United States Patent Application Publication US 2014/0230087 A1 - sequence listing, part 8

SEQ ID NO: 5029 - DNA, 4132 bp, Sorghum bicolor
  Intron number 11 from transcript Sb07g007030.1 (locus Sb07 g007030) derived from phytozome v7.0 (chr-ID chromosome_7; pos 10899469 to 10903600 reverse strand)
tggtatgactgtctttacatcatttgtcatgttcttacagttttacgaaatattaatcttctacaagatgacacaaactatctcaatacgagctcccaaccacctttcacatcatgcacatattcatatggtttcaaccaacactactacatgaaactttaccgaggtgggcaaaaatgatttaccgagatgggcatggcaaccgcctcagggacaaaaggtcatgttaatatgacctttttcaaggcagttggatgcctgtcttggtaaatcgaaaaacaaaaaaaacatggatatgcccgacgaacccatctaggggcccaccgagcccatccacgtgtcgcctccgctgttgcttctcgtcggaccaagatctggcctcttgctgccagatctgctacatcctcaccatagtcataggtcagagaagccagatccactacacctaagtaggatccattgcatcctcgttggagatgcttgagacgctgtgtcctcatcggagacgtcagagacgtgccgccctaagcattaccgagccagatccgcacgtgccacctcctctcctctccggatcaacaagccctgtccctagatctacatcctctcctccaggagaagcactccccagccaccactgggaagaaccccgggagcacgcttggatccgctggatgtcacaccccaattcaaggatgaattgagatgcataaaccttatgtgtgcccaaagatcagtcacacacataagcacataaattacaaagtatcatcactgtgcttattatataacggataattctccattacaataatagaaatctctcacaaaattggaagaataaataactatctctcgatggaagccttcaactccactgggacatagattggtggtacactaggatagaagtcctcatgaaagtactcataccagttgtcatctgttacccatgcgagatttttatccaaaaaaagtaaagcaagcataagtacatctcgtacttaacatggacaacatgggtttacgaagcttaggaagctaaaactggtttactgtggttagcatttttaataagcctgtaccttagcactatctcctttagttatgcataagcccaagttgaactaggtaataataagcatgtcaatagtcatcataataataatcatcattatacccatcatcatttataacatcatatttaagtgagcaactattccatcaattttttgggccactgctaaccatgagcatggctattataacagtttttaataatctgcagagtttgtacttctttactcgagagccttgatttaccctttcgcccaaggtatctagtctcttaacctccttcctagggaggtcagcagggttcactatgaagcatttcaaaggtttttctaccaagttcgtagccgctaggtttccctagaaagggattatagagccctccttccatatggcatatttcacgtaggccatacacatagggacacatgccacactatagtcagctcagtaggtcccatttgcgccctttcaagtaactactagtaagttaggaaagatcctactactgagctaaaaccagagccatgtggcagtcctggttgtactgtaagtcctagcttttgccaacagataagtccttagggagggccaagagcatcttgtacaaaacccaactgctctctcaccctatcgtccagctgctattcaattttatcatccattccatataatcattagtcatcattcatattatatatatatatccaataggtaaatcaaggcacaagttacaatagataggatgtccttaaaggtgatcaaattgacacatacacatgactaggtaattaagtaggttatgaataggacaagaaattcccattctatacttgccttgttggtagtttcactgctggtcctggtcgtcaaagtagtactgttgatcgcccatgtacgtacggctcaccgtctggactcgtgtcaacaaacaacaacacacattcacgggcaatcatgcatggcaaacacagctacagattagaacaatacaccaacagtgataaaacatgtttaaaaactcataaagctattctacatgtgactaagaacacatcaacatgaaaattagtaaaatcggatctaaaacacggaagtaataaattaagcaagatcttctaaagcatttaaatagacttaaaaggttaaacttaactatgaattttatcagtgcaaaacataaccaatagttatatcaacacatagggaactaagttacaaacctaacgcaagttgaacagatcgatttggagctaaaacgagccttttatgagcaaaatagtccaacgacaattctgttaataacctgactattttttcaattaaaaataaataagaaaataaggtttttccattcgaccaaggactgtgcatgtgattaatagaaacccaaggggctctgccattgccaacggtttggaggtcaccgtcgcgatgggagaggggcccacagacctcgatttgatgccctaaaagcacgggcttggagtagagatgatgatgaactcgcttcgccccttcgcgcggctagaggaccacccgtgtggcacgcgccagggccggtgatggctcaacccaccaaagttcaagaacggccctagaggccatgtttcgaggcgttgagagcactgggaggaagaggggagtgcggcaagctcaccaacgaagaataatgcagacgaaggcggtcaaaacggtgtgtggtgagggacggtgaccccaactcggtggtgctagggttttggcagctgcgagctcagattcggtgtgagggttggcgagggatggcgctgcgggtgcggtgggttataacacagggcacgggcgctctggtggcctccatccaccctgagacacgcgggcgagcggcggcggtagggtcaagcccgtgcttgggtctagcgctcatgggcctgccagcaaggagagaaatttaaaggggaggaggagcaggccgccctgggctattaggctgaaagcttaggagagggagggaaaaataaaagtattccttttctttttccaaattaattttcaaaggattttgaatttcttttagaattttatcaaaaccactcatcacaaaaataagtatgcagcagcatgtatgcaaaaacatgtatctagctttatatttgattttatattcccaaaaatcattaatacccttattttgaatgtcacaaaattgcataaataaatcaattctcatctatttgaaatggtgcaaaattttgggtgttacacccgaggccccacatagcagtttgagcgccgcacgaccggaggacccatcggaggaggccgctggggaggggaggagctgcggcgctgctcgggagggagggggcgctgagtcgctgagggacgtgatggtgctgagagagcgaggggagtcaggagagagaggtagagggaggaagaagggtcgtcgtgtggccgcttttgcgaggggctcgggagtgggagacaaacaatttgatgtgaaaccctaagtgtgtggcttatatataagcccagtacatggaaagatatgagctttgcaagctaggcctatatttatggaggcaggccttatagttgtccgcatccaaaaatcgatttacgaaggcggttgtctcaatatgaccgcctccaaaaatagatgatttttgaaaaaatgtaatcacctcggttaataaaaacaaccgtctcggttaaggccttagaaaagtgttttagagtagtgcaattcaatcactattcttctatttttaaattgaggtgctacctcatttctccatctttgtcgacctgcttgtaggtaggctaccctttgtcccaaattcgagttagcagttatattttgtcacaggatttgtacgactttaaactactaacaagggaagtcctccccaccctgtaaatttgaagggccatgacttatagatacagattcaatcaaatcaaataaaactttgtctttggagataatattttttagtaattgtatagtagtttttttgcacttattttatttgtctatggttcttgattttcttcctattgatgaagaaca

SEQ ID NO: 5030 - DNA, 2460 bp, Sorghum bicolor
  Intron number 1 from transcript Sb03g002470.1 (locus Sb03g 002470) derived from phytozome v7.0 (chr-ID chromosome_3; pos 2253456 to 2255915)
gagcggttcgggcacgaccaccagcccgtcgccaagtgagcctcaccaccgaccctctttgctcctgcgcttattgtttcaatgggtttttatataaatttgaaatcattgggcactgaatgtatcgttttacacgcatagatttgaaatcattggcactgaatgtatctcacgagctatctagtgtttcttctagtattccaagtcgatacttgttggttatgaatcagtgatgaggatgagatgagattttaaattttcgcaccccattcctgcaatcaataggggtcatgttgtgcaatgggaatgtgcgaagtggattagttgcaagtatcgaattgttgctcagtgttagcacttagtagatgcttcaaattgcaaggaactagactatccatttaataagatgtaattaaataacctgattgaatgagaaatttgctcatatgttgttttcagatacttcctaaatgcttcaaagtaaacccttgcaatttgtctcctcgaggacattattgtttcaaaggtattctttcacaattcggttagttccagacctgatgcaagtaactgggattggaaagttaacatgttctgttcatgtggattgtgaaaccggggagaatttcttgaaatgttgtgttgatttggtcagcaatgttagaatagcacattcaccgtgttggttaattccaccgccttgggaagtagctgctcttacattttacacgcatagatttgaattcaaaagcttagtgtatctcctgagttcttgtgtttcttccagtgtgttggttatgcattgatgatggggatgagatgagggtttttttcccccaaagtcctacaccacatttaaacaatcaacggggttatgttgtcattgaatgtgctgagtggattagttgtaagtgtcgacttgttgctctggatacatctctgtaagcattagccgatgcttcatattgcaagcaatagattaagcatataatccaatgcaattaaatagccgaatcaaaagtgaaatttgctcatatgttgttttcaaatacttcctacatgcttctaggtaaagcccttgcaatctggtaaagcccttgcaatctgtgtcctggaagacattcatgtttcttcttttcaaactgattacacttcttagttcaatccatctctctcaagctttatggtatttgtatttcacgcgataaactgttgagcaaattatttgcagtgcatcaatattatataaaccacctcattgaatttaccttcctctggatcctgccaattaatgattcttggggtaaaacagatctcggtaaatgataagaccctacctttgagttaaatccttgcacaagtatttaaattctgcaatattactgctcaaatttttgtagttaccagggtatggatagctgttttgctttgtatgaatttactaatttctattagtaaaagtgaaaaagaaagcaagttgtagagcaattgcttgtcagttgtcactaaatctgtctgctgttgaacatgggtatcctggaggacatttgtgtttcatcttcataaaacatatcacatttgtttgttccatccatgtggtttgagctttaatatatttgtatttgatgggataaattgttaagcaaactatttgcaatcatcaatactataaaaaaccgtcttattaaatttaccgtcttctggatgatgccaagtcatgattctggggaaaacagatcttggtaatggataatgcccaccttcagtttgaatccttggataaggtgtttttttttttttgattgagcccaacatatataaaataaacatagaggttcagaggaaacttacaagatggaaatctaaccagataagtattaagaatcctgcaatgttactggtctggattttgtagttaacgtggtatgtaagtgtttcttttgtatgaacgtaacaaattctattagctaaagtgaaagagaaaggaagtcacagaactatcgtgtcaccaaatctgtcttctattgaacatttttatcctggattctggaagacgttcatgtttcttcataaaactgattattacacttcttagtgccatgtggttgaagctttaatatatttgtattgtacaggatgaattattaagcaaattatttatgatacatcactattatataaactggttcattgaatctatgatcctttggatactgccaagtcatgattcttggggcaaaacagatcttggtaaataataaatctccatctaagatttgaaaagttgcataagggttgaggttctgtaatgtgactgaccaggtttttgtagctggctatgggttcatataatataaacatattattttcaatcagctaaagtgaaaaagaaaggaaatctcaaaactgttgcttgtcactaaatatgtctgctattgaatatttctctattgctggcag

SEQ ID NO: 5031 - DNA, 446 bp, Sorghum bicolor
  Intron number 3 from transcript Sb04g003790.1 (locus Sb04g 003790) derived from phytozome v7.0 (chr-ID chromosome_4; pos 3650085 to 3650530 reverse strand)
atagcttcggccgcctcaacgttctagatctccaggtcagacgcacctctttgacaatttctgttttctgaaagagaatcgctgttgtgctgaacttttcttttgagacgggattctctttttttaaaataatgcacttcctccatcaacgatttcttcacacgcaatgcaggcgtttctgtgcatttagtaaggtttgtattgatttacatcgttcagcttgagttgagtagaattcctgaatactgaatatatgttgatgtcctgcttagctaatttgcagggtccaagcagattttgcttgtcatgttggcacttgtagttttagtgtgtaaaatgataatcttttagttcataatacattaagagttgtttttaatactgagaacctcagatgaatcatttcttcaggtgcaaattcgccgtcttccaaagcctgttattgc

SEQ ID NO: 5032 - DNA, 1510 bp, Sorghum bicolor
  Intron number 2 from transcript Sb06g025720.1 (locus Sb06g 025720) derived from phytozome v7.0 (chr-ID chromosome_6; pos 54767769 to 54769278 reverse strand)
agaggaggtaccctatcgtatgtggcgatttcaccaatgaatttcccttgccatttcggcctgagctgatcttcatcgttgcttgttggattgttattattgattctgaaatatcccgaaataagtcttcttctttgggggtgtttagttccaaaaaaaaatgcaaaatgcaaactactttgtaatgatggaatgtaaaataccaaaattttccgggtcatgtttagttccatccaaaatgcagaatttattgccctcatgaggcttttttggttttttttttgggcctcttgaggccaaaatccaaaatggagaataactacctttttgccaaaatttttgcatggtgtttagttcccctttgcaaaatgatgaaccaaaacccaaaattttttggaatatgaggggaactaaacaccccctttgacgtcaagtgtctgtgaacggttggtaggattggggctatatattgttggatgtttgtagttttacgtaacattttgaattctaaaattttgcaactcattagctgtctcgtagttatgcaattgaattcaatatagttactgcaatagggagttgagaattcattacaaaaaggctgcacggctcttatgctaatatgccactatgcatgaacttcctcaactgtaagcagcatgcttctccagtattttcttaatcagagttgattagtgcttgatctttaaaaccatcgaggttattacagatttcagcatcacaatttaattaggatatctgtcaattttatgtacgggaaacacttctaatttgactgctttagtacaactcaggtacaaatgcatctaaaccatccgatacatttatgagccttccatctaatgatccaaccattggatactttctttctcgaacaaacgattggatcctgaggccttgtttagttccaaaaaaaaattgcaaaatggacaccgtagcactttcgtttgtatttgacaaatattgtcttatcatggactaactaggctcaaaagattcgtctcgcaaattacaagcaaactgtgcaattagttatttttttatctatatttaatgctccatgcatgtgctgcaagtttcaatgcgacggggaatttgaaaaattttgcaaaattttttttggaactaaacaaggccagctgtactcaaaatttgtaatgaaatggttatgtagtcatatcttaccattacctacttaattcttagatctccttaatctaccatttctcagttccttccattctttggattttaaaagcctactatcaaaattaagatcgctaatttgtttgagtgttccactcctcctccatagttacatgtgcataatttggcataacgtgttgtttcttctggtatcgacgaacagccatgtgctctattgttacatacattttctgtggagtattataataggtgtacaggtttatcttaacataattaattgcgtccagattgggtcgccatcagggaactcttattttcttct

SEQ ID NO: 5033 - DNA, 1230 bp, Sorghum bicolor
  Intron number 12 from transcript Sb10g006680.1 (locus Sb10 g006680) derived from phytozome v7.0 (chr-ID chromosome_10 ; pos 6271780 to 6273009 reverse strand)
taattggaactggctttaattttggatatttggtggtaagtttcattgctgttattttttgttcttagattatttagcttagaaaaaagtccaaattactctcccccaagtttggcctatgtcccggtaaccccctaaactaacatttagttcaatttactccctccaagtatttcagttggtttagtttaccccttagcaggatttcttatttttgtttctccacatataagtggagttttaatgtcaaattttgtgaggtgatagaggacatcataaattatgttagaaaaatatatcttaatttttggccactattttgatagtttaggaaatttaataataaattacccctagagatacaatattgtacgaagcataattatgaaaaatgaataatgtatttttctagcacaaaatatatgtcctccatcaccttacaaaatctgaaacttaaacacaatttgtacatacgagaaacaaaaaaggaaaatgtaaattggaccaacggaaatagttttttttagctcccaactgaaatagttggagggagtgaattggaccaaatactttagggcgttattattattattattattattattattatttggggcaggggggggggatttggactttttcccctttagcttgctcaacacaacagaattttatatctacaacaacagtggcaagaatgaacccttttagtcccaagtaagtagaaggatgaaacccaacatgtgccaccaacaaaaacggaaaaagagggtatacatataaagcatcaataataaatagttttatatttaggcttcgaaaatttaatttgctgtaggatttaattttgtaaggcgggattgattcgaaatagcaacctcgccactacccaggacccaggtcacacaaaagtcatctcagtctcattagtactgctggcagaatataaaataacagcacatgcaacttggcagaatataaaataacagcatatacagaagccttaggattgattggaatgcatgagtcaagcagtgcacctgatgactcatatgaacaacagattagactggacttaatttcagcggttgcatgatgtatttagtaatgtgtggttttctgaagggacaaactcagtgcaacactaacgcactatcactcattttgtttatatctacaaatactgctcatcatcttataatgtgaataatcatctatgagcagggaaga

SEQ ID NO: 5034 - DNA, 1419 bp, Sorghum bicolor
  Intron number 2 from transcript Sb10g025920.1 (locus Sb10g 025920) derived from phytozome v7.0 (chr-ID chromosome_10; pos 55267090 to 55268508)
gtcgacttccgccagatcgacgccgagtgggactggtaagcatatacactgtaatgactatatacgtgcagcaatctactacacgacgtgctctccctccgcttgctgccggccggccggcttccttccggcatggctgctcatgggtcatgcccctgccctgacagagttcctgctaattaacgttcccagaaaaaaaaatcacttgaaagttttgttttccatataggaactcacgtttatctggaacacggctgtccatacaagaactatattaaactttacttggaacatgacagaaataggtcttgtttagtttcgaaaattttttggatttcgctattgtagaattttcgtttttatttgacaaatattgtccaatcataaactacctagaatcaaaagatttatctcgcgttttacagacaaactgtgtaattagtttttgtttttgtctatatttaatgcttcatgcatgtgcacgtaagattcgatatgacggtgaatcttgaaaactttttgaatttcaaggtgaactaaacaagacgatagtaagaaaattagtgctagtgccagcaaggccttaaatgttcccagcaggaaaaaaacgcttgaaagttgaaactcacgtttatctggagcacggttatagtacttgtagttgtagtactcacaagaattatattagttttactgagaacattatatttgaagtacgcagtaaaaatacaatcatagacctagttcatgccgtcctttttcgtcttttgatttttgtttcaactctggagggaaaaaacgggtgtgtgagattttaattggcagaacagaaatagtaagaaagttagtgctagtaggtgctagttctggtgcacgagggtgctcagggcgtccatatatggcgtgttcgcatagttcccacctgttcactatttttgtgactggggccctggacgagcgggccgttggggacttgttggggtccgcatcattcacgccgggaccttgattagttctaaaaaattgtgaaaaacaacaccgtgacattttcatttttatttatcaaaaattatctaattatagagtaagtttaaaaaatttatctcgcgatttacagacaaactgtataattagtttttatttatatttatatttaatgttatatgtatgtgccacaagatttacgaaaatcttgaaaagttttggatttttggatgaactaaacgatgcctaaatgtgttatacagtttttttttcaatcctcatgagctacttggttgctttgctcatcgatataaactcgacatattcatgttcattcaggcagaattatagtaatgtctaatgtcctaatgatgtggtgacttgttgttggtggggctgacccaccctacgtgcattcacatacgcagggataac

SEQ ID NO: 5035 - DNA, 154 bp, Sorghum bicolor
  Intron number 5 from transcript Sb09g018720.1 (locus Sb09g 018720) derived from phytozome v7.0 (chr-ID chromosome_9; pos 46912854 to 46913007 reverse strand)
aaagtcagggccttcttaccaactctgacataacggtaatattcttttgtattatctgctttatttgtattctttgatttgataaatttttaatgtagaaatatttgttgtagcttatactattaatctatatgctctattcattaggttgtaa

SEQ ID NO: 5036 - DNA, 740 bp, Sorghum bicolor
  Intron number 4 from transcript Sb10g023040.1 (locus Sb10g 023040) derived from phytozome v7.0 (chr-ID chromosome_10; pos 51412421 to 51413160)
attcctggtaagtttacatgtacttatatatacactgcatactgtatgtgtatccctacataaaagtattggcagcgtacattgcatctcagggtcgcttattcttttcttcttaaactgtccaatttaatttattcgctgagtaaagaaaactacaaagagcagaataaaagtgcaatgaaagttaattcctttttcttttaagttgaggcatagaatgctcaacaatattatgagtataattttgcattagcaggaacaaggatggggatatttttattgatatccatgttggctcgatgtgtttattagggaccataagatattatattgcccctgacatctaagcccatatggttctgagaaaatgaatatatttgtgtcttaccttcttttttatttacaaaatcaatattaattaaggtaaatctcttttacgatctaaactcacgggcatcctatcttatttgcctacatgatttaactgtttaagtcgccagtatgctacgagtcgttggatcttatgtgcattgcttactggaactattccaatagtttatgttacagaaactatcctacgagttggattaataattgtttctatgtacctaagtatttttggattagtaattctttctatttatctaagtattttgtcttaaagaaatgcattcttcctcaacatcacatgctttatatttgttgattctcctctgactagcaattcaatttgtacagta

SEQ ID NO: 5037 - DNA, 1417 bp, Sorghum bicolor
  Intron number 2 from transcript Sb04g005280.1 (locus Sb04g 005280) derived from phytozome v7.0 (chr-ID chromosome_4; pos 5133622 to 5135038)
atcatcgttggctccggctgatccacttccctctggtatactttctagccacgtctattcccctggcctggcttccgctggatgtgtgcaattcggtagatctcttggatccagccacatgcttaggacaattcgttactgttacataatgttgtgtgaattgttgtgccgagattggtttgtgtaggacactgggaatttcgatttggtgattggagattagctgggtgggaattggtagatgtttagctgttgttgttaacggtatagtgactattagtagtgcttgtgatcaaatatcctcaaggattggatgatcaatttttttaagactctagtagcttggtttggaagccgattatcattttgtactgggcgttcccttaaaactgtgacattttgaactgatgcatctacatggtatcatttaactgtggtagatgcagtggtttttaaaacaaaaaaaaattgagagaagacagttgctaatatgttcggacagcatttctttgcatgtagaatcattgcctgtggacatttcttattcactgttgctgtgtgataaactgataatgcaattgacatctagtcatgcagtgtagatctgcttgattggtgctatgcttagcctgtttatgctttttacattcactatgttgttgttgttgctatccatattgaaaaacaaaaacacagagtaacccatttgttggctgtatgaaatgcacagtgacttgctagtctgggtttcttttagatcatccgggtttgattaagcagaatatgaatttctgatgatagaaatatacaatgaaaatatataaaatggtttgtctttgggcattcagatatttttctgcaaatagttcttgatctgaatatggaatgtgaaactcaagcctttagcaactgagatctgtaaccttctattataagaatgtttggatgctcttatagtcctatatgtggttggcacaatgggctttggatattcaatatggtacagtgctagttttgcataatgccccctgaacgactttgcattctgtatttcctaaatgtggaattttaaggattactgatatgaccaggttttgtgttcaatccaccgatgctctatgtttctcgagtttgatggtttcttctatttcctcctcccaacaaatgtgataaaacgatgctggttacgtatttacaatgtaatcacaaacttggttataactattctgccataaaaaatggatgtggttgttctgtgacctgattggcgccattatctgctgaaactcgcagccccaaatttctcttccatggccgagctttagatgaacatctcctgtcccttttgaaacagcctgatcatttctaacgttcttttattggctcggatgcaggctagaggctgcaggtgtggaca

SEQ ID NO: 5038 - DNA, 1305 bp, Sorghum bicolor
  Intron number 2 from transcript Sb06g029800.1 (locus Sb06g 029800) derived from phytozome v7.0 (chr-ID chromosome_6; pos 58372235 to 58373539)
aggtccgtaaagtaattctggttttctgaaacttattgtctgtagatgtagatttatgaacttcatcagatccgttatcttaattgcattatcttgatccgaattcggaatttcatctacttttcatttaggtcattgttggatctcatcacatattataccacatttttctgaatgggatttttcaatccattagcccctccattttaatttataggttgttttgatttttttagatatatagtttttttcattacgtatctaaacatattgtatatctagatgcttcgcaaaagctatgtgccaccttaaaaaaagtcaaaatgacctatatatgtactcattaaaattagatggctaactattagctttaagatgttcggatcgcaccaagtaatatgtggttgaagtgttgttttaccaaaaacaccactatttgtttttactattgattagctaatagttatttgataatactccacgtacgcgtcctaggatatagtggattttttgagggggtgtttggcacagctctctcacgagagattcctctagaggagccagagtcgttttagagaagttataatttatggctttgccaaaacggctccggctcctatactttttacttaaaaatggtttctccagaaaaacgtttaagttgtcctataaattaaaccgtcctagatttaatcaagtttttaggaaaaataaaatatttataatttacaataagatgagcatcgtaagatacaatgccaaatttatttttatagtttagctatttggtgtcttaagataatacttttctgtataaacttgcatttagaataaatttggcttagaacatagttaaatccattattatatttcatgacatatatgggagtgtttatcaagtggtgaaaggtatctcggtcgattgactaccaattagctaacattggctaggtttgcccaactatttaataagatagttcttatagttgggtgctcggctttttattagttgaccctttagcttggcctatttgggtccacctcaacaaaaatttagcagagaattattagttggcttgatccaaacgggcccggcctaacatgttaccaaaacttcatattagatatttctgatggcgaaactactatcatgcccatttgatgaagctagatagttcagtggtggttgaagttttcagtgcttgaccgcacatagtggactgaagtgtatattatgttttattatttaaagttggcacggcaacataacatcatatctgcaaaatcgccaggggcatttacctg

SEQ ID NO: 5039 - DNA, 758 bp, Sorghum bicolor
  Intron number 1 from transcript Sb04g032440.1 (locus Sb04g 032440) derived from phytozome v7.0 (chr-ID chromosome_4; pos 62390949 to 62391706 reverse strand)
tgcacagccctgtgccagcgatcgcccagagtaagcttaattataggatcaaaataaagtggtttaaacacatttgtttaaattctatatcataactgctagtagttctagtccaagactttttagagcttgggggaaaaaaactgagagatggctcatcaaaggccctgttaattggcaccacaaatgatgtagatttgcaaattagctgtgttttccagattttggtggcaacctagaccttcaacgaatggcatgccattaactggatcagctcctgctggtttatccctagctacaaaaactctccaagcttgacctatgccaaacagcacataaccaacaatattttccagttcacctgaagcgcaatcatgattctgcaaacatgtctctgtatctgaattttgaaagcaattgcatctgctttacaactctagtagcacacgtatggattggaatttgttgcgtttgttacagttcccatacctacaattgtctacacaatatataatcatgccgtcctaaaataagtgccgtacgtaatcttatattaatcaatgaaagagtttctagattttgtttttaaaaataagacaagtgtgtaaataactacgaactatgccactagtaaaacagaacgtcccttcacacttcaaacagagctttttgggcaaaggagaatgttcgcgtcttacattttcaacgtaaacagcttgtgatttttcaactacatttcagagaggggtcataccagc

SEQ ID NO: 5040 - DNA, 8540 bp, Sorghum bicolor
  Intron number 1 from transcript Sb07g026735.1 (locus Sb07g 026735) derived from phytozome v7.0 (chr-ID chromosome_7; pos 61850800 to 61859339)
gggtggcgcaccagttcatttcacaaattgacataaagaaatatcatgtaacagagggacgcatcacatttcttgtagtgtttgtatgcgccatcatggtggtaagtgagggctctgttcccgtgccgccttcagacctcggaaaacagcttgggaggctactggatagcaaagatgggacggatgtatcgttcaacttcgatggcgagatattctatgcacatcgaacggtgcttgctgcacgttcaccagtctttaaagtcgggctcctcggatccatggttgaggttaaaatgccatccatcaccctacatgcatggcattgctcctacaacattcagaatcatgcttcagttcatgtacactgacacgttgcctggagatgatgaacttggggactctccccatgagatgatgcagcatctgcttgctgcagctgactgttatgcattggaccgactgaagctcatatgtgcccacagattgtggaacaaggtttcagctgacactgttgctgctaccttagcttgtgctgagatgtacagctgcagggagttaaaaagcaagtgcattgacttctttgcagctgagaaaaatttcaagaaggctgtcttaaccgaggattttgtgcagttaggtcagaatttcccttcgattattgctgagctgcgggagaaggttgggatattgtgtgtaatttatctccatatgtgtattttagttgtccaagcataacttagtatggtgtttagatgatttagtgactggtatctcctatattctgaagcacattggaaattaattcaaaacctgtttcatttagtataggtcatttggactattttgctgatgagattctgatcttgtgcaaagatatggagattatgcataagcagtagcacacttctgttgtggtttacctgctctgttgatcctatcttacacgaagctttaaagatgtgcaacttttgctatgctagatttttaggagggctggaagaagagattcgctatataattgttttacatagaccaaaagaaatggatactgctagtgctagtgctctgtcatttatttttaagaataagaggattagtaggagtatcattggcaaggccaagcctccttacaagaagaatgacacaaaaaaatatctaacaagaattcagttgacaataagctagcagctctcaaagcatatagaaaagccaatgaattgtgctttatgcttgtttcgataagtggactagcaagaatcatgcatatataaatgtccagcctaggttcctcctatccacatgatactggagcttttcgagaattttacggtcagccagtagtgttttttcctcacaacaaattagcatcagccgtttttatggccagccgaacacgggtgaaataccagtgaacaagatgggaactgttctgaataaggtgttgactgtttgtgcatgttgttttctgcagaatatttaccccacgcagaaccaaaacccaggaagagaagaactatgaggtttagaggctttattggtaaacaagatgtgctcattcttttaaattcaggcaatttgataggtactgcttcagacagcccatgcggccatcgcgtcgtctcgctcgcgaggcgactccgagggcgacctagtctggccgccaaccaccacaccctccctggcgagcacggccgctgctgccgcggctcttcgccagcgaagctgtggcagcggcggccagcgggcggcacccaaataggctcgcccctgcatgtttctatcctccatcgttcctttctccccaatccaaaatccctcgagcatatctcgatctgctagctttggtcagatccttgcttccagtggtcggctctgtgttcattggggatggatgcgtgctccctcctctcccttcctcccattggcaaccttggagcctccagcaagaaggacgctcagtggcgatcatggagggtggcacagctctggatccgtggcttaggggtctggacacaatgccctttgcccaatccagctctgccggggcacgacgaacaatggcaagaagatgcttcctcgacggtggatgctctgctcgctcaggctatggtttgctcccgatgcttctagagcaaccttcaccagatccggtggctctgtggccggatccggtgacccctgccatcgatctgatggtgctggcgtgacttccacttcttgcggtggcgggggcagccatggaaagtcagaggcgttggtgggtcctcgacgctcgaggtggccacatggtggtggtgctcattggcagcctgaggctatagcgctgctgggcacggcggcctgtaggtagtgtgcggctcccgaccatgggacttggcgcgaccgggctgcggtacctagtcgtggggcccacatgggtgttgtgcctccttacgtgctccagaacgttgaggtccttcgatgagcagtgcaatctctgcacgtccatgctagctcactttggcaagttgacagactatggtgaaagccatgcatgaccctgtatgtgcgatcgacggcgacgcactccaacgtcgattacctccttggaggcatcgataatgtaggctcccaactctttgattgtagttttgtccctcccctctagtgaaaacctagctctggttttctggagccggtggtgcgacatcgtcgatgtcgtaaccctcttgagtgtgccactgtggagggatatgccacggccatgttgttgttggaccctcttgggtgagactggctctagttgtcagttgttgctgatgttttgatgagtgtcctcctctggcgtctctactccattggtggtcgtcttgatggtgccaaaaaaacaaatgtcgggtggtatttccactactgccgccattcccctccatggcttcctccccgtggatggcgttggatagtggcatgtgggctcggatgtgttggaggatgtcaccatcagttccaagggaggtcgccatgtttgatgatcctgggcttgcgtgtccgttgctactcttagcccccatctcactagttggccctcaaatggagggcggtagcagaatggcttagctacaaggagtggtggagggcacaatggtcacggtgaaaccgagtatgttgttcggtggtggcgcaaagcaacattcggttggcatctttcagcttttgtctaggcttatccttgagtcttttgagtattgttgttgttgttggtggtggtggtgttggtggtgttggtgttgtaatctctctcttttcctagtcctaaacctttttgtaaacttcagtcctggaccctccatgcaccggcttgccggaatcaatggaattttattcaggtgtggctctcgcccctctggtgatgtcttcaaattcagacaatctatttccttcatttctatctctggctgagcatattcgaaacaattagccgcccttttgaatgcaagaacttcacatgaataaattgggtactttgaattagatcattttcacagtaaatatatagcaattatgagaaatacacactattataaaaaaatttttggaggtgggccaaatggattaatggagatagggcattacaaccgcctccaatcaatggtcatggtaaatagaagatcaatggaggcagttgtttttgcccacctctgtaaattgagtaaaataaacaaaaaataaaaaaaacccacatggcctggatctaggccacacggatctaggccttgcgccattgccgtcaatccactaccttagctatgtcgttgtcgatctgccaccccatctctagctacctcctagggccatcgggtcggccaccgaggatgaccaaggggccggatccgccgctgctatggatgtggccaaatctgccgccgccggtgaggggtgcgaatccaccactgaggaggagatggccagatctgccaccatcgaggaggagggggctagatccaccgccaccaaggagaagggggccgaaattgccaccaccaaggaggagaaggccggatctgccgccaccgaggagaataaggccggatccactaccactaaggaggagggggttggaattactgccactgaggagaagatggtcagatctgccgccaccaaggaggagactgtggtggctggatccaaccgccaccgaggaggggcaccattgccatgtgcctagaggagtgggagagagacagagagaagggatgcgccaccaggagaggggaggggagcgccgccatgggaggagttgggtgcgctgtcgggagggagctggcatggggaggaagagagagggagctagcgtggggagaaagagagagggagttgagggcgctgctggcattgggagatgagggtgctgctggtggctaagaggagaggaaagagatgatgacactagtggcctcccaaaacctaactctttgtatacatatgatgagtgtgatatcgggtcgggatatgggttgtctaggccaccaatttttagtgacgggcaatatagtgtgccctcctttgaaaatcaatttatggaggcagacactttaatatgaccacttgtgaaaatatgctatttttggagggagttgttttaagaacgctcgcctctgtaaatcaatttttagaggtgggaaaaagtgcccacctcgataaataaaaaatacatgcctccattaatcataggcattaaccgtgatggttggattttgtgaccgcctccgttaataaaggatatcgtcttgcaaaatcatttgtgtagtagtgacaaacatgaaaaaccccatgttccaaatagggggcattagccttgtgaggtgctcaagtttcactagtagcttatggtagttccatgattttctaacatgatgattccacaactccaatgattcgtgtttgttttctagaagaccatcgtatattctacttcgatctgttggaagaacaatgtgttttccacataattgctattaaatgcattaaggatgatattgaagaaccaagtacccttgttatggtaattgtgatttcacaattttgttacaacatgtccaaaaggactaaaatatttgatactatacaaggttttagtctcatatatgcaaacagattgacttaggtgaagagattttaatggaaaatcaagagcatgagttgaagaccctacaagagacccaaaatcataggattgaagcttggtcaaaagacatgtcaaaaacaaagagatttatgcaaaaaatggttgccaaaaaatttggtcaaccccattggataactagatgattgatccccaaattgtgcaagaacaagacctagtgaaattcattaaccaaacaatcttaatgaagagattgaaatcacttaacaaaacacatcagagcaattttctaggcagtgaaggagaaggggtcaagggcacaaatgatatggtgaggtgaagaacaaaactaccataccaaatattgactagaagaaggtgttgtactgtactagtgtttaggcatcaaaagcaaaatagagttcttgcattttgctttaccattgagagcagaaatgtatcagatacaaaggtcatagggtgaattttctgtgtctattcaaatcatcaggaggcaatatttaactatttatttaagccttcaaaagttcacacatcgaacacaagtccagtcttattcctatatatacttgattactagaatgacaaaccttgtaaaccaatctatatcctccttccaactatggtatacaattctgcaactgaagctgatctgattaaaaaagaaccaagattgctcaacaaaagttctctgtagttgacctaagatcactgtaactgaagagatttggccttccaactatggtatacaattctgcgagtttcagaatagctcgccatcgggatgaaatatgaagaagagttcagttttatggctgctcttgctgttggcagaacgatgagttcttctcgttgccgagagcccgagacactgtagggatgaaatctacagaactacgctcttgccgttgccgggacacaccctcacgggtagatgttcccggttggaagtgcattcagcatcggtgagttcgccatggtccccgccgccagcttctcctgccagccatcccagcatccaacggcaccggtgaattggccgacccagaggacgaggatgacgacatcgccacgctcgcccgcgctcgcagcggtggcaccggtgggccgagatccgcgaagacatcaccatgctcgctcgcgggagagatcgagtggagaggatgaagctgaggagcttgcgccgatcgcaacagtacacttccagcatcgacgccgcgtccatggcccatcgtgcataggtgctcgtcgaggccgagggtttgggcgccagactagaggactcctgcctggctcgagggaggcagagagggtgatgactgcgaaggctcatcgttgcggagcgccagcgccgtcgtgcggtggccatgcagtgaggaagacagaaggaaggtgatgccatcttgaccaagggctggccagagcctggccaggaaaaatggtcatcctccatgtttttctggagccaggctacaaggtccaaagtggcttagtagagcctagcttcggcatatttacagacaaccaaacagctgaagggtggcttcctagagcctggttgggagttaaccacccaaccaaacaggcccctagtgacgtgattggggcacaagagctagccatgtggcactcatcatatgatttagtgaggatattacagccaacggatgttccaacgagaggcataacaacccaaatatgacaacaactagttagagggtgtttggggggtagtatgtacaccttttccttgccatttgaagttggtcggagcatttggatgctataggataggttagcaaatatacttgagagatccatcaaccaaggtgatcaagagaagatgaatacaatcactacaagtgtttagtgcaagtatggaaattgaggtttgcactcttgttttcttgatggtgcttgcgcacgcgaagagttgtaatatgggggcttgtaagtcttgttgtaccctctaaccatgtttgtggagtggattagcatgactgtcccttaatatctcttgatgatgcagattgaaacatacatgattcctacttaattttagcaagtactcttatgaatctaccattcttcaccctccttgcatatccaagtcaatatattatgcatatccattctgccaagaggagtggtgatcttaaacaaatttgttgtcataaattaatgtccactgttaagttatgggcctatttcacaacctaggtggccccatgggctacacatgtggtctccacgttataatgggccatgcaacccatttcaacacaccttatttgatctcacgctctcgatggcacccgcttactaatatataaggcatattctagggtttccctttcctttccccttcctcttagccgcacataggtctcaggcacgccgccgcctcccccctaatgcctcattgttagatatcatcctcttctcacaatccatcccaccttgttagagtcatcactgaatcccgatctcaccacatcgaaaccgattaagctttgctgccatagatctatttgagcttgtcacaccgaatcctcttcaccgtgcaggagccccacgccaccatagtccagggcctccaatcatggtaccacctttccaagggtatggtggggtgatgagcatgtgtttcatttcttatccatgatggggtagtgggtaattgtgtgggtttgaggatgaacttatcaaatggatctaaatagtcttagcctataagtattgttcttatttttgtccgtaatcttggtttctcccatgatgcaggtgaaattcaattcgcaaactaccttgtctccaatcgtcgtcacaggaaacgaaacctaccaattccggagagctagccacgccacagaatgaggggagtcaccattgagactagcaatggtaactttagtggcattgaaaaagttcatgtactatgatatggaaaattttaggtatttaatgtcaaatttacttcatccataattatgcagtgagtaagcgacgccgctcatccatcctagaggcacaaaccaccacaataatggattctccctcagttgttgtcaagttcaaaataaactatgagcaaaccaaacaccttgccgcaggccatgctgtcaactctgatgctatatctgccggggggcacatatggaggataaatttctacccacatggggcccaagagactccagaggaaggtagagacaatccctctatttttctcgaacttttgaggaagtctagaaacacatgggtcaaggccatcttcactacatcaataaagaacaaggatggtaaagcatttaaatttgaaagtagttggtccttcccatcagaaagatattttgacatacttcagttatttcagtttgggagccatactgat

SEQ ID NO: 5041 - DNA, 7893 bp, Sorghum bicolor
  Intron number 2 from transcript Sb05g015590.1 (locus Sb05g 015590) derived from phytozome v7.0 (chr-ID chromosome_5; pos 33749847 to 33757739 reverse strand)
ccgtcggcctgttcggcgcctcttacagggtccaggtgcgctcgcctcgcccgcgctcgctttctggtttctacctctctgttttccgtctgctgtatgtactgcctggcgtgggagtaaaagcaggggcggccttggcgtggttgtccggttcctgttcgcttgtaagcaatttgggagctctttacactggttaagttagatgcatgctacattgtgtttggaagctgcttgaagcctcattaatgaatgcagattagctgtaagacccgtggccgccggcaatcgccgacaacgtgagggtgacatggagtacagctcgtcgaggatcggactcccgtcacgccgctgccgtgcgtgtatgtggttggtggatcggaccaatccagcaagaaatcgatggaaactgggtgggatagggttgggatccaaggaatgaccacctttgataccacctgtaagacctgtggccgccggcgatcgtcgacgacgtgagagagacagagagtacgcaggggattcggcccgaccgagcagaggaacctctggctcgagttgtgtattccgtaatgaaaatatgtctgcttattacagcgaatgttcagcatatatggctaggaagccggccacacatagggcccacatgtcagtgtctagctattacaagaatgatggaaatacgctttcagtacttggtgacgtccttcatcctgttgccgtgacatctccccccatgaaggttctgcttgtccccaagcaggtgctgatgggaagcacttcttgaccacatgataatcctcccaggtggttgaatgctcgggtaatcctgtccaagtgagaagcacttgtggaaccgcagtattacctttcttgatgagtcggcgtaccagaatgcgctcagggactgcctcagaggctgccaggtccgtcagtgtgggcaatgttgagtatgctggagtatagtctggatgaaaagccttcaactgcgagatgtgaaatactggatgtatggaactgtcttgtggtaactccaaacggtaggcaactgcaccaattttctctagaatcttgtatggactgaaaaacttgtaagatagcttgggaaatggtctattggccaccgaagactgtgtgtaggtttgcaaacgcagcaagactgagtcgcccatagatcagttctgttgcggtcagcaaacattttgatgcggttttgggcttgttgtagctttggcttgaaagattgcatgtgcagcttgcgatgctggatgatctgagacactgatggagaagcatctgttgcatcactgggaactgcacccaaatcaggatcatacccatacaatgccatgaaaggtgagcatccaatggaactgtggtaggatgagttgtaccaaagctgagctagggataaccacgatttccatgttgttggtgaatcttgtattgagcatctcaaatacatctccaagcattgattaaccctttctgtctggccataagtttgggggtggtatgctgtgctgagattgagggtcaccttgtagagcttgaacaattctttccaggatgaactgacaaatatggtatctctatctgagactatggattggggcattccataaagcttggtgatgttatcgaggaataacttagcaattgaagtggctgtgtagggatgcttaactggaatgcagtgagcatactctgtaagtctatccactatcaccataatgactgagtacccttctgattttggcaggccttctatgaaatccatagaaatatctttccacacgccagatgggattggtaaaggctgcagcaacctagctgggtgtgtattggagtcttttgcctgctggcagatggtgcattgtttgatgtatgaatcaacatcagtcctcattcctttccagacaaactgtctcttgagtctgtgataagtagcagtgaccccagagtgacccctactgcactggagtggcaagcagctatcagcttagtttgcagggctgagttgttgccaatccaaatgagatcatggagtttgatcaatcccttgtgtagggtgtagccattggcattcggagtgctgattgacaattgtgtgaggagttgctgtgcatgagggtctgtggtatatgagttgagcacctcctggatccattggggttgaactactgattgcacagccagcaagtgagctattctggataaagcatctgctgccatgttttcttttccttgtctatatttgattttgaattggagacccattaatcttgtcattgccttcttctgcatgtcagagtggagatgttgttctgacagatatgccaaagatctatgaacagtgaggatgatgaattcttgcctttgcagataatgccaacatttgtctactgccataatcaaggccaagaattctttctcttatatggagaggttcttatgtttgtctcccagtgccttgctaagaaatgcaatgggttggccttgttgcatgagcacagctcctacaccatccatacaagcatctgtctcaattgtgaattgagctaggaaattgggaagtgctaggactggagtggtggtcatgacatgtttgagttgctgaaatgtagtgtttgcctgttcagtccattggaattgcttgtgcctaaggagggatgtgagaggcttagctatgattccatagtgtttgacaaatttcctttagtagtcagttaaccccaagaaggccctcaggtccgtgaaagatgttggtactggccagttgatcataacttgtgttttggcttgatctgttgagaccccttgatcagaaataatgtggcccaaatattcaagactgtgttgtgcaaaagaacacttggaagctttgaggtagagttggtggtgccttagggtccctaacacttgttgcaaatgctgtaaatgatcttccaaactcttgctgtagatgaggatatcatctaagaaaaccagcacaaactgccttaagaaaggtttgagtacttgattcatgatgcactggaatgttgctggggcattggttaacccaaagggcatgattttgaactgataatggccctggtgtgttttgaatgcagtcttttcctcatcggctggcaacattctgacttggtgatagccaggtctcatatctaacttagtgaacaccttggagccttagagttcatccaggatttattcaatgatgggcattggaaatttgttcttaatagtgagagaattgagttttctgtaatcaatgcaaaacctccagctgccatctttctttttcactagaagcaccggagatgcaaaggggctatggctgtgtgtgatcagtcctttatccagtaactgcttcacttgattttctatttcagttttgtgttgtggtgaatagtggtatggtctggaattgaagggcactgcatcaggcaacaatgaaatagcatggtcataactcctttggggtggcagagtttgaggatcttgaaagacatcagcatattgatgtaatagtagctggactaactcattggaggccactggaactgatttaggtggtgctggtcgatcttggattgtgtccagtaccacatatacccaaatgtcattgccttgtgaggatttgtagacctgtctggctgaaatggtagtcaactacaatgattgaggtttgagaccttgtatagtgacactagtgcccttatgctggaatgtcagagtcttgctcacccaatcacattttttttctcgaacacgcaggagagctgcgtatcaatatattaagaaggagaaaaagggtggatcacccaaatacaaaaacagttttttgggggttgggcagggggcccgaacccacacaaccaacaaaacccactaatatacctactgaacagacgcctagacccgaactacacaaagccatcaactcggttgcaaggcgaggagatgtcaaatccctcgagccccagcatagccccaagagtttagatcttctctaatggaggtgataagcccaaccaaatctggttgccttccttcaaacacacagcgattcctgtgattccaaatcgcccaagccactaagatgacaagagagttcaggccttgattcatatagtcaaccgccctagtggaggccacctcccaccaatcttcaaaggactgctcattaggttgcggagccaaatgttgaagaccaaagcattgcagtacaataaaccaagcttgatgtgagaagacacaagaaacaagcagatggtcaattgtctcctcctggctgcataagggacaatgttcaagccttgataagttggtgcaacacctgtttagttcaatttctaatcgagcaagaaaaagaacagtatttaaggctcttactgaggggaggtgggttgcagacataaggggatctgcacttacagtagctgttttaattgaatatcttgatctgtgggatttgttgatagaggtggagctgcagcctgaggcagaggattcccacacctggctattttcttctaacgggaaatatacgactaagtcagcttatgaagcaatgttcactggggccattcagtttcggtcgtgggagagaatatggaagagctgggcgccgaataaatgtcgttttttcatgtggctggttgcgcataacaaatgttggacaacggatagacttgctcacccaatcacattgcatggggctgtttctttccaaccagtcatagcccaagatggcatcataaggtaacaggtccagaacaatcatatcagatgtaaatgtatggccttggatgtaccatgtgaggtttggtaccttgatagtggctgtcatccattctccattggcaagcttcactttctgtttgtgtattggttcagttggcagttgagctagtttgacaaaatgtgcactgacaaaactgtgagaactcccagtgtctactagagtgagcattgttttgttcttgactgtggtcttgagtttgatgcagtttggggattcagttccactcagagcattcaaggacagctggcagaattcctctgttaatatttcttctatggccatttcattgagtaggtcctcactgatctctttatccagatcattcaccactatggcattgagatggatcttgtttctcttggtacaaacttcagcatggccaggttcaaacttttcaccacagctgtagcataagttgttggctttcctgtaatccctgagctgtttgtccctccaaaaactgccatatgatgtatttggtttggtatcttgtttcggtggtggcacccttgctttctgaggttggcgttggtatttgagcttgttcctatctgcctgtctctggcggatcttggcgatagttgctgctttgcgcattgttgttggcacgtggggctccactcctgctctaatatcttccttgagtccattgacataggttgtggcgaagaatagctcatcaacattggaattatgcatggagatctcaaattggagagcttggacctgagttgtgtattcctccactgtacccgtttgcttcaggcttaagaggtctgtgactgaggatctatagtcatcttagccaaattctgtgtgtacaacctcacaaaactctgtccatgtgattttcttatgagtttgcttgtaagcttgccaccatttggctgcattgccttgcagatgcattgaagctgcggtgacccataacttctcagggatggtatagatggtgaagtaattggtacagttgtcaaaccagatttttggatgaacaccatcaaaagatggaaactgcatcttgggtaaggaatggtgtggctggtcatcctttttgcggtggtcaaatcttggtttgggttggtgagaatgatctggcttgtgtggagctttgcccttggcaaacatgttatgaaattcttctccttcgaacacttctgaactagagccctcactggcaagtgattcttcttgatcaaattgcttcagagttagctgggctactccatgtccattagcattgacctgttgggaaatgaagtcttgctgtgttgcaaagttgtccaccttctgattgttggccataacctaattcttcaagtcctgctgtgccagattgatatcattcatcctgtcaaacagcaggtccacgctttccaacatctgatcccaatgggacttgtcatcgtcgctccttttcgacatctccaacaagatctgggtttgcttggagggcttgactgatgccgtagcggcactcggtggaatgcctgacgaatccacggtgaagcaacaggcttggtcgaaacctcccttttgcatgcttcaccaagacccaactcccggaagtaaggcgggatcgagggattttacacaggaacaagtatcctgcaacccaaatccacggatacttcctcgccgacgcctctgcaccatgcttgaacagccaaactccggaattttacacgcgaacagatgctgcgcaacccttgtttgccgtccaggtgtgctcgaaaggtgtgagcttacagtgattcacgacgtcgaaccctaggtgttgatgtagtcccccagttgtcgaagccgcagtcttgggtgtcggagtcgcgtccagcaccgctgccgtcgccatgcgctcggggttgatgaagggtcgagtgtcgtccgctgccgccgccggtgctgctgcttgtgccggatcgtgggggatccagcaagcaggtccgctccgccgccgccgtgcgcgaccgctcgtcgaggatcagactcccgtcacgccgctgccgtgcgtgtatgtggttggtggatcggaccaatccagcaagaaatcgatggaaactgggtgggatagggttgggatccaaggaacgaccgccattgataccacctgtaagacccgtggccgccggcgatcgtcgacgacgtgagagagacagggagtacgtaggggattcggcccgaccgagcagaggaacctctggctcgagttctgtattccggaatgaaaatatgtctgccttattacaacgaatgttcagcatatatggctaggaagccggccacacacagggcccacatgtcaatgtctagctattacaagaatgatggaaatacgcttttggtacttggagacatccttcatcctgttgccgtgacattagcacattggacacaagaaatctgtatccctagttaagatcaaatcagctgaaagttgcattgattcgtagacagcccatctgcgcatggttaagaatttcgtcaagtcttctttttaaatgtatcaaacaatgtattctttgcagttaactataagaagttggcagtttcagtgcaaattgtccatttctcaagatgctgttcaaaacgtgggcaatattgttccttaattaatatccggatgattacatttcagcaggttgtttgcatagattaaatttcttgtaaaataatgaggcatggaaactaaaactgcaatgtatttagtacttattattatttggcatgatgaagttgggcacaaaacacatgcattttagttggtataagggtggatcgccttctctgtggaaatggttagttacactttgaccagaacatgatgccaaatggttctctaagtagtgttgcatttaaaatattatactcgaacagattgggataatgtaaaagataaatggcccatttttcatacactgagatttttggcgtaccactttcttttcagttgagattcatccgatataggctgtgcttttttaaatgcgtggaattggactgtagtacagaaattaaatgtatattaactacttagattttctattagttatttcttgtactgacatcagtgctactactcaagg

SEQ ID NO: 5042 - DNA, 1213 bp, Sorghum bicolor
  Intron number 2 from transcript Sb09g004360.1 (locus Sb09g 004360) derived from phytozome v7.0 (chr-ID chromosome_9; pos 5279430 to 5280642)
tcccctgcaaggtcagagactgcttcttgcttcaggtctgtgtgccctcatctcatctcatattcattaattacaaacaatttataaatgattctttacaaatgcatactccatcatgcattgtggtatcgtcaagcagtaggcttgaaacttgaaaatgacaagatgagaataaattacaatactcaatctcgcaatgtcaccattagtcttagtgttatttaacaaagttgtttctccacttctccagaaataaatctttcaaaaattatggttcatctgaggctagttgtaagatgacagatgagacaaacagtgttagtgttccatttgttttaatttgctaatccatcttcccgtgaaatgcatgatccttcattctcatccaattctatatcatgcatttgtaaatatgtaggcaccccaatttccctgttttcctaaccaaaaaaaaaatggagaaagcctgttcattaactgagaatttaggtaacaggaaatatgtatgcaagtcaaggaatccggcctttgcttttagtacagttaggaagcaacaaaactgttgttagagaaggctttagcgcaattgctactgaatatataattatagagtaccgttgtagcatggatgctagtttgttgtcagattcaattgccatttccatctcatttctgtcttgagttaactggcacttatgtttacatgccactgcaacttagtatcttctgaaatcaataattgattcttcatactttttacttgtttcatactaagttccatgctataacagaacatgtatgcatgtttttcactatacatttacagagattattttgtctgtgttagtaaatctggagattccggagatagtatgattgttcacacataattgctccagtggttgcactcacatgtaagcaattaagtattaaatgtattttaaacataataggtctatttaatgttccagatcatgtcaagttatcgctaggtagttaatgttagtacttgaatgttgcatgtggctatgaacgttgatttccgccacactttgttggtagttggttagccatgtgggaactgtggtcaggaggcacaaaaatacactcggagacatcatcttgttttgtgggttttacttctgttgatttggtactctgcattgatgatatgaatttcatactgaatgatcatgcttgcctcctttcaggg

SEQ ID NO: 5043 - DNA, 1093 bp, Sorghum bicolor
  Intron number 3 from transcript Sb07g026060.1 (locus Sb07g 026060) derived from phytozome v7.0 (chr-ID chromosome_7; pos 61252130 to 61253222 reverse strand)
aggttttttgtttttccgttaacttcagctctataattaaatggatagataaatgaatgcagaatcgaatcctttagaagaggacagagttcatcggggtcaaatttaatcgatctcttccaaaaatcgtgattgttcactattactctggactagatgactagttgtagttagtgtggagaggagaggacagaaactaattacgtggaaggcactatgaaggcactatgaatggccttaattacagattatgtagtgatacacagcggaacattgctacttcagatctattctccatggatcacaaacagcgcctgaatggccttaattgtctgattatttgatagcatggtggaaatactgcaatgattttgtcttcaataacactgctccaagtgtgtcattggtatttcagacagttgaggagagagccatttggtgttcagccatggttcggggcctccaggacctcatatactttcagtttttctggtttagtggtcgcttggtagtcatgttcttggtactttttgtggcgtgttttctgttgtatagtagtgggggcatggatttttgtttgtgtatgtgtggattttacatatggtatacttattcttcttaatgaaatgccacagctccctgcgtcgtttttttaccattcctgcaaatcaaagtaatagcagggttacttgaaatttgccttccgtttacgcttaattttctcttttgagtatgaagtgacacatgctccactctttgtactagtagacataactacgaatataaaaattaacattcatagttcaagtggaggctgaagttaagaatgtccagtggaaaagtatagtgggtgcagaaggcactggtttgcttttttcaggcgtgcatgcaaatcctgtacattctgtttgtcggcttttgtctgttggatttttctcactaggtcggcgaactgagggtccttccggtgccagtgctggggcatgatttcaatactttggccatttctttttctgtatcactcccacaacctaatgaatgacacatagtgacactgaggtaacattgttctgtcctcttatgcagttctgga

SEQ ID NO: 5044 - DNA, 8238 bp, Sorghum bicolor
  Intron number 1 from transcript Sb07g018230.1 (locus Sb07g 018230) derived from phytozome v7.0 (chr-ID chromosome_7; pos 46190986 to 46199223)
tcctcgccatcctcgagctcctcaagttccacagggtttgtgctgatttaacttttactactttattacatttattaaatgtttggatacttggctttgttttcggagagagttttattagattgattgctggacttagatgtgaatttttagtgattttttgatcggttcatgtgattgttgggcatttgttattcttgtgagtggatgagtagggcactgatctggagattgctttgagtttcacaggtgcaacagattttgcgttcccaattcagtaaccacttaggttacaggggcgctaatctcaactcttggctttggttgttcaacttccatcattggaggggagggtttaatagattcgttactagatttggatattgaattcaatggtttctaatggcgttgttgttaggatttggggatttgtgggtagtagggcgccttcgagttttgcaggggcaaaattttgtttgtcatgatgcccaattcagagacccatgtgatcaatttgatagtatttgtttgctgccagtgaaactagctattttaaggaactgttgtaatgcattccaggaagtttggttgtcctatgtgtagatgtttattgctttatgctattagagcctggtatgtgtatgcaactgcacatatttcactttaactgccttctttttgtaattttagattgtctatgactctatgtgacaatatgctggtgatcatcattttttttgtatttataaacatcttaaaaggaaaatgacaagtggaagttgctgtcattactctattctaaacagtactgcattgttgctagtacaaaaggtttcttgcagcttttgctgctgcctcctaaggtagttttagttttttttccaccgtggatcaattcgcaccaaaaactcaccgagatatccaaacagtttaaccagatgacaatgccttaaaacgtatttactactaccaatgctgctacaattgttacaccagagttgttttagttgttctggttggcgttttttttgagtttcagtcgtgtgtgttccttaaacaagtaagatgtggtgtgaatttgtctcttttaaacattttctctacttcttaaagcaatgatacaaagtcctcctgcatatttgagaaaaaaaacactgccctgttgccaaagaaagtcgtttctactttcgctgaaaccatgtctactttcacatgcctagttatttctgtacctattgtgaacttatgtcaggtcttatatttacacaaggcatgcttacttgtgttctgccgatggcttctccttgagatggcaattttttttatttaacggatttgatgctttggaacttggaaacaccttttgtggtaaagggatgtgtatttcagatgagtacatggtgaatgtggtcccccaggatctaattctaacaatagaaagatgtgtttggtgatatttaccaacatggatatcattaccatttattggattaatggagttgatttttgtcagtggatatgcatggaatatttttttttatcaaaacatactattgctcgtgagatggatgtcaattcatgttgtttcaagcattgatgtgtttttgtcagtggagtagggtgttcatctggagattactttgtagttcacaggggcaacagaattttgcttgccgtcatgcccaatccagcgaatgtttccactattggggttaatctggactctttgcttgggttgttgtagtgttaatgtcacttgaggaaagagtttattttgttgcttgctagattttgatgcaaatgttcaattgtttttgatagatggatgtaactgtttaaagcatcgatgttggggtttgtttttttgatgagtgatccccaagaattggaattggctttaattttcacaggggcaagagaattttgtttgtcgtgatgcccaatttggcgaccactgccattatagggcgctgttgtgtgaaagtaaccccatgggataaattttattcaagctgtttgtttccactgaatctaggagttctaaggaactgtgcaatggtgtgtatgccattttgaagtgtcgtatgtggatatgtttattttatgctattagtgagggcttggcccagtatgtgtgtataaccttgcatgtttaacttgaccacattctgtgtgattttagactgcctctgcggtcatcacaactttatttgggtttgtagccatcttaaaaggtataaacgacaagttgaagtttctttggttactctgctattgtgttcaaaactgtcctttggtcatagcgccaaagagagcagtttttatttctttgtttgaaagttgaaactattattttgtgcctactttgaacaaactcaggtattatatttactcattgcatgctctgttctgtctgctgatggcttatccttgagatggcagaagatatattcaaattttatgcttggtaacttggaagcgccaattttggtataggagtgtatattacagatttaataaatggtgaatgtggtcccccagggaatctaattctaacaatagaaatatatgtttcctgatactaaatgacttggatatcattcacatttcctggacatagttttacttttatcagtctacaggcatgaaatgtttttttgggacatgcttattgctcatcagggtggatattttgaccattttaagtgcaagatagatgcctctcatattgtggttttttgcttttaaactgcaaactgtcaagggcctccacacctagctcaggaggaccttggctgcgcaggttgtagctagaggtaggagatgggggcgccagggtgtgcctggcgcctgacagcaggggggtgagattggagatagcaggagatgagaggttagagataatcacttcattgcttgatcataactgagtagctggttacatcttataggagctgagctccttgattctaatgccaggcattaactagagccggctaattactacttgactgctctcctacttcttgagccacgcataggccttaatcaccagccgtcctggcctcttcatggccctgtgctgcacctcgtgttcgaggccggcggctgtactgatggccccacatcacatctctcccccctcgatcagcagctcgtccttgagctggaaggtggggtagcgctcctggaaattctccaagtcttcccaggttgctcatgcagcaggttcatccttccagtgcagcaggacttggcgcatgccccttgccagtcttgcttgtgtgacgcggtctggtactggctgagtggtgccgtggtgggtaggaggcacagctggtggtgctgatggaggtgtgccgacgaatttcttgacgaggccgacgtggaacacatcatgcagtttggcgcctgcaggaagttccagtcggtatgcgacctcgttgatgatggcggtgatgcggtaggggccgtagaagcgggggcgcagcttgcccttggtggtgccttgaagtgacgctgggtggcgatggcgaagacggagccaaacccagtcacccaccgcgaagtggacctccctgtgatgcttgttgtagtgcttgttgtagacttcttgcgcctgttccaggcgcacgcgtgcatctcccagcagttcgtcacgggcagccatgctcttggccacagcggggacccgggactctcctggttcataggaacggatggagggtggatcgcggccatagatgatggcgaacggcgtggtctttagcgcagtttggaatgcggtgttgtagacaaattctgcccatggcagccagcgaagccattgccgtggcctgtcccctgttatgcagcggagatacatcacaatgatcttgttggcagcttcagtttggccatcagactgaggatggaatgcagtcgtcatcctcagcttgattgcttgattccagatagcttcatcagttctttctagaatatggaggtgaacaccgggtccctgtctgatacgatggactggggaatgccatgaagacgtacaatctcagaaaagaaagcttgggccactgactccgctgattaagggtgggcgagggcaatgaaatgacagtatttactctatctgtccaccactgtcaagataacagatttgcccccgacttttggtaaagcctcaacgaagtcaatgccaatgtctgcccaaatcgccgaaggtactggcagggggagcaaaagacctgcttggtgaaggtgttctgatttgtagcgctgacatgttgcacaagcacgcacgaagtcttgcacaacggcacgcagattgggggagtggaagtcttggcgaagacggtgcagcgtgcgttgcacaccttcatggccattgtcgtgcatagccgccaggatctcatggagcaggggggtgcctggaggtttgtagaggcgcccctggaacgccaccaggccgtcaatgacagcccatggcgcagagcgtttgtcgttgaggatctcttcgcggagggtgatcaaagctgggtcctgttcgttggcctgacggaggcgtgtgatgaagtcgaaacagggcccagtgattgccatggcagtcagctcttctgtatcatggcgggatagggcatcggccacggtgttggagcagccagccttgtattccaccgaaaaatcgaagcccaggagctttcccacccaatgatgctgtgggatggtggcaagacgctgatcaagtaagaacttaaggctgtaatgatcagtgcggaacaggaaacaccgaccccaaaggtaaggcctccagtggcggatggcgaggacgagaccaatcaattctcgttcgtaggcggcgagggactggtgtcttggggccgccggcctgctgaagaaagcgatgggatgtgtcccctgcagcagtacagccccgaacccgtaagtggacgcatcgcactccacgatgaactggagcgtcaaatcgggcagcgccagtatcggggctgtagtgacaaccttttttagggcctggaatgcttctgctgctgcttcagaccaggagaacccctcttatttgagaagggcagtgaggggggcggcgatcgagccaaaatcttggacaaatttgcggtagtaacccaccagccccaagaatcctcgaactgcccgtgctgaacggggtactggccagtcctccaccgcctggaccttggcggggtccatggtcacgccgttggccgagataacatggcccaagtacgcgatggaggaggagccaaaggcgcacttggacttcttgacgaagagtcgatgctgctggaggagtgtgaggacggcgcggacgtggccgaggtgctctgccatggactagctgtatatcaatatgtcgtcgaagaagaccagcacgaaccggcgcaagtagggcctcaagatatcgttcatcaaggcctgaaacgttgctggcgcgttgcagaggccgaagggcatgacgaggaactcatagagctcttcatgagtctgaaaagccgtcttctcgatgtcgcccggctgcatccggacttgatgatagccggaacgcaggtccaacttggagaagaatcgggcgctgttcagctcgtccaggagctcatcgacgaccggaatggggaaggcgtcctttacagtgatggcgttgagagctctgtaatcgacgcaaaagcgccaggacccgtccgccttcttcactagcagcaccggagaggaaaaggcggacgagctgcgccggatcagcccttgttgcatcatggtcgcgcattgcttttccagctcatctttgtgggcagctggatagcggtacgggcggacagcgactggtgcagaccccgggagaagggtgatggcgtgatcccgggaccgtggcggtggcatgccggatggctcggtgaagatggactcaaactggtctaggagcacggctaggggtcggtgtcgaggcaggccttcaggcgtggtctagacggaccggagacgcctttccagcagacggcgcgcccctggtgctgcactgtcatagacagggcgccgaaatcccagagtataggccctagggtggccaaccactgggtgcccagtaccacatcatagcccgccaggggcagtgcgaagaagtcggcgacgaaggaggtcccctcgatggagaacgccgctgcacggtatacgactgggcacggcaccagctcgccattagccatggttactttcataccgccgtggagctggaggcggagggaggtgcgggctgctgcctcggccgcgacgaaattatccgtcgattcggagtctagcagggctagcagcgagacgccgcctaggttgatgtggagttgcatcgtgtcccttgtgcggaccccggcgatggcgaggagggagatcgtggggtcctccaggttgaccagcggctccagttctgcgggatcctcctcctcggtgaggtccaggaagaagaggcgctggcagactcggttttggccacgggagtacttgtcgttgcaattgaagcagaggccctggcgacggcggtcttccatctccgtcggggtgagccgctgcacctggcggcctttgaagaccggcgcagggacccgtccgcccacttgggggggcgcgggcagagccagtggctgggccggatccgccaggagcccacggcccgcgagtcgaggcgccgaagcgctagccgcggcgaccgccgaggtgctctgctcgcggatctccaacttgcgcgccagactcatcgccacgatgagtgtttgggggttctgcatctcgacgtcgtggctgagcggcggcccgagacccgccgtgaacgcctggattcgttgctcctcttccaagggaccgatgtgcggcagcaaggcctcgaaccggtcctggtagtcggagaccgacccggtgcgcttgcaggccatcagctcccccattggattggagcggaggggggggggggggggggggaaccggaggttgagaatctcggagaagcgccgccatgaaggagtgccttccgactgctgcacctggatataccacatttgcgcgctgccttccaagttgtaagatgccatccatacctgctcctcggcgatgatacgctgctggacgaagtatgattcacagcgattgatgaacgccagcgggtcggatttcccgtcgaacttggggaaatccagcttctggaatcggggcggtcgatcgcccctgttctcgccgaactgctgcgcgcccgatgctgatgaggaaggtggtggttgctgacgcagcgtcatcagctgctgctgcatcgcggccatccccttggtcagttcggcgacttgccgacttagttcagcgatggaggcttcagacgtggctggtgttgatgaagcagaggagtgggtgggggacgatggggtggaggtggaagaacggtggccggaggatcgacggacccctgataccaagttgtcaagggcctccacacctagctcaggaggaccttggctgcgcaggttgtagctagaggtaggagatgggggcgccagggtgtgcctggcgcctgacagcaggggggtgagattggagatagcaggagatgagaggttagagataatcacttcattgcttgatcataactgagtagctggttacatcttataggagctgagctccttgattctaatgccaggcattaactagagccggctaattactacttgactgctctcctacttcttgagccacgcataggccttaatcaccagccgtcctggcctcttcatggccctgtgctgcacctcgtgttcgaggccggcggctgtactgatggccccacatcacacaaacactatgctggactgttggtgactggtttatgattctattccatcatttcagtctgtttcttgtaaatacatatttcatccagttttctgccacttcgagtgctgtaagacgattctgttctgtttaggtatatgtttccttatgaaatatcctcactgatttatgcataatctgtaagcattttaggtaaatactaatataattgaagggattgtcgacaaatatgatagttaagaaacaatcaggtttcctttgtatatgcttcgtgtcaaccttttcttcagtctataatttattttagcattcatacacactatgccacatatgtactttgattatataattctgatggctatgatatctctttgttccagcgtgtgctat

SEQ ID NO: 5045 - DNA, 11714 bp, Sorghum bicolor
  Intron number 3 from transcript Sb10g012821.1 (locus Sb10g 012821) derived from phytozome v7.0 (chr-ID chromosome_10; pos 19541448 to 19553161)
atagaagggaaatacggaaaatttggggttgaccggtatgtttagcatctgttactattatgttgctctgttcagtgtgatttatatgattcaaaacaatttcaacaagtgataaatcgacttattctgttaaactaatggtcaaggaattttgttcaaattagttatcttggttcacttaagaattaccccatcctagagcgatcttagtatttagttttgaaaaaaaaaacaaattcaagataaatcttttcataacatttggaatcgtgagcagacattggctttcggctgtagtgaatggttgtcacatgatccagttagcctcaactatgtgcatacatttcttttctctcctacagcacgaccaatcatttactatgctgtagtaaatggctaggagctctctagcccgcacaactagtccattaaatggagaatgatggcttttcacttagccatggtatctgggtgaaaccaaatatgatgatctttgctggttggatcatggatggagtattgtcagtttagccaatgatttttgggcttgagtaattttgtttctatcaattgtgagttttgaacttcagtttggtattttgtaaactagatctaatttaattgcagggtttttttctatctatatctaatattaaagagccaaaatatctcccccatttttttttcattctggcccactctctgagtcacgaatgtgtgtacgctcactaatcccatgtttgttgctggttccatgcccatgtcggacacttcgccgcaacctcctttcccatgtcatacaaatccccaaattgaatcgaaatgaatacaagaatgctacaaatcgaatttaatgtcagaacaaaaatcagatgataaattctccactttatagccctgccccagtcccaaattgaagaacagggagagtttaacctcaggctcgaatgagccctggctcatcacacaaggtttggaaaaacacaaatccaaggaccaagattgcatcttggatcaggtccttcccagagtctcgccgatccccgaggccatgtggcagccgctgcactctagcctcctagagaggttgcagccgtgaggagcctgcactcaccttcgtagatctgggcccgtcctcattgattttaggctagacctgctgtggtcgccgctgctctctccctactgccaggtattgctgccattactggtacaggaagagaagggggcaagccagcaaccatcacattgatgatgaagagtcttgcccacagaggatatgcagttggggccgttgactgccggattggagctgcccccacaaatatttggtctcagcgaagccatggatgacctgcaatattggagtagggcgaaagtgatagagataaggattgaacttggttggccggaggtgaaaaaagagtaagaagaataaccttacttgggtcttgacttcgcgtggaggagtttagggccacagtggtgctcaccatcgttgaagactccggcaaggcacggttaggtagcaaagcaggagcgagacgaattgggtcagctcagttgtttttttattgaaaataaatacagcagtggaggcccccactgttagcattttttaaaagcaaaagaaaacaactgtacagttgtgcaaagagcacaagaaggggaaaataaacaggcaagaaaacgaggccagagagctagaaaacaagagcagcccgggggaagacccaccaaggcaccatcatcccagggaggctaaaaagacagactgaacgtttagtaaaatctaacagcttgcgtttcggtttcatctaaaaaaacattgcttccagaaattgaagagcggcctcgatcaaagataaagttgttccttcgcttccaaatttgccaagcttctatgatgaagacctccatgaagggactttggagatgctgtttagcctgaattgtcatcaggaagaagtccatggaaaaatcccattggatgccaaggtattcccaacaaccttggctgaaagggcatccaaataagaggtggaaggcagtttcttccaagttacaattacaagggacacaattgtagttgttcccttccagcttgtgctttttccttttgacgatgtttcttgtatttagcctatctatttgtcaagggcctgggcgcctagggtagcaggccctttgctccttagttcgtacttggaactgggtaatgatggtgccagggtttttgcctgctactgcagcagaggtgagattgagagcagcaaagagagagaggttagggataacttcttgcttgattccttcaactgagttcagagttacatatataggagcttagctctaggctgctggtgcccagctcctagttactggcgccagctattaactaccagccagctaatactcccttgatctcctcattttcttcttaattgccttcataactcaggcctcttcagccgccctggccttcttgggctgtgccaggccatgcgctgccttgggagaggcactggttgctcctcgtgtacgaggccggcggctgtaatgtcggtcccaaatgacatctccccccccgcccccacgagcagctcgtccttgagctagaaggtggggtagtgatcctagaagctagcgacgtcctcctaggtggcagaggcctcaggctcgccttgcctgtgcaccaggacttggcacctctggccagtcaggtgcgtgtggcacgttcgagcactggctgggctgcgccatggtggatgggcggcaagggcggaggagctgttggtggtgtgccgatgaatttcttgagaaggcccacatggaaaatgtcgtgtaggcgagcgtggggaggaagctcgaggcggtaggcgacgtcgttgatgatggccgccacgtggtacgacccatagaagcgaggccacaacttgcccttggtgatgccctagagtgaagcctaggcgcggtgacggaggcgaagccagacccagtcctcgacattgtagcggacgtcgcggtgatgcttgtcgtagaagcgcttgtagacgtctttggcctgctctaggcggatgcgggcatcagctagcagctcatcgtgttccgtcatgtttttggccacaacagcaacagaagtttcgcctggttcataagagcggatggagggcgggtcgtggcagtagacgatctggaatggcgccatcttgagcgctgattggtaggtagtgctgtagatgtattctgcccatggcagccagcgcagccactgacggggcggtcacctgtaagtagggatgaaaacggtacagatattttccgaccgtattcgagaccgaattcgtttagaggggtttagatctgtccgtattcgagtccgaatattcaacatccgataccgtatccgtatccgaatacttaaatcgtatatttgtgatgtcgacatcaaatcatatcttatccgacatggttgatattatccgtattcgaatccgaatccaaccaaaaatatgaaaacaaatatgatatcagtgatatccgtccgtatctgatccgttttcatccctacctataagacagcggaggtacatgatgataaccttgttggcagcctcggtctggccatcggactgtggatgaaacgctgtcgtcatgtggagcttgatgcctgcgaggcgcatgagccctttccagaagagcgaggtgaacattgggtcgcacggtcaacgatggtgagaatcactgacttgcccagcaacatgggggcagggcctcgatgaagtccatgccaatgttggtccatacggacaccggcacaggtagagggaggagtaggctatctgggtgcagatgctctgatttgtagtgttgacaggtcctggaccccggctcacagattgggcgagtggaagtctcgatggaggcggtggagcgtgtgcttgatgccttcatggtcacagtcatcatgggattgtggccaagtgttggtccaaaaggaacctgaggttgaaatgaccggtatgtaccaaaaaacagtggccccagaggtatggcctccagtgtcggatggcaaggaccagtcgatcagcacgcgttcatatgtgtaacgccctagagtccaaacgactcagatctactctgcacgctgtgcgaaccacacctaccaccatcctacttacgctttcgtcctcgcttcacgtaaaaggattaacctggggatggtgggatgaactctagaagccttatatattttgtctaacccacctttaacagccaaggtgggacgaaatcctccacaattatctcataacatgcacatgggccacctcgagccaaattccaaattgggtcgggtgtgacatatatcccccctcaaaggacctgatgtctcaaacacacccacaaccgggcaaacaatgactaggaacgttctctcttagcacacacgatcgtacgtccagtgccagcacatgtgccacgctgtgcaccccgcagggcctacatgcacaataaacctcatctccacgcccctgacctgcacgcatccgtggccgcgaaggtcggctctaataccatttgtaatgccctagagtccaaactgttcaaatccactctgcacgctgagtgaaccacacctgccaccaccatcccacttacgctttcgtccttgcttcgcgtaaaaggattaacccgatgatggtgggatggactctagaagccttatatgttggtctaacccacccttaacagccaaggtgggactaaatcctccacaattatctcataacatgcacatgggccaccatggccaaattccaaattgggccgagtgtgacaatatgctgccagagattggtgtcgaggtgctgttgggcggctgaagaaggccacaggatgctggccttggagaagaacagctccgaaaccatgtgtcgacgcgtcgcactcaaccacgaagggttcggtaaaatcaggcagggccagcaccggtgctgatgttagtgctgtcttgagggcagtgaaggctgcgctggctgcctcagaccagatgaagccctcctttagcagtgccgtcacgggagcagcaatggccccgaagtccttgacgaacttgcggtagtagcccgtaaacccaaggaagccaactacgcgcgtcgagcggggctgtggccaatcaacaacagcctggaccttctctggatccatggccaccctggtggctgagatgatgtgccccagataggaaatggagtcaacgctgaacgcacacttggagcacttgacgaacaaccagtgttggtgcagcacggtgaggacggcgcggacatggtggagatgttcagccaaggatgcgctatggatcagaatgtcgtcgaagaagacgaggacgaagcgatgcaggaacgggcgcaggacatcattcatcagcgcctggaatgttgtcaaacagcatgacgaggaactcatagagtctgtcatgggtccggaatgccgtcttctccactttggcggggttcatgtgaacctgatgatagtcggagtgaaggtccgacatggtgaagaatcgagcgtcggccaactcattgaggagtttgttgaccaccagaatcggataggcgtccttcactgtgatggcgttcagtgcccggtagtcgacgcagaagtgccatgtcccgtctgccttcttcacgagcagaatcggggatgagaacgctgaggtgatgcgctggatgataccttgagccagcatggtggtgcaatggcgttcgagttcatctttgtggtaggtggggtagtggtatggacggacaaccaccggcgcagaccccgggacgaggttgatgcagtggtcccgggagcgcagcgaggtcatgccagttggctcggcgaagactgctgcgaactcatccagcggggccggccgaaggtcttccgcgctgcacgcccacaggggggccggccctgtcgccttagccatatctgtccaacaaactcggtgatcccggtgccagaaggacattttaaccgcgccgaagtcgtagaggatcggcccaagggaggccaaccactccgtgccgaggaaagatgtagccagtgagggggagcgcgaagaagtcggtggtgaatggctcgccaccgatggagaagggaatggcgcggcagaagccggggcacaccacgtgtttgctgttggccacggtgaccttcatgttgccctggggttgtatcttgagggacgtacgtgccgctgcttccttggagacgaagttgtgggtggagccagagttcaggagggcgagcagcgacgccctgccgagctggatgcggacctacatggtctctatggtgcggacaccagccatggcgaggagggagatgagcggggagtccgccgcagcattctcctgttcgtggtgcacctcctcatcgtcctctgccaggtcaagaaggaacttacagacgcgattgtggccacgatcgtacttcttgttgcagttaaagcaaaggccatggcgttcctccatctccggctgaccctcgatagcgaggggagctggagcagcatggaccggtggcgccggcagagccagctatggagttggccccgtcaagaggccgcgacctggcaggcgctgcacggcaggggccggtgctttgagggccacgtactgctcacgcagctccagcttgtgagccaaactcatgatgatgatgagggattgtggattgtggatctcgacattgttgctgagctgggctggaggtctgctgtgaacgcctggacacgctgcacctctgtcagcattccaacgtggggcagcagtgccccgaatcagtccttgtactctgcgacggtgccggtcggcttgcaggccatgagctcgcccagcgggttggagcagatgggtggcccgaagcgaagattgaggagctccgagaaccggcgccatgatggagtgccttcttcgctctggacctggataaaccacatttgggcgccgccctccaggttgtaagatgccatccatacctgctcctcggctgcgatccgctgttggtggaaatatgattcacaccggttgatgaaggccagtggatccgacttgccgtcgtacttaggaaaatccaacttctggaatcgaggtccggtcaccatggtcactgtagcccgaaccctgtgatcctgagccggatgattacagtggccactgctgcatagctgtgacttgtgcctggaggttggtgagggtgatgttcatggactcgatgagcttgaccagatcggcgttggttggctcagccatggctgctgatgctgacgtggctgagtgtgctggtgaggcaggcgctggcaaggtgggtgtggctggatgcggttgatggtcggaggtggaagatgatggagcagaagtggacgaggatcgccggtttcctgataccaggttgtcaaggacctgggcgcctagggtagcaggccctttgctccttagttcgtacttggaactgggtaatggtggtgccagggtttttgcctgactactgcagcagaggtgagattaagagcagcaaagagagagaggttagggataccttcttgcttgattccttcaactgagttcagagttacatatataggagcttactggcgcccagctcctagttactggcgccagctattaactaccggccagctaatactcccttgatctcctcatcttcttcttaattgccttcataactaaggcctcttcagccgccccagcctcctcgggctgtgccaggccatgcgctgccttaggagaggcactggttgctcctcgtgtacgaggacacaggacagcggctgtaatgtcgacctcgacggttgcccctcagtctttgttgccgtacctacggtacttgtgcccgcacatgacatctctcccttctgcgcaaacagctcgtcctcgtgctggaacttgggttagagctgctggaaattggacagcagcatccatgacatgcttgaagcttcctgtcctttccactgcattaggacctgtttaactcctcttgccaaacaacctttgagcactgactctggctcagtgcacacatggccatggctgattgctggcagctgcggttgtgtagccggtggtgttcccttgaatggcttcgacaacccaacatggaagacattgtgtagctttgctccagccggtagttcaatgcgataggcaacctccccaatcttttccaggaccatgaaaggaccgtagaagcgaggcccaagcttgctgtgccctttgttgtccatggaggccaaaggacggtgtaaaaaggcgcaaccaaactaagtcggacggtgtaaaaggcgcaaccaaactaagtcccctacctgaaagtccacttcatggtgcctcttgtcatactgagatttgtgatactgctgggcttgctctagacgctctctaatctccaccagaaactcatctcgctccttaagatgctcagcgacggccggtaatcatgtttctcctggttcataagctctcagtgatggtgggtcacacccatagacaactctgattggagtggtgcccagtgatgcttaaaatgaagtaacacaactcagcccatggaagccattgcagctagtttcaaggatgaccacctgtcaggcagcgaagatacatggctataatcttattggtagcctccgattgaccatctgtttgcgtgtggaacgcagaagacatgttgagttgcacccctgacaacctgaacagctcccgccagaaattgcttgtgaaaacaggtcccgatcacttactatagagcttgggatgccatgaagtcgtacgatgttcgtgaagaaaactcttgcatgttgcaactgatgtagcagtgtatggatgacccaacgcgatcaagttcgctgatgtggagaaccaatctaccactgtaaggaactaaggatcacagatttgctgttcaaccttggcagtccctcgacaaagtccattgcaatgtctgcccaaactgaagttggaacctccaggctctgtagcaaccccgctggacgcagctgttctgtcttgttctgttggcatcagtggcgaatctaggattttgtctaagggtatgccggccaaaaattttcatatataattcggtaaatctatttagctgtttggtagtaattgtaaaattgagaaagtgtttcggtatatatgcactaaataacacaaaaaggctcaaattcatagataatccaaaccatccactaaatatagtacaaatagttcaaaagccacaccgataattaaaataagacataaaagagaaatggagacttataatgctatttttgttactatttcactctcacctaaacaatcatgatcacaaattcacctctagatgccgatgcggtcataggacagagtgaaagaccgaacgggacgagatcacgaggagaacgactggacaacgatgggctgcgagcgacagctggctgccgacgacgtgacagcgtgaatgattggcgcgatgccgccagcgtaggccagcgttaagactcgaggtcgaagtcgaaccgatgcgtattgcctagttggctaattctgtattgggatctcactctccatcgctggttgcatgggccagcgttaagactcgaggtcgaagtcgaaccgatcgctcgcgtggtcggctagtcgcggcatgcctctcgctcgcggtctgccacaagctcatgaagttgtgctgtgccgccgagtcgcaaatgagtgccttctcttttttttttaatataaatatgtatacatacctgctttgtacatggaattacagggtatgccggtgcatacccggcgtaccctgtagctccgccactggttggcatgtacaacaagcactgtctcgtggaattacaaaaatcagcccaaactgtacgtagtgttttctggataccttcatgaccaacctcatgtgcagcagcaattactgcttgtgcccaggaagatatgtcaggcacaaacacctttccgtccttgagcaataggccagcagccatactgcagccatccagaccttcctgagctttgttcctgaccgcgtccagtgtgccatcctcttggagagcagctctgatttcttcaaacaccatgagctgccatgagacctcacggcgagagggcatcggtccaccatggtcttccgatactctaagcaaggcaaccgagaatcatgttgccgctgcctttctccgatgcaggctgctggcagctcattttcattggcttcagttgcacaaagtccatgccacgatgcatcaattctgacgcatatcaatggacagcaccatcatcgacggtggttccggtgtttcttacggagctgggcatgttggatgcgaggttgtgttgggtgttgagatgccacatcgacaacttcaagggggtgggcctgtagcctgttgctggccggaatggatggagtggacgaaccatgtaggcctcttgctgcctggcaggctacaactcatatgaagtccatgcctgtggcatttcaatgggatccaggaggcgcctgccacgcatctgcctgcagtgtaacttgttttcgcctggggttctttccgtcagtccgttctgaaatgctgcagcgaacaacgcgatctgcggtgtgcagcgcgtctgtggatatggttcccagttcattcgtgaggagatgctgccttaggtggtttgatctgcaagcgcaacttgcattcatgtgctcaaaggacaacatgtgtgacgatgcagtgcaggaacttgcacatgtccttccatgggatcctggatgaacacacgtcatgcatttgctggtggattgatctgcaggttgctttctggaggatcacataaagattcggtcactttttttaagtcacaaataaggaaattagctgagatgtaaaaggcttgtttttatatgtgatagatttatgtccagtcaagtcgagtcattgtatgttattacttattattcttagttatgctgcagctcgaggatgagctgctcaaaaggggcggagtaatgtcatgggcagtcggcgaggcctattggaccgggttcagcagtgtggcacattagtattagagttaattatagataaggtctctttcttacgggagtaaaagcctatctaggagttgtatccatctaataaagaaagaagaacaaagttgtacccgattaaaaaaaaaagcaagaagaacagatcaattatcccagccccttctcctatccctgcccttgtgttctgtttgcggcctatcagctgttgatgtctggctgcttgggctagggccatccagatcagatcaacatccataacttgtaatttcttaggaaattcttaaagagaaggcccaaattgttgaccccgttgtggctctggatggtcagtgccatgcagctccacgcagcacgtgcatgagaccctgcgcaaggaattgctaggatttattatcatagtgttgatgagcagggcaatatcacccaataaaaaactataagaattgtaaaagcaaaaaaataatataaatcacaaccatagaaaaaactttttatatgagtgctcgcaccaaaataatctggaagtggaatctattccttaactctggttattttttatcagtgcacactaacagctccgttgttacataacagagtctggc

SEQ ID NO: 5046 - DNA, 868 bp, Sorghum bicolor
  Intron number 4 from transcript Sb03g005900.1 (locus Sb03g 005900) derived from phytozome v7.0 (chr-ID chromosome_3; pos 6016839 to 6017706 reverse strand)
gagcattggcaagttggcaaacttggttaagctaggtttgttcaacactgatttgtcaggcggaatacctccatcttttggaaatctctcaaagttaactatccttgatgcataccgtgcaaacctggagggatccattccagcaaccatagggacaatgaagaatctgatatcccttgatctgtcatacaaccgcctcaacggttcgattccaatagacattttcaaactaccagtaatctctatgtacataaacctatcacacaactcgttatcaggaaccctttcttctcgagttggtacctttgcaaatcttaataacctagttctgtcaggaaaccaattgtcgggtgaaatacccgatagtatcggggattgtgccgttctgcaagggctttggttggaccataactcatttgaggggaacatacctcaatctctgaacaaattaaagggcctgagtacacttaatctgtccttgaataaactgtacgatgctattcctgatgccattggtgctatacataaccttggacaattgaatctggcatacaataacttgtcaggcacaatccctacaagtctgcagaatttgattttgttgtcaggattggatctgtccttcaacaatctgcaaggagaagtgccaaaataggggattttcagatatttgactaaattttcaatcactggaaataatgagctttgtggtggattacctcaacttcatttacatccatgccaaacaagttctataaaaaagaacaggaaatggcacttgaagcattatataatactagctctggcaacaactggtgcacttgtgttcttagctttcatttttcagtttatcaaaaagaagtctaga

SEQ ID NO: 5047 - DNA, 1261 bp, Sorghum bicolor
  Intron number 7 from transcript Sb03g013910.1 (locus Sb03g 013910) derived from phytozome v7.0 (chr-ID chromosome_3; pos 18500342 to 18501602)
ggtggcaaactcttcgatcttctcagcgaaaggaggttggttacttgaattcttatgttcatgtttggcatagtataatccattggtcgaatttttgtttttgggtcattggtcagatgtacacactggttgcatgcaaattattatgtataattcaagtactccctccgttccaaattgtaagacgttttgtctttcatagatacattacttttactaagtatctagacatagtgtatggtgcatagcaaaagctatgtatatagaaaagccaaagtgtcttacaatttgaaatggagagagtataatacaagtggtctcatatgatgaaatggtggggtggggtctgggggatgaacgccttccataacagcggctcctggttcagagttagttgaatcatgttgtctccagatgtgtgaaacacttgatttccagtgtcagatctagtggaaatgtgtaacccaactggctactccccccatgttcctaaaggaagtcgttttgaggttgtcttaagtcaaatattttaaattttgactataaataaattctttccggttgagtttgaaaatatgaaaatgatgtaagtagatttcatctcaaaatgtagttttataaaagtgtgtgtgtgtgtgtgtatgtatgtatagaatatatatatatatatatatatatatatatatatatatatatatattatagcaaaagtagtggttaaagttgtttttttggagaccgtgtcaatatccaaaacgacattctttagggacatagagggagtaagcatttaagccaagtgatgacttgtatttatttgtacttttgtttgtagaattgctaatcaagttctagccagttaagttcaatttttgaatgatttccttgggaaataaattcttagtgttattttttggaaattatgtctgtatagtttcatggtactccctctgtcccattgtcgtttttgactttgacttgtttgaccattcgtcttattcaaatttttcatgcaaataataaaataaataaatcattactaaagtatctctaatgatgaaataagtcataacaaaataaataatatttattcaaaaattttaaataagacgcatggtcaaacaagaagtctaaaatgacacttttagtgggatggagggagtacattattatccttttggtttcattctgttgatttttattttatatatttaaatgaggtttcatttttattcttttgtttttttgtagacaactctta

SEQ ID NO: 5048 - DNA, 1457 bp, Sorghum bicolor
  Intron number 1 from transcript Sb03g009120.1 (locus Sb03g 009120) derived from phytozome v7.0 (chr-ID chromosome_3; pos 9892014 to 9893470 reverse strand)
cccaccgcgcctaccaccaccaccaccaccaccaggtgtggatcactgctctctgccctcatttgttacttgggtactcggtggtttcttcatggcgttagcacttggttgcattgcgtgccaatccgattggtagagatctaatctcgtagtcagtagtcaggattacgactctcgtagtcaggttacgattgatttgcgccgttgttggattggattgacgctgggacctttagcttcttttatttatgattctgctgaattggagaggatcctactggcatagtcagaggaaaaatatgtgctaaattatgcctaattatacgtgaagcgaatttgctgaactttgttgagctcgaacgttcagcgggtgtttgcagacttcagatctttgatctgtacctgagaggactcatcagttcttcagggctgtacgatctggctgacgggctcctttgtaattaatctgtcatttggaaaaaaaatctagttgtttcagctacagtccttgataggagttcaaacatatgcatcatgagtgaactgcaacctttacaaacctgtggatctagatgcccccctgattaatgtgtttgttgaagcatggctttctcattgatgcttgtagttgtagttaacaaataattctctgtttggccggccattagggtcatatgtaagttgactttagcatgataatcgtctgtctatgcaactttaaacactcatcaacacattattttcatgtcatttcatttatatgtggattcagaagcacaacataagatgactgattcatccaactatgagtgactgaaggatctatgactttgattacagttgttgtagattttttaggaacatcccttatggtttgtgactcactgtgaatgttgggtgctcaaagctgcctttaactttacagtgcttcaaagattggcaaattcactgctacatacaaaaaaaagaaaacaaacaaacaaaaaaagagccagcagtggctgaaagttaccgttttgtttcacatatacaataaaaaaatcaatgaacataatttcgctctgatgcgatacttatgaatgggggatggccaggaattttccgtgatacaaaaactgtacaaaataggacgcggataattagtggatcacaacatgcagaaggttctggagaagtcgttttcatgcatgtcacacaaagattatctaagaaataattcgaaaggcgttgccttacatgtaagactgacaattgctgttgcaagcttatcttcctgtgtgttgacggcttatgcaaagtcgcacaggagaatcattcatgatgtggaaggccatcattgtttgttattttgttttctatgtttccagccccagaagctctgttttagatttttcctcataagtctgttatccatgtggaccacaggagcaggaagagaaatttggctggagaaggtc

SEQ ID NO: 5049 - DNA, 2053 bp, Sorghum bicolor
  Intron number 2 from transcript Sb04g025110.1 (locus Sb04g 025110) derived from phytozome v7.0 (chr-ID chromosome_4; pos 54965036 to 54967088 reverse strand)
gatttgtgccaccgcccccaagggccccgaccccggtaattggatcatttcatgtccttgtacagattctgtgacttgctctggtgctggtgtactgttatccccatcatatcattttgttttatcagaaattagcttagtttagtttcattttattacagtggttgtggttgtggttgtggatttggtattttctgttttcagtacaaaatccccactaaagcattttagatttaaggatttgcaacagctgcagggtgcttatatataagtaaaaaaggccaagttatggtaggaagtagcatgtagttctaagcagtccaggcccaaaaaacaaagcgatttgaatcagaaattttagcaccaataaaagagtctgatttgcacctaccccaattatcagagttagtgaactttatgacaaagtaagtgaactttatcagagtagtattaaaacaatgtgacactgagggaagaagggtaggctttgggatgatgtggttcctgtatagcaattcattgtgatcctaaaaacattgtgatccaaacttgtattaatatcctgatgtcacatcctactaccactgctgctaaagaaggttcaaacatggatcgattgacctttaattttgtctacaaagattagaagagcatccagatttcatatttgaatcctgttccaattgtttgaggggtttgctaaatagtagattctgttgcttcaagcctgtgttgactgcaatataaggattaacagatcacaagggaagcctcatggttaaattgttataatgtgatcgtggtaaccatagtttgtgaactcttgctagtcaacaaacctgtctttattgtgaattgtactgttaatcatggccttttgagcactcaaggttcaaaagtgaaggacgttgaaactgaagtttttcagttgcccaataaaaatattttcaggacaagtgctcatctagcgttcagtctaatccaattgattaattaaatattgaagcaattaaatttgtgatttcttcaaagttttgtctattagcataaaaacactgggggaagtggtggagacttaggaaaatgcaattcctgaaaacaattcgccaactcattatgtccttataaacaattcacctgtaaaagaattcatgatgacccgttgtgatatctatttgccacatccttttagtccaaaaggatatgaagagtccaatacaattaatgttattgaacgttctaacttcgatgaatcttgaatgagattaaaaagagtgcatggttttcatatttgaaccttgttccaaatgctaggttgtaggctctgttgattcaaacctgctcattttcttaccctacaaggagtggcagatcacaccacagataaaagaatattctttggaaaaatatcaatagtcattttttgttacttctgatacaaacttcttagctaccttgggatctccatgatctttgagaggttgtctatggagtatgaatatgagagattttacaatttgtgctacttggatgtcagtatgttgaactatttgctaaagttgcttcaatgaattgcctccattttcagtaatgagcaccttcacaaacaatgtacacaatccatctgcttgtagtaaatgttgaggattgaataatttcagattgagcaggaaaaaacactcaatgtgattatgtacttagtggatgttaaagactacaccatcaagttttcagtgtgactcccagcaatgctataaataaatgctttgcccaaatgctattgccaacaattctagatgtgatttagtcattgtagtttattttcgatacatttcactggtgcaaagcagcatgttaaatgtgtgattgccttagcttttgtagctggtggccatttatcttgagctaggattttttttgcatgcagttcaatgtgattataccatcagccatgggtggatgaatgaattatatatacagtgacactatttacttgctgcttgtatatctgttaggtgaaagtgaactgattattgactggtttattttgcag

SEQ ID NO: 5050 - DNA, 4753 bp, Sorghum bicolor
  Intron number 3 from transcript Sb03g014340.1 (locus Sb03g 014340) derived from phytozome v7.0 (chr-ID chromosome_3; pos 19152939 to 19157691 reverse strand)
aagacaaaaaaagcaccagaaataagtgaagttttttctccatcatttcatactgaagtgcttattgagttttcaacattcttaagatcttcttattataataggaactgccatatgttgccatttttattgatgttaaaaaatggttgtcatttactccgaaataggtttcttcactggatagttgtgccttatgcaaaaaatagctagcgtggattagtatcttattgccttgatggtgagttgtgatggttagatggattttgtttcttaaacagttgagtttcattgggtttgcttaagtcgtgtggcaggttaagttctttctagatcttattgaacatttatttaggaaaaagaaggatatcataggctcccttgtcccagtgaatcagaatggctgaatatgtggtggggagcgacctttatgggggttgttgcggaatagatgggagatacctctggctcttgcttgaagccttcaatctatatgccaagtgcctaagcattactggcagttgtacatcccaagaatttttaaatacatttttcatgtcaaatacacatacgtcctactatcaagtgctattagatgattgcagatccctcgctaatgaagcacagaagttgaagtcttttattagagaatttagagatatgcatagatcatgattgtaatcctacttgttctccaagttgtattcaaaggcagccccctcccccctcaatgggtgtgaggtgtaattctcccaattcctgcgctagctctctccaacctgcgccgccggtcctcccgtgctgcacgatctctgttctttccttatgccaactcccaacgttacaccctgtgcacattgggggcagcatttgatacgtctgcttgccgtcagtccccgcctgtgccttcctacatctttattttctggtaactggttagagcagaaaatgaactttgattattagtgtttatttctggaagcctgtatgttatgactctagcttgattctagcatacatgattgcttttcatactttaatgtcattttagttagggttcgtatactaaactgtttatatatttgttagagtacgtaagggatctattgggcctgggctggtgccatagcccattagtgttagggttaattagagataagggtcgcttgcttaggggtcaagtaagccttgcttgtaagtcaagtagggctctctatataaggagaggagatgtatcaatctaatcaagcaagaattaagaaggaaaaatccttccctcttgcccggctgtgggcaaaggccttgcggctggccctctcgtgccctcacaggcctagcccatgaacagtacccgcgggtactgtggcgcagtgggtactgtagcgcgatagccgcctgtgctcccctcaacaatcttctttcaatcccaacaaccacataacatctggtatcggagatgtcaggccccccttccatcttccatgcagccgccagcctcctccgtagccccagccgtcatagctgcgccgccgcactcagcttcattggagctctcctccgcgtcttccgactaaccgcttacgcttgactctcttgcgggggtggtcgctgagctgtcgcgcaacatggcagcgatgcaaatttccatggcggcgatacaggccaccgtggcggggctggtctagtcgtttcagcccacggccatggcaccaccagtccaacagatccaggacaggggcgagaagtcgcaacagatcgagcagcggacggacatcgtgatggagccgacggggaagatgcttacccgccaggagtcggtggtggtgcgtctacaggctgctgcgcgttgttggcatttcttagcgtcactactaaagatagactataaatccatcattagcaatggcaccagaaatgtcaggtgttggtataccataactatcgttacgtcagagagataacccaagtcctttaacagcgccagccttagcagtgcaatctggtaacaataattaggaatgccggattggccatcctaaccatccttacttacgatatgcaaagctgtagcacggcgctagataaatgcacagagtttacaatcttaagtaacggtacttaggtacgccaatcaatagttcatgaatataaagaataaaactgcaagcgaacagaactatcattgtagcatttcaacctgtgagtattcaagggttatcgtatttaatcccgtaggagggtgtaacaaatgcatctagtttggtttgtagcatgatcacttattgagatgcataggtagacatagtctattcaggggtcacgacaggctcttaaaatatggatagtggacacactcatctgggcaacctcaaggaataaagagaaaataaggaaataaaagaaataaagaacaactacttgagccggcattgatcttatataactatgcaaggaattgttagtagaacatctaatcaatataaccagagttagaactaagtctgaggctctggggagatccccacagctggacatccagccgatagggactttacagaactcctaccggaatatctgatcgtggaggaataccagggatgacagggttgtcactaccctgccacctacccctctacccgaaagatacccgcgcatccgctgatctccgcatacccgagcacctcgcccatgtaattgaaaacgcctcctagcctcccgggaccccaacccttcggattgacaggctcggctaagagtggccatcagagcccaacgaactgttaccccaatcttaatcctttgtctattcatactaattcgatgaacgatgaagaacaaggatgaacacatcaagaacatagcacaagaactaagaactagttcatatactatgaacaagatatgaacacaactatactctaattcaattgcataatcatataaataagataagaacttgctcatggaggagaactgaattgtattcataccaagaagctctaagatcctccaaggagacaagctctccttgctagctttgccttgctctactactgaatctaaactaaagaacaagtgtagaaatgtgaggtgtattgctccaaatatggtgtgtgtgttgaatggtgtggagccatctatttatagcccaacaaggacggttcatggcgatctaaatttggtaggaggtgaaaccgtccgatgcatgctgccatgcaaccgcctgaaaaaggtgggaccgagttgccgccacggggggtgcgcccgcaccagggtgcggccgcaccactggtgggcccccctggccaccgccttcgcgtggtcggttcgtctctgggccctgatccttcccgtggttacggatggatccaatggatccagttcggtgtttcggtgggcttttccatttatctttgatttgcgccttttctgaatatgctttcttgaagtgcgttttctcgtgtcttttgcgcctttccacgtgtcatacttgaaattgatatttgcaacaaaacttgtggaaaggttagttcaaagccctaccatctatttattttatttattaaaatgatgtttacaattataggataaggggtaccaacacgcgcggcctcctcgctcgttggcgggtgtgggtgatgtgcgatctgtaactgattcaaccctgcaccccttcgcagctcttccaagttgctcttcaccgcgtagaggaccttgatcttgtccgctgtgtcggggatcttgggcctgtggttgtccccacgggcggtgggcatgctgtttgccacgcaggtggcgaactcaaagctttcggcagcggtactagaggcactcccctcgtcgttctccatcgaaagccttccactctcctctctacgatgcagaccagcagccatgcagcggggagaaggcatggggtcaccggcgggagcacactgcctagcgtttccacatttctctaccggccaccacgagggcgtcttcgctggtcgctgtggcgaccacttcctgggggccacactcatgcagccctttcattcagatggtgtccatgggatccaggttatacacgtataggtccagcatgcagatggtgtccaccttacgtgcaggggtcacaaataaagtgtcctagtccatttcaggttaggaataataaaataagccaagatgtaaaaggcttgtttttaagtgttaggtttgtgtcaagtcgagtcatcattataagttggttaggttgcagctcgaggacgagctgcatgtcttggtggggtgtagtgttagagtacgtaagggacctattgggcctgggctggtgccatagcccattaatgttagggttaaatagagataagagttgtttgcttagggatcaagtaagccttgcttgtaagtcatctaaacctctctatataaggagaggagatgtatcaatccttttaagcaagaattaaaaaataaaacccttctctcttgcccagccgtgggcaaggcccctggccggccttctctcgccctcgcagccctagccaccaccacaacatcagcatgaacagtacccgcgggtactgtagcacaccattagccgctgtttccccatctcagccctctcaatcctaactgccacataacaatatgcttgttctctgctctccccagtgaaacaggaaaacattaattttttaggattcatcttacctaatatcataattaatttctattatccaggtatattccagaaataattgagggggac

SEQ ID NO: 5051 - DNA, 7910 bp, Sorghum bicolor
  Intron number 9 from transcript Sb08g001400.1 (locus Sb08g 001400) derived from phytozome v7.0 (chr-ID chromosome_8; pos 1363058 to 1370967)
gtttggttatcctcataagctgtatttggctcccggtatgtgtaactatgctggcttgttgttattaatattttatattaagttaattataggtgtgcatatatacaccatgcacgctacactcatatgctcacaagtgtgattctacaaatctaaacatatgaaaaacattagttcgttgttaaacatttgcaccaagatttgaaaactagtagttggagtcataagctcacacatccaccaccctaagctgcagttctctattcggtaccatatttagccatctgttgcagaccttcattttgtagagattttgttacaaacttgaaacctcaacaattgtaataggtattaccattacatgaccacctctatcatcaggatattaaaaatactataccactaacacatcatctgacatatggagaccagagtggaggggtctcatggatggtgatgatgatgatgcaacactgcaaaatcacacaaaatcctatagaaattatatatttgttgacgcgaaattcagtcaaacactaaagcattggtacatactgtcgagggtatcagtaaggggtaccctcagcgatgcgcattacgagattgcccgtacgcaggtcgagaccctcaattcgacgctctaatctcacgtatccgccgccatcgacggccgcaacctcgaagacggaaatagcgtcgagcgaatcgatcaggcgtcgagcgctggttaccgtcgaatacggaacaggctcatgcgaaccggggggcgtcgagcgcgaggacgccatccgccgcctgacgcgcgcacgcgggccggagcattaaatgcgcccgatgcttccccacctaacgcacaggtcacgggaggcgtgatagggaacaggcttccgtcccatcaatctttttgcagccttcctaccgaacgacccggggcgtgtcgggacacaggaaacaaggatggaacgtctaatcgggaccccctcgagacacccaaggtcagcgctccagatatcagcatattacgcagcgtccgaccctcgaccgaacagggtcccttcccagggacaagttgggcgtcgactgacaacaccacagctaccccgccggatccgccgccatgccgtacaagcacgcgacctcagaaccagtgcaaggcggcgcgcagggcagaacgcaggagcacgcgtaatcatcaccgggctatcaagatgggacggctcgaggccatgccgtacggaagcctcgagtaggtcggcgctccatgcggctatcgacccctactctaacatctacgcatgtaccctgtgtctctccttggagctataaaaggagagactcaggaatagaagggagaacacactacgacacaaggccacactcatacgtagtagagcttcacacttcataccacgcttgtattcgcccctgtacaagcacttaggtgcaagataatacaaactctctccccccgctggacgtagggccttctcttgcccgaaccaggataaatctctgtgtcttcttgcatcaccatccgggaaagggagcacgcatacaaatttactcgttggtgtgaccccccggggggaaaacaccgacagttggcgcgccagataggggtcctgcgtgttttccatcgatttcccactcctttccggatggctactctcgcctcgccatttccgcgctccacggtgatttggtttgggagtctcgagttcatgtctacgggctccggctacgacatgatcttgctctcagtcaaaggaccaggaggagcccgcgttacgccagcacggttgaaggccccgagacgccctcaccaccacgcctccccgcctaagaagaggcgcggacagcaccaccgcggcccctctgcttcagcacgaccaacagctcgtgcgaggcaggacgtgggccacaaggcggcagcaccatgtgacggagcaacaagcgcgacgactcagcaccgcgcgacgacgggaggggacgcgtctcgcgcgctctcccctaccgcagctaggctacttccacacgggttgttctctccaagggcggcactgccgttcgggttggacaacgccgcggcgtcgctcgccagggcgatatgcccaaacgcccagacgtacgtagaaagaccaatggtcctcccacgtagctctgaagcgcggcggccggcgtccgagctgccggacctttcccgagtacgagacctccgtcgtctaggccccggacgatactcgatcacctccctcaggcaacgatttctagaggaaggacgtaggtgttcccacgccgccgaaccggactccgactccgaaacagatagctatgaccctacgagggaatgctatcacatcgacggggcggtagaaactactgacgagacacgggatgctgccgcgggtggtcgagcccccgcagcgcgagaagaccccaggacgcctgggaacgacggacagctcgacccccctcctcaggaagacagaaccgcgcagctcgcgcagctgcgggagctcaaaatgaagctcgacgaagaccgcgagcgcctcgtcctgctcgagcaaatcctcgagcaagacctgccttacccgccgggcggaagtgtccgcagacgcgctcgagaggtacatcgacagatcgtcggcgacgcagagccagagcaacctgtcagccgtttccctcgagcaggccagaatgtagtggcagcgacgatgctgctacgtaacatgccagagccgtcgaattcccaggcccgacgcattcgagatgaagtacagacattgctccaggtggcagcggttcaacaagccgaaagttcggcgtctcgacgacgaggagctgccacagagaagcacgacgaacagcctctaaatgaagaggaggtgtcagtccatcaacaacctccccctcgaggtagaaagaccgctctcatcctccctgccgacaatcaacgtcgacacgacgcgcggcacgacatcaaagaaaatagacgccgccggcacggagacgcggaagagcgtggttatagcgcgcatcgcggtgggagatacgacagcgacgaggaccgggtgacccccgagccaccgggcccacgggtgttcagcagggcgattcgcagcacgcccctgcccaatccatttcgacccccaaccagcatcgcgaagtacaatggagagaccaagccagagctatggctggccgatttcaggctggcctgtcagctaggtggcgctcgaggtgatgatcgagccatcatcagacagctaccccttttcctctctgacaccgcccgtcgatggctcgaggaactccctgccaatcagatccacaactgggttgatctggtcagagtcttcgagggaaacttcaaagggacctacatacggccagggaactcgtgggacctcagcaaatgcaagcagaagtcaggagaaactcttcgggagtatgctcgacgcttctcgaagcagcgcactgagctgccacacatccctgaccacgacgtcatcttggcgtttgtctcgggcaccaccagtcgagacttggtgcgggaattaggtcgcaatcgacctcagaccgtcgacgagctgatggacgtagtagctaactacgcggcaggggaagaggcagtcggcgccttcttcagctcagaaggaagaaaaggcaagcagcccgtcgatgaagatgggatctccagtcgaggcctcaagaaaaataaaaagaagcagaaagtgcggcaattccaccgggaagactccgatgacaacctcgtcgccgccatggatcgaaagaagcctcgaggccctccggatggaggcatcttcgacaagatgttggaggagccgtgcccttaccataagggaggtgccaaccacaagctcaaggactgtcgtatgctgagaaggcatttcgacggtccagggttcaaaaaacatacgcgtgatgactccaagaaagagaaggctggcagcaaggaggacaacaaagatgacgacggcttccccgccgtccacgactgctacatgatctatggcgggccctccactcaactaaccatgaggcagcgcaaaagggagcgtcgcgaagtctttgcggcaagaatggcggtgccccagtaccttagctggtcaagcactcctatcactttcgaccgagaggaccaccccgacaaggtagtcgccccaggcgtctacccgctcgtcgtcgaccccatcatcgtcaacacccgactctcgaaagtgctgatggatggtggcagcagcctcaacatcatctacctcgagaccctcgacctcctcggcgtcgatagaggacgcctccagccgagcgccggcggtttccatggcgtcgtgccagggaaaaaggcactgccggtaggtcgaattgacctaccggtctgcttcggcacggcggcaaacatcaggaaggagaccctcacctttgaggtggttgggttccgaggcacgtaccacgccatcatcgggcgcccgggctacgccaagttcatggctatacccaactacacctacttgaagctgaagatgcccggtcccaaaggcgtcatcactgtcagttcctccttcgagcatgcgtacgagtgcgacgtcgagtgcgtcgagtacggggaggcggtcgagaactccaccgagctcgtcgcgaagctcgaggccctggccgctgaggctccagagcctaagcgccacgcgggcagtttcgaggcggcggaaggaaccaagaagatcccgctcgaccccaacaactccgacggcaaaatgctgacgatcagcaccgagctcgaccccataatggaagcagagggcccgcatgaagcggctcgggggcgcgcccagaccgtggcggtggaacttggcgaacgacaccacgtagccctcaggcggctgaggccccctgtgactcgccggcggcgcgatccactccggcgacgatagcgaggtgcggcggcgcagcagtccctctttctcaagctctaacagccggcgctccgtcatcgacgacgggcgccagtcgtcggcggcgacgagtcttacaggcatctcggctggagggacgatggattcactacagctcgagcgggcgtgtgcgcgtgagacggcgagaaagcaaaggcaacaagagaataagagcgagaaggcgaaagggagaggaatggcggcgacgcgacgacgtatttataggcagcagtccgccaacggacagatccgagaaataaggtaactccccccataaatgcgccgtctgacagtcctctctctcctcacaggccggactctccgaattccccgccgatacagtgtcgcaacgtcatccgcctaaaaaggcgcgcccaacgggcagaaaggcgaaccgccacggccccttccttccctcgtaagccaagggacgtaaccaccaaagtctcgagaggtcgatggctggcccgccgaaagggttcgacagccgatctcgagcgccagagtcagggatccccagtgagcggtcgaagatcgaggcccgcctcgaggactcgctggcgatgttcaaggtagggtcgagactgtcgagaggaatccccccgacgggaggcatcgagccgccggtctctatcgaatgagactggtatccctgaccacgtcgaccctgctttatgagaacgcctccgggctacagctgaccccctcgaaaggggcacaggttctcacttggactacccgctaggaactcaatttggggtggaagacgctcgctctatcgagagtacgtcgaaacccccgggcaaaaacgagccagtcagaactttccaccactggtgtcgaaagcgttcctgcgaattagacaacataaccctcgaaggagtcaaaaactcctccgagggctcgggggctacccccgcggggtcgctcgcgcgcccccacggaaatttgaccgcaaaacaaagcctccactcgagcgctagcgctcaaatggaggctcgggggctactgtcgagggtatcagtaaggggtaccctcagcgatgcgcattacgagattgcccgtacgcaggtcgagaccctcaattcgacgctctaatctcacgtatccgccgccatcgacggccgcaacctcgaagacggaaatagcgtcgagcgaatcgatcaggcgtcgagcgctggttaccgtcgaatacggaacaggctcatgcgaaccggggggcgtccagcgcgaggacgccatccgccgcctgacgcgcgcacgcgggccggagcattaaatgcgcccgatgcttccccacctaacgcacaggtcacgggaggcgtgatagggaacaggcttccgtcccatcaatctttttgcagccttcctaccgaacgacccggggcgtgtcgggacacaggaaacaaggatggaacgtctaatcgggaccccctcgagacacccaaggtcagcgctccagatatcagcatattacgcggcgtccgaccctcgaccgaacagggtcccttcccagggacaagttgggcgtcgactgacaacaccacagctaccccgccggatccgccgccatgccgtacaagcacgcgacctcagaaccagtgcaaggcggcgcgcagggcagaacgcaggagcacgcgtaatcatcaccgggctatcaagatgggacggctcgaggccatgccgtacggaagcctcgagtaggtcggcgctccatgcggctatcgacccctactctaacatctacgcatgtaccctgtgtctctccttggagctataaaaggagagactcaggaatagaagggagaacacactacgacacaaggccacactcatacgtagtagagcttcacacttcataccacgcttgtattcgcccctgtacaagcacttaggtgcaagataatacaaactctctccccccgctggacgtagggccttctcttgcccgaaccaggataaatctctgtgtcttcttgcatcaccatccgggaaagggagcacgcatacaaatttactcgttggtgtgaccccccggggggaaaacaccgacacatacataacaaaaaaatgaacttcattgctttgtctgccaaaaccagatctcatgatatgctcctaagaaggggtaactcatgttgatggaggacagctaggtttattgggaaactaagaggtaaattcatgtttacatgaccaaaaaaggctagtctaattgacaagaaaactagcaaagaccgtgaaaactctcgcatagaagggactcgtcaaagcatcaatgtcactatctagtgtgccttaagtcaactagcaaccctagcacgccacttatagtcatcgagtttagttgatgaacataatgggtcctaggaagccatctatggtcataaattggtttgatcaagtgtgttttaatttgtcttatatttattggacagggaggtattgtctcaagagaggcccgaaagtcatgcctaaaaatgtattataaatctacttgggatagatctacagttcacctcttatgctgcaaaaacagggtggcctagaatacaaaactagattgataacctagtttgctaaaaccagatggtccagtatcaaaagttgggtggtcctgtcttgccggcatgtgagatgatccaacattcactctaacttcctcgtgggaactctgaattaggcagtccatatgttcgtatccatcaccttgataagggttacatcatcgcaagcctttttctatatcacgtaggaacacataccttttttgtagttatctattatttagtaaaactactaaatttatctatatggattgttgcacattttgtgttctttgtcggatcttgatactatattgaccttttgagttaaaagagtgtgtttcataaaaccgcaggagacattgcataagcataaacttcacaaaactga

SEQ ID NO: 5052 - DNA, 3517 bp, Sorghum bicolor
  Intron number 2 from transcript Sb02g041480.1 (locus Sb02g 041480) derived from phytozome v7.0 (chr-ID chromosome_2; pos 75294332 to 75297848 reverse strand)
ccacctcatcaggaacaattcaagttaagtgagtttctatgtggtgcggcatgtataaatactttatcattggatttcctcgggcaaaaggtaatacatatatattcaatcactattgtctctgcagttgttatcagctctggacatatgcctaggcataatattaacttttgagctaaacagtgtctattaacttttggaagactttgttgatataggtttctttaattacattgaatcatcatattcatatagaactggtttattttgttatcattcatttagggagcatatacttggccaaatactcacaaaaacattttttttcttgttttcattcactaactaaacatttttccttgtattctttctttctcaactctccagatttggctactacctgaaaaacatcaactttcctcagtatttagcaatttgaggaaattgtgtatatatgatatctttgttggatttggccttttgtggacaacagctcttcttgaagttgcgtcatccctcgagatacttgaagttgaggtacttttgcagttttgcttgtttctttgataataaaattcagcaaaaccttttttatcaagaaaaaagtatccggtgacctttatgcctttgtcacttatgaatattgctaagtggttcatgtggtggaagaatgcacctgatagaattaatggatttgttgtaatgatacttagtacattggaaatactaatcagtaggcactttctaaaattctcaaaaaagatatcacctcataagagatgatgcaatgcaagaactattggtagttcaccatatatatggaagaaatgaacatgattcctagttgtcatcatccaatgccacatgttttcatgcatatgtacgtgctattggtcgctcagtactattagttccctgcaaataatatttgtgattattgataagaacttagttgatttaattattttcacttcataaaacatgttacatgtatatgcaggtgtatgaccatcgatgtgaggaggacgagaaagtaactaagttgtgtgctaaaagaactaatgcgccatgggaagtgttagagtttacatacccaaagcatttgccactgaaagtgctagaaatcattggtttcaatgcaacagaagaacatctagtgtttataggagcagtgatggagcgggcttctaacttagagtcggttgttttgaaagataagtgttgtaaggagtgcgaagcaaccagtacaacgtcagtaaaatataaattcccagaaaatgaagatgaacaagagctggtttgaataagctcagagaccggttgtcctcctgtgctcagataatttttagtgactgcaagattgtcagcgaatgtgtgtttgcctgaaatggaaaaaacgcgtgaaatgtattgctcgtcgctatagtatatggttttttcaggccatccagtgcgagtttcataaccgagtttccaacaccaaatctcatctatttataactcttataatcctaaatctcactaactatttctctaagcatgcaagctatccacctaagcaatgtactaccatattcaattaaaattcactaagtaaaacctcaataactatttatctcaacatataatgcactaccacatatacaattaaaatccaatagcacacatgacaactgtagtgtacatgtcagcaaaacaaataagtatagcccacatcatcatactacacaatccattaatccgcaattcccgcagcaacgcacggggtatgctcctagtttctataaaactctctctattcccataagagcaagtttaataatacagcctacttactggctataaggttctttgcagccttctttcagcccaccaatacaatagttagctattcactattaatctattcgctattaatacatggcccacttatccttctcacaaagtttcttggtttctgtgcctaagctggttgtaagcttacaacctacttctcctctcctcttcttcacctcagcatttagccggcttacagcccactataatatttgctctaaagctcttatcatctctcttcattaacatagtgttatatcagtatatttaatgtccatcaaactctaataaacttctattaagtggccttataaaataatcaagctaccagcacgatctatttcacagaataacaaacttaagatatatgagtgggtccgttggtatagggccttgacttcaatcattttgctctgtgtttgttccaagaacatcatgaaacatatcatgtctggatattataacagagtaaatgtttagaggacgtggggtttctataattgtttttggagaaggcatatgaatagatttttaaaaatgtagttaatttctataaattatatttatctatatctatatttatatatactcaatttttttatttgttgcggttaccgtgggcgtgagacctggctgtttcgtgggtctagagaagaggatgcaaaaaaaaaaagatagacaacaaggacttggttctagatgtataaaagtgcaaaagggaaaaaagttggaatctaaattaaattcgagaaactagaggattcgtgataaggttagactgagccgagccgtgacctgacttcttttctttttttctatttttattttgttgaaagaacaacaaacttgtaaattatgtgaaaaataaatagaaaaatgaaaaaatagcaaaactattttttaactcctaatgactaggtctacactctagaataaaatatttggtgtacttatagatctatgttttctttcataaacttataaagaatattactttagtgttgtcactggaatttttatcctaaacttttattgatgtgtagaatctatatggtaaacattttatgcacaatggacacatattgaccgagataatgatttttctaaaaatactttttaaaatataaaacctattaggggaaattatgaaaaatttccctcacaactttctataaaaaggtaagaggggagatagacaaggacttatgaatttattttgctttttctcaatcgttctccactctcttctctatttgttcgtttaagattaaaattctaaatgtctactacatcacaaaactcttaagggattagaaatactaagcacgcttaaactttagacaataagtcattgctcgcttagcacttaatgtctttaataatcttacattatgtttatcttgttaatattagtatgacatttcgcccaggcttataaaccttctggctacgccactgtttctatagaaggatattcactaacaaatacaagaaacataaaatattgaatcacataaaacaggatcttaggaaatgtaacggagaagagatattgaatcacaggaaacaggatcccaggaaatgtaacagagaagataatggaataagaacgttttgcgtaagattaataccgtatgaatttccagtggttttggcggtggcggtggcggtggaggcgctc

SEQ ID NO: 5053 - DNA, 749 bp, Sorghum bicolor
  Intron number 2 from transcript Sb03g026230.1 (locus Sb03g 026230) derived from phytozome v7.0 (chr-ID chromosome_3; pos 52815592 to 52816340)
ccttagagatagaggcaaagaaaggtaatatgtgcccatgtactatcattatgtacatatttttgatatttctgctctagaatcttctttcttttgggggtgccgtatcaatggtcttttggaaaattctatggatcattaatttaagtagtttgatatttggtgtatgaaaatgtgttctgtcatggaaaatgaaattgacaacaagatatctatctagaatccatctactagttttgaaattgaattgattaatgtgtctccatttcatggtttgctctttttgacaatattaattcatatcactgttctgctgttctcttagaatcatgactcaaaagtgtgaaatgtcctgtttgaaaccattgtagcatcctcagaagaactgcaaagaagatcatttatacagaatctgtcttaatttgtcctgtttaggagaagttacttcaggcttatgaatgtataatcttttatttgatttagttgttgtatatggaccttctggtctatacactgtttggttctctgatgcttttttttgtgtaaatgtattgcaacatccatggaaacattggaaagtgaccaatattagaaaccaattcatgatcaagtgcatcactacattactctgttacagtggagtaaaaatgaaagggcagaagcattgtctttcttggtgttcagacactcctgaatagtgttgtttgtttccaggtgcgggaaaaaattccaaatctgcgaaggttttc

SEQ ID NO: 5054 - DNA, 1811 bp, Sorghum bicolor
  Intron number 1 from transcript Sb09g005695.1 (locus Sb09g 005695) derived from phytozome v7.0 (chr-ID chromosome_9; pos 7597123 to 7598933 reverse strand)
gccccgaaggctcaggtgatttcaattcctcaacgccagctccaagctttaaattaatgcgatttttttcaatagtaaagatgagtacctcgagtgcctggccagtttgttagtgcctcgacctcgagtgcctggccagtttgtttgtaatgcagaagtttaggctcctagcttgcacggcccagtttgtttatataatgcagcttactaatctctgaagtctgaagcatagcctacagacttttggatggcactacccttccctgagacaattgctttgactcatttgtgctgccagcttaaacaggcaaaccgtcctgttctctgcagggtagagttatatttattctgttttattttaaatgattatctggtcttctgacaagttctgaattcgtatttagtaactgacgtagctaggaatggttttttcttatatcttgttgctatagcaacttcgagtcatttttttgaagggtggagtcatttttgtgatacgcaccaatcagatgtagcaagaattgtgccatcaaccttttttatatgcctttttattaactattacctgcgaatcatctgccacatttattgaattttgaaatgtgaagtagtacaggacagcaaattgatggtgttcattttccaaagaatagtttttacctgttcttagttgtgtttatgtatatttctgattgtcattttccatcttaggcagtccacataccctaggaaagaatccagaataaatgtttaagaaaaaatctatgtatggagtcattttgcctgaagcaatgacagaacatgcaaaccaagttgatcttgtttgaacacaggttcaacttctaaaggatgcccgaagctaagcaaagcaaaatggtttacagactcctcaaggatgaaacacatattttaagtgtgagtgagatgagttatagacttataatgtttgcaatataatgaacttgatgaattttatttgttgtaggtaactagtactttgctgatgtaaggtatgcagttaggtcccatataacaccacctaaagacgtttccaatgccattcaaagaagtccccaattgatatggtactatctttcatgacaattgagagaacatttgtacctaactacttgaagactttctttcctcacaggattctagtgaatactgtaatgtcatgtattgtggcagaattagattgaagaaaagatgtagatggatttagaatttcctcaattgattagagtagttgcaatcttagagaccaagcagacctgaactgctaattaatagtgtgatagatcaaaggggatcgccttgtgcatatgctgagaaaaatcatgatcttgctgctagctgcctctgttgtgaattactcgtttatttgtaatgaatataaacagttttttatctcgaacgcacaggagattcatacacgccccataggacatgggtatcgcccagaatgcgaagagaaaaatcacaaccatcaaaaataatttcaactgtttctgatactttctgctgttaaaaacacagtttcagtgtaatagattaaacggaatgactgttcctcgtgcatatggggaaaatatgatttcccttgttatgtactagtttacaatgcactatttttactgatctcgctactagctgcctctactgctgtgcagtacttctactgaatttcaattgttgctgctactttttgctaagtttggttgacctacttctattgacaaggtcgctgcaaaattaatctgaattcttcttacttactttcaacatttctttttcatgcagatcacaac

SEQ ID NO: 5055 - DNA, 2485 bp, Sorghum bicolor
  Intron number 1 from transcript Sb03g011910.2 (locus Sb03g 011910) derived from phytozome v7.0 (chr-ID chromosome_3; pos 13636615 to 13639099 reverse strand)
ccgcccccttccgacgccttccgggaagacaaaaggtgagattttttcttttgccgtactcgcgttctctcccctcttccagttccagtactttcctaaagttcttcgaaggcgtttatcgggtgccggggaacgcctcccgtccgcatgaagccccagcgtgctgcggtccgtcgagaaccgtcgttgcctcctttggcggccagggtttccccacggcggcagcaagtgggaggataacctgcgtggctgcgtcgattgtgacggatgtgagtactgtacgggtttgggggaaggtttgtgtatgatttagttcttatttccataggtttggacctgatgctgtttcaatttgcttgtgatctgggatgcgattactggtaggtaggtatctattcttcaagtccaaagaagtaaggtctaccttaattcttagtcccaaatccgaatcattttttttttctatcggagctagttctttgataataaggatacttcaaagtgaagcttattttggttgtccttgcccacaatttggatatctattctttgtttgaagtaggtatttgttaatcaatcagttctttgtttttatttccttctgtttgttctgtcatatactcatattttactgcttctgcctatgtcctgtaaatgggatagacattggaatttgaaacaaatccaaaggtcatcaatcatcattgtcttatcgcgctagtaaagagaattagatttcacgatatatattatatattttttgaatgatgcttccctacggcgcagccttcatagggggccaggggtgtggccgagtggcacgaggattcaaacccccactggctctaccaaaccacaggcctgtctgcactgagcctacattttggcgcgggaacctttttgcttgtaattagtatgagcattttttttgttttaaagaaaatcctgagaaaaaacatggtagcaaattagctaactaatactgaatgcttggtatggcttgtagcggctcttgcttgtttaattaatgttttctatgtgactttgtaataggtatattgttatttttgtgtatccttaaaaatctatagtgggttctagatgtctgatttagtaaattactccctccataatcttttgtaggcgccgatagatctcacgtttttgacgttttataagtcgtggagtaggtaccgtggagtctaatcagtgtcctaccaaaatcttcggcaattactcattgatctaaaatcaaagcgttcctttgcgtgcaacccgggtcccggacatgaattgtttctgctgatgtactgcatgcatgcttggatacatgcagaactaatctgcggcaacaacgtggccgagtagagtacgacacatcatttacctgccacctccctctcctagagttccttggtacctgtaaaacgcctctgtgtgccttagaaaagattatggagggagtattccatagctacatttattctttggatcatgcgatggcgatgacaggaggtgatgagcgtcatccagtgccttattttgcattcagcttcagtactcagaacataagttattggattaatgttaagtggtagatatatttaattctaactatgagatgtttgcactgaaggcattgcaaaattcttcaatgatgtcatgtggggccactcctactccagaagtaaacacgccaggggcgcacgcagataaccgccatagtgcgcgatcaccgtatgagaggagtggccccacatgacaaatgatctaggatttattacacataaaaaataatgacatcttggactttatataaggataactccatgtctagtctggaatctttgattttgtccttacttttatttaaaatgcagagagtcgttttccagttcttctctatattttaatgcaagtggtctttggtagtttattttttggttctagtgcctgcttgccattaaaattctttcttaggtcttctcccttttgttgctagtgcttccagatatcaagaatggaagtaattttagacaaagtgcaatcagattttacagattcttgatagttgatactaaaactgttaaacatttatcagctgtaggtccataaaactttgttctcgtgttatttggaaattctttgttgatgttacttattcaagaggaatacattacttattgcattttgttgcaatctttatttattattttggtattcaaaattttgagtgacggtcatgtttaggaagttgagtatgtctgttaggtacctgtttaccatgtctaccatggggaaacaatcatttgtgatttgaacaaatcctgttagtaggcagtgctttgcttgtttgacacattatttccccctattcagttgcttgcaattttggaggtttttttttggtggcatttttagtttttctgcttaatgcttataagagaaaggtgcttcatttcttaggtcttggctaagtttgaac

SEQ ID NO: 5056 - DNA, 1111 bp, Sorghum bicolor
  Intron number 5 from transcript Sb03g040330.1 (locus Sb03g 040330) derived from phytozome v7.0 (chr-ID chromosome_3; pos 67968032 to 67969142 reverse strand)
gtcaacttgagttgatagaaactcatcagcgcgaggtttgtgtttcttctaagtttttatacgtttcctttcctctgattgaccgtagctttatccttcattctatggttttgtttctttccttattatttcaagccagtgcagtattcatatactatgccaaagacctcgcctctttgaactatgccccgcattgttacatgcacataagtagtttgacttacgtaccacaaattctttttttttgttattgttgtcttagttgtggttgaccaatcatttgccaatgagagttcagatttgcttcactgctattcaatgttgtgaacaaaatgagcttcaaatgctggaacccttggcatatgtgctaatttaacaatactgaacaaaacttccaaatgcaaggtttcttggcatatgtactaattaacagtaatacgatacttgtttttgtttgagttacgctgaacttaaattagaagtcaggataaccaatggttaaaaagaaattgcattggaaatttgaattgtgcatacaattaaaaagaaatccatataacgcgatgctggctatttgataggcgtacaccttacttggctagcttatagccatgaggtgtctgtttgacatctccctgctgaaactaatggtgcaactttgaatgagttaataaaatccttgaactcaaacttggtagtttgactctaagaattatgagcatccttgtttggaagctctctctctctctctctctctctctctctctctctcatacagttttcatctacaaattgaatcacatctggcaatacaatttctgcagtctgtattaactagttctagttgactgtatgattgctttcttgatccagtttgaccttgagtccttgacccattaagcgtgaatcaaaatactgttctaatgtaccaattgaactggatatgtccatatcatttcagcagtctgtactctgtactaactagtgctaatggactatttgatatgcttgcttagccaaaagttatgtactctggagaggtttattcatccagcttctagtttgtaaagaatttgttttatgattgcaggtggacaaggctctacagagt

SEQ ID NO: 5057 - DNA, 5277 bp, Sorghum bicolor
  Intron number 8 from transcript Sb08g018560.1 (locus Sb08g 018560) derived from phytozome v7.0 (chr-ID chromosome_8; pos 48767273 to 48772549)
gtgccggtatgattaatcttaccttaacctcctttaactgtagcatatgtcattgcttgaatgttagaatgccttctcttttgttgccttctgcatctatattttctaattttacttatatttttggtctagttaccaatatgtcatcagtaacgcactgtattgtaactccataatgcaaacagctataatatatgtttgactttaagtgacacctctttttatatttatgcatttgtcatttggagtggatatgcaaaatgaggccttgtttagtttctatccaaaacccaaaattttcaagattccctatcacatcgaatctttggacacatgcatggagcattaaatatagacgaaaacaaaaactaattacacagtttgcctgtaatttgcgagacgaatcttttgagcctagttagtctataattggacaatatttgttacatacaaacgaaagtactacagtgtccatttcccaaaaaaatcttggaactaaacaacacctgaactgtatggtttgactgtacgagcaactcttgactgtggtgctggtgcttgtgcagtgattattgcagctgtggtcattatggtgaccttggcctgtagggtgatgtctgggctcaagaagaaggctagtggaagaaagaaggcaatgctttctttctttttcttttttgatctgtaaattaagttgttaatgaatctgcttcatgtatgatgcacatatcatacacacggttgtctgcatagctaagaagtgcagatgtgcaggcacatggcaacgccattgatagtgtatacggtgccctacagtaggggatggtcatttacacagtgccgatggggtggtaatttacatagtgcagatgcgatgactgatgtatatttacaggagcatacactacatatctgttgatgttgttatatgatatagaaataataaagcggtcgtcttggactccgtactggtcgttgtttttcatggccggtggtaaaagacgatttattgtgagaaaaagacaatgttgaatggctgacagattcgactaataagttcaaacgaacgagacgccgctgataaagtaaaccatttaaggtctacgtgattagtacacaagatgtttttggcatatgttcgtcattgttttgttacctcacggtgcagatggttcccagtctgatggtgtttatttagtggaaaaatgttagctattcgctttagcttaaaagttgaggtcagtcattgatcaacaatgtttttctcttataaaaaatcagcaaatagtactttctgttatggcttagagcatctctaagagactcttcatattctttttaaatgctaggaatagagattttagtgaaaaattattttccaacaagcttatctaaatgatcattcaaatatagctatcttctatttggatttttcgttaggtaaatatagaagacaaaaatagatctctaaagtgcgtatgatatgaataaccgttggagaatgaaaagatataaaaagtaatttttatgtaaatagctctctaaataatgattagaaagtgaaatttagaaaagctcccaacgaaaaggctatatatatacgtagtttaaacatatgtactaaatcagaagtgatgtttgtacctgagctgtcggaatctccagctacgtaatctgtttttaagttagctgggtatttgacctgtggaaagacaagctattgaactgtgttagtgcgtaggtgctcatatttttctaaatttatttttaaaatttaacggtgttatgtttttagtggtaggcgatgtctccgagctaccagtaagatgtcggtggtgacttcatgaatcttatgatttgttgacagtccttcagggtctatttagatctttttttttaaatttagacactgtagcactttcgtttgtatttgacaattgtctaactatggtctaatgagctcaaaaaattgtctcataaattgcaggtaaattgtgtaattagttttttatctatatttagtgttccatgtgtcacaagattcgatgcgatgatgaatcttgtaacttttggaattttgaaggcatggctccgtttgcttgtcttataaaccgtactttttttgccagccagtagtgtttttccctcatcataaatcagcgaacagtacttttagctatgacttttcagataaacaaacagaatttgcgtacatgtgttcataggaatgagtgtgcgtgaactataaggccttgtttggatgtagtcgtattcacatcaatccacatgtgttgaggtggattggagtagaacttgaactaaattccaccccaatccacactaacacacatggattaaagtgaatacgacaacatccaaataaggcctaagtgtttgcattgtactatgtagtactccttccatcccaaattgtaagtcatttcaagaattttggagagtcaaatttttctaagtttgaccgaatttatatgataaaaataattattattatgataccaactaagtattattaaattctttcttaggccttgtttagttcaccctgaaaaccaaaaagttttcaagattttccgtcacatcgaatcttgtggcatatgcatgaaatattaaatatagataaaaacaaaaactaattacacagtttagctgtaaatcacgagacgaatcttttgatcctagttagtccatgattagataatatttgtcacaaacaaacgaaagtgctacagtaccaaaatcttttcacttttcggaactaaacaaggccttaattatattttcatagtatactcactttacgttacaattcttagtatttttctctataattttggtcaaatataaaaatgatttgactctttaagattcttggaatgacttacaatttgggatagagggagtaatttttaaaaaatattgtctatacctgtgtggtgtcaggacccagcgccattacgtgcgtagtattgcttgcaaacttgggtcttgttcagttgaggaaaaattttggttttggctactgtaacagtttcgtttgtttgtgacaaatattgtccaattatgaactaactagactcaaaagattcatctcgcgaattacagataaactgtttaattggtatttgttttcgtctacatttaatattctatgcatgtgccacaagattcgatatgacggggaatcttgaaaatttttggaaagtaaacaaggccttatccggtgcgcagtagcaagatcagatcttcctaccggtgttggaatcaaaattgtcagaaacagttgtgatatactcccttcggtctggaatacatgtattgcggctattttaacacaaaataagagagagcgcaatagacacatttatccctcacttaacttctcaatttaattaaatctaatcttactccgcataaataaagggtgtaatctaagtttctttaaaaaaaatatggtaaacacttaattacttttatctctcgtatttttatttaaataaatatttttcttcttgatctccgaatacactatatttaggaacacctcttaaatgccaaaacgcactctatttcagtaccgatggagtagtgtttaatgaggtttgtagatgcgaatggtcttaccttgacgtttggttgtggtctctggatggtccaacctgtgtacgaaaccaagcatatcttgttatttggtaccaaggtgaccaaatgttgcgcatatcaccgttatgggttgttcttttgacacctatgtgtgcaacaccggtacttgcaattctgttctatagcgggacacgcagtatgtaaaccttgcatgcataaatattatttggtggacgatacagattccagaggagacgatgtcctattaggctgcaacataagtgtggtggaaattgaaagatttaaacggtcaggcgctggctaatcaaaccctcaccctatagatgtccaagggtccgacccgacggcacgacctgatgggggtcgggccatgttgagtcgggcaccatgcgctaacctatggttgaggcacaacatggacaatctagtatgtcgagtcggctcgaggtccataaaaggtccttgtttgttttagtaattgggtgacaatttaggtggattaatagtgtttatgtgagatacataggagattagtccacatgtgattgtatgatgatggaggagctcattgcatatgagacatgacatggagtcatacgaccaaggtggagaagattaagatgaggcttggcttgatggaccggttgcaagagtgaagggcaagttgaagtctttgaagcgagggaccgcgtgtgaaggtgaagcttgagcaagacttggtaccgatggaccaagacaacagtgaagagcaagtgaggtcaagatcgatgaaccaacacggttacatgatgatataaagtggatcatatcatttggtgattggttggtgcatgtgttgcatcaacatcagagaagatggaatagaatgcgcaaggcaaaggtataacctagagtatttctatttcatcggtcataggtgtgtagagaagtttatggccaaatttaggatagatggccgtactatcaaagaggagcaaacttgtttgcatatcggtcatctagtgccacttgagcgatttaactttgcatacgtgttatgatcgagtggcgcggcaagttgagaggctaactccttcgaagaaaaaatttgtgaaaatactaacacacttgcacatgttgatacacacatggtggtgttggcacacttttggaaggaggtggagtttgaagggtagagaggggtttgggtatacatggccatgcagcccgaggcacgacggcccggcccacggcacggtattttggcccggtccgagcacggcccggcccggtggtgcaggccgtgcctgggccgacctctgagcccacgggctggcccggctcggcccgaattttaggggttggtctggcaacgacccagtgccacctccgcaggcattgcgcaaacaactcatttttacgttacatgtcatttgatgtcatttctatgatctaagactgagattgtgaatctgagaagttgatagttataaaaaattgattgtggcattatgctggtgaagtgatcattgtcattgtgtgattattttgattttctttacaaaatcgggctgtgggccggcccggcccgtcgggctatgcgggccggcacggcacgaagtcagcccgtgggcccgggcttgggccgaaggccag

SEQ ID NO: 5058 - DNA, 1173 bp, Sorghum bicolor
  Intron number 1 from transcript Sb02g041960.1 (locus Sb02g 041960) derived from phytozome v7.0 (chr-ID chromosome_2; pos 75687001 to 75688173 reverse strand)
aacaagaaaggcttgcccacgggccaaatcaaagtgtgagtgcgcaagcacatttacatgtcctgttgcagatgccattgctccaggagtagacttaaaactagattctagtgtttgtcttcaggacaacacgttttgctggtttattgatgcagcagtgctgtcaatatacttgatctcagctcgattgaagtcaattgcatagctgcagccatgagaattgaatttgttcggttcctctgcatggcttggaaattgttgttcaaaaagagattgctaagaaatggtgcataagttggaaattagagattgcctgctctttggataataggggtggcttaggctgctttctttgtagttgttgcttatggactcccaaccagccaacctacttcaagggttacaatttaataatttgattttatcatcttatggaattcagtaatctttagatgaaatttatgtgctttagagagttcacccccttttttttaactgagtaaataaattctaaaataactagaccaagctctgtttaaacttaattggatgcctagcttcactgacgtaccgaagatgcaatataattacaatcttgaccaagtttcacaataatatcccctattttttttttaacattatataaactcttaaatacaccagctgcatagccatgggctgctaaaagccttccctttagctcacatacctacatttagagttcatgcacagcttcatctccttatgtgtatgcaaaccaaattctttgtatcacttagcaaatgtccttggttttctttataacagatatgtttagaaatatttaaaaaattttcttgaagaagcatgatgccttgttatgtttttcccccaatgatgatgtcgcatgctagtacatatataaggttgtgataaactcagtaggagacacttttgacaagctcttgaaggtgtagcattagtattttagataactgtgtaggaattcatatttaacaactgaacacacaatgttataagtttaaagaataccactgtatgcaccattcaatcaaaatctttagcagggtctggtctgacctataggtatagtcatgttaaaggccattcttgtttgtctaaacttttttttttgcaggcctgaggcactaggtcttgttgtggggattgtct

SEQ ID NO: 5059 - DNA, 10578 bp, Sorghum bicolor
  Intron number 4 from transcript Sb10g008350.1 (locus Sb10g 008350) derived from phytozome v7.0 (chr-ID chromosome_10; pos 8506789 to 8517366 reverse strand)
atctgcaggtaatgagcatttattttcatctgtaaatatccgttcaccatattctcacttcatttgcagccgtaggaatgtgtagtgcttaatccatttgattgcaaatagaaaagaaaatatgggcattgtacgtccccctcaaatgttgttgaagagatagatgtcactggcagtcttgtttatttgacactagggatcaggttttattgaattttgcttggctttctagtttgtacatgtcagtttattggattattgcgctgtgcctgtctcttgcaagtgatttagtgtgttgtttggtttgtacatccatattgcaaatggaagtaaaattagatcaaatgatatgtcttgccataacatccacaactttaattcatttccatttacgttaccaaagctacaaccaaacaacacctaggctggataatgacttgttttgagttggaactgccatttactagcatctatatctcatgagggtttggaaaacgcaaattgatacttatataagttgccatttattgtgttgcagggaaggtgcttgtaacacatgcattttgttttgtaccttatactacctactaggtagcgtacctgtgcgttgctacgggataataaatattatgtactaaaaatacatagatcacataataagataacattactataaaatttaagtatcaatattaaaataatattaatgcaaaccacaaagtttatgaaattaacatagtcattccatccgccgtccatatcaccaacgacaccagcgccagtagcgtccttcgcggcaccatgctccttatgactaatattatttatgcaaacaaatatgatgttagtgagatattatttgtgcaataaaaattgaatgaaaaaattgcatttatgagttagtaatgtaatgttaccttacctatggcgttaggacctccttaaatacaatatttttcgtgaaaattccatccgttgttgggatcttcttatccttatcttttttatttgacgtattcttaggttttttttcctcggcattccttttagcatttttcttatccatctttttggccttctcctcttgtgcatccccatcaggtggaagggcaaggatcttaatattcgttcttgatgtggctctagacattgcaacgtacaactgtccatgagagaacaccggtgcgggtaggtacacacccacgtttgggatagtttggccttgtgacttattgactgtcatggcaaagctcaacctaataggaaactgcttcctcttaaactgaaacgggaacatctcgtcatcagacgggcagagcggtattcgaggaaggaatacccgctttccagcatgctgccccacaacaatttccgcatcaattgtatttcttcggaaccctcgcaccaccagccttgtaccattgcatagcccattagcagggtcaatattcctaagcaatatgacaggacacccgagcttcagcttcaagacgtgtggcggtagcccattaggggtcagactattaaggaactctgatggatagtagttatgtggatcatctaccgcggagtcaaaactgtgatacactgtctcacctccctggaacatatcaatcattttcatattgatcatgtccacccaatcgttacgtgtagataaaatcgctcgggtggtgatgtagtctttgtccgccatgtttttatttagatctgggaagatgatgtcgatcaatgtatgaagatctttctctgcatcgccagagtacagaacacagatctcgtctggaatacgtacattaccatctccattaacctcttctgttcctccaccaatacgcaatagataatctgcaaaccatggatcactttgagccctcatgttacggacgagctttaggtggcgtacggattcccaaagatatgaccttcgtagagaagcaccgactatctgagccctggagcctttccgcacaacagggaggacctgtctaaaatcgccaccaaggacaacagtcttaccaccaaaaggtaggtgtgaccgtcccattatatctcgtaggctgttgtctagtgcttcaacattttgtctctttgtcatagatgcctcatcccaaataatgagagctgcttgctgcaacaacttggctgtaccactctgtttagtgaaggtacaacaaccgccctcttgaagagtgagaggtatcttgaaacgggaatgggccgtcctcccacctggcattatggacgctgcgactccagatgtagctgtagccacgacaagcttgtcctggctacgaagttttgcaattagtgccctatacaaaaatgtcttccctgttccaccaggtccatccacaaagaacagcccgccttgtttgctacagaccgcggccattatctcatcgtatgcagacctttgctcagtgttgagtgagtcgcataatagcacatctttaggattctgctcgatgctagcttcctcaaatatctcacgaggaatatggctggcatcgtcgtatgagtgatcaatatctggaagaggaaatgcctttatgtccttccccatagactgcaacatgtttctaatatctattaaaaccatctgttgtaccagatcaggagatggattattacggctgtagtcctctgacattgcatcatagtgttttttccataaccccatcacatcatgcggctcgcaaaataccagtattgttgcgaacagtcttcgcaaagaggaaggcatctgaaataaagtagcttcagttaaacattcatccaaggtattatcttcttcgattagacctctcctttctgcagcttcacgaaaagaaggtagtagaataccatcaactgtcctgaggtgttcgtatgaggtagcaccagcaacattattcaaaagaacacgaagaaagtagcgttcaccctcggcaggatgagcagagatgactcttccaacttggaacacagagtttttccttttctgccagaatttaccatcagactgccaggtaaaatgctcggggaagtctcgatataatattccgcgagcttcctcatgattcttatttgcttcgaagtatgctgtgaacattgactcttatacacctggtctgttaacgattcgttcgaccttgtcccgtttgtgaaatgcaaccatgtgcatgtcaggtagatgaagctgcaactgctgtactggtggatgatttttgctcaagtcaaagccatatatcctccatagcgcttctggaggcgtcacccaacgggcatctctatactgtttgatctcatcaatgtttcctttctcgtcttctttatcggtctccctcatcacaaccgatgccctatcatgtcccttgtatatgtatttgaacagatattttactgattttatgctcccacaagcctcaacatttatatgacagttgaaggtacgtagcaagcaagggttgtaagggacgacccattgattgtcaaggtaatggcctcgaactttttgcatgcgcccatcattgcgtcgtcgataaatggggtatgaatcctttccttgtgttgatgcctcacagaatgggcgtgggtaacggtttttgcatgacccacgacctactgtgcacggacatgatggattaagcaccccacaaggaccatgcatcatatgtttcgtgaccatcttgtatagctcggggtactttttcttgtttggtagctctgcactgatgatcatatcatattgctcaggacatgtgagcttgtactttcgttccattattagcaagaagtaggctttaaccttcccaagtatgtctttttccatcaacattttcctcattgcatccaactttgctctgaagacccgtgtgacgagatctgggcggtcctgtgctgtctggcctgggtaaagttcattcttgatctcatcccagttagggttacaagtcattgtgagaaagatatcaggtttaccatactttcgaaccagagccattgcatccatgtatcgacgcctcatatcacggggtcctccaatgaatgatgaagataggacagtacgccgtccgacattctcagcagacccttcacccgaattcatgctatccaccaagccttggtatagatcagccctcaatgtatcctgattcatcctcatgtagtctaaacgtgagctctcaatcttgatgtaggtgtcgacggcaaactgctggaaaaggcgtttgccatagagtattggattaaatatccctggccgcatctgaaatttgtagcaatagtagtcacgcacggagacacatgtatttgaaacaggttctacaagaagacattgttcaaattagtatcatgagttagcagaaaggattttactttgcattatttaaaagatttgaaattacctccatcattgtcaccattgtcagcacgccttttacgggtttctcgagctcgctcaacttgagccatagtaacacccacttttggaatgcaattgtgccacccaagctcaccctttggaaagaacaatgggtatgacaaggagtcgtaacatgcattatatgggcgaatgccatgtatagaccgatctttcccttggaggagaacactatgctcaaattgaccatgacgctcactaccctcaacccagacggcggcaacctctgatgtcaacggcacgttatatgttctctggtcaaggcgctggtcaaggtttagctcgactcggtaatcctcaaggttttcaacatgccccatactccttaattgctgagagtagggattcccttcaaggatccccaccaattgttgtataacttctctgtctttttgggcacattgctcacgacacttgctcatccgatgatcgagggacgggtcatcatcgtaaaaataaagctcgaggtgccgcttttcgacaccctcctctttaccaaatgatcgtatgttatagtaaatctgaccatgggcacggaacgtgtagacaccgcagatccgcatgttagtggtgatacgatctaagtggcagtacaaagaagtgaaagagaagtgaccattgaaatatctgatgtttgctcggaaatgcctagcatcagcgtccgagcttgaccacaatctcatgagctctggtggtgtctcaggacttgaaagatgaatctttccacccctacaacagaaaccagggggttcgccctcaaacttctttgcgtcgcagtgcttgcagttcggcaccgacggtagcatgtgcgactctgacgggacattagcgtacacccggtcgtatggatcaggctcactgttctcttgctcatctttgtcgagattgtgctcgatgtcagattcatcctcgtcgtcttctgaaaatatgttgatgtgttacacattgaaagcaactatctgatagatttttttaactattacgtgttgtaccttgtccggcaaaaaaatacgcctcgtcctcttcctcatcctcctcgaatatgacaccctcgtcatagtctgtgcagcacaaccatatatatgattagacaaatggcctataaaaaaataaaaacacatagatgtaataaagtaaataccatcctcgaccatagtgtccggtgtatggtcttgtgcaacgttagtaggtattgaattggtatagtcaactgcagacggtttcgtatgtgtgcctgtgcaattatttggtggttgaattagcgtttcctgggtgacaccatctgtagcaaaaaataggtatgagattttggaatatgagagaaaagtaccaacaaaatatagtgatcacggctaattaccgttgcaaagaacactcgattgagtcaggccattcgagtcaatgcactttccatccgtacacactttagttctacctccaatgttcgcttcaaaaatctgattgcgacgtgataaaagggcatttctttcaccattggccactcgcttccgctgaacggtgtgtgctgcatccaattcaggggtctcgccttctggatcttgaactatagttgtgatgtgaaccggcgttcctgtcaattcaggtatctccatattgtttgattggggttcgggcgattgaggtgaagaagggaaaataagttgagggttaaagtgagggctttccatggcgattgagtctggatgcaacttgttgactcggtgttctctcaccatcattttatagttttttttgctctcttttcgtttcaacttcttttcttgtggagtcatttgtagttttcttgtagtatttttgtgtgcattttttgctgcatacaactcacgacgcctcttgtttattagcgccttttgttcaggagacattgcagcccttcgtgctctatctagctcacgcttacgctcttttgtacatgtaacaatattgtcgatggaaccagatgcatttacatcacctatatttacatcacaaaagtaaggtctcaacgtctaatccattaaggacacacaataattaaaattctgtgatgataaagtatacacaacattgtcagctactcttatgttcaaacttcttttgtaattaaaaacaaaatcatgattctataaaggcgtacccatttcatgaatagtgtcgatatctgtctgtgttaaatggtcgtcaatatcaccaggaactccaatggttaaaggaataggaccacctaaaaaattattgatataataagtatcctatgactccatgatatttttgctataagaaaatcaatttgattaccatacttgttgactgggcagtctcatttggagtcatttgtagcatccttgtagacttttttggtgcttttttggttgcatacaattcacgtcgtcttttattcaatagcgccctttgttcaggagacattgcggcatttcgtgctctgtcataatcacgcttatgctcttttgaacacgtgacaagccggttgccgagacctaaatcatattcagaatgtgtatatatatacaaacacaagcacgattcattagaatctcaagcaatggatacaaaaatatacccattttatgaacagtattgttaccttcctcagtgtcaatgttatgcacgtcaccaatgccaccaatcgtgcttaaaggtaccgaaccgtctacaaatataaccatacaatacaaattaaagcattccataaccaaattatgtaagttatagtcatcgcaccaagtaatacttttatttggaaaattagtcacctgataattgttgcaagctgttacaataggatgactgcctatggagccagtcactattttcatcgctttcatttattgtattcccatctacaagtttaaacacaataacaaattattaacccatagaatgcaaattgatccttacaataagcaaactatgtcacggtgccacatcaataaatatgtttattagcagaaaagtaacctgatagttgctcagcaccattattataggctgagtgtacatggagccggtcactattttcactcattttatctgttgtaccccactcacggagtctcttattttttccactactattttcatcagacgttgttgcatatagttctctctccctcagcctcttctgcccattagcatccccatctagtcgcaccaactcgagtcgggtatgattcccttaaaaaaaattatgttattgagttgcaaatatatgaacatagagatatcgtaaaagtttatataccttcatgcgttgtatttgtaaggtctcccaaaggtacccgatcaccggttggccttggtgtgtccatcaacactacctgtacatatctctcacaacatgtagtacactggatagctttggcaacacttgaatagagaggttaacaacttccagcaggtgtttcacatcacatgaaaagctaatttctcaattctttcttgataattattttctataattttgaaactcttatacaacctttttattacttgaaatttctctctatcttagaagatgatctataataaagaccgtttgatttgcttgtgcaacaatctgactctattagttttatcggcaaccaacctaataaattctgctagtatgtacgtgatgctagatgtatccagagttaactgtctattctaaactctgaatgcatatgggtcatacatattctaaaaagtagtcgcaaataaatcatgtctatgatttgggacaaatgaacaaccaatcggaaagcttcacaacttctgtatgatgcttagacttgtgatatcagaatggattcatcttgtgttttggaaagaagacaattgattgtgagtcaataaagtgactgactggaaaagaactaccttcactgtatggctgattattccactgatttgatctacacttgcatttaaatcaagaaaataggttgatagtttacctccaaaatttcttgggtagatcacgatcctttcctgaaaacaaaatcagaatagcagtaaccaaaggttactctaaaacatggaagactgagaggaatatctccaaataaaaaataacagtggtagacaaaggcataaaactaaagttacacaaaaataaaagactaaataaatcgaatccattttttgcagagcataataagtcccgaggaggcagtagtgaataaaaatcggctgcatgcagtcctgaatgatatgcttaagttcaatcatcttccacacaaactttttgtctgcagcagcataaaagaggagaaaatagaggcagaaaaaaacccaaagaatcaagagtccagtttcagtaggtacagcaccacagtgaatatggctaggaaaattcaggcacttgtgaaattgtaggaaaaaagaccagaatcatggtcatgaaacgttttcaaattgggatgaacattcacacaccttcagatactttggaggggtagttagcatggagtttgaaaatttatatttaaataggatgaggattagtatattccctatactgtgcaatagatttttttagcatcatggagtttgaaaatttatatttaaataggatgaggattagtatattccctatactgtgcaatagatttttttagcatctctctacaaatttagatgtactgcaagcatcacttgaaattgtttggcaaaatgcagaatattatttttttcacagaaatcatttagcatgtggattataattttggaggagattgatttcaagaatttgaaagtttcacaacacaacaacctgcactcacttcataaattctgctctgtaccgcaccaggtttcaacaaagacaaagcaaaaaaaaaacagagtttgaggctatcatagttaaggtttatgctactatttttgtttcctcgaattaagtcatttcagtatccaaatcttaacgtttccttgactcaatgaaaacagaaaagctccatttttaggtaaaggaaacttcgaaagtttctgaagtgtaaatataaagtgaaactcaagataagcacaatggtctgcacatgaacacatgataatctttgggaccgagttatagattaagacattcggagctggatagcacatgtaatgtcaattcattttggcgtagaccttcactaatgcaaccgagttaaaaacaataagacatttgggtaggaatgacggctgaccgtatgcttcgagacaggatgaggtatgcagggagttgctgccgtgagctgcttggagtcagattgatcgacgtttcggtcgcggtgattcctcgtttcctgttcaccgacaccaagcggctcaccgtcgaagcacaacgccggtgctagtgtcggtgctgcccgcgacgacgacgtgcgctggtgcccgctggtcgaggtggagaaacgtaggtgcggcgacgtggtgggaacggcgttggtgcctcacggtgtcaagggattcgcgatgtcgttcgacggcctcacgttcgcgggtgcaggggtcacgggtgcagcatggcgtccggcagcggcccgtcacgagggagatcgcggaggtggcgggacacaggccgcggaggcggatgtggctgcggacgggattgagccggtggcgacggaggcggcgttacgcaggccgcggaggcgaacgtggctacggacgcgattgagccgccgtcggcggaggcggcgggacgtccgccgcagaggcagacgtggctgccgacgggagtgagttggcgttggcgtaggtggctggatgtctggcggaggtggctggatgtccggcagcggcccgtcctagcccgatgaggcgtcagcggaggcggttgtggctgcggacgccgacgcaggagtcgcgtgcgctgggcaaatctctcgcatgcgttggtcaaatttccttttaataactgacgcaaatctctcgtttccttccttgctgcatgcgttggtcaaatttccttttgagtagagggtgggcccgagtttatttcctttgtcgcatgatacggtgaatcaaaagtgaagcgatcatttgtcgcacgatgctggtgtctcctctttgtgctttttatttgtgggagattagtggtaccaacattccattatttctgatgcatacatttcatctttattttacaggtggatcctcaggatattgtc

SEQ ID NO: 5060 - DNA, 4747 bp, Sorghum bicolor
  Intron number 1 from transcript Sb05g019050.1 (locus Sb05g 019050) derived from phytozome v7.0 (chr-ID chromosome_5; pos 46394945 to 46399691 reverse strand)
accgcgcgcgcgccaccgccgccctcgtctgtcgggtgagcagttcttcgcagctcctgctgctgggttacgttgctgcgtctgcacttttgtcttggaatgcgcctgaattagacctcacagcttttatgtcatataaactcacaactcacttatgtcagaaaatgaaaacagtgcttgttatttcggcatctgcattgtactttacatcataaatcataaactctcgtgtcagcttggaattctccgtgttgtgctaaaactatgatcttttgaagaaagggtgatatcttgcgatgtgaacattagttcaaagaagtagcctttgttgtatcttctgtttgtttgatgtacatctcttagatcttgccattaaaataggtgacaaaaggtgctctttgctgtatgctggctaggctggtgggtaaacatggtatattctcattgtgtccgattctcggtaggtttagctgcagatcatcattagtttttcattcatccaatctttaacatggggccatgggcagccattcccctgttatttcaggaatgcctaggcctttggtcttcatggtatggaatgttgtcctttatggttgcacaaattgtcttaggcactgataaatgtacaaaaacttttttatgttctctgattgcaaatcacaactagttgatataggtacttctgtgattcttgggtgagaaagcagtttcttatctcccatgtcagttttcttcccattttatttgattatttcacacattgggcaagagactgtcattcatttatcttttgaaataatttttgttatgtcattacctttaattgatatataacagttgttcgtaatattgaaagcctgccacttagtcaatgatgaagctgtgttttgtcatgtaatttttttccatgagaagatcaaatctcttgctgagagtcttccggatcttacaccaaattttgatgaatctgaggcagttattttctttctttctttcttttttacattgttcgtaagattgaagtattttatggttccttcggtgttttctttaccttttgagcttctgaatagtgcactatacacttcagcaagacaaaatcaaatattactacactgtacacttatctcatcacataacagtttcacatatgtgaccattgataggtatagaaaacatagataggaaaaaactgaagggaccaggacgagtctcttatttttgttttgctggaatttgtctgaagggactggttgtggtaatataagggtgcgtctttagtgaatgtggcaaaaatgttgacaaatggttaagtttcatccaaaagcatacttcgaggatttggaaaaaaacttggcatatcaatagaccatagtcactcatagatgtactttgttgtaaaagctgagattacaactcgttctagattagttcatacgaaaatgaataatttgggtgccaaaattttcattttcatatgaattaatctataatgagtttgaatctcaatttttgtgacaaagtacatcataacatgaactacgaatgcaccaagttttagattttgttgaatttcaaagtatacttttggatggatcttcaacatttccaatatttgtgccattttcaccagagatgcacccacagatagggggtgtttgggactgctctgcttcatgttttgcagctccgctctacgtttttcagccaaacggtttcagctccatgcactcagttcaagaaaaaaaaggtggagttgtgagagcacctaaagaggtactccacaaactccagttttttgtggagctgctccatggtggagtttgtggagcagtcccaaacacccccatagtatgcaccacatgatactggcatgaacagacaagcttttgtatccaatgcatcgtaacctgaaatggatggctgttgagacagcttttgagcatttcttgctgcctttctgtaatttaatggtagttaatttacaactgggaaaaaatatctcaatgctttctgctgaacagtatctcctaggaatgataacagtaacatgagtgcctgtaagtgttaaattattaatgctgtttcctgtaccctaggaataacaggaatgtctttagcaaaagaatgaaataacgacatggaataaagctacgatttatattgcattcggaaataatgatgtggaaatgctctgcatgcaaagattcaatgcttttatgtgattttagtgggtttggtactaaggcaggttaggggtgttctaaccttgttactgtcctcctggtcactatttaatcctttagtggcatctgttctgttttgttaaaccggtgccaggtgtgttgttgtgtgtaagcgttgtgttggatgtgtgagttccatttgcatttgccttttttctctacttaagtgaagtgacacacaactcttctccatatccgagaaagaaacagtagatttggtaaaaagcgctagtggtgagagtgagatacgagagtatagatttagcagcaaatctaaagttggacatagctgagctgatgtgtctagcagccatgctacactgctactgcatatggtgtttttcttcttggagagtgcacatcttatgcattcctgtttatatccatttgagaccattacacttgtttacggtgtcaaccttggaactgttacgcttgtttattgtgtcagccttggaaactatgtccttattaggcgataattgctctttttgcagtagaacaaaattttattgaagatgttccttggtgatcttgagaaaagtcatgcattatgcatttataatatgattcatttttcttaagacaaatacttgttccttaaactgtgttcccttatttcagatggctactgctgcatggtttagctctgcaagccattctactgaaaatatcaccaagatttctagcctctgttggtacctatctattgcagattacgttccataagttgccttagtttctgataatcagtggaaactaaatcaactgagactttgctacttgcctatttctgcgatgatatatattttttggaaacttctgctacgtagctatttctacatagttatttctaaccatagcctagctttgtagacctaacaataccttatacgattgtaccataaaatggttattcctcaaatgcagacatgcggaagttgtctatcggatttggttatagatggctacaaatgggcggcatgaggcgcatgccctgttgaggtgtgccatgcttgggcttgacctttgcctgtagtgccaacgagcatggtccgtttactggctggcctgttaagtggtcgcttcatgaaaaccctaactaccgtatcacccctcctgttcccccaccctgtctgccactgtgctcggctgctcgcattctggcaccgttacccttctctctgggctctggccatcccctcccttctcagcactgctctctttcactcctggccactgctccccacctcttctggctaccgctcccctcttcttctggccgcgcgctcccctccctctcctccagacctcccccctcctgtgaacagctggatggtgcggggtcgttgcggaatcagatggcggcgtgcggtggtctgtgagatccaagatggctgtgatttgtgtatatgtggtgtatggatgatgaattttgtgtgactggatcggatttgtgctgttgtgtatgtgtggatgatggatctgtgactttggatttggcttgaactttttggtgtcattgagttcttggattctttgatctcttgggttggtgcaggcacactggctcaccaggctgatgtgccggcacatgtatggttaagtctctgttgtaccatgcctaggctggccgatgagcccattggtgagcacggcatggcacactagctaacgatgtctatcgtgtctgtgcctaactgtgtctttcctaatcatgcttgtgccatgctgtgccacctgtttagccatcaatagatttgatgatgtgttttttttaaaacattagatgctggaaatgttagtttctttatttaaggatcataacatattttcagacttgactctgacttggtatgctatgtgctaaatctgttccttatttcatggtaaaaccaatccattacattttttaactgtccatttttcgttacctgggatattttaatgatattttgtatgcatgttggcttctctcttagttgtcaatgattgccctttttctctgtattagccaagaactgtttctaaggccgtgtttagtttgtcgacgaaaaattttcgcgacactgtagcactttcgtttgtttgtggtaattattgtccaaccatagactaactaggctcaaaagattcgtctcatcaatttcgaccaaactgtgtaattagtttttattttcatctatatttaatattccatgcatatgtttaaagattcgatgtgacggggaatcttgaaaaattttgggttttggggtggaagtaaacaaggcctaagtctgaaccccaaagctttgatttttgtgtaagcaatttctagcatctagatgtaaagtacaaataactatttttggcaacattcattctttctatagcttcttacatggcacatgtgtatctatacaatttacttttcgtttaaactgcattgcagtttgtaatatatgacatgttatcctgcaggaactcgatttcccagaggagcagatccaactgtc

SEQ ID NO: 5061 - DNA, 1094 bp, Sorghum bicolor
  Intron number 6 from transcript Sb06g002790.1 (locus Sb06g 002790) derived from phytozome v7.0 (chr-ID chromosome_6; pos 5551522 to 5552615)
ctgtatttgccaggtaatttgagaactttgtgttctcttaaattgcttgcatagatttgtttgataggaatttattttacagatcagatgccatattctgacataatgattcatccactgcattattttcactggtggttctagtatggcatgatgtaagattgtggtgtagtggatgcatagttatcaattccattccggtaccagccagaatgaccggtacattccattccatctgtcaaaccgagatgcaaatgacttcatcctgtacttgttaaattactggccattccggccgttgctctttgtaccggccggaattttaaataccagttgtatcggtaccgggaacagcagctggctttgagggagattctgcatgcatgacagccctttagcaaacgcacactgcccaaggtttcacagagtgatcctctctctagtctctgcactagtacacaagtaaacagctgctgtaaaggagtgtatttttctttgactacatgcatccatggttaaagaatggtaattttggtgcaaacatatatatatatatatatcatgcatgtataaggtataaattagtaaacataccttaaaataaataaatatgcatatggatgaaagtatttaaatttttgctacactctgaaacggtacactggtattgtccggtaccgaaacattccattccaaaagaaaaatcggaatgatgtccggaatggaattgacaagtaggatgtccatgtactgtgaacaaaccacatgattatttctggaaggtggtccctgctgtgtgtggagtgtccacagaagtgttggcctgtcttttttaattgttaatgggatgatttgtggtttcttgttgcaacctgtcttttaattgtctgtggcaccaatgctcttgtcaaaattcaggagttaatataataattgtggggagcatctcttgttttatttgcttctctaacttagaatgggtttattgttttggctaagtattattattgattctactcatttaattcgagatatcagtggtagttcattggcattactgagcattgttgacccttgaacattgcaggaagact

SEQ ID NO: 5062 - DNA, 12645 bp, Sorghum bicolor
  Intron number 4 from transcript Sb10g011100.1 (locus Sb10g 011100) derived from phytozome v7.0 (chr-ID chromosome_10; pos 15562156 to 15574800)
ctagatccgtgaaatccactatctctcactttcaggtgagtgcattggcaccatcacatgtgcatcttgcctttgattattataaaggtaattttctgtaaaataattactagaggcataattggattgaatcatttcaaatcagatgcctgaaactcttttcctagtgtcaagcacatgtaggacaaattaaaatgctgcactaatatttattaaagtgatattgttcacctgtctgaaaatgtttcagtagaaagtatttgttcttcaaaagcataaccagcagaatttaaataaattgtggaatccctcttccctatattattgacttgcacttggatttttaccttcattctttgtgtatcatacaaagctacaaataaactgtaaagttgtagtggatgcatttgtgggttgcacttatcagcactgtgagaggagtggcaactacagcagcctgaatcaatggcttcagcaattgagttgcctgcatgttcagttagtagggcatcgaccacagcctagagatttgcctgcatcttcacttagttaagatatctagttaggaggataagttatcaatttgcttgttagcctgttaggtgctagctctatatcaaaggcttcagcaaagagttggattcaagcagaagttgaaccctaaatcaatcttattcaatgcttctattgagggaaaaaacctccactttctgccccctcaatccaatctacttgcccaaatcacaagtactgtccatatgttgcggtgtgggggaaatgggataaccggagccggaccccaactacggaggctgaagtcatgatcggctgatgggagaggttgttcccctcgatgccctgttgtggaaggagcaagggttacggggaaaggaatacttctttgttgattatccctaatacagtccaatgtttaagtaatagtctcaggagcaatcttagacacagttctcttactaataaggataacaatccctaggttgatatactacatgtggtagttgcctacgtcattcatggcacctacaatgtgcctgtcgtcgtgccaatcatccttgagttgtgcttgccccacatgtcgctaactatgggataacagtcaaagaatgaatctacaggctcccatgtcgctagctgtgagggtcctttctggggggctggctagggatggccagtgtagggggcggtggcgcagggtgagggcggctgctatagagaggcaggggagaagaccaaggcttagaagggagaggaggggatagaagaccttaggccaattccttgcttacccttgaacggttacattgcccctctatccctctatttatagtcctaggagacttagccaataaacaatctaaacttattccccaaggaactagagaagagtcgttatagatttggattttctttacaagtaagccgattctatttcctaaataaacctgatctattttttttggacaagtctctaactattttattgtagactttccttttattcttgatcctcctagatatttggaagtcggcgaagcggcaggaggctgcccctccgctggtcgtgccagccctcctggtggcgtggttgtccaaggcttggccggcttgggccctctcttgggcccatttttaggcctgtgacatttctcccaccttctccagtcggcgtgtcctcacgctgaatcattgtagttgttctccgtgaagaggagtgtcgaggttgttatagtgtggaaacctttgacgatcatgtgccagtttgtagttcgtccaatggcaaagagggagtccagcgagttcgaccatggtggtgattgtgcctgcaggtagaagtaccttgtcgaagtcgatgatgatcccttggttaagtgaccaagccgttgttgtagtgttgcccatgatggtggagttgactggtagccctgttgatggcgctagatgctggtggggtggcgccgaacaatagaagtatttgttggggctgaagatgatcccttggtcgagtgaccaagcctgtgttgttgtgctgcctatgatggtgatagtggtacgtagtccatgctcttccttgaccacttgatgaatgtggtcgaggatggtggtgttgggctcaatagtgtcccacgtgttcatgcgttggggtccccctctatagctctggttgtcccatggttgctgtcgagggagaggctgccacggctgagaatctcttgttgcatgtttggggtcgacttgtatgtcattgtcgtcgatgagcaggatgaggtggttctcgcgtttgtagttgtgggtggggtgcttgtcgtaggtgatgtagatgttgatctgttgttgcttatccaacacctcaaggtggcatgccgaagtactcgatgcactggccgatgtgctccctgtccgttgccggtttgatctatgtcaggtgcatgtaccgtagttgttgtgtatctattagatgaaagattgtattccgattttcatgttgcggggggcatgttgccctctgaaggactcccagtagtggagccacatcaatgggtctgtcgtgccgtcaatcattgggaaggccagcttggcgtagcgttattgtggggtcagcgaaggtcctattgccaccaattgcagcagttgttgcggaggtataggcgccgagggtattgcatttggaggtgccactgtatctgctgtcaggtatggaagtagaagaggtagctgtgccataggtgttatccctggtttagcattggtaatgaagagattgtctgtctgctccttaattttaagaatttttggcaatttggagtcatccatctgctcatgatgggggcgcactctaccatctccctgacgtgcttgttttcctctttgagttgttctgcgacgatctccttttcttattttaccttgatcatcattgcggctttggagtcctgcggcttgttttgcgattgaattggatctgttatcgaaggagaattgttgcgcccatcaaagaactcattgaacttcctcgtccaacgattgatgaatgctgaagtaattttcgccgtcctccttggagcgtgcacgctcgatattgcttaggcgggtgttgagattggtgatgtgtacctcgtcgaagtttctgttcatggtggagagggtcacgatttgcttcatgtcgtgatcatagtggtggtgaccattagatccatcaggtctctagatactaggtgtcatagtcctttcgcggggggcggctggggacgaccggtttagggggcggtggtgcaaggtgagggctgtagagaggtagggaagaagaccgaggcatagaaggaagaggaggggatagaagaccttaggccaattccttgtttatccttgaatggtacataacccctctatttgtagtcctgagagacttagcccctgaggaatctaaacttatccccaaggaactaggagaagagtccttatagatttggacttctttacaagcaagccgatcctattttctaaataaactatctattttttcacctattttattatagtctttcctttattcttgatcctcccggatatttggaagttggctatcggcggcacaacgggaggccacccctctgctggtcatggccccctcctggtggcgtggtcaaccaaggccgggccagctgaggccctctctcgggcccatatttaggcccgtgagactaacaaagctggttcaccttaacactgaataagcacttggcacttgccactcaccacgcactagtcctgccttgactacccgctctagttctcgaaccgccacaccatgatgcattggtggtaggggaggcagagcgtctggcgacacccacggatggtttgagcaaccttacatggaaggcatcatgaactcatgcacatgacggtactgccaatcgcatgaccacatcattgatcttggtctccattcagtatgatccataggatccaaagtagtgcggtcataacttgccagtgctcatccctgaatggatgctgaagttcggtgccaaatgcgaagctaggcctagatgctcatgttcatcgagactgcgcggtgcttcttgtcctagtgtcgcttggagactgcctgttgctccaagcggtagtggatgttggcgagaacttcgttgcgctcagtcaccctaggtttgtaggagcgtatctatggagggcccctaccatatacgatcttgaacgcggtctcgcaaagcgatgtctggaacatcgtgttgaatgtgtgctcggcccaaggtagctagcggagccattggcgcgaacgatccgcggtgaatcaacacaggtacatggcaatgaccttgttggctacttttgattgcgtattagactgagggtggaatgttgtggtcatgtgcagccacacacctagaagggagaggagctcgagctagaatgttgagatgaagacggggtcgtgctcatagacgaccgactgggcacgtggaggcagaccacctcgccaaaagaaccttagccactgcatccgcatgtaagggcatgctagtgaaatgaagtggccatacttggagaagcggttgatcatgttgaggatgaccaacttgtcgccaatctttggaaggccctccgtgaagtccatcgcgatgtcagtccacactgaggccggtaccgacaatggcatgtggtggctgatgggatgtaggtgctctatcttgtagcgttggcaggaggtacaattgtgcacaaacatcctacaccaaggcacaaagttgggcccgtggaagtcatggcaatggcggtggagcatgctctagactccatggttgttggtgtggatcacggacatcacatcctatagtagtagcaaggatggcatgaggttgagcttggagtcatagatgactatgccattgaccaccgactagggcgcagaacatagcttccactgaatcggaccgggtgaagctgttcttgtggaggagtgccgtcaatggggccgccaccacatcgtcctgtagtagtaccccacaaggttgaggaagccacatagggtctgcaccgatcgtggtttcggccattctgcaatcgcaacactttgccaaagtccatgtccacgccatttgtcgagatggtatgcaccaagtatgagatgtagctttctccaaaggtgcatttggaccgtttgatgaagaaccggtgttgttgaaggacgaggacagtgcaaacgtcaaggtctcattgtaatcagcataccattgctctttagtatgtgtgccatccgagctgcagttggtcgacttcttcactagagcgcaaactagagagcaacatcggcttcacttgctctaactcaatgctttggatcctccacttccgccttgagtttgaaggagggtgttaagtgaaagctcatctactactggcccatatgagtgtctatatatacctctccactaatggagtgattgcttatcttctcatatccccaaggttagtaacaacaggtgctaccaacgctatttagaagttagaactatgagaaagagtaggaggcaataaatggtcctacgtgcaagcatgggtacttaggccaatgtggcgggatacggtgcccaaatggccctgcatgaccatcaggggtcatttgaacattattaggtacttttaaaggccacaatatcatgttctatagttaaaggggttatatagtcagccatggatattttaggtggttatgtagactttttaatatgccacatcggggaaacaatcttcaaaaccgcatcaggggttatttaaacagtttttaatagtttaaggggtagaataactagtttttataagggagggggtgtagacaaccaccaatagttaagggagttaagtaaaatgaagactaattgtcgtctttttttttgcgactttagactttcattcatataacaccatcagagttactatcaacagtgaccaggttaatgacacaggatggagcagaatgccactcttccatcctattgtccacagaaacctgcttagctagagtatgagcaacttggttacaagatctacttgaatacatcaatttcaaatcagaaaacaatgaacaaagctcccaagcttccctgatgatcggcgtaatccgcgatcgttggttcgccccaaccttccaaagtttcacaagttcttggctatcggttttgagatatagccgctgcactcctcggtctcttgcaaaggccattccgtctctgagtgctagagcctccatggttagcgcttccaggccatgggggtagcattgtgcacgtcctccaccaaagtttccagcaacatcacgcagcacaactccagtcgctaaagctctgtctgtgttgcacttgatcgacccctcttgcggtggttgccaaacaggcatagctcgctgcagaccactttgtcggcgtgggttacttagcagtcagaaatcatatgcatcaaccatggcggcgtacctgagtggtcgtttgacatcaccatagcggcaggagttcctgtcaacgtagcgatctagggtagccggccctcgactacggagttcgtagtctcgtgccgtgtcttccagtagcggaggttatacccctcacggctgcctgggcttgagaacgagagagagggtagaagataatagttcttgcttgattaaaccaatcctgattacatgcataaatagtccacggtgctaaccatatggagaaattctctcctaaataaaaggaataaatctaatttatttcctaatcctagccaccagtcggttggccctcccttgcttgcgcctgcccggcctcttggcctctggacgcggctcgctcggctgccctgcgtacgttgtgggcacggcatctcgggtgtaggggatgccgcacatggcatctctcccccctcagcaaccagctcgtcctcgagctggaaggacgggtacttggcggagaacgcttcaaggtcttcccacgctgccgaggctgctggttcgcccttccagcgaatgagaacctgctgaacgccacgggccagccgggtgcgcaccgcgtgttccggctcaggattgacagccccatgctgtaccactggcagcagcggcggggctgtcggagggtcgccaacccacttcttgaggagaccgacgtggaagacatcatgtagtttggcgcggggaggcaactcgaggcggacagccacctcattgacgagctgggtgatgcggtaaggcccgaagaagtggggctgcagcttccccttcgcagccacggacagggacgccaggggtcgttgacgtagtcgaagcagaacccagtcccccacagcataggagacgtggcgatgagatgtatcgtagtgacgcttctgcaccgcctgagcctgctccaggcgacagcggacgtcagcgaggaacgcctcgtgctcagccatagtcgaagcgacaacagccacccgagtgtcgcccgcctcataggatcggatggacggagggtcccgtccatagaccacgcggaagggcgtctcacgcagggaagactgataggcggggcgaggcgtggcgagtgactaccgccttacacttaagcgagtaaggcgtaaggcgaggcgacgccttaccaactaaaggaaattttaaaatatcagctcagaggagtatatagatgataaagaaaaaaggaaaggaaaaaagaaaaagaaaaagaaaggaggagtaataaatggtctgtcccagcccacgtgcaccaagcaacccatgtgcccctcaccctagtagccctagcatgtgtcttcatctctctcctgcgctgcctagtcctgcaactacttccgtctccacccatctcggtctgttccctcccgttccgcctctgcctccacccacctctctctctctctctctctggaggaagaacagaggaagcgggatgctgcaggctagtaccgattgggggaagatggccatggcctgcaggcggccgctccttgccgcggcccgcacaggcggccacacagctcgacagtggtcggtcggcaacttctcccatcagctcaggcgagctgcagcttctggttcccctcccgctctcctgctcactgctgtggaatcttctgcgcgcctgctctctccctcccgctctccctctcactagtgtggaatctaaggcgagtcgtctgctatggcgtcgtgtgtgcagcgccttggcgcttaagcgacgtctaagcgacgcctaagcgacgccttgaaaacattggttatatataaattccacccagggcagccaccggagccaatcccgcgggcggtcgccggtgaagcagcgaaggtacatggcgatgacgcggttggccgcctcggtttggccatccgactgcgggtgaaacgccgtggtcatatggagcttggtacccatgagacgcatgagctccttccagaacgtggacgtgaacacggggtcgcgatcggagaccatggactggggcatcccatggaggcgcacgatctcagcgatgaatgcctgtaccacagtctcagcagagtacgggtgagccaacggaataaaatgacagtacttgcggaagcgatccaccacaatcaatatgacggacttccccttcacgcgcacctcggtcggaacgggcagcggtaggaggaggccggccgggtgcagatgctctgtcttgaaacgttgacagacggcgcaggcgcgaacgtaatcctagacgacgcggcgcatgtcggtgaagtggaagtcacggcgaaggtggtgaagcgtgcgctggacgcccttgtggccgtcgtcgtgtaccgcggctaggatctcctgtagaagaggcgaggttggtgggacgtagatcctactgtcgtagatgaccagcccgtcgaccaaggcccagggcgcagaccgagtgcccgctgcaagctcttcccagatggcgacgcgggcggggtcggtggcgtgtgcttggcacagccgctcgatgtagtcaaaatgtggggcagagaccgccagtaccacgccatccacggtgttgcgcttggagagggcgtcggcgacgacgttctgggcgcccggctcgtactcgacgacgaagtcaaagccaaggagcttgctgatccaatggtgctgcgggatcgttgcaaggcgctggtcgaggaggaacttcaggctatagtggtctctccggacggtgaagcgccggccccagaggtacggccgccaatgcctgatggcgtgaacgaggccgatcagtttccgctcgtaagcggtgagagaccggtgccgaggcgcggcggggcggctgaagtaggcgatggggtgtttgtcctgcagcaacaccgcgtcgaagccatgcgtcaaggcgtcacacttcaccacgaagggcctggtgaagtcgggcagcgccagtaccagagccgaggtgacggcggtcttgagggcctggaacgccgttgtggcgtcagcggtccaggagaagccgcccttcttcagaagggccgtcagtggagcggcgatggtgccgtagtcgtggacaaacttgcggtagtatcccgccaagcccaagaatccccggaccgcccgagcggaacgcggctgcggccagtctcggaccgcctggaccttggcgggatccatggcgacgccggtgtcggagatgacgtggccgaggtaggcgatggaggattccccgaaggcgcacttcgagcgtttgacgaacaagtggtgctgctgcagcacgctgaggacggctcgaagatggagaaggtggtcggcccacgatgagctgtagattaatatgccatcgaaaaatacaagcacaaaccggcgaaggaaggggcgtaggatgtcgttcatgagtgcttgaaaagttgccggagcgttgcaaagcccaaacggcatcaccaagaactcatataggccgtcgtgggtgcgaaacactgtcttctcaatatcggccgggcgcatgcggacttggtggtagccggagcgcatgtctaacttggtgaagaatttggcgccgtggagttcatcgagcagttcgtcgaccatcggaatggggaacatgtcttgacggtgatggctttcaaggcgcggtagtggacgcagaaacgccaggagccgtcggccttcttgacgagaacgggcgaagagaacgccgaagaactccggcggatcagcccctggctgagcatcacggcgcactggcgttccagctcgtccttgtgtgtcgcggtgtagcggtaaggccgcacggcgacgggctgggcgtcaggctggagcgtgatgccgtggtcacgagagcgcggcggtggcagcccctgaggctcggcgaagacggagtcgaaggagtgcagtagctcgtcgaggagggatgcggaggcggtggtggagcagatggccgccgtcgcggcgccctggacgcacggccagcagatcgtgcggccttgctgggtgaaggacatggtgcggcgctggaagtcccacgtcaccggtcccagcgtgccaagccactgcgctcccagaacaacatcgtatcccgctagcggcatgacgaacaggtcggtgcggaagacgtcgccctggacggagaacgggacctggcgcagaacgcctgggcaggtgacctgctcgccgttagccaccgttgccgtcatgcgtggccgggcggagatgggcagcccggtgcggcgcgcggccgtctccgagatgaagctgtgcgaggagcccgagtccagaagcgcggagaagaggacgttgccgatggtgacaccgatctggagggtgtcggtgaagcggacccccgccagcgcggagagggagaaacagggtgacgcctggggcgtgggcgttcctgcgacagcccatatggtgaacacgggcgcctcctgcgttcctgcagcggcgctgtcgccctcgacatcatcaatttccaccccgtcgaggaagaaaaggcgccgacaaaacctgttgtggccccgggtgaatttttcgttgcagtggaagcataaaccttggcggcggcgttcagccatctctttcggtgtgagacgccgcgggttgccctcgccgcggctctgctgggaggccgccggggggcagggagcgctaggagaggcgccgacgccggcagggcggcctggggcgctggcggtggaggagggccgcgcggcgccaggtgcggtagttgctgtatccgccggtcgctctccatcagttcgacttggcgcgccgaactcatggcggccgcgagcgtttccgggttgtggatgcggacgacgtggctaaggggtggcaggagtccgccggtgaatagttggacccgctgagcctcgtcaagacgtcccgcgcgaggtaggagagcctggaagcgattggcgtattcttccacggtcccggtgcaccggcattcaactagctcgaacagcggggctgagcgtaggggcggcccaaaccgcaggttcaggagctccttgaagcgtccccatgttggcgcgccctcgtcctccagcagttgcgtgtaccaaagttacgcgacgtcgtccaagtggtaggacgccatccccacgcgctcctcggccatggtacggtggtggcggaagtaggagtcgaacttgttgaggaagagcagtgggtcggtcgtgccgtcgaagcggggaaaatcccacttcttgggtcgcggagggaggtctaggtcgcgtggtgcctctgaacggcgattatcgctgtcccccgacgagaccggcctctcgtcttcagggactccaggagatcggccagggtgggttcgctcatggtggatggctggggtgctggcacggtgggctagggttttgggcggagcggctggaagaggatcggcgtgactgagataccaggttgtcaagggcgtagcgatctagggtagccggccctcgactacggagttcgtagtctcctgccgtgtcttccagtagcggaggttatacccctcacggctgcctgggcttgagaacgagagagggtagaagataatagttcttgcttgattaaacgaatcctgattacatgcataaatagtccacggtgctaaccgtatggagaaattctctcctaaataaaaagaataaatctaatttatttcctaatcctagccaccagtcggttgggcctcccttgcctgcgccagcccggcctcttggcctctggacgcggctcgctcggctgccctgcgtacgtcgcgggcacggcgtctccgggtgtaggggatgccgcacatgacagttcctctgcatccacagggcatacatgctgatgatgaagatgcttcggttcctgtcattgcacagcttggccagcaggtcacttgcccacgtcactgattgatgctactttaatctgtttccattgcatagaatgttatttgttcaacaaaaaaatgacttttttatacctgaagctgagaaatttagtatgggacattgaagcatgatgtctacctgttattgcattactctgtagttcactggtcagccttgattgatgctgctttaatctgtttccagtgcataaatgttatttgttcaacaaaataaatgagttttttgtacctacagctgagaaatttagt

SEQ ID NO: 5063 - DNA, 3522 bp, Sorghum bicolor
  Intron number 2 from transcript Sb01g032180.1 (locus Sb01g 032180) derived from phytozome v7.0 (chr-ID chromosome_1; pos 55043926 to 55047447)
cctggtccgccgcgccgtggggctcgctgaaacgggtacacgttctgcctccgttcacccgtttctcgctccttgttgcatgagccggtaacaaaattaacggttcagtttaggcgcggtggatgtgcgtgcttgctaacctggaagcaaaccttatgaattatatgatcgtccttttgtactttccttcttaattgacttccatgcgtgcatgcgtcatctaattcttagtgtgccaaatgtgattcgtctgttccatccggtgacttgctcaacggaatctgattgtggaccgctggataggtttgttcccaattggagtgtatcaagttttgatctgtggataagaagatgtagaactatttaggtgcccatgctgcaaacatcaggtgttgttaggctacctgcacactagaaagcgattacagagctacaatgtgatctacacacagtagtaataaaataataaaaattagctaacacagtggaaaagggggtcaaattgctattgctaatctagtacagaaaccgggaaaaacggtgtctaggcgtccagcacacattattaccctgttcaacctcaaccgctctgctaagtagtttccataagctgagtttctttttctgagaggagtggttgaatgcccacatgtatgaggaacctacttatttagttttcctagaatgtttatgacctatgattgtcagcatggggttaaaaaggttgtttggttaatcagatatatgcactgatttcttttctagccatgattagactataacaacttttcagtttcaaattagggttcatattattttcactgaacatcatatgcttccccatacccgtgcaataatcagttatacttatactgtaccaaggaacatttgattataaccaagtgccccaaaaccataacagtttagccaagtaactaagccttgtctggctaatgcactgccaaaacttttcacgatgcagcctttctcagctcaatatctgggcgtggtttcatattatccaggtctggatataaaacttgcttctctatcctacttctgtgtctttctatttcttatttatcagtaatcaaagaagttggtttctggttgaacattcaactgcttgactgtttttttgctattactaggttgcttcagagaaagataattctagggtagattgttgtcattttccttattgtgtgcacactatgtttggtattaccccaatctgctttgcatgcagcaatgatcttattttgtagacaggctgaatatctgcatggacacagtccaaaagcttatgtctccatctcctgtattgtttcaggaagcattttcgagaactacttttatctgcttatcagatggaaaagcatctaatttatttctctgaagcatttttactttgaagtgatttcgtaatttgagttttgtttttttggacaaaaacatgaaacaccactgtaccacactccagacttaaaaaaaactcagttttgtatatagcttcataagttctttgtaattgttataagatcagccacttatcagcactagctaatagttcaagcaatgcatatgctatagcaatagtggattgttgaattatgtatgataggcttgttagaagaatttcctaaagtatatcttgttatttaagaactcttagttggatataaatcttttcgttcacaaaatggatgtacctttgttgtgcatatcaaattttgttgacctgttggaaatgttgtttcttaattatagtactcagtttaaaaccagcagaaatgaaggtttaaaacaaagtgtcagtattacctgataaaggtatacaccctccgtcccaaaatcgttgacgttttaggtttggacacgggaatttaagagtgaaaagatgtggtgcacagaaaacaaggagagagatagagaaaaatagagatatgatgcattgggaaaagaaaaaggtgtattgggagaagagaaaggtgcattaggaagttagaatgacaactactttgtgacaaaatatgaatcgtataacgtcaactattttgggacggagggagtatgtcattgacacacagtttctctagagaacttcttgggtctctgttccttcctttgaatgattttggtgtagctatacagtctggcctatgtgaattatgcacaagttaggtgagtttaagtcaactgcacaatatttcttttactcctaaaagtcttgtaacaaggatgcactagtaagtgatactgtcatatggaacataacataattttcatctgtatctagctcatatttgaagctaaccaagaggctaaggcttatttaactgttttcttcttagacatggtttgaatgctttccactttcttatgttcagttttttctttaaatgacatgagaaaaaatgtggcccctgttgtcttatatagtttgagtattaccattacattgttcattaggttaatatgtctgaagagcacaatgtttcttttctactatggccttgtttagttcgtgaaaagaaaagtttttaggtactgcagcacatttgtaactatagcaattagtgtccaatcatggactaattaggcttaaaagactcgtctcgcaaaatacatgcaaactgtgcaattagttattttttaatttatatttaatgctccatgcatgtgttcaaacattcgatgtgatgaggcgaaaagtttttgggtgggaactaaacagggctgagtatcctgtgtagtcatgctttaattttagtaaaacttgcttagtgttgactattgagcagtgaaacttggccatctttagttccttcgcttgctccagcagtttccttatctagcctagccaagcaatgtgttgtttagatctgaagaggttgctttgagtgattgcttcagttatctattctatgatttcaaaacaaaagaagcaaacaactagtgcccctaacatgtttgcatcagcctctcctcatgtgggctagttgcttcatgccgagcaacacgaggtgggcagtagattcaaatgacccttatgattgtcactctatgctgatctctgactagttagatgtttggtattgatatagtgatatctcctaaaaaatatgtttctattatgtgtctttactttcctatgcctgtatgagggtggtttagagtaaaagtgctagttagctgtgtgcattcttgtgtttgtattacacttcatcgtttgcctacttcttttccctgaagaatgctagtatttcaaattatcccagtgctacactctccctttggtaataatatacacttacacagtgatcttatttgaccttccatcaacttacatgcatctttctaagttcttatagctttctgtctcccctctttctaaaataccaacatcagctatacattgtatttttcttattattgccgttgttctaggtggaagctctgatacatggttcacttgttgtttcaggtctactcccaagtgaaatcagcctcttcaagata

SEQ ID NO: 5064 - DNA, 3239 bp, Sorghum bicolor
  Intron number 5 from transcript Sb10g025620.2 (locus Sb10g 025620) derived from phytozome v7.0 (chr-ID chromosome_10; pos 54991805 to 54995043)
cgaggtaatttcattactaatccctccttttgtaaactatccttttgaatcgtgtttcttagctcacccatgttctttgcttagattgatcactttatggagataaaatgtttgtctcgtaaaaaaagtcatgtaatgcttttatcatggtgttcctgaattttttaagttcacacctacatattgctaagtgtagtcacaggggatgggcaccttatgttctgtttctgttcttccttccgttgcttaatccaaaggatgttttgttgaaggtggaagtgttatttcgattgcattttttggacagtaagatagttaacgggtctgttatggcaaatggagccggtccagtgggcccacgggatactgtattgagtgcccctctgggccagctctgataccaaagatgttgtggtcgattgattggggaacgtgatacaagaacagaagatagatctgctaactcaccctccctctggagactctgagctgcttcttagatctatttctgctttgcctctaattggtacctgattgtcttttatagagatgaggacttgactcctaagcaaatatctaaagaatcaatctagctcaactctttcctaacaaaccaaaccaatctaatctaatctaatgcaattcgtggtactgctcacacgatgcagtaccacgtgggcccaagggccggctccacttgccataacactactccacccctccatgacagctcgtcctcgtgctgtagacctgctcggaattggggctgtgcaatactgaaggtgatgaagcacattcgagcattcagcttctggaagaagacaaccatggcgacaattgtggtgattacggaagatgtgtagaagacagtagcggtgtggtacatgttgtgggccaggactgaggagaatgcccactttggtggagcggacaacgtggctctagagagctcgccagagatgcgtgcatgtgggtggtacgcggagatggccacaaccacagagatgccgtcagctggggcgtgagcctggaagcccctggaggaagcaacttcgtggagcacgtgtacatccaggtggtgagtggaggggtttggaggcctgcggattccgccaactctgtccgacggcttgaggcctggcagcgcggatggcctcactgctggtggtgttgcgagggctgcaggtgtggaggccttgccgatgaggcagccaggaccaagcaggacgcccgcattggtggagtggacatcaatgctggagatgcaaccgcctgttgcttctccttcaccatggctggcacaaatgtgacttgaggagtaatcacaggtggggatggtgctgatggtggagggggtgcggaagttgtcggtgtagctgcaactgttggtggaggtgaagctgttggcgaggttgccggcggggaagacatggcggctgctggtacagcggactgggcagctggtggggaagaaggcggtgatgctgctgcgtctagattgtggaggagctggtagtgaggagtcctgagtcttctgttgacactcaaatttggcttggactcatgtattagcaatattcatgaagaggctttccagtattagagtcctgagtcttctgttgacactcaagtttgtctaggttttccagcattagaggacatatggaatttgcttgttgatgctggaaaggaataggaaaggaagcgagctggcaacagagaatcagctagcgtcaaacatacatgctagagctgatgtgtgtaatgttttcttccttgcatgtatgcatgtggtattttgggcagctgctgaagcaaacagtaaaaggattgttttgttgagtccaactgctatacgagctaagagtcaaatcggtctccattgccgattaggaaagattgtttaatgtatttggatttggataagagatacatgaagtccaggtgctcctcgaatggatacatgaggcaagagaagctagaagattaaaggaaagtgcacacgtcatgaccagagatgattggagtacatgtccgactattagtgatatactcatgcacggtcgattaacatatgcggccatgtacagatagattagttgcatgtagtaaattaagtttcctaacaaggggctgtaggaaagaccagctgccctataaatgcgaagggtgacggccaattgagggatccaactatgcaatcgatcttttatcaatctacccactttttacccttatctctccgaaccccttgctgccctacatgtctctcgatgggatttgtgggcgttctaggtggccttgccgatccttggacacccccactgtgcgtctccccggcgggtcttccctagaggcgttcatgggtttatggggcgaagaacgagtggctaatcggcctcgttgaccttctggtcggcctcaccgttggaatctccctccgctacgtgctaggacgtgtgcggcctctaggcgatctagcccctaccggcgtgtgtgacccaaatcgtcgtcaacaccttcgtctgatcagtatgctcgaggaccatcttgtagatccgattgatcaccgcggagatgcgatcataccccatagagatgcggccgaagtcctctcacgagtcacgacaaatcagcatcagcatcagccgtttttccagccagccgaacagagtgatcacccatggttgttggcgcacaggacagaggattgaagtctttgatacctaagatgttgtggtagattgattgggaacgggatactatagatctgctaactctctggaggctctgagctgcttcttggatctatttctgcttgcctctaattggtacctaactgtctcttttatagagatgatctgacttgactcataagcaaatatcttacagaatcaatctaacttatctctttcctaataaaccaaaccaatctaatctaatgcaattcatggtactgttcacacgatgcagtaccatgtgggcccctgggccggctccacttgccataacaggtctcaattgttatattttgggagttatagcagctctgtgttacggacaagaacaagctcagtgtttttgtgtcgtagcacaccattattcttctttatctttttgctgcattccttgacagctattatgatttgatttcttggaagctttggtgttgctatttggaataaaaacatcagctcccccaactattttttttaccttatttcatttgcagtattcgt

SEQ ID NO: 5065 - DNA, 3811 bp, Sorghum bicolor
  Intron number 1 from transcript Sb0010s010920.1 (locus Sb0 010s010920) derived from phytozome v7.0 (chr-ID super_10; pos 2353165 to 2356975)
ccttcgacgacgacctctggttccgcatcggccaggtacgtacgttacggacgcgacgatgagcattttctttttttcgatttttcttgcttggaacgaacaacgtactgcgtaggacgggcgcggcgggcgggcctgccacactgccatcacgggctgccgcgcgaggtgtggattggtttccctggcacgggcggttggtttggagcgcccgccggccggccggccggacccgtgcatccacaatcgatgccatgcatgcgctggcgccgcttcttcgctggcgtcatccgtgatttaatcttacaacatatatgaagtccctgtgttacctgctgatttttttaaaaaaaaatattcaaggtttttggtcacatttaatcttacaacatatacatagaatattaaatatagataaaaaataactagttacatggtttgtatgtaatttgcgagaaaaaatcttttgagtctagttactccatgattggaaaataattattgaatacaaacaaaaatgctagtagaattttgcaaaacttttgagaaactaaacagcccctaatcataattctctcagatctctgatccattgtgatgccatttttttatattaaagtgaagcgttaactaacacagattatatattaaataaaaatgaacagaattaattagaggggtaaaacattgatgggaaattgaatttgttcggtgtgggtctaaggtattagaccttgtaaatggatcacgtccttttgtccattagtaaatctaacttgtaagggcactccaacacaaaaagtattataatttttatgaacattaattgtactaccacctaatcattttgctgatgtagcaaagtatttattgaagagagagagcaaaaattatagaaaccgggtataagttagaaaccatgtatacacgagaaccaagacatgaagtgatgtgattggttgagaatagagagaaaatgaatgtaattggatccatttaagaccatggtttctatatgtagtgtctataaaaattaataggtatacaaactacgtgtagtttttagcattggagtgccctgaagttatcttaaattaaactgtttatttgatcaaatttatagaaatattttatagtaatttgatgttacaaatcttgaagctcttttcaaaaatcttaattaaacttaaaaatatttgatttaagataaaaattgatttattcagaatggagggaccgacaataagttgaaatagtgtgagcgtgatgacttcgttggagtggtcaactggtgaagtcgttaattaggcgctagccgaaatagtacgaattaactacggcaatgttggagctcgaccaaacaccatgtagcgactataaaaagttaatttcgcaccaacagacctaggtacatattaaatttgatatctatttttctcttctctaagttacatagacagatctaatgcgtcaatcaataacatagaacatgtttggtttgatacctccctagcaaaaacatgctcctggcatcaatctccactcccacgctcaaaatcgaacgtacgagacaataaagagtaacgaaaccaaacaagcacttagtatgtgatgcatggctaaggtcttgtttagttttccaaactgtagcatttttgtttgtatttagcaattattgtctaactataaactaactaaataggattaaaagattcatctcgtgatttatagctaaattgtgcaattagtttttgttttcgtctatatttaaaactttatgcatgtgctgcatgattcgatgtgacgaagaatcttgaaaagtttttgaaaaaagtctgcatcaccccctaaactatagggtggtgtctactttaacccccaaactatgaaacgacctaatttatcccctgaactatccaaaaccgttcaaatcactcactgagtggttttttatgacggttttgctacagcaacaagtggttttgactttttctttttttttctatttcttttcgttgaagctttgaaaaattatagtaaatcataaaaaatcataaaatataaaatctaattttgttggactccacgtgagtaggtctatacaataaatatgtaatatggtatagtttagtacaaattttgtactcatttgatcatatataacttagttatagatttatttaggtttatacttgttaaatataaataaatctataactaagttatacatgatccgatgagtatgaaatatttactatagttaaagcatagaataaatagtctaccacaaaaatttcaccacaattggaccatagaagctgtaactatgaattatttcaattagttacatttaaaatttgatttttctaactaatttaaagctacagaaaaaaatttgtactaaagtataccatattatatattcattgcgtagttctactcatgcggagtccaacaaaattagatttttgatattatgatttttatgtcatttactatgattttttatagattatatgaaaacaaataggaaaaaagaaaaagacaaaactagagttaccgtagcaaaaccatgttaccgtagcaaaccgccgtcaaaaactaccctgaggtgatgtgaatagttttggatagtttaggaagtaaattacaccgtttcatagtttggaggtaaagtagacaccactccatacttgaggggctgcggtggtgatgtagggcctgtttggtacagctcacaatagcttcataagctgttgtgagctgttttttttttgccaaacacttattttcaaaatagtttcatgggtgaagctgtttttctcttcctctcacaaaaacataagttggatgaagctgaaaaaaagtagcttattgcagtttcttcctcatttctctctctcaactatgcatgaagtagttggtgaagctattttgttaaacactttttccaaaacagcttagcttcatctagaaagtcactcatgaagctattttctaaaaaaacagctttactagtgaagttgagctgtgctaaacaagcccgtagtgtttttgggttttaagcaattattaaaccggacctaaagagtaacgggtaatatacgtcgtgacaaaaaaaaaaaaaggtgctagcacgtgaacacagatgcatgtttggttggtccgtgccgaaaagtgacgatcgcagaatgttggcgtgcaaaaaagtggcgccttttcgttgggggacaacgtcacgtgtgcctgactgccgggccggacaggatcatctgaatttcaagcacggtcgtttggatctgtatacctaacttataggtacagccttttttttatcgtcaatcatggtacagccttgcggtcatagtgccatatcagtggggaccattgctcgctaagctttttagttatagagatagagatagcctcttgtttgtgtttgttgtccatactagggtcttgtttagtttcaaaaaattttgcaaaacttttcagatttcctgtcacatcgaatctttaaacgtatacatgaagtgttaaatatagacgaaaataaatagtaattacacagtttgatcggaattgatgagacgaatcttttgagcctagttagtccatcattagacaatatttatcaaatacaaatgaaattgtactattcacattttgcaaaatattttggaactaaacaaggcctagtaatatactacagcgattattttgtctgccacagtgccatatgaattcgtcacatacatgtggtcgctcacgtgcaggcgatcggccgggaggctagggcgctgttcaacgt

SEQ ID NO: 5066 - DNA, 1061 bp, Sorghum bicolor
  Intron number 2 from transcript Sb02g038650.1 (locus Sb02g 038650) derived from phytozome v7.0 (chr-ID chromosome_2; pos 72874117 to 72875177)
cgtcttaccttaaaggcttaggtggtgctgaaaaggttactctctttccatatatcaagttacgttccatttgggatattgtagtatccattgactattgtggcactgtgcatgatatttggtaatttacatgctttcatgcttcgactgtagtccttaacaatcttataataaaaactgggatgacagcgactaacctatcattagatgagagttctataatggcaaagtaatacttgttcctgcaaaaaattgtattctacatttctgcataagccatggtaagttgcaggcacatggatttcagtacagcgccatactttaggatcttgtaggccgccaatgctatcttcttccatctcacacattgtaggtaaaaatagctagtgcatcagcatgaaaaatttgagtgaattgttaatctaaatgtcaatggacttgggttggactttaatcttttgagatggtaagattttagtagtgttacatttaatcactcaatttacaaatactgaagtaggaaaaaccataggcataagtacaatatgcctgacattctggggaatcaattttgtaagtgctaaattctgtagactttttctttctgtaaagatcacaatcataacatgaatcatcataactaattctcaaatcccagactgaagtggtcccagattatggtgcagaacctaagcaccacctaactttagttatgatttgatgcttggggtgacattattattatgtatgcaccagtgacttaggtagttgcttgccactcaagtcgatctgtatctcttaaaatgatcctggaaatattttgtgtacgataaaatgcatcatctcgatattttccaagattttatagataagtctttagcaatgccaatattgatatttcaaagcatcatatgaagttttcaagcgacttttgtactggcatgttcagacttatgtgaagatccctgctttgtttgattttttttttgagcatattcttatctgaccagaaatataacaatcgaatacctccaacattatgcaggtaattttggtcgctc

SEQ ID NO: 5067 - DNA, 1897 bp, Sorghum bicolor
  Intron number 2 from transcript Sb05g017110.1 (locus Sb05g 017110) derived from phytozome v7.0 (chr-ID chromosome_5; pos 42092044 to 42093940)
tcttcaaagagttcaacaacggtggaggtacattcatctcatctgccttctctctctgtcctcttccttcgcatcttattatttaatctgttcatcaaacatttttctctaattccattggcaaatgggcttttctaatcaagaagacaaatgaaaacagccttttcatgctcatcttctttcagatgttatgattgattgattgatcatacagcacataggaggactataggagccaagctagttaggactgtgtataggctacaatgaggactagttttcatattgctttgaactagtaatcactgacaagcaggcagatgtggaagctcaacacattccttctggggtccacatgtcagctacaattcttacattgacaattaggactgtttgtcacattggactggacatggcacatgccattccttcccagcttagtctacctcaacagtagcagtgcaaccagcaccccccacatcctatttctagataatatttctttataccaacattgtcctattatgaaggtatccttattcttttttgcgaggcaagatttttcacgttttttcagtcagagaccacatgctgatatttttgtagtttggtgtgagctggggaaaaaatgtcaggatatccttgacacatcacataattcaaatttaaatatttactaattttaacagaagctgttcatatgtaaattcgacactaaatactcaatgtttagtttttatttctttttgcgaagaacttattttcaatttttgatacatatgtgacaaaaacaaagagaaatcttaccgttcacaaaaatttcctttttcattgcttttgtttgtagattgtatgtagaacaatgtaatctccctttttgtgtgaacttgtatggaatgttatagatattgcatcctcataagttatcatttagaagatattctcttcaaggtttttaatttcgttatcgcaaaaatttcggccaccaccgaaattaccgaatttcgcgaaattcggccgaaatttcgccgtaatttttttagagactagcacatgaagtatgcttttatttttaaaaaaattaaatctaaacaagtatcaatatgatttatgattacacatctattgaatagaagaatatgcaatataaacaatagaaaatatgagtctaaagttatatagcacatgtattagtatataataaaattttggatttttctttcggccaccaccgaaattaccggaattcgcgaaatttcggtgaaatttcgccgaaattttgaaccctgattctcttcatttcaaattataattcggaacagaggagagtacttgttacttcgaatttgtaatttgcttgagagaatattgcctagtatagaagcctcaatatcgatagatgcctaccactaggtaatcaatagcataatttcttattataactaatcaagtaaaacatgatcacttataccacatctagatatcgaacctatatattgtgcatgttccatctattctacttactccctttacagtaacaaaatagtaaaattttcagttgtatgaagtgaaccatattaaacttcaataactgctaaaaaaggggctaattttcaaaaggtaacatatatatctacttgtatccctacaaaactaattatctatgtaaatctacttgatttctcttaaaaaaaagacaaatatacttgtatccctacaaaattttaaactaaacatgaatattagaatacctttttttgtcaaaaagggtcatcgctaaggcaaaggtacccaaaaatcatcataaatcatttcacaaaaactcaacaaacacaaccacactaacacttagctcactgcaggtgggacctgcaactgcctcaccgggctggcctcg

SEQ ID NO: 5068 - DNA, 2413 bp, Sorghum bicolor
  Intron number 1 from transcript Sb10g023510.1 (locus Sb10g 023510) derived from phytozome v7.0 (chr-ID chromosome_10; pos 52142924 to 52145336 reverse strand)
cgaagacatcgtcgaacgcgccgccgtcccgtggtgtgagtgatccgctttactttcccttccctgtttgtcttgatgcgatgctggtatgtggatggcgcctgttgtgcttcgtgtgcctctattgaatcggtgaaatttgattggttcgtggccagaaaaaaaatacgccttctccacctttgttttttttttgtaagaaaaaaaatacataacctatggattaataggaaatcgattttctatgcatggcaagtaaaaaaataatgatggtcaaatttctagaataatttcgctataatgaaaatttattttattaaactgaagggatgggcctctactgttttgggtagcagtggctgggtagcttcacgaagggatggacctgtactgttttgggtggtttatttctcttttcggctatgaatttgagtgttgtcaaaagagtttggtccaacgctccacgtaatacgtagagaatgacttttaagcacatggatggttgcatattcttgcaaggaagaagttagttatgctttaactcaactaataatgaattgttttttgtcccttttctgaagattgagttgctttgtattaggccagtgtcagtgggggtttcatcaggatgtcatgcacatttattagagcgttatgtcagtaaaattgtactttttgcatgaaacgaagaggagagagaaggaagtagttttaccatggtgaaacccccgcgggcgttgtttcccacacggtgaaacgggatgaaatccccactgaaggctaaatcgtttcaccatcttgcagtaattaaatgctttgcccagcctaggaaacgtcaaggtgaaacttatgcattgtggaggttgtttcattattcgtttcattgatgccctgtcagcggatttgttttggaaacagtgcattgaaacgggccactgagactggccttagatcaacgcctgtttaataagtatagagagctttaattagaagttagaaagtatagagagcttagaagttagaaattatttcctccaagcacaaataagtccatctaggtttgtcttaagtcaaacttgtttaactttgaccattagtatcttaaattgtaaatatattgactatgcaagattaatatattatgaaagtgtttctcaaaatgaatgttataatagcaatcttgtgttgtcaatgtatataagatttgaaaatattgctggacaaagttgaagaagattaactaggacaaatctaatggacttatattggtatggtgagtgctacttcatttgtgctattttgtatatgtaaactgtacataaaaatctctatctttgtgacattgttatttattgctgaacttgttcctctttcctgggtcatctaatttggtcaatgtatggatgatggatcaacttgctcaaaagaataatagtctaatctatcctttattcctgtttgatggttttctgtattggtgtaatatttatatctaaatagctacctcctctctgttgtattaacatcacaaccgcaactattaggcattagtttaaaggccttcttactttgttatgatataggaagttctaatcaccacttgaatatgaaatattttgtgttaaaagggtattaaaaaaatggggggggggcatgtaaaacaagattgttttcttatattattgttttggagttcagtttgtgatatggttgcatactgttgcaccatgccctccaatatgagctaatttaaaggattaacgtgattaaacactcatgtaggcaaaattatagctgcatttcccctcttaagatggtttatctggaagtaaagcataagagataatggtagtgtcatacaagtattctattccaatttctcactgccccagcacccttcctcttgttagatctagaaactagaatgactgatgtttcttttttcctattggtagtttggtacacatacacatattaccatatgctgttgtgtttgcatgtgttcttgtgctagctctttattatagattggcttgctagacacagcaatttctttttattgatttgtgtgctttgttagaaaacaacaatgtttactgaagaagcacatgaaagggtgcaatcaaatgatatgaacctttaactgttttgcattactctgttgactcgtcaattgacttggaatctcatactccctccattctatattataagacgttttgacttttctagatttctaggtatgtagctcttgctatgcacttagatatacactatgtcttggatatatagtaaaagcaaagcaatctatatagaaaagtcacacaattccagagtagtagttaatgggcaattgcttcgtcaacctttgcaaagatgctgcttgttgacattctagtggtgtgtgtttcag

SEQ ID NO: 5069 - DNA, 10646 bp, Sorghum bicolor
  Intron number 2 from transcript Sb01g030570.2 (locus Sb01g 030570) derived from phytozome v7.0 (chr-ID chromosome_1; pos 53067014 to 53077659 reverse strand)
cgcggcaagctctacgagttcgccagcgccgccaggtgcgtgcgtcctccctccctccctcctcttgcatgccatccttctccttccctccggcctgcttcgacgaatctgaatgaatacgagtcccgcgcgttccatcgtccgtttgtctagctcgttgcgctccgcaacagggccgcgcgcagcagttgctccttcgatttcagactgtcggtggtgaatttcacttgattttttctgggatttaattcgttgaactgggtttttttcctgcggttgggttcgtctttgctccaacgcttgggggcattttttttctgggatttggttcaactgggttttcccacgcttgctattattggaagtcgcgaactcctgtagagcctgctccaccctcagctcccccaaaaaatatctgtacggcttcgatgcacatcaagcgttcttcctcctctctctctctctctctctctctctctctctctctctctctctcctgcccctttgctgctactgttcctttcgctcaccccaccagccacaccccatgtccatcgtccctgctttcatgtctcctctcatttgatacctggctggactggctgaaaacagcaggaccggcaggaaaaacaattaaagcctgaagaaatcgtacatgggggcaacccaatgcaatgccaaagtcctgtattaatgcgcggccaataggagcaagagtgagtgagtggaaaaagaggcaggcgtgcccagtgactgcgtggaaggatagctgctccggctacaaacggagaaacatcgtcatgtgacttctggtcgcttgccttgttcctccggccagccaaaggcacttttttcttggtttgtaggagttttttggaaacaatcttttcttgctatggattagtggtggtgccaattgacttttcttgtttgtgttctccaatcacatcagttccggacgagggtatgatggcttgggactcaccggtcattttgctgtgacgttggctacagtttgtactagcatagtattaattctttggtttattttgcgtgcttttggtctgggtttattggtttcatccaaaggttaagaaatatagtacatgcgatattgcgatatattgtagtttcagcaagatttctttcttcgattttatgacaaatagtctggtgacctgaatgtcttcagcttctctgctgagctttagtttcagttagtttcacctgttttaccgtgaggccggattccaacttagtcttcctttgggtaggttaggtttaaagttttaaactgacttgacttcttaatgtctttatatgtatatgaaatcattgtatatcgacccttatatgaacatatgaaaacaaactgtctggtttggttatcatatcttgacggttttatccaatacatatgcttggttgatgcttaattaataatctataacatattctgatgaatagttttttcaaccagcaagttccaaccaagtttacgcacgcaatcaattcttgtcgtacatcattccatgcccatatttacacaaatctttcggattggttcagccttgacagtccattgtttgatgatataataatatataagctaatatgagtacttattgttaggaatcataaactgtacatggtgtgacatattctccctttcatacatttcaagatgttttttactgtgctggagccattctctttattcactttggttttctccaacagtaaacagtattatacatattttgaacatgttactactggggttgcagtgaatctgatttactttggttagttcttgagatgatacacctcggttatgaggtttcatttatcagtactggttgattaggagagattacagaaatcatcaagtgtgttacgtgtaatatgaatttttccagaccatgtaatgcttagttgagccctcattcagttaacccttatccttgacttaatgatcttgttgttctgaatatttcttgagccctcattcagttaacccttatccttgactattaatgatcttgttcttctgaatatttctctaactgaagtgtaagagagttatgaagttatagagaactagagtcatgtatgttgcgtataggttgctagattaatcattaggtcaagctatcttacatcacagtttggagcttttgttgagacgatacctacatttgaaaacaataatatccatatatttttagctgtaggtacacgtccaattatctctcgaaataaaaacagactagtgccaagttttgcttgaatgaagcatgtgataatggcatcaatgttccttactagagatttggttttgttcttgtcacactgtagtttttcagattgtagcctagtgaattttgcttgaagaaacccatagcatgaggtgaagaaccattgttacagcccccaaaatttgcactcgacctgcatgttgattttgcttgcaagttattataaggctagtctcaataggagtttcaaatgagcttcattctcatttaatgctataacacatcattaaatttgttgagtaagcaggttaattacgaagagagggaaagagaaagtttcatagagtgtcatctagatgaaacttgttgtgtcaactaccaacacaaaagctgatgtggcagtcttggtatgtaactgtgttatgaaacttttcattgagactaacctaagaagtatatataattatatctattattatctagttacaagtgttaaaaaaagccatcacattcatggagaaattttcacataactcaaaaataaaagcgccaacaacgtttgattttataataatctaatagcataaattaaagcaacgagtctttgtctaatgcaattagtaaatagcgaattcagaataataataaatttaggaaaattagaaatttgatttccgtacgagttggaaagcaaaaggtacctaattaagagttcatctcggtgaagccaaaatttaaataactacgaaaactaatagttggtctccgaacgaattggaaagaaaaaatccaaataaatagtctatataaaattcaataattaaatagataaattcaagtttcaatagtagtttaattttcctatgttggaaaacacctaaaatttggtgtattagtgtaagttattaattaaaagttagggttaattgaatatttttcattataaatgtcacatttgagttataccgttactattgatcatattgaaacggtgtcattacaattcctcacctctctaaaccgtcccattttatatatatctgatagtgttaggcccatgtgcaagagttgcatagcggctacagttttgtatagaccaaagtgcccacatggtcttcttctttctatcagtcttacttctttagccccctctgtggctgccatgcttgacctcatctctttttccaccctaaatgatgggtgtaagacctccttccccttttctagcattgactcttgcattcactgctgacgttggcctcactgtgctactccttgtgcttgacttggcattcccaaaggtagttgaacccatagagcacggtgagatcaagcactatgcgatgatgacgagcacacaccacatggtgagctcagcgctctatccctactaccactaagtgagatgcaagagagcattgtagcgaagagcttgggagacccgggaggttttaacaatgtagacatcaccaaggaggaaaagggagatgaggtcgaccacaccatcgagcattgacttgaccaccacgctgaggcgagcattctctaactccgcgctcgttggtcccattgtcatgggcttctcaattgtgctcgcactcaccatgttacatgtggagacattgagagaggagaggtaggtagggagggaggtaaagattttgtgggagggagtagatgatgagttttatgaatgaggcccacgcatgtgggagagggacacaacatgggcatttttgtccatacaaaaatatggtagcctaagagtgcatcaaactacatccgaaacatatggcatagatcttagttagatagaattataaaagcaccggtctaatatgaagaatagtaaatggtataactcagaagagtgacataatctataatgtcatagatctaactaacctaaaagtgtaaataaaatagtcatctcttttactctcgaaggccaaaaacaatcacaatgatcctatagatctagattgtagtggtctagatctatcaaaatatataggaaaaaaagtaaagaatccagtatagatagaacaagtatggaaagagataataatatttaattaattcaatactacaattcaattttgccgtggtaataaaattcaaggaaaccacatggaatgcctttggtaggggttatattcatgcacatgatctatccaaactggatacaaatgccttagcacacccatgaaaaaaaatcatgaaagcactttcaatcttcacactgctctcttcgccttccatgctctataccttgcaatcttagtcctcgcaacttagccctgagctcattgagttgccctttatgcttgttctatcttgaaagctttggcatcaataacgtcatcaggaagggaaaataaacaatcagaatgtctcgatccaaatgggcgtggctcaaatatgatgacttttatggctgcaacctaggggagggaatatgtaccaacgatcgagattatgatgaaatcatgaaagcatatcaactttttggtatcttatgtgtaattggtccatctatttctagttacgcatgcgtgagaaactcgtgagcaacacacccacatcatttgttttttcttcatgagaagctagctggttacaagtgagaacatacatagtcacaacatggcctcactctagtctcctcggtcctctcctccataccgaactaccaccttactgtgttccaccttgcagcttgggccaggaagaaaatcaacaaaatcaggagattcttccttggacgggcgtagagctgccttgcaatgaagccgaccggttgttcttccactcatcaactaaggtcacggttggcgatggcaaaaggcccatttctagcacagcaactggttggacggtgaagcacccaaatatttggcaccaaacttgtttgacttgctgagaaggaataacaaatcggtccaataggagcttgacaactatagttggatccgttcgctaagggataggatcacctctgctatccaagtcgaggagtttgtctccctttggataaggctccaaagcatctagttgacactaagcgttcgggactccatagtctagaggtggacaacctatgcttcttactccactcattcaacgtacaggatccagttccaaggttcctatggcgggttccgaaatgaacttatttggagagcaaaagctgagaataaaggaaaggtgtctgcttggatcctggtgcggtaaaaagtcttaacaacagataatctttagaagagaggttggcctcaccaggaccaatgcgcgctatgcaacggacctttagaatcatgccttcacgtatcactcctttgcctgttcgccaaggcagtgtggagccaagttctttcatgggagaattttgatgtacagttgatccgccccactcaagacccacctcacctgaagtcttggtggcaagaggctacaaccaagatagcgaaacaagaaaaaaggtgcttcaatgggttagtcatctacacactatggaacctataaaagaaaatgaataggagaatttttaataacacccagaagtcgataatgcaagtggcactaagggtaaaggaggatatcgagcaaagaaaaagagctttagcttggggagggagcaataacgcgggaggcatcacgtaatccttttgggggctttggccctattgatctgtacataaacctctttaccctcttaatcgaaaggcagagctcctgccattaagttcaaaaaagaatgtcatggcacatgggtcgcaagcatgatattggtagcttttggtagtttatttgtgacggcttgaggcaccaatggatgttggcgcgatgacaaggccgatcagaggtagtaatggctccaatagacgcaagcaacatgtttatgaattttattacacttttagttttagagaaaagaagcaagtatagatacacaatacattgcataggatgatctagaattagaatttataagatgtcagcaacatggttatgaaccaaacaatttgtgttaatttggacaagagttgaccaataaattgagctcattaagaggattctaaaggctatcttgatttgacctcaacagaggtatgacacgagagaagggatacaacaatagctttaggtgaaggaattgtttgacttggttaacaatcaatcaaatatcatacaaaactattaacaaaaggatagttttaagtaaaaatctcaaacgttatagaaactacatgaagttcatgcccatagatgcagtgggatgcatataaagaggataattacaatgaatcaaacatacataactgtttgccaaaaaaaatcaagtgaaagtgatcctaaatgttataactgaaaaaaaggctagccacattacttgtgcgggggcaccttgctcataatgaatacatgatttagtggtgaagggaggagttcagatcagcacactcatattgtcttttaaagtgcatctcactaatacaacaaagttcataataccaattagcaaaacacagtattatgtcattttccatcttaacaacagcatgaatatcccagtggtatatataatagaaggaatttatttgccatacatggtaaacctcaatatataacaaatgcaggtacttgattttctcgaaaacaaaatcacatgacatcataattaattatcagaagtcagtacatgcaatggcacatgtacaagtttctatctaataattatacttgcatctggtctctgcaagttgccacaccgaaattatttatttttcttcagcaaacacataatgtaattaagccactgcttatcaacatcgtgtcttcccacattagtgtactagtcatactgaagcagtaatttctgctggaaatgtacctgctatgacaatggagatgtctcaggtcttactacactgcctgtatgtctatacattattaatgcacgcaatgttggcccacaaattttttgtacttagggaaaatattggctacaatcatcaaataaacatgggctcttggcaaactgccgctgaattttattttgttcatttcaatatcactaaaactctgaatcattaattcttttgctattgcctatcaaattacttattccaaaaatttttgaccccattctagtgttctaagttctaactgaatacccccttctaaatctagctacaactgttattcctctctttttgttctctcagcacatagctacagggagaggaattttggaggttttgttatctgataggctagagatgatgcaaagtggagcatagtttcccttcaggtcacagtgtacaaccagaaatttgaggtcatctttatcattgaaactactcaggtttctaatacaatagttcagattagaatcaacagaaaggaggttggtttgaagtaaaataagcaaaaaaagggaaaccaaaatatgaatggaatataaagaaaaggggtgaacacagtggtaaagctcccacacagctggggtccaggtttgcaacctccaggtgagcttacacttattttgtaaggattcgctcattctaattgaggattttaaaactaaatgcaaatcaactgcgagtaaacaatatttcaaaaatacttgcaataaattgaagtacttgtgatattttgagataaataataaatttaaagctttgtgaaacacacaatagcaaactcaagggacgctgtgaattgggaatgaaaattggattgataattcccaactgtccaactgcccaaaggtttgttaaacaaatatgagatacaatagtgaatatccaataccatatatatgtctgatctgagttcgagaaaaccaaatcccagtagtacccatattcaaaagtatatgtatccaagcttagcctgctattgtttcccattcagcacaaaggtaaggaggtgagaaattcctttagcctcggccaaactccagtccattagttcctctttagtgagcaatgatgtgctagctaaagttgaagatgccatcttgaagacaccaactgtgtaagattatccaaattgtcaaagatctcaggattataatagagttgagtcctctttgtgtctaattggatctgccctcaaccaccaatcgtcaaagcagtcatcattaatccatggggttagagcctgcaagccgagcctttgcagcaaaataaaccaaaattcctatgagaaggggcaagcacaaagcaagtggtttatcgatcctatccctccttttgatcacagaataatgggtagattggcacatatgaggaaacacataatacaaaatgttcttattttcatgttttagcagacactcttccagatcacacccttaattatcgtctaatgtattgcacctgtatacaagttgaatatgtttagtctattccaccaacttaaagctttggccactccattgtttcaaactccgactaatcatgacaaaaattatccgatgagttttcatatccaatttagactgaaagtatcgtaggacatcatctggggtatttactagtgtgcagttaactaggggtagacatgcaagaatgaaggaaaaaagtgtattagagttatcatggacctataattggtgcaattgggagaagggtagatggacttagttaggagtatctcggagcaaaaggagtaccacatttgttcacttaaaataaacttcactatttaacgggaaataaagataattgttttatttttaccttagcatgtatggacaaaggtgaaggttagttaggaccggccattgccctcattgtattttgtgactccttggaaaagaatactgaatagaagtataatacctacttgaacttgaaaatgcaacctcttccttgtgcaatagtcaccctaaatgttgtcctcatctaacattgattactctcttcattagctataactgtgaacagcctctttgatttttctttgttgtctgatcttactattgattgattgtactgccacataataatagagatatctacagattttatttaatgatttctcttgtgtgggtcatacaaatatggagatagatgcttagtcaatggagtggcttatgggctttataagcacaattacatttatacaagatgatttttctgattcagaaatagcatcatcaccatgaattaaggccaatgttggttccttccctacggaaaaacatacaccaccaaccttctcttaaaggtgcaggtcaataataccaaaaactacagatcataaagtttttgcatttttattgtgaattctctttggttggatcactgttgtttcttccaaattaacatccaatgttagactgtgattgcaatagttccactgaagaagtgatgagaacatgagactaaagatgataggattggtatcctgatagtattggtttaggaggatgcatgtgtggactatacatgaagcaacagttatttccttgattacaatagcaaccttttgatactcttcatctcacatctagcccctggaattggttaaacaagttttactccccctcaaaatcaccaaggttattttgcttattcttgaatataaggattctttgatcagctttatgagccatcatacccttcactattgtatgtttctaatcacctgtggcattactaatttggaatcgattttccggtcaatagtctttctaacaacaagaactccatattactgatcctactctaactccaactgcgaaactcagctatctcgatcatgcatcagctgcagctttttagcacaatggtattatcatctccagactgcagtacttcatatcagctgagtttgggactttggtagacgtgcaacagaagaaatggtcattcttttgtgttcggcattaattgtattcttgtcttttcatccgaaatggcctaatattatgttaatttcagtttactacaagcttcaaaaaacaaattgtggtgaattttgagaacctattcaaagcatgcacaatttattctaaaacttcaaccaaattgctagcacactattttctccttgttagcttagctccagtatgcgcagatacaataatatttgcttcattttcgcatgcaagtacatagttttagtagagttgagccaaggctcatattctcatgtatttttttttgttctttctaagttccttgtatctaatatatcaattaagtattctaattctggccagaaaggttaactttctgtcaatgataagattctgtcagtgcgatcaactaatgttatgctcgactttttattaaaaaaaatatattattattttcttattgtttgcttcattctgcagcctccagaaaacaattgaccgttataggacgtaca

SEQ ID NO: 5070 - DNA, 25524 bp, Sorghum bicolor
  Intron number 1 from transcript Sb02g012600.1 (locus Sb02g 012600) derived from phytozome v7.0 (chr-ID chromosome_2; pos 21678176 to 21703699 reverse strand)
ggaggaggcgtggtggtcaggtggcgccgacggtcgtgcgtcgttgctgcggggtagggcgtgcggctcgctacggcggcagccgaagaagagggaggacgcgggttggggcggctgcagcaacatgcgtgcacatcatacacagggcccacatgtcggcgtggtttttttgtttcgcacgatgagccgtaggggcgcagtcgcagggctcaagcggaccgacggagcaacgaagaatattgcaccaaaatttggtcttattttctttctttttagttgtaggagattgttgatcttagatggttttgatgaattaactaaagggttgagaaatgtgcagccatctctaagatttatgagcattgaaacataatgcatcgtatcacacatatgaatgcaaatcatcatgtatatgaaccatatcaaaccatagaaaagatcatgtatgattgcacgttggttatcaacttgcaaaatttcagcacacgggtgaacatgtgaaataatcaaatcagtgcaaatatttcttgtatggttaatcccatttgaaccatatgtattatcataattacttgccattttattttgcaaactcaaatctgatttattttcaataacttttagactttttgatggtgcaagtaccaaggattgcacctctgaaatcttatcgttatccatatcatggttcaggttttgggcaacacacaatgggtttagttgaatggctaccttcttatttctctcaacaagtatggtgttgtcttgagcatccatctcttccctattatcatcaccaacctagacatttggaaagacaaaactagaagtagagatgagagtgttagtttcaaagatatcctcacttggcctgcattctaaatatctatttttctgtggtgtatccctcacactctcattgttgacactctcaaccttatagtgggtggaatcactcaactcacttttgttttcactctctctcattttggcaatgtggctctcattctcacatagattttgatgcacaattacttcaacgtcttgtgaagccacatatgcatgtgtatcgttgtcattaacaatcacatgttcttcctcatcgaaggttgggggctgatcataattcacaacatcattttcttaatgaacctgcatcgcaaaaggaacaagaatagaaggtattatgatgtcagaagtaaataattcctcacatgattcatctcttttttctctcaatttttatggatcactctcacatagaattttgtggctctccttaaatattgtggaatctctctgttgacggtccttaagtactaaatttaaccatcaaataaacatggaaaaggatccaaatgaaacaaacatctagaattagggttttatttgatagaattccacgagctttggtgtttatctattcctggatcatgctccaccgacctaaaggatcaaggaaaaccgtgcgatcaatgtcggtttgatccgacggcccaaattcacttgaaaggactatataatcaaggcctctccaccccagggggagagaggagaaatcattatcagaggtagccatcaaagttagtgtttagacatctctcccatagagaattagaattagctactccctaatccttcaagtttagaggattgattagatagcaattagagaagtagagcactacgctctggatttggatcttcggtaataaagattggtattatttcatatctttctctaatactttgttctaattgtattatgtctccatttattatgttcttagtttgctctagttctatatttgatatagttatgattgataatgagtttatgtataagtttgcaaagcgcttagctcttgacgcgagggagttaagtggtagatcacatgtgggcgtgtgcttagatgttatttacctgcaaatgtatcctttggccaggttgtgtggtagtttgcgatagtgacagcttcgttgattcttatatagtccaccctccgttgataggacaggcagaatttgtattgtggagtaagtcttgcgatgttctgatttactttagcaatgttccttatacatgaatgaagagtcttttctgctatatatgatcttgtagataactagagtagattgtgacttagtagatagtagataacttagaatccattctctagctaatctgacatcaccttacatatatgaggagtagtctattttctaatcgatgtgttatttacccaggagcttatacttcattatcattattattatggcttacccccctgccaaagtaagtgactgtgtgatgagttcctcattagtaatcatgttcttgcaagtttatctctaatctatgccttgatagatttatccttatcttcatttaatcctttttctcctgagcaaaattataaataacgatacctggaatacttacctggtgaaatgctacaatgaggtgttttatctgtgcgcttgcggatagaatagattattttctagagagcctttacatttataaatacctttgtacactgtggcaccatgctggggttgacaacctaatatctaagtggtgttagctagtgtcaacactctcatcttcttattttgaactctctcactgaattttggttggtgccactctttctcacgtatggtggaatgtttcatcttttccttttgatttctctctgttgacaccatttttgggcacgtgtctaggatggcaggatagggtggcagtacgatgcgggttgctgatgaggatggttgccgatgagggagaggttgaatgtgactaagtccacaggcagtaatatggtgccgatggctggataaaaaggtctgccgatgactatggcaaggggattgccgatgatgcgaaggaggagtccggaagctgccagttgtcatgtggaggagtttcggtttgtcacgaaggatagttttattatttccttagttatttgcatcgttttgtatacggattccgtgtaatttggaattcgaattctaatcgtgtctggttgtagctctttgagcagggtataaatataaaccctaggaccttgtaataatcaatcaagaaatcaatcaaacacacgtttttactcatattccagcatctacttttcgacgacttcgtcatacttttttctttttattacgagttcttaggaattcgtcgacttaagctcggcgtgttctcgagttccgtgtgagtacctcttagccgtgacatccgggcgcatcgctgttgtcaggactaaagtattcgagttatcacctttgccgatagcaaggtcaaatcggctggcacgccttaacgtttgaatcgggtattagccctttgtgtttgcagatcagttttgcatcaacacatcttttggcacgcccagtgggaccgattcaagatcaagatcaacatgtcgatctctgacctcgatcaagagaacgtcatccccgtgacggaggccaacctcaaggatgagcaaaagcaagctattgcccaagccatggaagagttcaagcagcaatgcctgaggtctttcagcataaacaggagcggcgaagtggtccagaaagatgcactgccggcaccacggcaggtcacctttgacgccaatcctggcaagcttcaagatatggttgacaatgccatcaatcgagcgttgatcaaccaagctggtgtactgtctaatacggttttcaacgccgtggcaagaactttcaaggaaggacaaatcccgccagattatgtggggccctcccatcatcagccaacggcaccagaggtcacggctccatcggctgccttgacgaatgcaagtgcacagtctgccgtccctccaagtacattggggactactggtgcactatctatgccgatggcaaccaacccacaaatttcagttgggcagcataaactgacaacagatatgttggcatcggcaatgtcagggttaactcttcctcccaactggtggggttatggtatgcctccagagttgacgccgggaacatcacaaataactgacatgaggggcaaaactcctatgacatcggcacctcccaatgcgccggtgaaccagagtcctcggtataccacaactactactgcaaggcctcacactgggaatcctcaagattcaatgtttcagatgcccaacgcatcggcagagtcaatgctgatgcaacagaggcctatggcccagtcggggtatgtcaattcaacgacggtacccaattaccaatcatcggcagcacctttgccgatgaacgctaataatggatggcttggacagcaagcctttccacaatcgccccagcaaggttatcagactacagggttccagcaagggcaggtctatcccgggttccaaggtcaggggattcccaaccagccaataaattttggacagcaactcggaggacagccaatcggtggacagcagtttggtagtccgcagattggaggacaggtgaccaatacaatgttccatgcaggtcacgtcccgaacagacacgtggaggttcgccaccaagtgccagatccgcagccgcctcatcggcaagacgccgatgcgtattgggccgataagattgctgaagtaatgagggaacaatttgggataaaacccaaagtcaacacttattcttatcggacaccgtatcctccagcgtatgatttgatcccgcttccacatcggtacaaggtaccggattttacaaagttttccggacaggacgacacgtcaaccatggagcatgtcaacaggttcattattcaatgtggagaggctggtaacagggacgaattgagggttcgtctattttcatcatcattgtctggatcggcctttacttggttcatatcattacctcccaactcagtaattacttgggccgatctagagaagcaattccacaaatacttcttctcgggggttcatgagaagaagatcaccgacttggtcaagttgaggcaacgtaatgatgagtcggttgagggatttgtgcagaggatacgagaggtcaagaataaatgctatagcctggttctggatgatcggcagctagccgatttggcgttccagggtttgttgtcacatatcagggataagtatgcctctcaggagttcgaaagtttaagtcatttggtgcagaggatatctgatcaagacatcaagcctttcgagcctaagagggcatggaataagaaagtgtcatttgttgatgaagcaacaagctcagattccgatgaggaaccagtaatcggtttggcagagtgggtaaaaaacaagaagccgatgtcttgtccttttgggcagaaggaaccagagaagtttgcctttgacaccgccaaggccgataggatatttgactttctacttcaggaaggtcaaatcaaactgtcacctaaccatgtgatcccatcggcagaagagttgaagaggatgagatattgcaagtggcataatgcaacttcacatgacaccaacgagtgcaaagtatttagacagcagctgcaatcggctatagagtccgggagaatcaagtttgacagttccaaagcccagaagccgatgaagatagaccaacatcctttcccgacaaacatgttggatgctaaggggaaggctaaggtcttaacgtcggagatagctgagaagagtgcatcggtagatcctcagcatcaagttactactgccgatgcaagaagtaagggcttggttcaggaaggaactagctcaggaaggcttcctcgatctggcatcgtcataactcataggaggcctcgagaaaaatggcaacaacgggaagatcggtatcggcgccagcaggaagattatcaacggggagaagaaagacgccgacaggagtggaatcggcacagggatcattggaattgcccattcttcatccattgttgggaagaaaatatcaagcttcctactgtcagagactgccctgaatgcaacggttatgatcggtacgataggaacgatcgacgttatcatgatgatgaacggcgagctaatgggccgatcagaggaagggtgtcagttcatgaccggctggggggcaggttcagtgggcacaacagacttagtgaccgtgtccagtattttcccaggaaccaagaggagcttgaaggaatggctgatgcgcgggttcccgatgagttcatattttgcagggatgctaacacgcatcgcatggagtcaagggagaaccgacgcccgacggcaaggcaaaggccacttcctccatggtgccctcgaggattaaccaagacacaaaaaaggagattgcaacgagaaaggcaagaggagctaaacaagggagagaactctagaagtcggcagccgtcagacactaagagggaaggtccatcggcaggcgtcaacatggtcttcatgttgccgatggagtttcttgcaccagccagtgacgatgacttggaattttctgatcagatagctcagttggctctggatccgatgacggctatctttgagaaacctgccgatgacgagaggcagcatcttaaagctttgttcctcaaaggaagggttgatgggtagccaatgactaagatcctagttgatggtggagctgctattaatattatgccgtatgcagtatatcggaagcttgggaaaggggatcaagatttgaccaagaccgatatgatgctcaaagactttgaaggaaacgtgtctccagtcaagggggcgatatgtgcagagttgaccatcggcagcaaaaccttgccgacaacttttttcgtgatcagcggaaaaggtgcctacaatttattattggggagagattggattcatgccaattgttgtgtcccatctacaatgcatcagtgcttggttcagtgggtaggtgacaagattgagatcgtcccaggggattcttcttatgttatcgcatcggcagaagcggatacttatgaaaggactaggtgcatttcaggagaagtttgggagaaagattttctcaaagttgccgattatgagattccactgatccaagcagtcggttctgacgacggtttttaatggatagattcgccgatgatggaaaattaggccagggattcacatcggccgatgatttggtagaagtagatataggtagtggtgataagcctaggcctacttttattagtgctaaattagatcctgagtgtaagcgacaattgactagtttgttaaaggaatataaagattgctttgcttgggattatacagagatgcctggtttagaccgatcaattgtcgaacatcggttacccatcaagtctggatttcggccacatcagcaaccagcccgtcgatgtaatcctaacatcctacctgatattaaggccgaaatcactaaacttattgaagctaagtttattcggcagtgtcggtatgccgaatggatttccaatgttgttccggtttacaagaagaacgggaagcttcgggtgtgcattgatttcaggaatctcaataaagctacaccgatggatggatacccagtgcctgtcgccgatctactggttgatgctgcggctggccatcgggtcatcagcttcatggatggtaatgcaggttacaatcaaatattcatggcagaggaggatattccaaaaaccgcattcaggtgtcctggtcatgttggactatttgaatggatagccatgacttttgggttaaagaatgctggtgctacttatcaaagggctatgaattttatatttcatgagttcatcgtcaagctcgtagagatttatattgatgatgtggtggttaagtctggagatttctcaaagcatcttgccgatttacgaaaagtgttggagtgcacaaggaagcatggattgaagatgaatcccaacaagtgtgcatttggcgtatcggtagggcagtttcttggtttcatggtacatcagaggggtattgaaattagtcgaagatctattgatgccatcaataaaatagtggcccctaccaataaaaccgagctccaatccttgatcggcaaggtaaattttatcagaagatttatatcgaatttatctgggaggattcgtgcgttcagtcctcttcttaaattgaaagccgatcaagagtttgtttggggagaagaacagcagttggctctggatgaaatcaagaagtatctagtaaatcctccagttttagttccacctcaacaagggaagcccttcaaattgtatttatctaccgatggatcggttatcggttcagctttagttcaagaatttgaagggaaagagagggtaatttattatttgagtaggaggttgattgatgctgaaaccaggtattcggccattgagaaactatgcttatgcttatatttttcatgtatcaagctgagacattacctgttgtcggccgaatgtgctgttgtttgcaaggatgacgtggtccgatacatgctatctatgccgattatgagtggtaggatcggtaaatggattttagcgctgtcggagttcgatttgcgttacgaatcggctaaggcagtcaaagggcaggttatggccgattttgtgactcagcattgcggtctagtggaaaccttggaaattgcaccctggacgctcttctttgatggatctacctgtgaccggggggcaggaatcggcattgtattagtttctcctaaggggaggaagtatgagttttccttgccgattgttgctacatcaacaaataatcaggctgagtatcaagctctgatcaagggattggagttgttaagagaagttcgtgctgatgctattgaaatattcggggattctatgttggttataaatcaattggccggaagctatgaatgccgaagtgaagttctcataacctatttcgagagaagtatgcaactgttaaaggaattcaaagacttccgattggagcatgttccccgattgtataatgaagacgctaatcggttagctcagcatgcctcgggatatcagccaatgattaatgcgacatcggcagtcggtgccggtgattggaggaaagaaattgttgattatctaaaagatccatccaaaaaagttgaaagacgggttcgatttcaggcaaccaagtatgtgctccttgaaaacgaattgtattatcgaactatcgacggaattcttctccgatgcttgggtgatgatgaagccagaagtttgatgggggaaatccatgaaggagtgtgtggagcgcatcagtcagcttttaagatgaagtggatgattcgaaggaatggatatttttggccaaccatacttgaagattgttttagatatttcaagggatgtcaaggttgtcaaaagttcggtaatatccagagaacacccgcatcggctatgaatcctataataaaaccttggccattccggggatgggccatcgatctgatcggccagatttatccaccatctagcaaagggcataagttcattctagttgccactgactatttcactaagtgggtcgaagctattcctttgaagaaagtcacatcggccaatatgattgattttgtgaaggagcgtattatttaccgatttgggattccccaaaagattactaccgatcagggcaccatgttcacgtcgggggagttcgatgaattcgcaatcggtatgggaattaaagtgttgaattcttctccttactatgcttaagccaatgggcaggccgaagcgtctaacaaaggaattatcaagcttattaaacgaaagattgaagaaaatcctaggcggtggcatacattgttaaatgaagcactatggtcttatcggatggcttgtcatggatcaaccaaggtgtcaccctatcaattggtgtatggacatgatgcagtgttgccttgggagattaaggctggatctaggcgattatcttttcaagatcaattggctgccgatgattatgccactttgatgaccgatgagttagatgatttagcagggcatcggttaaaggctttaatgagtatagaagaaaataagaagagagttgctagatggtatgataagaaagtaaaggctaaggagtttgccgatggggatttagtatggaagttgattttgccagtcgggactaaaagttcgaagtttgggaagtggtctcctaattgggaaggtccttatcggataagacactcggctcctagtaatgcctatattctagaaactctcgaaggagttgaatttcccagagcattaaatggcaaatatttaaagaagtactaccccagcatatgggtcgatgcataaaagtttaagtgccgataacactcctatcggctggatttaaatgtttgggggcagacttaatgtttcaaaagatgccgataacagtcttatcggctagactaaaagctaaaagcgggaaaacaaaggtgtgttgccgatgaaagcttcagatgttcagcagcgcttggattgccgatatggcgcgcagccggatctgattggctgtctctatctctttgatatcatcatcggcagaaccttctatcggcttcagcttcctcttcaactgcagcgctttgcgaccgtggacgtttcgttcttgttcaaggtgcttgatggtctccggcagttgactctcttcttgctgggcttgggacagagcatcctctacctgcttgagttcggccagtagagcttctctttttgccgatagatcagatactttctgcttcagtgcatcacctgaggactttaaggtgccgatgttcttatgtttctcatcggctaagagtttttctttcatcatctcctcagaaagctggatttgagcggctctatcggcaaggcgtcgagtggctctctggtactgtagctggcggctttctaggtgtgcagcatggaagagggtttcttcagcatcggcagtaatttggcctctaagggttttgaacagtgccttggctgggtcagaatcgttgaccagttgagctgtgtcttgatgaagtatggccgatagctcctccagcttagccctggtttctgccgatacagtcccaattgcccgagaggagcttgcttcctcaccttcttcttcgaagatatcaatggcgaaggagaataagctatcgggagaatcttgttcctgaaaatgagaatgaaataagtcatttttatggtcaaagcttcggcagacgatactggtggaaaaattggatgacttacttgtttcaaggcaatttcttgcctttgactcaaagataccgatggagctacaggttgatcggcaaatgttgccgatgaaacgatatcgactgaaagaagacaggaagggttatgagactaaatgagaataagtttatcggcggaagtattgttgaaatatgttacccggaggaggaacaacagttgtctgaatcggggaaaccgccgatgatataactggacctgccgggccagttgtttgttcacccacgtcagctgatgtaccttctgtttgaggttcttcctgctggggttcttccatctgtggtgcttcctgcattggttggggagatggtgcttgctgtgtctggacttctggagaagaaggggaagattccaccgggattggagacaccggaggaggagggggagttgccactttctggcgctttgttctagccttagcaccttgggtgcccttcctctttggctggctagactggggggcatcggtaccttggcgtttggcttttgtcgatgcaccagtttgctgcaacaacaaaaaggagtttatgagcacagatagccgatacaaagatagtcagcataaatgaaaagggtttgacaaattgccttgaaagcttgcgccagagtggaagcagttaccgttggcgatgtctgagttttcctggtggtaactttcttgaggcgcgcaccccgatgcacgatggaagccagagtgggagcattgtggccgattgaggagatcgggcctgaggggaacaagtcgatcggcttgccactcctactaaccaatgggggggtgttgtcaacctgcaaaaggaatacaggggtaagttaccgatggaaatagtattggaaaatgagacatcggtttaaaatacttacagtgtcatcagggacttcgtattcggggtcgatcatgccgcggtatgagagggccgatctgcagaatagattctctttccattctgcccaccatagcttgtatgcctgagtgataaaggcagctggaacccattctgacagatctacatctgtatcggcatttggtggtagctgggctactcgagtccactcgagaaggttggtgataggttctctgggctttatcacatcggcataaggaagtgcaatcggcaactggccgaaagctagctggcgagctaatgccgatggattgtaaaattcataggtttggggagaggtttttgtgctaccgaagaaattcactggtatggctctgggagtcacaattgccatcatcacctcattatccttgtcaagagcttcatcaaatggattgaaggttagagggagcatgctgtctgggtcatcataggccaaccatggtcgttcatctctggccaatccctcatacagagtctcgaagaatcggccgatctgatccggattgttccctgaacagggtaagactataacggcttcgccaaagttcaagggggcacgcgttgccgattcctcttcacccaacacatgattttcggctatatctcttgggaagtgctgtgagaacaagttgaaatcaaggcgcttatgcaggtgcagattgagccacatattaataaaccaccaggggcctcccaagttgccgatggattggccaagcaggagtttctgggctacctgatgaagaaggtggtaaacagcgctgagcaaatatcggccgagaggaaattggccaccgctagccagtctttctgctgccgatagatagacagaagttggtcctgccgatcgaccacagaatacaaacttgtccagccacatgttcagaaaggtggtttgctcctttatggtgacaggccctctcccgcggtacttctggatgtaccctgaccaaccgcggatagcgcgagtctccactttggcactgggggcagtatcaaaaaagtgggtgctatcggcagaagatatatctagcccagtgagcatggctacatcggcaagggtaggagaagcagggccgtggccaaaaacaaaagcattgagagtgtctgaccaaaagtaggatgcagctatcagcagtgactcgttcctgtgcatatcggcaatggatagcctaatgcattgagctagcttcctctcaccccactggacttcataagaattgctgaccctcaagaaccagtctttccaccctacagtagggctaggccaagaacgaaaagtgtctttccatagatctacagaaaagttttcagccctaaaggggattctattggtttctgcgttgataagattggttggatctgaatcccctagaggaccgagacattgaaggtgtggttgatcggtggggatgacaattttattggacaactcctagtgattttgggggaataaaaatacaaagaaaaaggaaaaggggaatattcagtaagatgaatcgcggatgaataggaatatacacagaagatgagatggaagtctgacctcagggacgacgaagccaatggccatcttgtcgtgaagaggacgttggagggcaccggagttgatgaagaggagtgcttgtcggagatcttgaaggttgtaaatggcgccgccgctggaaaagcaaagttggatagtagaatggtgtaatgggggaggagtacccaagaaggaactatttataggacaagatgggcaagggcaaatccgacttatctctttgccgcatccgagaagcccgagggtactcaggtggatatggtaactgttcgcacggtaatccagggattgtgcaggtgatttgacgggaagcggtcattatctaaagatattttactgtgcgagatctcctggtcggtccatcggcgatattctataacggtcatcttgccgatgggcggatagaggggaggtaaccgtttttgcgaatatcctggttagagcatcggcagatctttgtaacggtattgttgccgatgtacgaccaagaaagatgcccgtttaggaagttggggatttcgaggaatctgcggaggattaggatcagagttgtccagattgaggttgtcggttaccagattaggagcattaattgcggagaaggcatcattactgcagagaatttcggagcattaatagttttatactccgaaactggggggcatgtgttgacaccatttttgggcacgtgtctaggatggcaggatagggtggcagtacgatgcgggttgctgatgaggatggttgccgatgagggagaggttgaatgtgactaagtccacaggcagtaatatggtgccgatggctggataaaaaggtctgccgatgactatggcaaggggattgccgatgaggcgaaggaggagtccggaagctgccagttgtcatgtggaggagtttcggtttgtcacgaaggatagttttattatttccttagttatttgcatcgttttgtatacggattccgtgtaatttggaattcgaattctaatcgtgtctggttgtagctctttgagcagggtataaatataaaccctaggaccttgtaataatcaatcaagaaatcaatcaaacacacgtttttactcatattccagcatctacttttcgacgacttcgtcatacttttttctttttattacgagttcttaggaatttgccgacttaagctcggcgtgttctcgagttccgtgtgagtacctcttagccgtgacatccgggcgcatcgctgttgtcaggactaaagcattcgagttatcacctttgccgatagcaaggtcaaatcggctggcacgccttaacgtttgaatcgggtattagccctttgtgtttgcagatcagttttgcatcaatcaaattccactttgtctctttctcagggatataaaagctaggagactttccacttaataaatcaatcaaattccaagattcactagcaggtaggagatagaaggatcctctagaggctgtattcaaggtttgcttattttccccactaaggccctcaaaaaagtgaattagaagaacttcttctcgaatagaaagctttgggccagtgagagtaaggttaataaagcggtcccatgatttcctaagagattcttcttctagttgtctaaaagaaataatatcacgccgaagttccgccactttggagattggaaaatatttagaaagaaaactactatataactccttccaatctccatgaacactccctactttgagtttgtaccaatgtctagcttttcccgttaaagagaacagaaagagcttccatttgagggtctcatcggacattccttctatgcgaaggaggtcacagactcgataaaactctcttaggtgtgtgtatgggttttcctcaccttctcctgagaaaggttgtttttgaacaaattctatgtattcggggtctatctcaaaactagatgctatgataggctttgaagattttggtggttcgagatgtgtgcccgtaggtctatgaaattcatagatagacatgtttgaattcatgatagaccagagatcaaggattagataagaagaaagattagcagagatgaggcaaaggataaaaggaaaatatattttttttatttttttttagaaaatgattaagctagttcgtagtcaactcagcaaccgtctccccggcaacggcgccaaaaatgcttgttgacacttgctaacaccacttgaatactaggttgtcatccccagcatggcactaaagtgtactatggtatttatacgcacacagataatccgcaagcgcacgaataccgttgaagcttttacccggttaaaggttttgtcgtatccatagggaaacgggagaaccaactacgctctaacttaaccaaaatagatagataggtgtaaataggaaagatagtagaatcgaataagaacaatattaaaggtaagataacagagaggatagctatctgttggtaccaaaattgattatatgggaatagagaatagagcaattctagtatatgggcgatgatagtagaatagagaggatagctatggtttctctacttcaaaggggtatgtctatgtctgggacgaaccacgtgataagagtacaccacagaggatgcttatccttaggccgataaaccctacccgtcctgctaacaagacgtggactacagaggaccgacgtaactgtcacctacgcggcctaccacacgatccagctagacaggggatatccacaagtaatctagatctaagcacctcgcttacacctatactacaactctcacctatagcgtcctatagattagaatattcaaaagagttgtgaaccagaacatacataattagtaattgcataatgaattagaagtagattaccagagtcatcccatgagcaagcttgattagagcttgatcatgacgaagtacaaccggaggaagaaccgacaggccagcctctcctctaatcctccttcgttctccatcttgctactatctagatctactctagtttagagaagagaggagagctctcatctctaaaccctagcttttgctctatctatgaataatgaataatgatcaaggggtgcctcctccaggggccagggagtctggttatatagtcccttcaagtgaacctgggccgtcggatcaaaccgacattgattgaacggttattcttgatcctttaggtcggtggagcataatccgcgaggttgaacgtgattggccactgtagcagggcgggcgccctaaggacgtgggcgggcgcccaggtcctggctttgttcggcctccgcttccttcccgtggcttctggagtcatctagatgtaagataattgtgtggcacgttaatatctctatgtaatcccgatgtgtgtgcctttcttctgtatttcctgataaccccctgcagaaatagacaaacaccaaaactcgtggaattctgtcagataaaaccctaagtctagatgttgatttcatttagatccttttctttgtttatttgataattaaatttgatacttaaggaccgtcaacagtggggtagttcgtgatagtgacagcttcattgattcttatatagtccccctctcgtgtattgggctggcagagcaacattattataggggagtgattgctatgtttctcatttaccttgctaatatcactatgcatgggcgtagtcttgtctcgcaatgattgctaagtatgcttgcactaattatgataatgctagactatatagttgagaataacttagggaatattcttgtagttcgttctaataccatgctaatgactatctagagtatctaattgaggtgcttatcatatttatatgtggctaatcagattaattatccttgtcactattcattatttcatatatcttttatgtgacacttatccctgtatgaagagttagataaatgttctcaattacatatgcaatgatagatgctcaatctcatattctattctataatcaatattgatgattgttaatcccttcccagtggtaaaaatataaataacgatacctggaatacttcccgattaaaatgctacatcggtattaatctgtgcgcttgcagatctcattcattatttatttagaagagcaattgcatatttcaataccgcgtctctcatgtcatgctggggatgacaacttggcttaagtggtatgagggataggtttggtatttttggcaccgttactagatttagagaacttagtctacttttggtaatgatgttaagaatacccaacaagcatttttggcgccgttgccagggaaggttgattactaatctggaatggaataaaagattttgagttatcattcgcatcactaatatgattgagcttatctattctctcatacagttttaccccgatatttttctattttatcttatgcaggggaatgtatgaatagaagacatcttctaggaaattttgttgacaatcccgaagcgttattcagaagaactagagccaagctcaagaagagatcatcaacacttcagcaagaagcttcatccaatcaagaagatcaccggaacttgtcttcagagttcgaagccatggcgaacaaagcgatccgcgagttctcagctcccactacggacaacatccgcactggacctactgcagagatcgatggcaactttgagctcaagcctggacttatcaacatggtgccatccaaccagttctgtgggaaggcacacgaagatgctagtgctcatctacaacacttcctggagatttgcaacacatttaccatatcaggagtccccagagatgctatactacttcgcctcttcccattctcactgttaggaagagcgaagcagtggttctacgctacgaaggagaagaatactacgtggacactctgctcaacaaacttcctggctaagttctttcccatgggcaagaccaatgctctccgtgggaagattacaagttttcagcaacaacatgacgaatctgttccagaagcatgggagcgcttccaagactacatcctagaatgtccccatcatggaatggagagttggctattgatgcagacgttttatcatgggctcgggaacagcgcccgagaaaccatggatgctgcagctggaggagcattcttatcacataccataccacaagccacacctctcgtggagaagatggagtccaatcaaagctggaatgaagagaggacccagacacgcaagagaggtggaggtatgcatcagctgaaggaggtaggcatgctgtctgcaaagctagacctgctcatgaagaagctcgatgatagagctagagacaagaaagaagttatgcacatctacgactctcacatgacttgtgaggagtgtggagacactggacactcaggcaatcactgccctaagatgcttgaggatgtgaactacatcatcatcaacaacaacaactactactacaaccgtcctcaacaaaatcaaggttggaatcaacagaggcctaactactcaggtaattatcaaggtaacatttcttacaacaataataataattttccacctctgagagagttagtgtctaatcaaggaaagctaatggataacctatctaagaaagtggcatctaatgataaaatgctagaaaatataagtattagaatggataatttctctactgccatcaagaatcaaattagctttaataaaatgattgaatctcaattaaatcaaatagctgctgctattcctactactaaccccggtataccatcacaaccggaaggattagaatctgcaaatcttgtagacatgtttgatgtaggtaattggagtaaccccgtcactgaattctctactaaccttctgtcggtcaagagaggcgatcgaggacgccccgtcatcccgatctccatcgacatggtggacgttccagaagcactctgcgactttggctctagcgtcaacattatacccagggtactctatgagaaattctttacatatcctttattagagacaaccatgtgtttgcagtttgcagatcagacgataacttttccaaaaggaatattgaagaacctttgcgtccgagttggtaccttgtatgccccagcagactttgtagtggtagagaccggtaatgatgagagggcacccatcatcttagggaggccattcttgaacaccttgggagctatcatctacgctagtgctgctaagatcagtttctacatcaaagggaggaaggaaacatttttcttcaagaacaagactacacaaattccacatcaatccagatgtgaatcaaggaagaggaccaacaggaggaataggaacaagcaagtgtggaccgagtcagctaagatggtcactgtagttcatggaggtcaagatcaccaacttaagtcaccgtttttgaccaaaaaggacgacccaggaatgtcaagcatctactgctccataaatggatacaacttttacaagacattttgtgacaccagatcgggcgtcaacataatggccgcagtcacctatcggctcttgttcggaaccatgccactaagaccaacatacattcagctccagatggcagatcagacatttcgagaaattaaaggaacaataattgatgtcctagtcaaaatagacgatcactttgtctacacagactttcaagttattgacatgggaaaagacgaatatgatccacccatcatccttggaagaccgttcctcagcactgttaaagcaattatctacattggaaccggagaagtccatatgcacttcccctcagagaaggtacgccgttattttactgaccctaactatatcattgaagaatctaagcaggtaaggaagcgacgcaaccgcaaccagaggaggcagatcattaaggacggatgggcagactatgaaggagaagttgtaaggtcagaagacgtagagtttaaacagaactatccagaggagactgaagcaccgagtgaggtatggaaagagaagataactatacatgaagaggaggcgccgccggaagtaccgactccgccaaccaacgaatcccaggacaattgagaaaatggagagtcctgttcggaggacttaaaaacaccgaacgccttgccaagaggtaaacttggtagttatcttttcccttttaattattttaaatagttacttagttaatcatattcatactattctaaaaagaaaataaaaaagtgaaaaaaaaacagtaagccccatgtgagtatacgagtggcataaaacccataagtacattcactgtggtggcataaaaataaaataaatatttcatttctgttttataaaacaaaaatataaaaacagggaataataattattaaggagtctcaacatgataaaggctagatatttatgctaacacttaatcagttccacaagctttgttgtctatttgagctccacaagatttaagaatcaagaagactagcagacggaggacattctaatcgttgtcagaatactgctgactttcaaatacacctctgccacctgctagctacatcaagggaaattacgtcaaaattcagcttgggggagagcaccaccatttataccaataagtatttctatctatctttatacttatattatattagaatttaaatatatataactatgaaaaactcaaataaagattttatgcttatatatatgtctttcgcttagtgtgtttaataaataaataaagtggctatgctaatctgtatctaaataaaactcaagcatggatatgatgaatagttgctctgcctaattttcaaattttaagttctctctcaagtttagatataactgttataatttaaagcttactctagacctaaacttgtgggataaaaacttgatctgaagtctaagttgttaacggatatgatatgggaaggttgagctgttgtttatctattcctagagatgctagaattctagagaattttatctttgaaaatctttaaaatgttgcatgatgagttcctatatgacgagagtttaaattcctaccacagccatatatacatgcttgtcagactttgagccacacatttactatttactgcttatgagcattgagtgtggtcaagctatgtagacccttagaagcttgtcatgtggttaaatcaagatttcacttgcacgttcactcatatatgctacttctactccggaagtaccatccacatatatccatccatttccatctccagaattacccaaaaatattctactcctaatccgggagagaataacaaaaatatttctgtttttctcttgtgaaataaatgctcaagttatcttgttactaccactagctatattatctcaagagatgacactactagaaatgtgttcatcaatgacgattcactagtgacgagtgctaacttcgtcacagaatgatagcattctatgacgaaatttaacagatcgtcatgcctcacgagtgatggagctttggcatgaagaataatgacgaaaatgaaaggattgtcatacattaacaaaactaaatcgtcattggttatttggctcttgttccacctcgacgacatggcgctgtggtcccaccagtgagtcccaattcaagacgtagtgatgcggacccaccttcgggtcccaacttcgatgacatggcgattcggtcccaccaacggggccagtcaacgaacacgtggcttcgaggggccacgagttgaggccgactagctgccagcccgctccctttattttcattgcaaaaaattactattgctccctttattttcattgcaaaaaattgctattgcatgggttcgaacctgcaatctgctggtgaagagaaaggagcctcaccactagaacacaagggtttttgtgatttgaagatacatatttttctatttgtactgagaacatagcgatgacgtagcaatgtggtctcaccaatggggcagctgacctgcctctcggtcgctgcctgcccctcgggaggctcgaacccacgacgtgtcccttaataggtacgtgccttaccagtaggacattggcccttttgagatcataacatacatgttccgccacttgtactcgatacatgttccgccatttgtactcgaaacatgttctgagttgatggaccctatatttatgatcacatagagacatgaccgattatgtatactcgtggagactgatcgcgagggcgtctgtggccctaaaactagtgtcgagggtgcatccctggtggctaatcagcgccgtgcggacaagcagagcggcaccgggcagtggcagcgtgcttgggacacaactgtagcgccaacacacgagcagatcggtgctgggcagcggcggcgcacgtgtgggacagagcagcaccatcggcgagcatagctacgtgtggtgcgcgagcagaggatcgccaattacaaggtttgattggtattcaatttttttctaaatatatgcatgtctttgatgtgtttttgaaatttgttgaatttattactggaaattaaggagtgagtacaaggttttattgtattatcaaaacagatggatagaagcccgactttgctcccaacaccaatcggtggactttgcttatcttcctttggtctatgaacaccgagactacagaggagaggaaagcaggcatgttaagacttggtgcagcttaggctttagttaagtaaaacagtggtcgagatatattaaacacacttgagtatctcaatggtaatgcacatcgagtttttcctttagctccaggtttcgaggccaatgggagccattttttggtgttttttatttctctatgttcattttaccagttttttaattagtatattattgcttaataacctcattcattttcaagtatcttattacatttgttacatattattttatttatttgtcatgcacatcctcacaaagacgtacatgtctaacatataacctaataactaagtgagagttattcatgcttgtacaagatatatagtaccaccttgtcaaaatcatttgaaaattttatgtgatgtttatggaaccaaactatgatgttgtgtgcatctatgtgattttctgaccaagtttctctattgttctaatttttgtttgattagtgaataaaaaatgttaaaataccctaagctagttgaaaaattctaaaaacttgcaaggacacctcatttcggtgtataatgatgacaaaaaagtttcaactatttctgaggaagtgatcatgcacaaccacacaagtgtctcacatgtgtcacatatagcctagtcacttagacatgttcatgattctaggtgatgtacagtaccaattcgtcaaaatcatttgaaactttaatgggatgcttatggagccgaaaactaatgttgtgtgcatctgtgcaattttctgaccaagttttcctattattataatttttgttggataatgaagcataaatgttaaaataccctaagctagctagaaaaatctaaaaacttgcataaacaccttattttggtgcataatgatgataaaaaagtttgaactgattctcagaaagtggtcatacacatcctcccaagggtctcacatatagccttgtcactaagtcaaagtttttcatgcttgtggagggatgtatagtacgacttcgtcgaaatcattttaagcttttatgtcataatcaataagtaataatatactaattgaagatctggcaaaaaatgaacatagacaaataaaaaatacaaaaaatgttagaaaaatgtaaaaaagctaactcccatcagattcgaacccaagagctcataaagaatctcaaacttccttaccattgcgctattaaagtgtgtttgttggttttgggacacatgttacttaaccagcagcctgcgtcaatccgaaaaaaaatattggattagaaaagctatttttagattgattaataaacacggactcaaaagtaatggcatagctgcgcgcagtagtcgtccgatagaacccatgcccgcctgcctgctgcgctgcctccctgcatttccgctcaaaatagaggaaaggctccccagcccaaccgttctcccgccctcgttcctttgctcctcccttccttcctcaggaagcctagggtttagggcttcaaccgccacgatgtacggcggcggcggcggtggtgccgccaacgctaactcgctcttcggcggcggggcttcatgccctcacagtccacggtggtcccggagagcagcggcctctccaaggtccttcctaatccccctcccctttgtattgctccctttcgtccatttgttctccatcccctgctgacccgttacgggcgctcccgatcgaccggtgtggtgggcagggttggagcgcgcagacgctgctcccgctcaccgtgaaacagatcatggacgcggcttttcccgggcggtgcttagaattgcaagattcattcgtaagatttgcattttggatggtcacactgcttggatggaagatttgttcattagtagacccattatccattaagaaagaaaaatggcctcttttatctgatgttgttctactggaaattagcctctaggacataggtatggtgggccccaatgaaatgcttcccttttatgcaaattttccaatacttgctataatgtctttttttgtgaaatctaatttatctggtttcagacggttttgcattgagcatttagttggcatatcgaagtcatttaaaatgttgtatttactctgaattgcaggttaggcttgttggacgc

SEQ ID NO: 5071 - DNA, 878 bp, Sorghum bicolor
  Intron number 4 from transcript Sb03g023240.1 (locus Sb03g 023240) derived from phytozome v7.0 (chr-ID chromosome_3; pos 46424398 to 46425275)
tcactgtaaggccatacctgacaagtcacttatctctgttgctacgacattcgccaaatatacatgatttccctttctgttttgtatttttgtttttcacaatgcatacttttcactgattgatgctgctatttagctcttattgttgtctctatttagctcaactgttttccatatccaagttccttttgatttaaaaagtaaatttttttctatgcttcatgtggcaaatgttgatgaaccttgggattgcactgcctccatgagcatcttttatatataatacttcatcatctgtagtcattaccatcagcatctctttaggagacatttccaagagggcaaattcataattaggcctgaaagtttacatgaaaactgggattgcccagatctcactcttcatgtgaacaaggcatggggaagagtgtagtcagtgttctagccttcatggcaatcttttataatgttatgtgcctagcatttggtggataactaatatttctcattatgccacgacatgccatcgttatgggtgggttcttgcagatttgccattcctggcccacatgtcagtgactcatatggtcccacatgtcattgacacaaacagggttggcacacttaagggtggcaaataaataattattccgttagtaatagcaataagtggaaacatggttgtgtatgtgtatgatatctgcatgttaattttatatctggtgctcccaaattgtctctctacttgataactactcaaacaaacataaaatacaggaagaacatatgatgtgtatattggattctttgaatctaacattactatcttatatgatgtttcaggcagccaagtccctggaggagaagctcaaatcttc

SEQ ID NO: 5072 - DNA, 6345 bp, Sorghum bicolor
  Intron number 3 from transcript Sb01g022150.1 (locus Sb01g 022150) derived from phytozome v7.0 (chr-ID chromosome_1; pos 27142835 to 27149179 reverse strand)
ttcctggagaagaagcaggtgagcagatggcactccaatcgatttcactttctttccttcgtcatcttctggattcaaatggttcgtatgtatggaaaggagtatcatgtagattctttgcttgtgtatgaagtaattgaagataatgcttgtacattcatggtggtctccacaccagttgaaattagttaaactgttaagtaaaaattgcaacttactttggtgaaataagagggaaatttatttgttccttgaattactcatagttctacatggttcttaggttaagacttaagacttaacagtggcgatgtataggttaatgctttcacacaactaaatatttgttactataataactcttttgtggacatttgtgaagtttgattgtttctttatggttctgtggatactgtagctagcatgactaagtttgtttttttacttgtggtgctcatacataattttcatgttgggtttcactatctataaccaatatcttcaacgattagcttttttttaaaaaaaatatttagatacagtgatcatttgaacgctgatgtctctaagcatctatacctgtagttgtctagatcaaaatatcatactaatttatagttgactagacctctttatatcttacactttgtgaattaaagtcaacaaaattgactcaatttctctttattaaaagcttgtttgttttgctggttgcttaattatatcgctcataacattacttgattgaaatatgcatcttaaacatgaaccctaggaccatattatctcatatgtattcaaaatcactaatagattatttgctcgtgctgggttccgtcttcactaaatttgtatcccattttttcctggggtgcacacttgtgctctgtgggtgccacactgttgatccaaaaagaattccatgaattttgcgtgactacacaacataacattgtctgcatctgtgatgtttttaaagtttcagttttttagaatagtgcatcatgcacttctcataatttttccacaaatggggcattgtaccttaaatatatggcaggaaacttgaattttatcgggtggcataataggaatggttcttattacacattgtggtgtcccttgatgaccccacacaaaatttggcttgtctctttaataaacttgagttttggtaggagtgttgtcccttcatatttgggttaagatgattggatgttttctttcttttcttttttttgctcgaacacacaggagagctgcataccattgttttaagaagggaaaaagagggggaaggatcccttacaaacacacacaccaacaccacaaaagtcttgctactaacaatctgactcgtttgtgacaaaggatgaaacgggccaaccaaagaaaacacactacaccggcacaagggtgaggaggtaggagatacctctatccccggccaaaccccaacaaataattcattcccagcgagcagtaagaatctagccaagtctttagagactccatcaaacacacacttattacgatgaatccacaaggtctaagcaccaaggatgacaggggagttgaggcctttctgtaactggtgcccaacgtgtacattgattcgttcccaccaatcatcaaataactcctcaccgatctgcggggaaaggaactgcaggccaactctttgtagaagtttgaaccagaattctcttgcaaaaacacatgacaggagtaagtggttgatagattcttcagcttgatcacagtgaggacatctatcaggatgaggaagccctcttcttgccaagcggtctgctatccaacaccggtcatgatctaccaaccataagaataatttatattttcctggagcccaatgatttctaatttctagtataaggacgaaaaaactcgttccctggaagagatttttgtaagccgatcttgctgaatattggccctttaaagataaccaccagatatgataatctgtgactccgggctgcagctaccaaccataagaagaatttatattttcctggagcccatgatttccaaattctagtataagccaaaaagaactcgttccctggaatagattttgtaagccgaccttgctgaatattggccctttgaagataaccaccagatatgataatctgggactccgggctgcaggatcacatccttgatcaaatcccatatactgaaattctgagatgactcccgcagttagattgccttggatatcagagacccacaaattatttgagagggcattgtgtacagtcctgctagctcttctttttgagaccaatgcaaaaacttgggggcgcaaggtcactgatccttttgccatgaatccaactgtcagtccagaacaaggtgtttgttctaaacctctgttataacagccatagagaaaaaaaacatttgagcagggtggacttgaatctggaaaacaaaccatggttgacttggatcagttttcttcagccatctttattctgagtttaatctgctgaactctttgcactagatagtaagattttgaataccatgtttggatgatgtactgtttctctgtagtttctttgatgccatttagtctttgttttgcacattggctttattgggttctggtacattgtctgaattgttcatgacgttctggttttgttagtttaggaattggtcgcagccatccactcatccttcatatacatgcatggttaacatgtgttattgtgtttaacagcttatgtggttactatatggccctgtttgacacagctcctgctctgacatccatgcaggatttagagtttggagtttcaggataaaatagagggattagacatatttgtttaatccaaaataatacaatattgcttaataaaacctttagtttgtccacagctccagctccaagattttctggagctaggaatgaccagctccaaatattcttggatttaggactggccagctccaagcctccaaatagtcttggagctggagttgtgccgaacaggtcctatatgtatgcattatcaatttatcatctcatttgataaacctgtttgagctgttgctgagtcatgttccacgtatgggcaccgatgtcttaactccattcattctcatgcatcttactgtgattgcttaggacttgctagttgaacctgagctatccccctaggttcagaacatcatacactctgtcatgcgtcatctgtattagttagatggccctgaaccaaagaagcatgttaattgctgatgactgatggccacacagcatggcagggatagatgagagatactaggaactatgaaatatttcttgatcaacgattagaggtacaagcccatccttatatagatgggataactggatttttaattagttttttaacctctagaattaaggagagtatcgacccatttcggttatagctgcattagaagtattaggctaaaaaaattctgaaaaattcaaaagaataacagcgccattgaaattttaaattagtaccaccgttacaagtttacctaacttcgtgtataatagtgcacagttcaaccctctacacttggacttacactccaccacagatttaaaacacacctaggacaaattggagttccactaaccatacatctacacatattactttaagttaaagttgaactgaataccatctaatatcaagcaacctttgttcactatcaataaaaaatcaataaaaccgcattgtaattgacttctacatgctgatcaaaataggagaagcatgttgagcaccatttgacatcttcatctattaacttctgagatatgaatttttgtgcaaactgaaaaagtaaatcataatatcgatgactgaagcaattaaacagctagagattgccttcttgtacatacaaaattttaaaaaactagagattgccctattgacatgctctgttttactgcacctaacaaaagtaggcaaagacactatgttgacacctttactagccaatcaacttgtgtgaaatttggttggagatgtaatgtagcttttgtagacaattcttgcttctaatctgtaattgtgtctgcaatggatctgtgacattgttttctagttaatctataggaagaaaaagctagtcaaattgttcactggctttcacctaatgaccgagctagcacacattagttacaaataacttgattctagtgatatcatcaccttgtggcgtttggagagagtaagatgggcaacttgttgttcagactaatgttcagggctatgggccagtgaaaagttctttactctgtatttttgacaagacagcaacagttggactagaataaaggtgtacagatacttcatcgattaatctttaatttaatgcatttgtatgagaaataaactttaaaaggataaagcttgttttctgttccttcaatggagaagttgaattgtgacaaaaaaaggaccaaacgaattatagaacattactctctcgaaggaagatactttagctggctaaatgctcttgcttcattctgagtgcaaatctcgagaccttttctacatacactggcacttaaggtagacctccactaggcttacttgagggactcagctgacatctatggcgttagcatagaatcagtgtgatgataatgcaatgaattggtgcctggtcgaagtctgaaagtttgatgatctgttctgaaccaaaagattttgggggcaagttctggtgagtgactaacaatgttttcaggtcggctggtcgaacctggtcgacctgggaccgaccagacgattagtcgtgattaatcgtcgaccagcttgattaatcgaccctggtcgtccaggcatcttgtcgcccttgtatatcaggacatatatctatatatctatatatatacctctctatataatatattatgcaaaataaaggaagcaagaagcatcaagactgcatttgtgtttagctggtgacttatttgtgggagttgttttcctctcttttctgcactgtccggaggtccatattcatgtcccaaactccatttctttgctgacttgctgctggaagcctggaataccataattagcaagcagcaacactaatgcagtcttgatcttgacacaccttaacagcagcactgctgcaatagcaaataactaacatttagcagaccatagcagccacacacccagcatattacataaccaaagtccatgtcctggttaaacaggcccaaaaacagagtaaccaaactggtcatccatgtcctggtcggacgactaattggacgaccagctaactaatcaaactaatcatcaaactttcagaattgggaattctctcccgcaatatattcttgttattaggctagcacatatagcatattataaacatgatggattatgctgagccacaaatttacagtgcaacttaaaaatgctatgctctagctttatacatttcaactgtctatgaaatatttaatcaatataatgtcatttttgtacctaatgtctctgacctgacctgagatgtccaatgaatttatcctctatgcatgtaatgtgtatttatcctctgtgcatgtaatgcacaataatagtcgggccattttgtttgctgcacacagaatactctgaatttcagtgcctcccactgtccagtgtagtgaatttcagtcgctcaaacatagctccctataggagagggtagagaactcacatcgttgctattctggaaggtggaaacgccttagtggatgcggaggaagaggtgaaggcgtctccactgtatttgaggtgacagcagcaccaacagtcatggtttgccagcaagggggatcttgatgcggaggcggaggtggaggcactggtggacaccgaggcaatggctggaggaggtggtggctgtggaggtaaggaggtgccagcagcccagccgtagcagcgcttctctccagagcttgtggcacttttacttgtttgtgttgcggatgagagggagccagggaggcgctgatcgaggggtcaaggcttgtcccagggaaagtgggtgggttctgctgacgccccctgtcaacagagttttctaatgcagatgtgaaatggcctatggatatttttttttctcatgtggccttctccccccaggaaaacaaactgggaagctcccagggttctagtttccaaacaaagccttgaggtgtcatggcttatttgggattagtaatgtagtgtagaagatctatctcttggctggcaacaattacctatgtatatgacaatatgttaatagagatattcacttggcagg

SEQ ID NO: 5073 - DNA, 1288 bp, Sorghum bicolor
  Intron number 2 from transcript Sb08g019290.1 (locus Sb08g 019290) derived from phytozome v7.0 (chr-ID chromosome_8; pos 50001506 to 50002793 reverse strand)
ctggacaggttttatttcttgatatgacaactttgatttatgcataggactactccgcccctactataaaaacaaggcattgtatttatatgtaataaatcatcacaacatttatgaatatgcaaataccttgatgttttaggttcattcctcaaaaatattttcataatgatattggtttactagattcagcaaaccaaaatatgtttgttgtttatttcattttggtatccaaagcatcacttttgactactagttgcagtaccattaattacttatagaaaaatgtctacataaccccccaaactatctaaggtagaatacttcatcccccaaagtataaaaccggatattctacccctgaactttcaaaaccggtcaaataacccccctaaagtggttttagagggtggttttgtctttttcttttttatttatttccgctgaatctttgaaaaatcataataaatcacagaaaaatcataaaatgaaaaattcaattttgttggacttttgatgagtagatctacacaatgaatatataatatggtatactttagtacaaagtttttgttgtagatttaaatctatgtttttctataattaaaaagaataattcatatatgtagttcctatggttcaattgtggtaaattttttatggtgggctcattattgtatgcttgaactacggtaaaagtttcatatccattggatcaagtataatttagttatagatttatttagctttattcttgttaaatctatgctttatctataactaagttatatgtgatccaatgagtatgaaatctttaccatagttcaagcatacaataatgagcttaccataaaaattttaccacaattggaccataggaactacatatatgaattattctaattaattatagaaaaacatagatttaaagctacaggaaaaactttattctaaagtatatcatattatatattaactatgtagatctactcatcaggagtccaacaaaattgaattttttattttctgatttttctgtgatttattatgatttttcaaagattcagtggaaataaataaaaaagaaaaagacaaaaccaccctctaaaaccactcgagggggttatttgaccggttttgaaagttcagggggtagaatatccggttttatagtttggggggtgaagtattccacgctagatagtttgggggttatgtagactttttccattacttataagtacatgttgattgcatctacctttctattctaatttgtaacaattag

SEQ ID NO: 5074 - DNA, 1764 bp, Sorghum bicolor
  Intron number 5 from transcript Sb01g040530.1 (locus Sb01g 040530) derived from phytozome v7.0 (chr-ID chromosome_1; pos 63886342 to 63888105 reverse strand)
cagacagttttttggtaagacattattttctgtgtgcagtaagtacaagttatatgctactgtgtctttcacattggataccttgttttgtgctttacggcttcacttgaaacatgtataattattaatagtttgtgccaaaactctttcctgtattaattcccaatgggttgctgctattgataccttgtagctatcgaccagttcccagtaacttactccctctgtccctgaaagctgcaacttctagagttgtcctaaatcaaacttttaaaactttgaccaaatttatagaaaaaaacgctaagatttatagtaccaaattaataccattagatttatcattgaatatattttcataagatactcattttatgtcatagatattgatgctcttttctataaatttggtcaaagttaaacaagtttgattggcacggattctaggagttgaagctttcagggacagagggagtatatcaaatgtattcaatgaactttagtccccagtccattaaatgatatgttgggaaagccttataagttattcctatatatttggagttgtcaagtgtcatgattataatgaagaaggtttaaaactgttaatctaaagttacttcgagtgggattaacttgctgaacatactgatgttaaacacactggtatacaaagtattccttgaatttcctgtccctgacacatgcatacttgaatattgttgttttgttgccccatattttggcactttattctgattctgtgctctttagcctttgttatccggtttccagtacttcaaaattcaaagttattccctctttccaaattataagttgctttgatttttttggtacatcgattttgctatgtagacagatacatagcaaagtcgatgtaccaaaaaagtcaaagcgacttatagtttggactggagggagtattcaagaatttgataacccttatgtcctggtttggatagtgaattttttagcacaatccaaagggattcaaccttatattgagacaagcagtagtgtgatgccttggcattgataagatacctttaatagtcttcagttgatgaactttgattgatttgtggaaataaaagtgaaacaaatgaaataaccccttgtgtaatgaagttggagaagatctatggatagtaaggtgtcttgtgcagacaggaagaactttgatcccagatttgaaacagtcaaaatgtgagtctatgattccaaagatatgatgcagcacaactatattaatttggaattttggtgaaagtttttgcacaagattggaaagtacttctaaagcagcccaagaaagttttgggcaaattttgaagcattgcaagccacttggactatttttctgttcattattttgattattttccctctaattaactttgtggctttaaggtttgggtcaactctattcttctatagtacaatgcaagaatttttccccttcaaaggttctttggaaaataaaatgacccaacatgccccaattcgtgagctgcattttgttttgagtatggtgtcacatgttgtcttgcttaggctgcactacatgaacaaggcgatgttgagcctgggtcctgttgtatgttgatgtgctttgtagttttagttaattcatggcacaagtgcttggatgtattcgttcttgttaccatatcggcaattgttttgattaataaattccaaatttcaggttaattttatcgattcacttccagaaatataccc

SEQ ID NO: 5075 - DNA, 2626 bp, Sorghum bicolor
  Intron number 2 from transcript Sb09g005660.2 (locus Sb09g 005660) derived from phytozome v7.0 (chr-ID chromosome_9; pos 7547170 to 7549795)
gggaagccgatctcaaggaggcgcttacctcgcaggtgcgtgtgatgtccctgtcctgctcttcacatgactagtttgctgtgcaaatgccttagtgcctactactgcctaagaataattcaggttcagcatggacatagagtaatgtttccatatttccatttgttcagtgtactggcttctttcagcactcaatttcaatttcaaaagtatagaatacatcatgcttgtggattggtgtatgtgatttgacgttatgctcatgttgattgttttgctgttgatgctgtgttccgatggtccagtggcaatgttattatccttagaagtatcctcttctttaaaaggagagcaaaaatatcaggatagaacaactatgctagatcaaaaactggctacgcactttgctatgctgagactgctttgtgttattctagtggttgttcctatttggtgctggcttttgatcatgtatataatgttagccaagttctttgtcctcgttaatttattgtctaatatcaaaagaaatcccacagttctatatcaatctaccactgcacttgtgtacttctcttctaagttctaacattgttcttttgcaagtacatgcttgtctcgaacaagtaccatgaccatagaaacaaatccttatatctctactcgtcaagggtcccagtagagtacagtgccgctataatcttgggactgttgcttccacatttcgttaattcagtgaattctctcttctgcaatttttttgactccaaggtgagaggaagggttaggttagttatagcccagcgttatgttcagaattgttgcgtaacccagcttgccaagaattaaaaggctttgttgttgtattttgctggaggtaatgaggtataatatcctgatgtaagctcaattcaaaataacattttaaaggtacatattttgcctattttgtatagttggaacttagctaacatagcttttctgatattaatattgttgtttagtttcctatgttctgatgcaatgcaaacacttgtaattagttttgcattgattctcagaacattgtgaagtaggggtatacactacacaacatagggctgggcagagacctataaggaggtagtagtctagaagagggattagaatgtagactgggttgacttggatatactattttcttgcttggtgcctggggcctaaaatccctagtatatataagatcactcttaagtaactaaactgtcggattgatacgatctcaaatatctaagcattggctgggcccctgggaaaaagcaaggttagaaaaagcgctgggcggtgacctactgcctagaacctaggcgtgcctaagcgttatctaggtgtttatgccaaatgccaaattataccaaatatgtgtatctggataaattaaagttgatcttcatgccttgatgtagtctgtaggtgcaacaccacaccaacagacatattgcagaggcatattaatattatatacaatacaatcaatgaatcatggttgtagatttcaaagccatattatatccacaaagatgtacgtagtctgtagatgcaacacaactacataccaagtacctacagagcagtctacactaaggcatagaaggatttaataatatgcctatgaaattcatatggaggagcaggggaaagcggtgggcaggagtggagaacagaggatcttgccttgacgcttgaggtcacgacgaccggcaacgaggaggtccggccttgtgttatggctcactgtgccacgcaacacagatggaggaagaggccaccgcagctgggcggggaggaactgcaactcgatgtcagggatggtgtccagtgggcgacgggaacagatcaaggagcagcacctgggcaggagcattgagatgaaattgggcggcggtgcggcgaggagctctctgtgacttgcagcctgcaaactttatccttccagcgcatcagctttcttttcctgcggtgcagcttcgcctgcgcgcgggctttcgcccaccaaaaatcgtcccaccacacgtctggctgcttcctcgtctgccttagcgccgtggaattgctgcccagtgccgctgagacaccccccccccccccccccccggggcctgctgtccccctctgcctagcacctactcgcacctaggcggctgcggaatagcgcctttttgaacactgggaaaaagaatccaactgttgaggacttacgagaaatatattacttgcttgataatattgatgaagcattctcaatccttggtgttgacccattcctattgctatgtggatactgttcacaagcctcagtgcagtgcaggacaggccctgacatgatgtggctataatccactaagataccagtgtatgatactgattaatgaggttgatcaactccttacagttatatgcagtttcagtattctacatgtggtcttcagacttcaatattattatatatctaactataaatatactccctgaacagctacaattgtcatttttttatttcttttgtcattgttcattatctttagtcgtcatcttcatttctcatgttaaatggaaactgcattccgtataggtgcgtagcctagcc

SEQ ID NO: 5076 - DNA, 4934 bp, Sorghum bicolor
  Intron number 1 from transcript Sb04g028160.1 (locus Sb04g 028160) derived from phytozome v7.0 (chr-ID chromosome_4; pos 58243078 to 58248011 reverse strand)
gatcccctgccgaggtcctcgcagtccgatactgggtcagtttccaattcagtacttagcatgttcaattcattttccaacagcagtaatccaactgcaattgcaaattgttatcgtggagcatattgcatgacgtgcgaatgctgaggatttcatattttttttccataccatttgcttggttgtactaccaactggctgcattacagtgttctatcatgtaatttagtttagtaagaacggaaatatagaatgcatttgtctctcgagtttagaaaaaatttcagctgcatggattatttcatggagttcccactgcataagtgtccacttatatattttaaattttgttgtaagcatgctcattagtcattacactagaaagtgctgcgcgaccttgccgtgcaggccttaagcgtatctttgccattcttttcattcttggtgtctctctggccgtcgtcttcctaaagccctcctcaagtgtcaataggtttatgtaatctaggcaaaagtggctttcgattaggccaaagcttccatttgttgcaacgaaggagatgtaatgttgggtgaggccttgagatcttgcaagtatacgttgcctcttacagaaggatgaccaaatagatcagccatagaagaagctatagtggcaaccatttaatttaacagtataactccaggtcgaccaatgcaattgaataacctttcttaaatacaagcttgcagttttggacaaatgttccataactaaaaaaaaatactgtattttcttatgtttttatattttagaatgggagcttgtattatgaacttttcatagccaaatgggaggttgtggctgcccctttttttttcatcgtattgcttaattagaagtactatgtagctattttagttaaaagtattcgtttgaaccatagcattctgaaagagtgcatggcatgcgttgaacctgcaaacaggaagcagataatcaattaaaataatggacttcaaatctgatatagtttggaggatgtgggaaaatagctgctctaggctataatttacggaaatgttgcttaagaaacattcgtatcgaagttgataaataagtttaggccttttctggacaattagtacaattagcttattgtttaaatggtcctctatcatgttacatgatgctgtaaactaatggcttctatgtggtttgatcagattgtttcctccagaaaaaaaatatatgtaaatagaagtgttgtcataattcagccatccagaaaacatgactgcttgagaccagaaagcaaaatttgtatctagggcacactaaaataagatacttttcttgaacggacaaatcaccagttctcagaaaactattttttcttttcgtttttttatttaggaaaagatctaactacaggaagttgggtacagaccagactgatgttgatcacaataaggtagacttaccaaaatgttttgaagcaaaactaaattatttggcacatctttgctgcgccctactagatcgtccagttattggagtccatcataataacgtttattctacataaaaaaaaaaattctgcacatttgataccctagggtcagaacttgaagcaaaaggttgagaggtcatcactgataagctatgttctgcttgctcttcattgtcaataataataaacaacagatcccaaatggaaatgtgctgcaaataaatacaaaacaaaaatattttttatcataaaaaatcatagatttaacaataaattgcatgatggtgcgaaatagcacactaatagagattatattataattaccaaagtagctaaacagagtaagatgaaggattagatttttcaaagcaattccactgtttttctagaactacccacttgacaatcaagggttaaaatggcacactttgtgcaaacggtggaattgccatacttgtattggaattacttatgattttgctgactgcagtcagaaatttagactaccactaagccaagtttcaatctgaatgagaaagtaggaagatagaaaaagaacatttcaggctcctatacctgtaccttcattggcttcttggaggcacctacaaattctattatatacaaaaacatatgtaggtgaaaccgtgaaagtcaatggaaattttgtgatttacttttgtcgtcgattttagcagggtagtgtaggaagtcaataactctcaattcattgtaaatactacctttacttcaacttaatgaaacgacagacacaaaacacctgccatattcgctcaaaaaaatggatagaagtattatgccgttctcagataaagagtgctgcatagaagtgcatagtacaagtgttttgagcactatattttacccatacacaagtttgttcagtttggatagtacctgcgacaccttcttggaggtaaccttttatcttacgtaatccatggtctttgcaggtttctcaacctctatgagatctcctgagttcggaccactaaacaatctaattgttgggtctgcatgaaacatttatttatcaagatttacttatccaaacaactaaaatgacaatgctagagaacgtttacatcaatatttggcctcgttctagaaatgaacaacccagtatgcagattaaaataacaaagaaaatggtagaagtataatatgattgaaatgcaatcaaaatatttttttaaaaaaaattataaatgatatacaacaggttagggggtaattatacatacaaagaactgatttgtttaatatacagcaagtaggtgcataacgaattgcctgatgctctgacatttcagtttgaatagtagggtcctaagaacttactgaatatatgaatagtatagtaaccaacaaagaatttttttattttgcatatggaaactaatctgcacctggtttctagccatttgtacaacaaactgaactgatgaagggatatttagcccactgatctaactgatataactaaatagctaagttgtttacttatctgttaatggaaatgcagatcaaggaactataaaaggtttgggaaatgctatttcgtgtattgcttcaaagatcagtaagatgaaatcgcccattgatcagaccactaacattaggaaccataaaatgtaaacacatttgagtttgcaaaggcctaagggatgaatacagacctctgatgccatccttctttactgtaccccaaattaccataatttttttattcagatttgcaccaacctaataagcttgcaaaatgagcgagctgccaagttttggacattgcacagtatgatagaagacaaacatctaaattcacagattgataacaaaaggagacggaaacatggcaacgactgaacctcgaaggctatatgcaaaaaagatattaagaacaactcatgcttatgcccaatctgagtacctgaggctttgtcagtatcactaaacatgaatagttctatgcaagaggaaccttccacaggaaggcaagtatagaaatcatatgtcctgaactatcaacaaaggattcattctttgtttaattttttttgaagctttaaccttggatcatcaggaatcctagtttaattacagatatatggactttcaatctttaacccattaccttgcggcgcaggagctctatcttatcatgggctttactgtttttcatggcgccacaggcggcccagtgctccgttggcttgctgagctgcaccggtggccatccgattttcctgtgccattccttcacggcggccctgctctgttttttttctatgggttgcagtggaggttcaggtcccattggatgggtgttgccgccacttctgtcgccggagccgtaaggccaatgcaccagcgcttgccgcaattgacggcacacacagcgaggacggacctgtggagccaggcggtgagtggccagtgtggcaaacaggacgaggtggagccaaagcagcgcatgtctagtgcagtggtcagcatgggcgggggccccagcggcccctgctacccttgcgcgttcgccgtcgaggctcgcgcggggacatcgcgtcgcctgagggtggccaccgtcggcacggcaggtggcagctacggcggacccgcccagggccactgccaggaccgtgccgggagatgcgtccgcgcccacggcaggggccagccaccacggggggccatgtcgggagagggagggggtacggccacgctgatgtgcaggggccgggggcggccactgtcggggccctcccgcgccagtgcaacaccgcgcgtaccgtgggcgcgcgggagaggaagccggcggaggtgtcaatactggcctcgcggaggctacgatttgcgagtgcccgtttctccagcttaacgggcgacggatgggtctgcgcccgactcaacccgcaatcgaacggtccagaacacctgattgctcgatccgacggctcgcggcttagtgggcgacgtggcacgatggttagcccacttttggtgcaggaatcgtatttagagatatgtggcttctcaactatgatacaacatatcctttattctatcagtaacaatagggattcttgtggagcaaaatcactattctagttgccttttttctgtaaattgttttctattgttgaatagtacaccgtcgttgtgtaaggtttggtaaaagttgtggtgatagctttggcaaaagggacttcatcttgacaggaatgacatctcttccatctatgatgactgatcaatcttaatctgtactataatgatgtctgatattctgggtggcactgatgttttgtgaaaccgaccgtattccctagttaatttttgactcaccatatatctgatatgtatggtacctcatggtatatttttttgttcattattgacagaattttaacgcccttggct

SEQ ID NO: 5077 - DNA, 3009 bp, Sorghum bicolor
  Intron number 2 from transcript Sb07g028215.1 (locus Sb07g 028215) derived from phytozome v7.0 (chr-ID chromosome_7; pos 63224050 to 63227058)
acaaaaaggaagaattcctacacaggtgacaagccacactatatggggacgcaaattatcgcattatattttccatattatgatcactagtgtatcaaccccatgcgcgcctctatattctaggagacattatattttatctttccacacactctgtccgttcattttaaacagaatactcttacctgatgatcttctactaccaattacacaatatgtcattaatctaaattcataattttcctcctctgcttgctacgcacctcataggtcttgaataattggaacctcagtgtgagtttgctagttttagttggagtccaatgtactgggactgggacttcatgaatctagatggcgactttccttattttgtcctattaattagtacaatttttttatccttgtattaagtagaagatacattatctgctccttattcaaagcgctcttttctattttattataaatacggatgcttattggtttgtagaattcactcttagctactacagtgacataaacaatcattccggctagctacaccacaattctcaaggtgttacattctccatcaacaattatgtgtgtagtaataacatatataacactactacataaaaacttaaccgtagcgggacgggtcttttgcatttaccgtggtggtttttgcaaccgccacggccataaggtcacggttaatcatgaaccgcctcggttaattctttaaccgtggcgggtgacgtaaggcaaccgccaatcttggttaatgttcgcgtaaaaacccaaaaaactaaaaaattgtgattttgaagatttgaaccgaagaactcccattcaacactatcaccttctaccactacaccacacaatcatttacacatatatataatacgctatatttttatatcaatatttcataatcttacattgtgtattttggctactaaatgaactcaactgaaaaaacatttaactacaaagttgtaaatcttgtcaagaactacaactttgatatataatgtatcaccatcaaagatagtttgaaaaaattcaaaaaattgagccttaaaatatatgaatttcaaacaaatatttgagactctaggtgactttaaatcaaaaacttgtcaatatcaaacatgtagatcaggtggaccactaaaactttggcattaactatgtgaacattgaagatcatttagaaattcaaaattttaaatttcaaaatctataaccttcgaacacatgtttgagactctaaatatattcaaattaaaaacttttcaactataaagttatagattctatcgagaactataacttttgtatagaccatgtcaacatctgagattgtttgataattttaaattttaagtttcaaaatctacacacttaatagtactttttagaccctaaacagtttcagttcataaatttttcaactacaatgttgtagatctcatcaccagctacaattttgatataaagtttattttcatccaaattcatatgaaaaagttatgaattattttttgttgtaaccattaactaaggcggacattataacgtaaccgccacgattaattagctattaacggttaccttacaatgcccgccatggttaatttttaaccgtagcggttgtccggtgggctagccggcttcagccggtcgtgaataaccgcgtggcgaataacgtctgtttcagagtccttatgtgaaacgctgcgcaaaatgaaatgtatagtagtataatttactatgttagaatatcaacacaatttaaattgcatatttaccgttaacagatcatttccatgattgctaaactatatatatatatatatataaccctaaactacaaaaccgggtaacaattaccctccaactatcagaactagaaaactttggtccttttggttttaaaggtgggtttctattttcttaaataaaaaaatctaatttaatctaaaaattaataagtaattcatttaacattagaaaaatataaaacaagtttcttttgttttctaaaagtattatctatctgtttaccactcattttagagttatttggatcttatgttttaaaaataaatattaagcacaactacaagcattaaagcaataggaacagaaataagccagttcaattaactatatatagaccataaataggtagataaaattttaaaaagattggtactagtttcatatttctaatttaaaataaattagttctgaacttttagagattaaaacagtttttttattattttagaaaacagaaaaccaaccgtgaaaccagaaaggaagactagatttaactgatttcaatagttggagggtgctttattacttggttttgtagttcaaggttgaaaatcgatttgacatacaatttgaaggttgaagaatatacttaccctaggattctatactccttccgtcccaaattataagtcattccaagaatcttggagagtcaaagtttttcaagtttaaccaaatttatatggcaaaaaaataacatttttggtaccaaccaagtatcattagattctttgttagttatattttcatagtgtacctattttatcacataaatatttatatttctctctatatttttggtcaaacttgaaaatgttttgctctccaagattcttggaatgacttataatttggaacggagggagtatattaatagtggtagaagtggatattttagaatcttattaagcatcattatgatatttctgaaacagcctatgtatgtaatttagatttagaattaatggagattgagtttagttttagtaacaatggtctgtttaatttatatacaaatttaatgggtaatattggattatcttttatcaaactatatagagatgaataacttacatgaaaatttatagttttaatagtggtgctacttaatttaaccctttcgtcttttctttgttaggtctaagctttgggctaggattgggcggtggaaca

SEQ ID NO: 5078 - DNA, 5317 bp, Sorghum bicolor
  Intron number 1 from transcript Sb03g031990.1 (locus Sb03g 031990) derived from phytozome v7.0 (chr-ID chromosome_3; pos 60388857 to 60394173)
gcgacgacgccaccatcctccaccgggtcagcaaggtacgttaattactgcgtacgtacgtgcctatatacacgtacgtgtttttttttgcgagcatatatacgtacgtgtttaatcagtttgtgcttagtatatggtatatatacgtatttatgttcgttccattccatatgcatgcacgcggcgcaccagctagctagtagttactttacctagtgacggtggatcggccagcagggcgctcatatctcatggccggcgtgcgcggtgttgctgacagattcggcagatctcaagccaaacaggctgggtgacggccggggaaaccgacccggcgctgagccgccgaccctcgccgttctcttctgctcgtatttaggtcttgttttagatgcactcaaaaacccaaaatttgacaaaattttccatcacatcgaaacttgcggcacatgcatagagtattgaatatagataaaaataaaaactaattacatagtttgtctgtaaatcacaagacgaatcttttaagcctagttattccataattaaacaatgtttgtcaaataaaaacgaaagtgctacagtgttaaaatccaaaaaaaattagatctaaacaagcccttattatattgccccggccgcctaggtacaagatccagcagtacgtattgccgtataggatatatgcacgcgccatgcaagcagcgtatgttaatttgcgtgtggcagatcgaggtggagccagaaaaaaattataggttaggcgagttctaaccaaaaaaataaaccacagggctgaccactgaccagatcacaccactagagagtatagaaatagttaataaattggtaactgagatgctcatgaacaatgccatttttattttgctcgtcttgcatatatttcgtgtatcgaacgaaccactgaaagctataagaaggattatcttagtatcaaaaagcagaaggattatctttatcataagtaaccaacaaggatggcaaaagctttatcgtagtttttattagactatgaaaaagaaaaaaaaaaaggagagatgagtatttacaaagcgcatgccgcgccctgcaccagcaacttcaaacaactttgctcgctgctccttggcatgtcgcgagcggacgctgcgtactcggcaaccggaggtaaggaaggactgaaggagattgggggtctggggatgtggagcgacaccaccggtagctgggccacccgccccatggcacccctagggtggctcccccggccatgtgcgtacagtacgccggccatatatattaaggtcttgtttagtttcgaaaaaatttcaaatttcgttactgtaacattttcgtttttatttaacaaatattgtccaatcataaactaactaagatcaaaagattcgtctcgcgatttacagacaaactgcgtaattaatttttattttcgtctatatttaatgcttcatgcatgtgccgcaagattcgatgtgacggagaatcttgaaaactttttagatttcgaggtgaaataaacaagacctaactttgtaattctgagtttttttatctaagattacaaaatgctcaaataaatgaattacatactcagacttaaaggtattcttgacttttcacattcatagtttgacactgttaggcctctcaatacatagtttcatggcacagttaccaaaactataaactagataaccgagccacatgagttttatagggatgaaactcctctctcatcttatgaaactcattcatttaatgaccctgccaagtcagcaattttgcttatgtggcatcctatttaatgtgcatgacactctcatgaaacatgcattgagattggccttagagttaatttgatgaaaatgacataaatggcaaaaaagtttagagcagtaataactatgagaacttaacttttttatggcttgtgagtaaccatcaacttttataatggcacgtaagtaaaagcctcttcctaattaataggcatgataaaaaaagtgcacatgcatccaagtattatatagattcaataagagagctattgtcttctctctctctctctcaaaaatctctccaccatatttcaaaccaaacttatatatattactaatctcaatcgagtcgttttcaaaaaagcaggcttagtgggccacatatatattattcttccacgcaccatacatatggtctggaaatccctcgtcatattcttttcacatgttgatatatcgtccctttcctttggtaggtcatattaaaacgatcagacgttagttgatctaacgtaatcaaaccgtctctgcagttaatacgtacgtccaacactagtacagtactacgtacaacacaagaggtttcaacgtgcgatagctcacggcgttttctgttgtcagctcactggacaaataaatctatgggtgaaatcttttttttttgaactctgtgaacaacgcctttttgtatttatatacacacaatccagacatgttaataatgcttttcgctgaagtaagctttacgttgacggcccatttctgtttgtgtcccctaaatcggaatgcttttctaccatctttgaacagacatcatcgatagtgctccttccacaatggtgacagcattcgtggttgtctgccggtaatgataatgtccacaacacaaactactaaataaacttaaccgtgattttttcaaaaccccctcagaggtggatatgattttgaaccgtctcagttaatacctcggattaattgagatggtcattttttattaaccgaggcgggtaatgtagatattcagaagatgaaagcagtgggcgagtaataaataccccatatattctaaattataaggcattttagttttctagtaatataataatatatattatattatattatattatattatattatattatattatattatattatattatattatattatattatattatattatattatattatattatattatattatattatattatattatattatattatattatattacattacattacattacattacattacgtatcaaaaaaagctaaaacgtattatacttttgtttgaaagattcggttcgcaacatatattaataagcaaggaatagagttgcagcttacaaacgcgagagacactatcttatatggcagaccgccacatgatattgaacttcactcaactaattaatcatagcatttggaggaattctaaggtaaataagaacccttccaccctgatatccaattagcacacttgtcctgatcctcgctgacacaactattcaatggccctgtttggatccatgggttagagttagatttagctatttggggctcaaataccctaaagtatccaaacatgaggggtagattaggattatttgcatctaacccattccaaaaaactatccccaaagaagtgtttatttggactatttgaggctatttgaggcggggcccaaaggaaaagggatcggctgtgtgtcgcacgggatccccactcgcgatgcctcccagccacgacccctctcggttaccagcactgccgcctcccagctcgcctcgccgccgcctctcaaccacgccgccacctccaagccgcgtcgccgtctcccaaccgtgtcgtcgcctcccaacaatggcaaaacagtctgcaaggaagtatagctagtgagtcgtcccctagctatcatcgccatgaaccactcttccagatcataagatcgtaccagttggacacggttccaggttagcacaaattgctccatgatgtcatcaggttccaaacttttctcgtgtagggacattctgtgaataggtgggcagcaatctccaaattctttatacatagcacgcagaagttctcctagcccctttgttgcagaggtatagtaacaaaaagaattcgtctttccatttctaggccacaatctcgtataggtcatggcgtgatgtgattttgaatcgatgcaattctaaagatgcagacgggaagaaacaacggggtgtgtgtggatagcaaggtcatccaagattatttcaaattagtttaaaatatactccctctatattggtaaccgaaatcatttttgacagcgacaagatctccgaagcataactttaacttcttatttttatagaaaattttattagaaagtggttcaagataaatctattcatcacatggtttccgcatttctgaactcaacaacttaaaagttatttatgacttatattctcaatatttgaccaaaatcttatctaaaatgacttggattatcaatatggagggattactaactctgtctcaaaatagaagtcattatatgatatgtgtggtgcaggtcgaactttttcaactttgactaggtttgtataaaatacgtgcaatattaaatttattatgaaagtattttaacgatctatctaatgatactaattatctactataaatattaatatctctttaaataaatttggtcaaagttaaaagtgcttaacttcttggaaagtgagaatggcatttatgttttgagatgggggagtattgtttagttcgcaaaatttttcaagattcaccgtcacatcgaatctttggtcgcatgcatggagcattaaatatagacgaaaataaaaactaactgcacagtttacctgtaatttgtgagataaatcttttgagcctagttgctctatgattggacaatgtttgtcaaataaaaacaaaatgctacagtacccaaaaacaaaaaattttgcgaactaaacaaggcctaggttggtttactctaacgtacatggaaaccaaacgagcttagcaaagaaaggggtgaaacgccaaaccataataaaattcttagcaacctatttccaaatcggataaccctgttttcgcatatttctacttgagaaggtttgggaaaaaggacaacatccattcaaactatctctaaaaattgtaaaatttgaaccaaaacttcatcacaagaagatgaatcgacccctgaaatatttctccaaaaatcacaagttgaaaaaaaaaagaccccctagtccctgtttctccagaaaataagcaatttgctcgaagaaaccaagtatttaaaatcacctccaaatattatgaaacttggtctagaccttaactaacccatggttaaggtaatccacgggatctttccaaaaggtccatactatttgattgttttttcccccgaagcttcactatttgaatgtaatacataacaatgtgtttttctccaggttatc

SEQ ID NO: 5079 - DNA, 9234 bp, Sorghum bicolor
  Intron number 4 from transcript Sb0012s012570.1 (locus Sb0 012s012570) derived from phytozome v7.0 (chr-ID super_12; pos 3126141 to 3135374)
gacaactctatgtaggtttatcaaggggggtgtcaagatcaacaacaagaattttggcaaaaccaaaagatgatttagatcctccaggaaagagcaccaagaatatagtttacaaagacgtcttaaattggtgattaacagtatgtatactcaaaccatttttagtcctcttgtgaatgcatattgtccaccgtgtgcttgtttttttatttttggacatgttggtaaaccacttactgcacattctcataaatttattatttttaggtgcaacaaaggggcaagtggatggctttataatctcaagatgcattgttaggctgatatggtggcatgaccgatgaagaacaacattggcttctgatttcttctttattgtttcagtcgatggtgctcgcatgtgcattgatgatggccatgttgttacaaactttgttgctcaggtaaatatgcgcattgctatttattctagctacataccccaaaagatgttataactggtcttgtataactaaaattatgtgcacatgattatggttgcaggcactgaggaaggagcccttgacgatttacagacatacattgatttggaaaatgacaagctcaacgatgtgctagggagcctgttttctaattctaggggttgccgattggcatgtattgcatatgcaagttgaagcatgattatttcttgttggacgtaatgcgcaagatatgactttactatgcttttttatgcatgaacatggttatatgcaattgagtgtgactaaaattatcgaaaatgtcattactcgcttgttttcatgtgcatcaccgagataaaaccgtagcattaggacgggcattatactagtagttctaggatcttcacttgtaggattctcagggagttgactaaagtgtgtcctgctcatagcgacaaggcagagatcaagtgtataggctctgttggtgggaaaacaccaacaaaaccaaaaggtttgttcattatactctagcctttggcacattgaatgagataaatttgatgtttatgcatttttctcaatctaaacatgggtggaacaaatgattaacaagcttgtagcattaaaacacttgaccgatcagattactcaacattatggaaggatggtctatctatacatgtaactttatgattatgacttttgtcttccaaagataggatgtgcaatatttcagatcattgaattaaaagttacaagagaagaaagtgattctaggaacaaacataaagaactaaaaatgttgagctaattagattggatcagatgaggttgtaactcaaagtatgtttggatctctacttatgtccatgccaaaatcaaggaggatgttttggaagtaatgatcacttaccaagagatgttacctttagtattgaagcatgttgaagtcgtaacatcttgtggaagctttccttgcttggctatattgtcgcctttgttgtactcctttcttagcttatgccattatttgttctttgtctaatttgtgcttggacctttaggtcttcttacaattttatcgctgcaaatcattagtggacaacacataaccgaaggagtatacaagtaatgacaagggcattgttgtaatacaaagctaagggtcacttcctatgctacaaaagaaaatgttttaacatacttagcatagcacatttattattcccaattacttatttctgaaggattgattttattttcccatcttatgtcttgattcttaaatataggcattatgaataaactcaactcatagaaataaagcaatagtgaatttagagatttcaaaccagcgtgtggagcgatgaggaagatcttggttggatcatctagaggagttgaccttcttccccatgtctcagcttttgaaccttagaggtaagagtgtaggacgttacatgctcttctgttgtcaatcttttattgattcctgataattagtggtagacaagagaatgcaattccaggagtgggtgctttgatcatggatcatattttgtggcacccttctttcttcttagatacgcgtgagttgtgtctcccttcatgtctagtgtgagttcatctgcaggggttagtccaacaaaaatattccaatatctactatagcatactatcggctcaaatatcaacctagacatcatgtctaatttgatttaagagggcgttcttaacctaagcaccacgcttaatttaaaaagcctttgaatgtaagatcaccactcctaaactagtcaccatgcttcatttaagagatgtatgatgataaggttcaggcccgatcttccgagaggtaattggtaaatttgatttgtggagaactcgacgttggcaatccggcttcaaatcagcacgattcgaaccctgcaaccgttacaccactgctccgttggttatcaaccaagcacaacttgttgacctcgccaagaaggcttttcctgtaagcgaattgaagaacacaagcaagaatgtataaacacacaatcttaaattgcagatatgaatgatgtgaatattcaatgagggttcaagaactcagttccaaagaactaatcgacatagtggaggagatcaagaacgggggccgtagatcactgtaaaaggatttgtcaccacagttacattgaacgattcagtttcttgatggaaaactaaactctaaacaaaacccaagtataacagcggcaactgcgtggaaaataaaggagaagcaacctagggttggaggcgactagggggaggagcccacaacatgggattaaggcccgaatttgatacatggccaagttggaccaaaataggtgacacagcaccttgtcatggtcataaagattaatccactaaagatgtagagctaggactagatccgaaacgacgacatcatcatcccctttcccatgagtccaagatcaccctgtttcgatgttgtatgaagaagttatgatcaaaacactgacaatgtgtttgctgaatccaagagggacgtggtaggtgagttgtagattaattgcaacttattaaagacaatggtgtcaacgtatccaacgtggcgatgtcctattaacctccccttcttgaagtggagttgtcctagactccatcttggcgatgtccacatcatcccctccttctataatcggagtcgtcctcgactcttccccatcaacaaactcctgcaaaaggttagtgacaataggcaatgcacaagacataacaggttgacaaagcatagtataacatggtgcatctacattatcacataacacagtagtagtagaagttgtagcaagtaaagcacctccatgtaacttatttccattatttttatcaatgtctgtggaaggtttattgttaatctctttagcatgtttaacaatatccatcggtcacaaaggcagcaaagtaatgttcttgttcttatgtatgaaagtgtatgtattagttctaccatggtgtaaagcatcattatcaaattctcatggacgtcttaacaaaattgaacaagcttgcataggcacaacatcaaaatcagcagtatcacgataacaacctgtgaaaaactaatatgggctgatgtagttaccttagtcttaccactattattgaaccattgaagtttatatggatacgaatgttgtcgtgtggttaaaccaagcttctcaaccaaatctgaactcaccaagttgttgcaactcccgctatcaatgatggtgagaacacgacaaccctgcacaataagatatatgtggaacaaattgtggcgctggagctgcttctcttcttcatgtaccacacgtgaactcaacacacactacacaagaagactaggatagcctgcggcggcagcaacagagtcaatggcgatggtctctatgtcttgatcgccctcggtggaatctacaacaatgttaggagcaagggctaaatcatcttcaacatcactagcagttacatatccatccttggtaccacgaaagcacgacgactggggtaatccttcatgacatgtcccatgcctttgcattgatggcaaatgattttagcgctgggtgaggaggaaatagtggaagcacccgaagtgcacctttctttagttgtgggggctgcacattagacaatttacttaccctagaagaaaatgcaggtgtagatggttgtggtgcaacagaaatcttgagcatctctagctcggaagatgatgctgaaaattcctcccattattagacctaaaagactagtgttgcttgcgtccctgtactttatagcaagatgatacaattgaggaaaattatgccattctttgtaatcaagaatattttggatatcatggtttaaaccaccaaagaatctagcactagcatcagcatcatcttcatgtacaccacaacatgctaaaccaataagcaattcttgatagtatgcttctacgcttttatctccttgttttaaagtttgcagtttaagacgtaaatcacgttgataataaggatgaacaaaatgagatttcatacgttgttttaaagcattccaagtttgaggcacagcagcagcattattagtattgcaaagatcactccaccaaaacaaagcaaaattagtaaactcactagtagcaagtctaactctatgctcagcaggcatattatgagaatcaaattttttttgaacagcaagctcccaatctaaatatgcctcaggatcaacattacctataaaaggaggtaggctaaatttaattttagcaaaaggatcattattaccatggttattacctcccatacaacgacgattgaagttgtagcggcgacggttgcgtgcatcaccgtcatcgtctacatcttcatgatcagatagatctccatctgcatcttcatcatcaccatgatgagattgagggcattgctcaatctgttcaatgcgggtgaccagattattcacattgcgtgtcagctcattcataagattgtgttgttcagtgatgaacactgtaagttcacccttggacacacaatcattgaaatccgtcagagatcctgccatggttagaaaatagggaaaaccaagagcaaaggattatccctatcaactaaaaggaaacaagtggtcgtggtggtggtaaatgtggaatacaaaatcagaagcagcttaccaccgtcttacaagtgttcttaccaaagccaaacaagagcaaaaccaaattggcaaagtaatctgtcattgagcatgggtaaacagttgcaagaggaacctgtgctgatacaagtatatgtggagctttggacaggcacaatttaggtagcaaggattagcaatattcgaatgcagagttagcgaagttcaataagtatgcaaaggacaaatcacaattgttggctaagacgtgtgatggaaggaactcagcgaacaagcaatagagcagatttttcctttatcctgattttttctggattttctcaaaaggcactagtaggaatcaagattttttattttttcactattttttgtatattttctctgaacaaggatcacaaaatatgtaaccacaaaaattggcaactacaactgggtcagatgtggtctacagaaattcagcaagttctttgaaaagcgtgcaaaacccttgtcaattttttctttattttttcctgaattttttggcaattttgataagaccaaacagggctttgccgagtttgggttgggtctaaatggtgtcaagaaattgttgtaaaaatttcagatttttctgataaacgagcggaaagttatacctgttttaccgaaggtatctcaagttatgtttttcggaaggcacaacacggcggcggcggtgaaggtgccagttagggcaaagcatccctaaactccaacactgatcataggatgaatcctccctgtgactaatagcagtaggtattcgtctgatgatgtaaggagggctgcgaagcaggcaaaacaacagcggctggcaccttgtcatgatcatatagattaatctacgaaagatgtggatctgggaccagatccaaaatgacggcgtcgtcatcccctttccaacgagtctaagatcaccccgttttgatgtcgtatgaagaagttatgattaaaacactgactacgtgtttgctgaatccgagagtgacgtggtagctgaattggagatgaattacaacttggaaaagacaatggtgtcaacgtatccaacatggcgatgtcctcatcatatgatactacttcaaagcctatgcatactattgcaaacaaaggtagcgtgagagcaatatagagatttactcaatagtgatgatagagtatgatcgcagtgagaaatattattatatttttagatgcagatgaattgtatgcattcaaggaactaaacatgatgtggatgaggaaactaaatgaagtggatgcatggatgattcaaagtaaacatacaatggtatgcaaggaaataaaaatataactactcataaggtttaatgcccatgagtaagactatctcaccttcatcacacttaccatgatgcacaactaggatgagtggcgtagcgtaagtatcgatcacatgggatgggagttgtattcttgtgatgaagtccttttctccaatctacacatggttagaataaataatatatatgtgtatacacaaaccggtgagatggcagggatctagaatgatggatcttgaatgttcaagcaccctgggttcttcaatcttgtggaatcttgtcactagatcgaagcggcttctgatgtcctatctattacacactcaacagaacaaaggggtaatcctactaaagccactagtacactaaatgggcagacatcaagatcattatcggaacctttacgccaattgcttccccggcaacggcgccaaaaatgcttgttggtatttctaaacgcaatcaccaaagatagacaaaaaacgtgatccctagcaagagcaccagaaatgcctgttgacgtttgttagtgaaaaaagaaatatgaaagattccacaagcgcacagaacatcatcatagattttaccgggagtattctatgtatcgttatttatattttatcatagggaagctagggttacaaatctgataattcactatccaacatctactaacttaaagtatcaagtaaactggagcaggggtatgatatactatagaataaacaattaagcacatataagagaattcaatgataaatgtatagatagtcatagcgggaggacaacaagaaagaacaaggttctattgtatttctctattacttaggttctaaggcaacagaatatgaaaacatatagcagtcacacaatgacactttggagcagcaggtcctttatgactcttgaagaagactgggaaggagtagtcgggggaaggctgccaaaagctctatgaaatgaacttggtggaatacaaagatctaacaaggctgttacccgtggggctaccataactatccatgggattaagcgcatcctcaggtaaactatagcctagacaccacatctatgctagcgtttactactctaattactatagataactagagcactcgatacgagcggagatcctttgccaagatataacaactacactaatcataaataggcataaagtaaatagagatgataatatattaacgcataagtcttacaaagaagagatatgaagacataccaaaactctgaagaagagtcctctagaactagagcgtagctccgcttaccctaactcccgactagaaccaatctactacattggaatgtctagccctaattctctaaagtagagaaaatccattcgagggacaccactacaactcatagagaagcgaggtcatccatttgagggatgcctctatagctcataatgatagctctccccaagggggtgaggcttgtatttatggccccctaggaagcaccactgccctcggatcaaaacgacctaaacgtacgcttaagattactcctcaaaggcggtggatcaggaatccacaaggttgaagctgattggcttcagtagctgagcggccacccaagggggtggggcgggcacccatcccctacagccgtttgccgccccgttcgtagaccagaaatagggcaaatgatatatggatttcgatcgtctcgacaagcccgtcgcaatggtgcagcctagttcatcaattgagatacttttattcaatgattagtttgcctttagctcttttcctatgtgacccctgcaaaacatagatgcaccaaaactcgtggaatttgttagttcaaacctctaaacctatgttggtgagcatctctttgtagtaataaaagttatgttgacagttaaaaataggagttaactaccaccaacacatgcttaattggctagaagcctaattcgggttggacccggattagacaaggcttagggttttctaattgggcctccaattcagggctgattggaggacgcctatataagagagggagggggcgctgccagggtgatctcacgccattaggcaacagccaccgctcatccaagctcgcgcgtattgctcctcacggatctagcagtttgaaggcgcaacactttttccccacacgtgtgggataccttagaggtgctgcatctggagcataaggacgaattgtgcaagagggattgacgtggtggacgaccatgcaactacacaaacactgctactatgcgcacgactacactgagttgcttccactgcacctacgcatctagttgtaatcacgttatctataactggcagttcatcctattttatgaggtcaaattttttattttctggctagcatagtgtcctcataatccttcactactttctgattgtcctcgatcaagctaggcaccggtggctactccatttgccagaagactagttcgacacatgggaggagctatgttaggcattcatcaaaaatttcatagctatctgcgagcagcctggcaataagtacaaccttgaaaggatacgtgatcgcaaggacgagccgctccgtgactacatccgatgtttctcagatatgcgccttaagatctcaaaaatctcctacgatgaggcaagctctgctttcatcaatggccttcattaacatgaggcccttaggagtaagttgcttcgaaagaggccgaccacggtcaccaaccttctcaccaccgc

SEQ ID NO: 5080 - DNA, 18478 bp, Sorghum bicolor
  Intron number 1 from transcript Sb09g001490.1 (locus Sb09g 001490) derived from phytozome v7.0 (chr-ID chromosome_9; pos 1433675 to 1452152)
agctcatcgtgctcaacatcggcagggagcgcaaggtacctacactcctacgtacaaacacgttttttttttccctttcatcataaattcggtgcaatgtttttatttccttgcatatactaggagtagtttttttttgttgttgccttttcttcttatttttaataataagaaaaaaaaagaaaagaaagagaactttgccgtgcctggacacacactgttgagcgcatgcatgcatgtatgcaagtcaatgaaaagaaaagagcagctagccgaggaaggagtgagtcatgtgagtgaggacaaagtaaagcagagaggtcacctggttcccgttggtgatgacgtgctggctggaccatatgcgatgcgatgcagatgcatgcatggtctggtcgtccaagtgttggccgggaacttgctcgtcgtggtgctccatgcatgccatcaatggctggctgatgtgctcgtgactagctagtgtgactaggcttcttctctaggcaatcgccgggccgtgaacataacgtatgtacgtcagtggcatgagtcttcggggccttgtttagtacacccttcatcccaaatgataagttattctaaaaattttagagaatcaaaacatctcaagtttaattaaatgtatattgtaggataataatatttatgacactaactaagtatcattagattcttcattaattatattttcatagtatatctatttgatgtcataaatctttataatttttttttataattttgatcaaacttgagaatgctttaactctccaagattcttagaatgacttataatttaggatggaggaagtaacacttaaaatccaataaaatttcaagattcactattatattaaattttatttcacatgaattgaatattaatatagattaaaaaaataataagttatgtagtttatctgtagtctataaaataaatgttttagccatagttaatttatggttaaataataattctcaaatacaaactattgtaatgtcaaaaacttttcccttgtgggccgcttctcttggctgctagtgtgtcatgtcaggccggcctgtgcggtgcgttggaaaatgggatgcaccttgtagaatgaccaggagctaccatgaatatcgacgggtggactttaccttttcatttctattttctttttgcttttctaaaattatttttgtttcagattataagttattttaattttttagatgctatataattttttctaggtaaatagttttcaactattggttgtggtagtagttggtaaggaggactttgtagaatttgttttatcgtttcgtttctagacttagtgggttgacggggcagatgatgatgtcgaagcaacttttagcactcggggacctctgtcacctgatagtagttgtaggtagtgttgtatgttgtagtgaataatatactctctccatccgaaattataagttattataagaattttggagagtcaaacttttctaaatttgaccaaatttatattataaattaataattattatggtactaactaaaggtctgtttggtacagctcacaccagcttcatgagctgttgtgagttgtttttttttgccaaacacttatttccaaaacagctttatgggtgaagctgttttcaccctcctctcacaaagacataagttgggatgaagctgaaaaaaagtagcgtattgcagctctctctctcatttctctctctcaactatgcatgaagtagtttgtgaagccattttgccaaacactttttccaaaatagctcagctttatctagaaagtcactcatgaagctattttctaaaaaaacagcattactagtgacgttgagctgtgccaaacaagccctaagtatcattagattctttcttaattatattttcatagtatactcactttacgttacaaatcttagtatttttctctataattttggtcaaacgtgaaaatgctttgactctccaagattcttagaatgacttacaatttgggatggagggagtagtaggtagatgattttcgggcccgacatgtagttatcacgaacttgtaagctgttcaacgtctagactttttaagatcctaatacaccaatggatgaaacagaggtactgcaatgcacttgcttctcaatgtcttttcctagaacaagtcctacagcggtgttgaaatagcctgacaatacatgaggttacatcgagtcgggtggcacacgaggtggtatggtggggactcggatggctaatgagttgtattgtatagatataattattgtggcagggatgatgaatttcaaattttgtcactttaggcctttagggtaatgctacaccacagttaacttcttttttcaccatgttgcccagttcagttcagggtaacatacactagagctagaacaaaaaataacaaacctcaaaacttgataacttacatgattcacgtcgaattatcaaaaaaaacccttactcgattcatgcatggttaggtcttatgaagccaaacttaactttcaaataacaagccagatcgcactaattcacgagatgcttatgatgtataaacaagccaacttgatcaaccaacacccaatcacctaaatccaacaacctaggaccacatcccaaatcaaatcgcccttttattctccaacacaacaaaccttgtgaccccaaccaaaagaacatcaactagtctgcccatacaccatcgtttactcatgtagaatagcgaggcagcatgttctcgtgtcacatagatcacctgcgtgtgggggtataaacccctatacccttacggctagacttcagccaggaagcttggcccactacgcgacgagttcaaggcttgatccgacagcccgagtttcgcgcaaggaaacaagacgtggagatcaagcaggattctagtcggttagaataggaattgatatcgaattatctatggcaattgtaaccgactaggattagtttctagatctgtaaccctgccctccagactatataaggaggggcaagggacccccctaggacatcatattctctcaacacaaatcaatacaaccagacgcaggacgtaggtattacgccaactcggcggccgaacctggataaaaagcttgtccgtgtcttgcgtcaccatcgagttcgtagtttgcgcaccgtctaccgataaactactaccgtgggtataccccaaggtagactgccgaccagctttcgtcgacagtggcgcgccaggtagggggtgtgcgtgcaacttttccggcgaacaagatggtcacgatcccagcttccgcgaccgtgcccgaaggcctcacgttcaccgtcggccagatcacgtggacgacgtgcagcggcggtttcgcgaccacggttccgaaagagatccagatccaatctgagatcacgccgtctccgaccacacgcatgacggcaccaagctcccgaccaccgttcccgctctacaagggaaaggagatcgactgctcggacctcctccaagcgctcgatcgcgctgactccaagctattcgaagtctcccaactaatagatggagttctgcgccggcccgaccaagctgctcgagcggatttttcgaaattccgtcggccaactcgtgtcgccacacacgaacggctgggaacgcccctgacgataacctcaaccccctcaggacgatccgtcgagctcaaaaaggaagactatccttgcggcctgatcaactcggcctctgtttactcacaccatgtccaatccgttttcagcaaagcgggctggtcgccgacaaggaataatcgtcaccatgtcaacatggtgaccatccgagagctacgagacggccaggtttccagcaccaactcaagcaccggctccgtccccaccgaggttgtgaacaccgaagacgaggactacgacctggattttccttcacaccctccggttttcgaccgattcccgatattcccccccccccggcgaggggatattgtattcaatgtcagcgccgacgaactggctgttgacggggaaacagacgaccagaggcaactccgcgaacagcgtaacgccgagcgcgcccgacggcgtgcggacgagcaacaacagacgccaccaggtaacctcaacgatgcctttgacatggtcggggaccagccggtctacaaaacgccgagcgccaacgtggctgtcgccatggccaacctggatcggcttcctgacacccccgaatgccagggagtccggaccagtatccgagcacacctgatcgccgcaatgggacagacagctactctgctcaagagagtccaggacgtctcttatacggaagccgcctccgaccagactcatcgtagccgggcctcacccagcaggcgtcgccgcagccgctcccccgacaaccgtcgaggggactcacggcgcgatgatggtggtcgggacgccgatggccgccgccagcaggaccgcgtacgcggccaagaagaagaagatcaacacagggatctccgccacaacatcccccccaaagatgcccgggaccgcatcaacaggcgcgccgcagagagagcagtccacgaaaacctgcgccgcatcgagtacgacgcgacccacggtcctccgggcctaaggcagttctcctcacacctccgccaggtcgtgtggccccgcaatttcaagctcgaaaaacttaaaaaatacgacggcaaggaaaatccagagaactggatcactctctatgaaatcgccgtccgatcagcggcaggagatgagcacgtcatggctaattacttccccgtagtcctcgaccaggctggtcatcagtggcttctcggcttgcccgaggactccttcgactcttgggaagagctacgacaggctttcatcgacaacttcatcgccacatgcgagcagcccggaaacaagtatgacctcgaaaggataagagacaggaagaatgaacctctgcgcgattacatccgacgattctcggatatgcgcctcaaaatcccgaagatttctcatgacgaggccatatcagcctttatcaagggtttgcgtttccatgaagcgctgaggaacaagctgttgcgtaagcgcccatcaacggtagcagagctcctcgccacggctaaaaattacgccgatgctgatgacgcagaaaaactaatccgagacgatgcgagaggccccgaccagccctcccggcgagatgacggtcgtggtcgctacgacaacagaaatcaccgccgctccgacaaccgcgatcaccgagagggttgggatcggcggcgcgacagccgcgacgacttcagaggaaagcgccctcgcgaatacgaccacgaagtaaacacggtcaaacgtcccaatggacgacgggactaccaagacgactacaacaaaacgttgaagggaccgtgccagctacacccaaagtctaaccataccatggaagagtgccgcgtcctcaaaagtatctatacacggcgggccgcccaagaagacaccgccaagaaaagtagcaaacgcgacgggcacgaccacgaagatgaggatgaggaccaagacagggacccccgacaccaatacgtcagccccaccgacgtggttcactccattttcgggggcaaggtctccactgagtccaagcgagaaagaaagctgttaaagagagcctgcctcaacatagacagcacggacgggctgatcgcagatccgaaatttcccgcctggtcccacagggagatcgcgttcagcaggaaggaccagtgggccgctatcccagagccgggtcgtttcccactgattcttgatccctgcatcaatagcatcagattcgagcgcgtgctcgtggacgggggaagctccatcgacatcctcttccgcaacagcctgcccgccctcaagatatcaccggcgcaactaaaaccttacgacgcccaattctggggggttttgccaggtcaaagttcggtgcccctcggacagataacattgcctgtccaattcggcacacccgatcacttccggacggagttcatcaacttcgtagtcgcggacttcgacgggacctaccacgccatactgggccgcccatcgctgacaaagttcatggcagtcccgcactattcatacctagtgcttaagatgcctacggagaagggtgtcctgaccgtcagaggcaacgtctacactgcgtacacctgcgaagaagaaagtttcaagatcaccgaggcaattgacctctcaatccgcatggcggaaacagcaaaccaagccgcacagctgccccccgaccagctccgattacctgagcaggagacagccagaaagaactcgaaatccaaggagtacaaagaagtgcagctggtcgaaggcaaccccgagaagacagccctcatcagggctaacctggatccaaaataggaagacgcgctcgtcaggtttctaagggacaacgtgagcgttttcgcatggaaacccgcagacatgcccggtgtcccacgaaacctgatcgagcactccttaaacgtctcgaagaccgcaagaccaatcaagcaaaaactgcgacggttcgctcgtgacaaaaaggaggctattaggacagaaataacacggcttctagcagccggattcataaaagaggtgtatcatcccgattggctcgccaatccggttcttgtacgcaaaaagaataatgaatggagaatgtgcgttgactacaccgatctcaacaaacactgtcctaaagatccttttggtcttcctcgcatcgacgaggtggtcgactcaacggccggatgcgaactcctctcctttctagattgctactctggttatcaccagatctcgttaaaggaagaagatcagatcaaaacatccttcatcacacccttcggcgcatactgttacactaccatgtctttcggacttaaaaacgccggggccacttaccaaagggccatccagcaatgcctccacgacgagattcgcgatgacctcgtcgaggcctatgtggacgacgtggtcgtaaaaacaagggacgcgagcaccctaatcgacaacttagaccgaaccttcaaggcactcaataggtacaagtggaagctcaaccccaagaaatgcattttcggcgttccttccggtctactgctcggcaacgtcgtcagttgcgacggcatacgaccaaacccttcaaaagtcaaagccgtactcgacatgcgaccaccgaagaacgtcaaggatattcagaagctaaccggatgcatggccgccctcagtcgtttcatctcaaggctgggagaaaaaggcctccctttcttcaaactattgaaagcgtcagaaaaattctcctggaccgaagaagccgacgctgcgttcactcagctcaagaccttcctcacttcaccgcctgtcctcacagcgcctcagcccaatgaagacctgctcctttacattgctgcaaccgacagggttgtttccacggcaatagtggtcgagcgagatgaaccaggtcacgtcttcaaggtccagagacccgtttacttcataagcgaagttttaaacgaatccaaggccaggtacccacaaatacagaagcttatatacgccatcctgataacgtcaagaaagctgaagcactacttcgacggccatcgagtcctggtgacaaccagctttcctctcggggacatcctgcgcaataaagacgccaatggcagaatcgtgaaatgggcaatggaattatgtccattttccctggagttccagagtcgcaccactgtcaagtcccaagccctggtcgatttcattgccgaatggacggatctcaacgagccttccgttcccgatgtctcagaccactggtcaatgttctttgatgggtccttgaacatcaacggtgcaggcgctgggatattgttcgtatcgcccaacaaggacaaacttcgctacgtcctcaggatcctttttccggcgtcaaacaacgtcgccgaatacgaagcatgcttacatggcatacgactagccgttgaactgggggtcaagcgcctctatgtctacggtgactccgctttggtcatcaaccagctcaacaaggagtgggacgcaacccacgagaagatggatctctactgcaaagaaattcgcaaatgggaaactaacttctatggcatagagtacatccacgtggtccgggataagaaccaagcagcagatgcgttgtcaaagttaggctcatctcgggcccagatcccgcggggtatctttgtccaggacatccatgagccaagcgtaagccctcccctggtcgacaagcaacccaccgaggcaatgctcatagatgacgccactccgacaaccggtgggcgtgactggcgtaccccgttcatcaaatacatatcagacgggacaggctatcaggacaaaacagagaacgagcgcctcgtccgacgatcaaagaactacatcctggtcgacgaaaaactcatgcggaaaaacgccagctccgaagtactgctcaagtgcataccccaagatgatggtatcaagctcttggaagacatacacgctggatcctgcggcaatcacgccgcatctagaacgctggtcggaaaggctttccgagcaggtttttattggccaaccgcggtcggcgacgcagaaaaaccggttcggcattgcgaaggatgtcagtttttcgctaagaggacccacgtacctgcccatgaaattcaaactatcccgtcgtcttggccctttgcttgctgggggcttgacatgatcggaccatttaaaccagccccgggcaatttcaagtttgtcttcgtgttaatcgacaagttctccaagtggattgaatacatgcccctggtcaaggcaacctccgagaaggctgtggagttcctcaatcaaatcatacacagattcggcatcccgaacagcataatcaccgacctgggcactcagtttactggcaccactttttgggatttctgcgatgacagaggcatagtcataaaatatgtgtcagtggcacatccacgtgccaacggtcaagtcgaacgtgctaacggaatgatcgttgatgccctaaagaagaggctgtacaccgaaaacgacagagcacccggtcgatggatgaaagaattgccggcagtggtctggggcctccgaacccagaccagtcgaaacacgggggtgtctccgtacttcatggtatacggtgcagaggcggtcctgccgtctgacatacacttcggatctcctagaatcgagcactacgacgaggcgactgccgacaacgccagagaactcgaaatcaattgcatggaggaaaagcgtttagtttcatgtctccgaaccgcaaaatatctcgcggcagtcaggcgatactacaacaggaacgtcaaggaccgttccttcgtggtcggcgatctggtgcttcgatggaaaacaagccaggagggaatgcacaagttgtccactccctaggaaggacccttcgtggtgaccgaggtcacacgacctacgtcctacagattggcatacccagacggaacacgagtgcctaactcttggcacatcgacaaactgcgacgtttctatccataaagttttaatgactttcttttgtaagtatcttataatttttgataatgaaattctctatttttcgcctataccttgtcatacacagcactcggcaaaactcctgcaatggatgctcttggcgacaaccaagacaaatacggtgacacgtcactcagatatttttacagcgctcaaaacaacagtcatgacaaaaaagaaaactttattacaaactttacatacaaagtttacaataaataccctgacgggcagatactagtctattcctacagactactttattggcctagctgctcgggctgatcacccgcctggccctgctgcccggacgaaggggtcggggccaccggcgcctggctggtcgagaccgcaggcgtcgaccgcccatctccagcaacggacgcgcccgacaactccctggccgacctatctgagctcggctggtctggaggagtggccgttccgcacaggttgatgtcgccgatcactgtcgacgacaagtccagcagactaccccgaagttcgtccgcttcctgtgggccgacttccttcgggtaccccttctccagcctgctcaagtcaaccagggggtagtgggcgcgtaccatgctgaggacgtgcgcaccggcaaactccccggcgtccttcacaaactgctggagccagtcccacgcccgttgcgccttctcgaccggggtcaactgcggcgcgcggggctggctctccgggagctcgggactgatcaggtccaggaccggggacactcccttccagatcctgcaacagttgaccttccaggagtcccggtccttgatcaggtcatccaggtgctttttggtgttcaccttgagcactgcaaacgaaacgaaacgttactttcggcgtaccagacaagcaaaggggcaggcagcaaccaacaaggcggcacccattaccagctaactcccggtcttttcgacccaattcctcttccgctcgccgcccggactcctgtgcactggcgagctgttggccgagctgctccttctcttgttggaggctcgccacctcctcctccaagtctgcgtgaatcctaaactggtcagcaaagcaaactatacaagtatgcgaaaactgctcggagcgtgtgactaaccttcctgcagccggtactggtcggccaggcgacgagcgaggtcgagacgacgctccttttcggcgctcatctcgaccaccttctccccgacctccgcccgcaaccggtctacctccgcggcaagggccttgttctcggccatgacgccttctatctggtcaaagcaccgtttccggtacttcgccgttttcattacgtcctacaaagcaagcatataacgatcaagcaagacaaggcaaaagaatgcgcagcagctcgaaacgccgcttaccttgacttcgtcgacaaggcgcttggccgcgcgctccaccctggcggcctcttcggactcggcgagctcctcatgaccgataaagtgatccccgcgttagcgccacacatacacgtgttggcggccatcacggggacgaccctcgatctcttccacctcgtcgtcggaggccgccctggtttcctcctcctgggctgcgtcacccccggtggtggtcccaggcatcactggcccttggaccagacctggggagcccgcagccggagaggctcctgctcggggcggcggggggacttcactccccccggcaggaggagcggtcggagatcttcccttctccgaggagtcagttgggggggcctctccagccctggtcgggctgcttgttgtagtcggcgcgactgcagctgttggctgctctgtggtctggggggccgcatccccagaaccgcgggcaggctcgcccgttccctggccggcagtttggccagggtcgacatccgatgccgcactacaggaacaaaatttaaaaaaaaaagagaggagtccaaaatacgtaagtcgaacacttacaggtctgaccgacgatgggtcgcggtgaacctcctcctcgcccggccggtcggcgcctgtgcccccacctcggcaacttgcggggcagcggcgccgctggccactcgatcagtggcgaccggcgcagtgtctgggcggctccgaggccgtcggaccaacgacggtgcagcctcctcgtcgtcgtcgtcgtcgtcgacgatccgcacgagccgacgacgcttcggcgcttggctgctctccgccggtaggtctgccggcagctccggtgtcggcaagggatccgccggcaatggccttttccccgctaccctctcctcggaggtcgggacggggcgggctcggtcttcctcactactggtgtaatgagtacaccgagcagcgtcctcctctggcgggacctctcccacaggatcttccatccccggtgccagtgatacatacactgcgcaccggtcgacatcaccgacctgcaaaagcaacaaagatgagttaactgcagacgatatacgaatgatcaaacagactctgctacatacctttggtgctggtcgtcctaacttgaaggcttgcacccgatcactgccacgggtgaagcccccatccgcgaagttaaacagctcgttcagcagctgttgtacctccgctttctccaagatctccgaccgcatcctggtcgggtctgcgcttccggcatactcgtacgccgagtgcaccctcttctggcagggcatcacccggcggcaaatgaagttgccgaccacgccaagcccatccaggcgcgaccagtcgatcagcttcatcagatccgccacttgaccgtcgaactctgggcggtcggtccagctcgtcctcttctcgggaacgtaccccacgtcgcagaacgtggagctgcccggttcctccctgacgtagaaccacttcctgtaccattcggtcaaggaggtgttccatgggcagtgcaggtaacgattcttcatcccatcacgaaggttgaggtatactccacctgcaaccttggagcctccaactgctcccttcttcctcagacagaaaaggtaccggaaaagatcaaagtgcggctctatgccaacataggcctcgcacagatggatgaaggtggaaataaggagaattgagttcgggtgcagattgcaaatcccgatctcatagtacaaaagaagaccttgaagaaaaggatgaacaggaacaccaaagcctctcttgatgaaatcctcaaaaacgacgatctcaccggcgcgagggtcggggtagctctccccctccggcgctctccagccgccgagctctgcgccgtgcagaagccccatgtcgacgaggtcaccaagagattttgtggtgctgcgagacttcttccactccttggccatcagttcggccctcttcctggagtcgctcttcgccattagaggtgcgaatgtgggctggagttaggaagatgcaggagattggagaagatgagagcggaaggtttgaaggcaatggcaggagaagcggtacaggcggtcctattaggcccttataaacccgcgaccccacctctcccacttcctgtattctcgggaagtgggcaggccatgcggcggacgcggcgtttcggtttacaatgattatagacaattaatgcggcggagttttcgtaccaattgatggtttccttttctcaaaccatgcaaagagcggttgtacagttgccaggtgcagcttttcatgcatccgtctgacatatcgtcaggagaccccgtcacgtcaactttaattggaaagatcttttcaaaagtaagaagacacatacgccagtgagtcagcaatccggggactgcaccgaccaccgagcactcgacgctcggggactggtcgcccagtctatcagctcggaacttcaaggactgcaccgaccaccgagcactcgacgctcggggactggctgcctagtctatcagctcggaacttcaaggactgcaccgaccaccgagcactcgacgctcggggactggctgcctagtctatcagttcggaacttcaaggactgcaccgaccaccgagcactcgacgctcggggactggttgcccagtctatcaactcagaacttcaaggactgcaccgaccaccgagtactcgacgctcggggactggtcgctcagtctatcagctcaaagctttaaaaccatgcaccgaccactgagcactcgatgctcggggactggtcgtacagtatagtaacatgtaattccaagcagcacactaagtgcctggggactggtcgattggtcttttcgattgcagacgagcatgacatgctcggggactggtaaattcaattttttagaccttgctacaaggctcatacttcgccttccagcaagctcggggactacatcggtacgatgcatctagcgatgcatctcagtctcaaaactactttggggaattttcttttgaccctggcaccacgtgcctacgccacctactaccaggctcggggactaagtgggcacacttcacctagcggtgaatttgcttgcttttttgatgcttctacctttcagaaaggcgaagtgggcacacttcaccaggaaagaaattttttttagagcaccatgcattcttcgaacaacctgcttcttcgatgtcaacgttgatcaactgtctttcgagttggtcaaggaaccgttgcaactgtttgggcgatttccccgcttattgaagacgacaagcctcgctgatcgaagaagctcaagacggcgtgttgcatcacaatacatggcgctcggggactagctgtgggggtataaacccctatacccttacggctagacttcagccaggaagcttggcccactacgcgacgagttcaaggcttgatccgacagcccgagtttcgcgcaaggaaacaagacgtggagatcaagcaggattctagtcggttagaataggaattgatatcgaattatctatggcaattgtaaccgactaggattagtttctagatctgtaaccctgccctccagactatataaggaggggcaagggacccccctaggacatcatattctctcaacacaaatcaatacaaccagacgcaggacgtaggtattacgccaactcggcggccgaacctggataaaaagcttgtccgtgtcttgcgtcaccatcgagttcgtagtttgcgcaccgtctaccgataaactactaccgtgggtataccccaaggtagactgccgaccagctttcgtcgacactgcgtgattatgattgtacttgtttgttcatcttattaattaaatgtcaagagtcaaatactcaatcttagtgcaacattgaggataacatttttcgaccttagtggttatttgtagtttcgtgatgcatttggatctctctgtgatcctaggagcagaactaacctgagagatgggggcataagccccctacttggcgtcaataatggagccccctcccctctcaacaatttttacacatggccaaagaaagagaagaaaagaaaaatagaagaagcaagagaaaaatctatattctatatctctgtaaatgtggaaagtactttgtccatttttctataaccctcccattttataaataacatatgttgggtttcttgtggtaacatagataaatagtcatcctaatacaaatagatcccctatacacttgtccagcttaattgtagaccgttagtagcagaatcattccgagtaaggtattaggaaaaacttttgcctacttttgcactgaggggaaggaactagtataaaatcaatgttgggtaccataaactgggatacccaaataaagagggcaaaaaagcagcaaaaagaacaaaagcaacgcccgaccccttgacctcgggcgcaacctccgcctcgcccgagcccttggcctcgagcgcaatctccgcctcgcccgagcccttggccttgagcgcaatctccgtctcgcccgagcccttggccttgggcgcaatctccgctctgaccgagctccggcctcgagcgcaatcaatgcttcgcccgagcctcggtctcggtatccggattccaacacacggtggccgtacccctgatatgacatgcgtcattcctcctacactgcagtagggcttgtcgaccactgttccaacaactcccatcactgtggcgccttacctctgtcactgtgaggcattgcctgacaataagaggaatgggagaaattaacccctgccactgtaaccatgccttggcagttactattctactattgcaggacaggccacaggatctcggatccgacttccacgatccgaacacagggctcggcaacgctccacagggacgaccacgccgtcagccatcccccaaagacgaggaggccaatctccacagggtcggcactgtcactccactgcatactgaagatgatttacaaacttacacatgtaaaagccctgtcaccccttgtggctataaaagggaaggtatggcatccttcagagatcatcgaacacacgggcagaagtgtagcacacaagcacaacacttcagctcaacacaccaggcaacacactccacccacgtagataaaaggagacttaggatactgagcacccctccactaactccttaagccgagacctgggacttagccctttctcgcaaccaacttgtattcccctactacaagcactttcaggtgcaaggcaatacagaccctgactccctcactggacgtagggcattcaaggcccgaaccagtataaaccctctgtgttctcttgcatcaccattcgggttaagagggcacgcagactcatcacttgttagtgcctggacctcgagtccagactccgacaatcagtgaactctcaagttgtataaaatcaacaaactctcaagccatagacatatctctcatctcagaatgcaagaccaacatatggtgttcctcgagccaacatatggtgttcctcgagcccacgcagctggcggcggccatagctgtcgcccttgttcgctctggtgtgcttcgctaccatgaacgccctctagcgtgtagtggtagaactagcactcctctgatatgttactctcttgtgatcttcagggtagaacatgtgtgaggatgcgagcgtaagtccctacctggcgtggacaatagagcccctcccttgtcaacagttttttttgcatggctaaagaaagataagggaagaacatagaagtagagtttttttttataagaatcaaaagtagaatagaagatagatagagaaaaagagaacaagagcagaaagaaaagatagtagcaggacgcaagcccaatgcatttgccgggtcagtcttgggccgagatttccattccgaaaacctatacacgaaaagtgttgacctgagtgtccaacgatgttgtttgaatccaacatcatccctaaacggaaaaaaattgcgtggactctgggctcattccatggaggatgagccccctccccggatgcatgacgcgtggcggcgcttctaatctgacgagcagcgtttccttggctccctcgacagctcgtagacacattcaaggtcggctggctcctatccgctcggctcttccaaggctggctcctacacatacgatttaaacttttctaatagatcgtgccatcattaccgtaagcagttgcacaccgccgttgtgttcaaaacttctctaatagatagtgccatcatcatcgtaagcagttgcacgctgcaaagtaacctgtgtaagcagttgcatgccgccgccgccgtgcatgcaggtgcacacaccgccgctgcttgcaagcagttgcatgctgtcgtctccaccgtgcacgtagtcacacacacgccgccgctcgtgcaggtagttgcacgccgctgcagcggcacttcgatgaatcaatcaacctcgatggccggcgttggagatcaagaagacatcacaactgccattaccaacttaatggcaacacatcttccatgacggccggaggcttcatgcgcattatcaattgatggtgttggtcgtactcgtggagatgacgaagatcgtcagctaacatgtttgtttgtttactagatgatctcgccttttttttcatctatgttgttgttgattgaaccaagaaccaacaacaagtcaaacaaatgcttcagctatattagcagaaccaggatgcggcagcagcggtgcccaggtggacacgcctgctgttgactatgttcgacaacctgctgctgtcctgcatatggccatagaggccggcgtagacccgctgctattgccgccgccgccgctggcgtcgagctgcgtgcagtcttcacggcgggcatccagcatggcgtggtgggcacgtctcctcctagacgatttggaccacctgctgctgtgcgacacggtcgtgagccaccgccgccgccactgcaacatcctgctccgaatctgagccgacggagccgcactcatgtccacaacctagaagccacagtggaccgtggagccgagggagccgacgacctccgtatacgagctgccgagagagccgagtcaatgctgctcgtcagattaaaagcgccgccacgcgtcgtgcatctagggagggggctcatcctccatggaatgagcccggagtccacgcaatttttttccccctaaaccactcaatttggtcacaaataatttgactttgcgtctgcaaaatataccgccaagcaactaaatgaagtatgcagagcatgagagcgactgagcaagaattgtgatctctcatggatgctgtctgcaggttctgaacgaggagacgttcgccatcctggtgct

SEQ ID NO: 5081 - DNA, 1471 bp, Sorghum bicolor
  Intron number 3 from transcript Sb03g008750.1 (locus Sb03g 008750) derived from phytozome v7.0 (chr-ID chromosome_3; pos 9408921 to 9410391)
tctcgccgaggacgccgtcctcaagcagatccaaggtcagacactctgactctgacacctttgatcaatatgaaataaattcgatatgtacaatttttaaacctgcaagttggattttcaacgttaaagtacgaaaccgaataacatgcagcctctgtctgctaaaaccaaacaaatttggttccatggttagtttcaaaagagtttttttgtttttttaataataaaattcttgtttatgtctaaaaatttataattaatttgttttagtctgagaaatacaaaagtagtataagttttatctaaaaaatgttagatatctattggtgctctatttagagttatttagatcgtactagttttaaataaataataaacatgagtacgtacgagcaataaatcaatagaacttgaaataaatcagttccaaataattatatatagatcataaacatgtagataatatttttagaaagtagtacttattttatgttttatgatttcaaaattattgatgaattttgatatagtagattagattattattattattggaaaatataaaaccaccttaaaactagtaagaggaccaaaattttctagttttaaccacgggaggatgtccgttacatggtttcttagttcaaggttgaaaatcagactaccatgcaagttaaaggttaaaaaatgtattttaccttaataaattatattctctctatttcaaaccataaatcgtacatttaagtttatactaagctaaatttctttatctttaaaaaacttaatttcatattattgaaaataaatacactatcataatatatttaattaataaatcatgtttataatgttgtaaccgaacgtcttgctggtcttctcaccatatgtaaccaagcaacagtcatttgttgttcctgatcaatgaatttggtggggaagtgctcctcccgcccgtttatgtcaaaaagaaaatgtgtattttttttataaacttgatcaaatcttgagaaacttactgataacaaaattaaaactatttatagtttagaacagggagtacgtattttaattaacttatggactttgtcgatcgatagcttttaaaatctcagttttgtaagcattaaaagcatacatgtaaatctattttgaaaaataatttcacaattccatacattcacgagacattatcctatattctaactacaacatgtcaatcacgtatatatatgtcctactgataaatcctcaaacatctatctaaatactggtggacaccgatcattccatctatcatctatgggccaacccaacgattttcatcagcagactggttctagctgtgaactgatcactgaactgatatgataactgataaccaatatactgaactgatatgataactgataaccaagaggttaacaattctgcagaacttccgatcccgctggacattctactgtcaatt

SEQ ID NO: 5082 - DNA, 1488 bp, Sorghum bicolor
  Intron number 1 from transcript Sb10g008790.1 (locus Sb10g 008790) derived from phytozome v7.0 (chr-ID chromosome_10; pos 9203152 to 9204639)
cccgtcgccgcaaacgccttcaggacaaacccaaggtgccgtgcggttctttcgcctcttttttctaccgcacaagtgattgtacagcgtgttctagttctatctgccttcggtgtttggagaagttggactggataggtttcccccgatgcggatggcttctcgacatagattctttagattctttgatctatatatgaattgtattagatggtgaaccgattagtccaccgatgcgagtggaacaagaaggtggactaaaccgatgttgattaacctatgcgggcaaagatttgtgtcctgagtctaattttggcaaaccagacagtaggcctcttactttatttccggactgatatggggattggatacttaatttgagaatcgtgccaatttcttggcagcagcaacggatgaaaatggtggtaggtatcacaaggcaacagaactaattgttcgtcagaaactcactcagattagcccccttccctttatattccaagggaactgataattgataacataggttcagacttcagagtaccaaaattattctgattttgttttaactactaaggggaacaggtaacacaagcagcaaagtttttatctgtccaacagatattaaaagatgatagtgtggaaatgcttctggggtttaaacttacatagcgctgcccttcttcagacaagtcacgaaatcttgcatcaagagaaaaatgaaatggcaatgtcaaaaggcaacaaacaaacttgacagaaatgtaacagatgcagcaaatcctttgtctcatcaagaggtttttgcaagttgctgcaggtaatcttttgttttttttaaaaaaaaaaaagaccaacttaggaggaagctaggtgtcattttattttatattttatgaagaagaaattaggcactcaaatttgccacaacaggacttgaacctgggtggtctgggtatacatccacacccttgaccaactgggcttgctcagcttccttcctggttagtctttgaactgtagtttgtccatcagctattaagtaatctggtctttggtgataagtacccaattaaaatccttttcaagaaatatcagaaaatataacattgagaaacatcaaccacgaaggaaagatcttcctgtaaaagatcattaagatgtattttgttctatcttttattttgtttacaatggttttctggaacactcagagttcacgtgatgcattcatgcttgaagtaaaatactatttcagacataatgtatgccttcaatatttggtctcttttttgttgttaagcaccgccctttcgttcaaagaaattaaataaatttgttgcacctgttatgtgatttggaatttggatattctagcggtgacccagtatgtggtacaaactctttgaagaaatattggactaaaagccaatactttaacgtgtggaaacagggaaagcagattatacatcactgagtgaagaggag

SEQ ID NO: 5083 - DNA, 1637 bp, Sorghum bicolor
  Intron number 1 from transcript Sb02g010160.1 (locus Sb02g 010160) derived from phytozome v7.0 (chr-ID chromosome_2; pos 14938743 to 14940379 reverse strand)
ccgcgcgcaccgcctcccctacatctccctcggaggtacacagccgatcccttcttcctccccgtcccccccgttcattttcgttttcatttttttttattgtgttcgtgcgactccagcaatgttggagctggaggaaagccaattatcatgtgaatgatgatgctcgtcgtgaaattatgtgcatttcatttcattcagtattttcgattggagctgcaattgtctgcatcttcgtcagggtgaatgatctccaaatcataagaaaacttgtgatcgtcaatattcgaaacaacgaaacatttgcaggaggaaatctggttgtattcctctagtgattgtctggtctcatatatttcaccgtttcttcaattatttctacaaaagtaagaatgaattttaaccgattagctacgaaaatatctgagccgttcaacacattgaaagcaacagctagctacgaaaatttctgagctgctgaacacattgaaagcaacagctagctacgaaaatttctgagccgctcaacacatttcacgtctctttctgaaattggaaacaccctggacattagagctcgagaactgcagtcaatttctcattacaacatctgactttcagataaaaacatgaaaagaaaatactttcaagctactgctgtttaaagcacttaagtgtttagcacataaacataggtgccttgttccattggcaatggtatcatgcccagcacctttacttgtagcacctattctgtgtaaaagatgcgttttggaaagtgacatatggagccttgggatggagcaatacactttccttcctgatgtgtacttcgatttgttgctagtcacacatttcaaaccttgtcaagttggttaaacccacaggttacccttattctgtggttcttgatgcaatgacgtgtgatttactcatgctgctagtcacacaatatgagtgccggtaagctggtattctcacaatggtcccttattttgtggttcctatgagaatatgctggtgggactgtatctttaggaccacaaatcactgaaagctactgacctttagatttacataggttgccccatcaagactacacaactcatttgtcagtagtgcatcactggacagcttcttgagaagttgagatgcatctcctagcacaaataactacagtctaattgaaatactgttaaattgtctgctcatgttagttatactttctggactttgtccttcattagatttattatttgtcttgtgttaatcttttttgtgctggaatgctaatttttatttttgcacataatcctttgtttttcaataaactaatgagttgtacaattgactgtatctgcaatcaccaatcagaaagtgcaaaccagctgcttttggtttattgaacaataaatttcttgctggaagatcaggactagtcactaggctgcaattataataaaaaggtattttagagaattattttatgatgcttttgttggtcctgtggttttactgtcaaactgttcagtgccataactatttgttactcagctgttaatcagaaagtatacagctcacttttggtttttggaaaccatacaactgacttgaacttttgttggctatgttcagtg

SEQ ID NO: 5084 - DNA, 2600 bp, Sorghum bicolor
  Intron number 1 from transcript Sb06g023630.1 (locus Sb06g 023630) derived from phytozome v7.0 (chr-ID chromosome_6; pos 52726068 to 52728667 reverse strand)
ggccgacgattccaaggccctcgccatcgtcgagagtgagtacagcttgctctgcttaattaattcccccccccccccctctctacttgtgatgcaaaggtggtgctggcgtactgctggttttgtgctttaaattcatgtgctaggaattctgagaaacttccctcctctgacctctctatgcttgggttcgtcgtctctgtactttctggtagctctacagtggcagtactaggtacttgtgagttgtgattcttgacagttggtcatggtctgcttctcttttcatgggttcctgatttgtcggcatgatcctctttggtgctggttgttgtcgaacctatttggtccgactacttttcgtcgagaacaaaatttttcttcttaggaattcagaactatttgtgtcaggctgtgaggtgcaaatcatattgaaacctgcgatcaagttctaaagtactctagtcctagagtgtatttttttttttaaaaaaaattgaagtaaattttcgagtccggttttcagaattatttaccagcttgctaaatattttttcttttcattttgtgagagtggcagccatgcctgccaaggactctggaggaattgcttgtcaagttctgcaggggtacgggggtaaaaaggtctacaaacattttgcctcactgaaacacaaaattgtttttaggacgacgtggccatctagttctaaaaaaagtatgctagttgtttgatgcctagacatgtagtatttccttttcttgaaatttgattttagtgaaaattcagattttatttcggaaaaagatggtagttggaactttcctgaattcttcactttctcggtttcttcccaccttttgtcctctcctttcttgcctgctctcatcgttcttctgcctttatccattcgaatttcccttccaataaataaataaataaaatgggcaagccttagagtcagcatgtattcctatcgtttttcctatgtcaatataatgaagcgcagctcccatgttctagaaaaaatatcctttagaaagattctaagtttcatgctaagagaaaaaagaatcagacattaaacaaaggagtatatagaacaactttccactgtgggcttggattgttttttttcggattatcagacagttctttcctatttcttgaaaccatggagcaattatttgggtattagaacagacaaattctgttattttgcagctttgttattcttcagtttagattagtgagtacaaatttcaaatgacagatgaatcatgacaaggttatgataaattttaactgacttctttagatatatatttctctcatattaacatgctccatcacagcttacaaaagctagacaatgctttctgttgctgctacgccttcaaagatgtagtacatcagttccttgcataggtgggcaaatgatgaaatcatgcgctctgaagcattcggtttccctaatggttatgcagatatacaaaataaactccttttttatacttttgaagaaaaaactgtttttttatacaattgaagaaatatccagcttcatccccacaagtgaggagtcagacaaaataagctcatggaaatttaatttgcttctatttcctttggcctaggccttgttacttcccctattttttcaataaacgacaggtcctgcttgtttaccttaaaaattacttttattgtttaaatggccaaaaacatgaacaactaatcaacagaacacaatgggtgccaaatttgagctggcaaaccaggcaatttgctgttctctggtttatctcttatcatgtcgatcaatcttttgttattctcctatattaatcctacaaagcctactcatgcacatccaaagccgtattatctggaaccagataccaacaaacttgtatacaaacggaacactgcatctcacacatacagtgttgacagacaaaattaattaaccaacaaaccatattctaaaaatttgttaagcacatcacaaatacatagaagaagatttttttgtagtcaattttgcattaactatgctggtggcctggtcatgtatcttcagaagaccaatcttttttttaaaaaaaaagaaaggcaaagctcaattttttttaacaaaaggcaggagctcaattaagaagaagaacagaaaactgatcatcgggtatttaaaagttggaacactatgtcatcatttggtcattcctttcctgaaagaggtagagtaggtttctatggttactatctatcgctttgtagttcgtgtagtttagaataagattaatcctatgcaagcaggagcatactagtcaaataagagaaaggggaatctacaatctttctcactaagcaagctatctaagcagcagttacataggacctggatcggatacaaataagttgtgcatggcaatctcaactgcatgcttctgcacagataatagtatagtgacacaaattacattttgcactgtatacagccacttgctagcttcttcttctacacaaaattgttcagcaaagtttgcagaaaagcaagcctaaattctctatttttctgtctttccagaagttgcag

SEQ ID NO: 5085 - DNA, 3466 bp, Sorghum bicolor
  Intron number 1 from transcript Sb08g022030.1 (locus Sb08g 022030) derived from phytozome v7.0 (chr-ID chromosome_8; pos 53810519 to 53813984)
tgcactgcaacttctgcaacacagttctcgcggtaagcagctaagatctatctatatatgtagtatctatgttgcctcctgctgtgcggatgcatggtctatctatctgctgctttttctctgcctctgtaaatctgctttcaagatttatgtgcacttgtgaagtgactgcctgggatgggtgagcaccggcccggcccaccctcatcaccacacaattgtcctgttctatcttcatgatttgtttgtagtacactcttccaattgcttttcttgctagctagctgcttttgttgagacttgagagtcgtccttcaatttctcccaattaaacaaaaagagcagtcaattggctttgttcatgatctgcttcttcaaatttagtttgtaatttgctcttttgaagctcccaatttactacatgttcttcaatttcttgtttcttttgaaagaattgtttttttcgttcgaggccaggtgcgtcgatcgatcaattcgctggagatataattcaatttaaatatgtttttttctgaaagttctcaagatttgttatttggctgctctgtacagtacttctgtatatgatatttcttgggggatacaacaaaattcctgcattatcctcgtgttgcaccctcttgaatcccttgattttaatatcctgaaactagtggagaacagtgtccactatacataaatcaaagacaactgtagcagtgtatatacatgcatgtgcatgaatattgaactttacttgaatatgcactatcttccagaaaaaagttatatactctgctacttgggcataattgcaggcatgcatgtagaaagaggttttcaaaaacaaacaaataaaacatttagtttcttttaggttaaagttcttaatttgagtttactgagaggtcttcaagttttccatatacgattcatatgtttaagcatatacgatttgaatttcccttaattatcaacatggaatgataatcatcattttagtgtcatgaagcctcttttgaagttaattaagagcatatacctgcagcttctgctgcttttttactttatttcttattgcattaaactcttatccagctcaagaagaacttaactggggaaaatcatttgattctaattaattaacctagctgccaaaccatcttctttctgctaatcagctagcgaagtttcaaaagctatgatttatgtacagagctgccttctctctagtctctactgccccagtgcccccctcttttttgcactgaacctaatatccatcttctttgtttaatttacctttttcttaccttattattatcttaaccccctccctaattgattcggatgtacaaaactttgatcaaagaggggaaaaaggattgagttattactgcatagatatgcttgaaatattcaatgatgaattcttgcaggcagtattccacttataccacatcatgacatcaagcctatacacccccatgcatgcatggtatttgagtaaaataagcagataacctcagagttgatattaagcatgcaataaacaattgtgcatactgtacttcagtgtacaagtacaactgacaacggaacacagattaatagagtaataataatagagatgggaatcttgtttttgatcatacacatgctttaatttatttccatgtatgtacatatttcagcttgatgatacgtgattctcatttctgaggaccaatatgtcctcttgtattattctttgcttgattgctaataatgcatcagcatttgtctcggcgtagctatgtacctttttccacaaatactaaggtttaatttggtcaagtgtcgtttatagtttctattaccctatttttgctcaagattgtgcatgcatcaacttacgtatatgtagataacatggcatacatataccatatatatatagctcagttcttaacttttaattgattccattgatattaagctcaattggcatgaaaacattaaattgtggctgaaacacttcagtggtatgtgtagtgtgattcgttgaagaatcagactagtacgtaagttaactggctagtacgtatatatgtcgagtgttggtaagttcaatgatcacgagagatgacaattagttcgtacatgaggtaatagaaaaatctaccagaagaaagaaaccgtccttttgcatgactcactagctccataatgatgtgcatgtgaagtcctccaggggccgcagaccagtttcggcaatctttggagcatttgtgaaatataatgggcaggtgatcttcattttaatctcttgaggacgacgatgctagttaatagggtttaaactttaaattgttaaacttaacttgaattcagccaaacctagctaatggtcatatattagcttatgaattcaactcagtgtgctagggcttgctgaaataaagcctcaaaagaaaattctgcaaaggttttgctaagtattcctcagaaactaaagtattggttactgaagttacaggcttattggacttcctgttaacaagaaaaggtgagaaaattattaatcagatcaagtagtagcaccttgcactgtagctgacataccagccagcagcatacatctctctgcatgtgagtttgtgtgtgaagtgggtttctatgaagtgtcactatctttgcttctttcctctactgccttcactattttatcatttctgtggccaatgagcatgcttgatctacgaattattcagttctaccactatctaggacatcatatcacacaccctctccctctctcttgttagcatgtgtctgatctgatcaggcacatgcacacacacacacacacagcatggcagctagcaatccatccaccttggccttttgtgtgtttacatctgcatgggctaaacacacctacatacacaatcattattgttgctagtaggggtcatccatggactttgtttattcattattttgggagtgagtgcccagaaagatggtgaatagataatatcaggctgagccatgattttagcctggactataagattgtgtgtgagatactcccaagagagagaaggcatgggaaacaagagaacaaaagtgatcggcatgcaggtgttacgaaagtgagaaccatatcagcaggcagcaatagtaacaagcgtctgataaaagcatgtattggaccagcagcagcagcagcttgttgatgtagctgcttaaagtgacaaactgacaacaacaaaagtagggctagaaaagctacctggcgtgaaatctcactctagtccttttcgatctaccttgatctttgatttcatttatttctcattttttaatgtgttcatcacaactttctctctctctttctctagatctctgtcatatatatatgttggtattcgattcatggttaatcgtaccgtgattgcaggtgagtgtcccggggaatagc

SEQ ID NO: 5086 - DNA, 1916 bp, Sorghum bicolor
  Intron number 3 from transcript Sb03g010700.2 (locus Sb03g 010700) derived from phytozome v7.0 (chr-ID chromosome_3; pos 11671973 to 11673888 reverse strand)
ggtacctcaggtatagtgctttataaaagatctcgagattgcactgattaaatatatgttttatctgcacctatgatacacattgattttctcaggaccccaatttacaacttgggtttttcttcagtatctaattgaattttcatggagcaagcaggactgaggctgtttacatgggcggatacagtgggtattcctggtattcccaggaatacccaacttttttatacactaaatatatatactttttatacactaaatatatataggtatatttatatatatgtatatctaatatattagcatttctatgtttaccaaataaaatttttctctcattctttttagtttattcttgcattcttttttccatataggttctatgttagctcgattgccaaaattattctattctgttgtttctacaaatgaaaacctaattatttatctccagaccatatacatattgactcgtgccaccaaatcatattttatttccaaactcttttccaagacaaatcggaatatgcacatggcaacatgtataacaaagtatccttttcgtgtgagtgaacgaggcatgagtgggagacaattccataatcctcattcctaaatctctaaccctagccgaccaggcatgatgtagtggcggcactgctggtttccagtgtcctgagctcctagtggtgcgaggcgtgtagcacgggcgtggcctctgtctctatgctatgcctacatggcgactggtgaaggcacacgtcggtcatgaggttagaggcaacaactgagtggtggcccaccagacaccaggaatacccaagatttaaatcctggctccgccactggctgtttatctatctttttagatatacttgttgctagtaatgctttgcagcattcttgagttgtgagacaattaatgctccttttatcataaagatgattttctttttttctcctaaaataaactggtatagtatttttttggggggttttattagtagaatgttagaaaatagtgagaccatccacatcagaacagtcatttggattgggttctggcttgtttacattgtctaaagggtgtgaacataaccttactctttcattggagtgtcaccagaaaatttcatggagtgagaataacatcatggaaatttgtcagttacacaaaacccctttccagtgtcaccagaaggttgctgcaatatggttgttagtctgtgtggatcattggcaaggatgtgccactctctaaaggctgaatggaatttatgatgttaagtcatgcgagtagaatcagtcggtaacctttgtacctttgttttaaccttcccaactaatatcctttagtatcgtagccattggaatgggaatacatctgttttcaaaggtgaactaataaatagcttctccagtttaattgattctgtatatgtaacaagttgcctgggcacagtactctgagttgaatttgagtttccaaaaaaatggatttacaacgctgggattgtggacacttgtatagttttaaaggaattatctaatataggaaacattacaaagttgattttcacaagctctgaaaagatttactgaaataagagaagtttatgagtgtgaaattgacataaacaaatagtttcactgcaccatggagaaaactgctggaattaagtttcaggcaggttaattatcgaaattcaggatggaagtgaatcacttgattgtactctttatgattgattcatcgttcttttcatatttacaggcagcggtgtcttcttcttaagttcttctatccaccttatttcactaaaattacctttcagtttcttgcctgttaatttaatgctaccatgtaatggccagtcaatctcagtaatactattttctgttattgtagttagctg

SEQ ID NO: 5087 - DNA, 6903 bp, Sorghum bicolor
  Intron number 1 from transcript Sb04g021050.1 (locus Sb04g 021050) derived from phytozome v7.0 (chr-ID chromosome_4; pos 49375569 to 49382471 reverse strand)
caggcctgcggtgaggccgccgtctcctccgtccggtaagcctgtgtcccttctcccacccatcctgttcgattctcgtagctcccccagcaccttattgttcggggttcataggagaagtcttcaagcctgaaacatcgaaatgctttggccatagaatatggataggtcaagatgagacgttgattatttattaatttggaaatcgaatttgtccaatcaggacaagcttagtgctgctcacttcggtgtgctttaggttcttgctcttcttggcgtctttgtatgtttgtttggtcggtaaagagatcgtgttcattgttgtactgtccatggcctactttactgtgattcgtgggaattggactaattgtttcttgcaaacttagcaatgttgttcaattgtgagtatgaggcgaagagagaaactcttgatatcagttcctactggtaccatatggttcttgccttaaacaaaccaaagctggagtggcaccggagaagggccttttttctatctatgtctgaaggcactgtgattacaatcaggatctccttacagatggcaacaggcatccagaatttccagatccagatcattttgttcgtcttacccctcaggtccccttgctatgatcaagtggctcctttgctttgcagcttcatggtccctgacctctataaacaagctaaagtgtggctaaagagtaatttgttactctcaactttgttttaaaacccttttttaaacagctttaccacttatggaatagccgcaggggcactcaagatttatggtgccaccaagactttttgacttcatattgacaccatacctcactactcccaaatggactcagttggagtaccttaaggagcactggataagaaattgcatctgtcaatattgcttttattgccatcattctcttttctgtagactcccaaattgcatcaggagatctgctctgtatcagcccagggctggatcgcatgctagaagctaaaagtgaggagaccataccttgttacattggaccagccaaacctatcaatgagaggcctactcctctcaccactataggttatgacaaacatctgtatcatcttatttctcactcctcattcccccttgttgctagaatcaagtgtatccaaagactttgctttgcttgatggtccctgacttatatggaaaaggcaaaggatattctgttactttggaccatattgtttgaaagtctttttttatcatttcaattttagtgtctttaccacagtggtacattatggacagccaaggtagtaaccatggacatcatatttctgtagccataaaaatacagagttgaagtacctcaaggggcactcgccatctgatggaagataccttgattggcatatggatctctcgcagaggactcccccatgcaccagaaggtccacaatgtgtcaggaaaagtttaatcatatgaatagaacatatcagagcttcggctcaagttagatgttgggcccagatccccctacccctggcggtcggaccatacaaacctacaaggctgagcgatgagccttgtgtccccttgctactatatatggtgacaaaatccattctgcacacatgaatacatgatatcaacctaagcctaggcagtgcttgacacactgttattacttattagtaggaccattgtcaggtataggttctatattggagcagacatatatcatacatgatagatactttactggctttctttgttcaaggttttgcaaagctcgaatatctactttggcacccccttgggtccacttgctatgatgaagtggaagcttctttgcttcatgctcaatggctcccaccactgtgtacaagctgaaggatagataacataatacacattagtattcacaggcaatctgctggaaaagacaagacttcaattgtgatttttatgtttcatacgtgcaactactgtgggccacttcaaaaattgactgggctttttttcagtattggaaagagatggttttgtgatgatttctagctatttgagtggaaaatactgatgagattgtggtagatccataactttgttaaaaaaatgtatataaaatcagtgatatgtatatttggttcgagtagacgaaagatgaaactttggtggctcacaacctcaaaagctagatataagattttgattatttgtgccatcttacgtgggaattatgacacaccctacgatgacatgttacgtggaaattatggcacgcaaccctacattgtactaatcacataggaaagcatgatctgctattgattgtcaccattagtccattacagtgtttatttatgatgcttggctgtgaaaataccttggcctcaatttccacaaaactttctaccacaacaaggttgatatattatgcctgtgcacactatgttctgaaccttctagccaaattatagcaaacctcaagctagctttactcttttatttttttcccttttaaattaattatcaaaacatcaaacttgctgatctcttggtcactaaaggctaaggccctgtttggatacaaagtatttttggagttttagaaaaataccatggttttgtaaaatactttggtttaggagcgacattgtcaatggcctagacgcccaaggtaggaggcccttggctcctcaactcatagctagaaccaggtaattgtgccagggtttttgcctggctaccgttgcagcaggggatgagattaagagcagcaaaggtagattaggagataacttgtttcttcattgcttacccatctcaatctgattacatggtataaatagagggcctcagcctctagctggcgcccagccctctaactcctcctttctctccccatcaatgactctaatttctcattaactgtaatctctttacccaacatactaattgcattcattacagcggcttgtgcctccttgggctgttgcacgcccttggatgctgccctggctgcatgtcgtgctctagacctgcagttatactgccgcatccacatgacatctccccctcggttgacgagcagctcgtcctcgagctggaaggttggagagcggttgatgtcctcccaagtagccgatgcagttagaggggtgccggcagacttcttcaagagccagcagaccagatggttcttgtgccaaaaggacatggtgaaggctgcaaagtcccacaggattgggcgcagtcattgggtacccagtactatgtcgtacctgctggtgtggacgccggtgattgcgtggagcaacatctgtgatgtcggattagcggggtcgtcggaggcggtgtcattgtcatccgccgctgccaggtccaacaagaacaggcgctggcacattttgttctgaccacccccgaacttttcattgcaattgaagcaaagtccgagctggcggcgttcttccatcttggacatcgacaggcacctgacggggcgaccctccaccataacggtggtggctgcggcagtcgcagcaggtgccggagccggtagagcgagatgtggtggaggccaatgttttcaggtcgttcgattaatcgcgattaatcgtcctggtcggtcaggagtgctcgattaggaggtccgacccgaccaggtcgaccagaaacctggtcgtccgattagtcgtccacttatcgcgattaatcgtccgattaggacatggacgaccaggttgtgtgctctgtttttgggcttttttgactgggcagatatgtggggggtatggagatgctgttggttgtcccagttctccagaaatagttaagaaggagatgtttgtttacatcaaaaagagttgaagatgaagaggaatgttggtttacagtaatgcagtcttgatgcttcctttattgtgtataatatagtgtatatatagaggtatatatataggtcgaccagctgatatgcctggacgaccagggtcgattaatcgacctggtcgctgattaatcgcgattaatcgcctggtcggtcccaggtcgaccaggatcgactagacgaccagaaaacattggtggaggcgccagaaggaggccctgctgctggtcgcatggtggtgcttgcagcggggcagccactgcgacgcactgctcgtggacaaggctccagcatgcgggcaaggctcatggtgactgagggttgtgaactttgatgtcgaggctgagcggtggctgtagcccggcagtgaaggcctggacacgttgtgcctccgtcagcatacccactcggggcagcagcgcctcgaaccgatcctggtattcggtgacagagccggtccgcttgcacgccatgagctcgccgagtgggttggagcggatcggagggctgaagcagatgttcaagagctcggagaagcggtgccaggacggggtgccttcgtcttgctgcaactggatgaaccacatctgtgcgccggcctccaggttgtaggatgccatccagacttgttcttccgccgcgctgcgctgctgatggaaataggagtcacagcggttgatgaacacaagcggattggacttgttgtcatacttagggaagtccatcttctggaaccgcggcggccgatcacccagattgccttggcaaccttgggcgcctgcaaaggatgctgctggtcgcggcagggctgccacctaactctggagggtgctgtatggaggtggtcaaggcctggatcatcttggccagatcagctgttgatggttcggccatgggtgaggatatggaagcggctgaggtggaaggtgaggccggggtgggaggcgtggtggtggttggatggggtggtggtggtgcagcagaggatgaagggcgcctggaagccgatataaggttgtcaagggcctggacgctcaaggtaggaggcccttggctcctcaactcgtaggtcgtagctagaaccgggtaatggtgccagtgtttttgtctggctaccgatgcagcaggggatgagattaagagcagcaaaggcagattaggagataactagtttcttcattgcttacccatctcaatctgattacatggtataaatagagggcctcagcctctagctggcgcccagccctctatctcctctagctggcgcccagctctctaacctctcatttctatccccatcaatgactctaatttctcattaactctaatctctttacccaacatactaaattgcattcgttacagcctgtgcctccgggctgttgcacgcccttgggagctcccctggctgcatgtcgtgctctaggcctgcagttatactgcttcccccacatgacagacatgaagtgtttggatgctacaaacttcgtagtttaaaaaaacatagtattgttaaaactgaagtctttttggagttttattaaaaactctcactctagacctttttatctaaaaaatggttttgcatgtctatagggtctaaaactgcagtttttttagtaccacatagtttattaatactacacaggtccagggcaatgtttttaggtcgtctggtcgaaccgggtcaacttgggaccaactaggatgattaatcacgattaatcggatgacttgtacaggtcgacattacccctgatcagtcacctaggaccgaccaggacgattaatcgcaattaatcggacgacttgaaaacactggtccagggccatcttatagtattttctggttttggacatgtctaaccgatacaagagcttgagcctatttgagcattcttgagcttatccttcaacattgggcctgagcatagcttattttgaactatcctgctgatacaccatgaccctgtggagtagcattagaccgaaatggccaaatttctgtattgtggattccagttgcctttgttattttctgcagcatgggtatgtcttcagggacatgaattggtagttgcaaagcttagattttggcaatgataatttagcaatatacttgaattcagcagtgttttgaaaggatcatttttttttatgtttactggtatcctcagctctgaacacgtccttgggatttgctagttaatggtgacatatctgaaagtcattgtcatagggatttatggtgattagcaaacaagactaaaatgaagcatcttcctgttagcataaaaccatctgagtaacatatgctcatggtatttactttgcttgatctcagttacctttgctttgaatgatcatggggatctgttgagggaggggagcatttggtagtttggtagtcaactttccaaccatcatctagcggttgtgcggaggggtcaattgagtttttctattcaatatatttcggttgccgagaatattctggagaatactttaagttttgtatggaggcacaagttaattgaaagatctggttcaaactacagaatacgtgaaggtggcattaatctgtttaagatttggctagaatctggtcgccttttttctttggctgctctctttagttttttttagagatctgtatttttggggtgtgtccttgggtgggatgacttctcctttcaccccgtattttatctcctgccttttaatgaaatgatatgcgaatcttctgcgtgtttgaggaaaaaaaagatttggctagaataccacattttttgctgaaaacctcctcttgccccgatcagtcggatgcaaagtgatatgctctggctaaacatgagcccttatgttcatgcataattttctgtcaagcattttcgttttgggtactggcgtccagcaagacatgcagaggattcatcatcatagctaaattgaaaatgaactcacttgtttctttgaacaggtcaaagccaagccttgcatccgtcgtggcttgca

SEQ ID NO: 5088 - DNA, 15238 bp, Sorghum bicolor
  Intron number 2 from transcript Sb09g021160.1 (locus Sb09g 021160) derived from phytozome v7.0 (chr-ID chromosome_9; pos 50580998 to 50596235 reverse strand)
ctcctcgtccgtgacaggaggaagataaccctcaggtacacaccatgcctttaccttgctccatctctctgcgttgcaattgcaacgtcatactgtagtaggaaataggaacagtagcgtcttgacagtggccatatgtggccgtgatgactgatgagccatttactatcagtttctccaatttcctatgcaataggtgatcacagaaactgggttgtttggatgtgttgtcgtagtttgctagcatcacattcgccaaagtgtggctgacatagaaaatgtgacgagcaaaaccgaagctacacttatagcaaaatttagcacaaaattaagtttgacacgtgcgacacggtgctaagaatgtggaatgacatagttagcagtgaactaaatagctgccaattaaaactgctaattgtgcctgactaatctttagcgcgtgactaatacaagttttagtaacaaaccaaacagtgcctagctcttgcttgcatcagggcactcacaatgcagactctatcatagagtctaaagttatttattacctcgaacaatgtggacttagagtctaaataagacttggagtcttattttttctatctctttcttcaataaatatgctgtcacatcagcaaaataccataaataatatataattaaatgtcttcgactctgtgatagagtcttgcattatgagttcgattcctgcctcggtcgatatgcatgcaagtttccttcccatcctctgcttcctctcttaccggtgcatcggtccgtcagaaaatggcaagggtacttctaggttttgttggagattagttcggctgccgaatcccactctgatcattcttgtggatatgcataagcataacacacatgcgtgccaaatcctactcaataattagtcacaggtgacgctgataccatgcttgtacccattgtcatcacaccattaataagatcaaagatactgttctggttggaattttttagacgtgacagcatacgatgctagggagattagtacacgtggctacatttcagtcaagaaagcaaataaaaaactacttcctggagacataagtcaaaaaatcataatatggggaattgttacagaagaagaaaaaaaatttagagtatgcatgggacccaaagccaaactgtattattaattgattctcacctcacaaccatatatatggcgacgcatttgcgatttatgaagttgtggctgagattgtctcacagctcaaatgtgccgcatcgtcatcacatagtggaatgttaggtatttcagatgtgtttgattgcatggacgggcttttgcgacatcaggacggcaggacgctccggatcctagaccgtgcggtgcttaaagtgacaatattctggatgcactagctgctttaaacaacagcttttaaagtgacaactttgaattttattaatttcactagcaatatttgcttatatattttgtagcaaagaatactagtacacaaaagctctacgctaacggtggagcataatttttacaagtggttttaatttaaaaacgtctgtgaaaagaaatcgacgggcccaacttaaaaaccgccagtggaaacacattttcactagcgatacaaatagtacattttcacttgtggttctattaagaaaaccaccagtgaaaatagattttcatatgtggtttttctaacaaaaccgtctgtagaaatcatatatttttagaggcggttttcttaacaaaccgcccctagaaatctgatttagcggcggattcttaagaaaaccgcatgtagaaataatttgaaattgatttttttagttttttaaatgacctcatatgaaaaaaccatcaaaataaaagttgtagatcttaaaaagttatgaaacattataattgataattttttcatttgaaatcatcttgtcatcaaaaactatgttcgaatttgtcaaatttgaaatttaaattttgtaaattacctcaaatggagaaacgaccaatataaaagttgtagatcttaaaatgttatgtaactttgtagttgacaattttttcatttgaatccgtttagggcctcaaacaatcaatgtttgctcagtttaggataatatgtggggaagttaacataaacacaagtggatgtcgagtgaaggggtagaggaggcttcgcgcgaaggtgaggtcgcgggtgggtggcttgtgggccttccctacgattaaaatctttttttcgtattttaaaacccaatttatattttctagacaaccatttgcataggcggtgggcataacacaaccacctatggaaaacgatttccacaagcggttctcagttaaccgttagtgaaaagattcatttccactggcccttagcactggcagttttgaaaatcgactatgcaaataagttaggaacagcctatatgtatgtactagtggaaaaaaaagcatcactatattttttcatgtcagtaaatttctagatatttgtataaatgttttcaaaatgatgacaggccaaatgttgtattaattattcaagtacttgataagatcataagaatgcacacaaaagaatttagatttttttttctacaaaaatattgaaaacactcttctaattcaacctcggcgttcggtttaaaccgacgcttcggttcggtttattcggtttggctaaacttcggtttccataaacaggtcaccgatcggtttgcaaaaaattcagaaaccaacaatttcggtttcggttttttacttcggtttttcggttttaaccgaaccgaccaaacacagaaaaaaacacacatcaaagtacaacatacagcatagtcagaataacaatctgaatggtccaggcgtcatgtttatatcaacaacagtacagaaataaagaatggtccaggagtttattagaacacaagttacacaacatgattagaacaacaaataaaaagaagctccattcagtcattcaggcattcagccttctctccaacaaggcaacagggatcaacaacactacaacaggaagaaaatagtggatgtagtgcagagtgcagacgtgcagtccaaactgtccaatagtggatcaagaattcaagatgcagtagttgctgtagtgctatccttagtaatggccatggcacccatttctgcaataaatcatcacgtttcaattacttctcaatgtacatgtactctattcttatgcaatagaactgataacaaattagaactgataacaaattaccttcctcaagcttggccattgcttcatggtcctcttcaacctcggtgatgtagtcatttgcacgaagctaatcatttgtacaaacgagacgttcaaccattgttgatgtcagtgaggtcctaaaatcatcaagtgtccttccacctgcactgaaggctgactcagaggctactgttgagataggaattgccaaaagatcacgggccatgtgagacattatgggcaatctagtagcattgatcttccaccatttcagaatgtcaaagcctttagaaagctcctcattatcttctgtaaggtacttgtcaagttcagatttcacagtagcagtgctaccacctgtgttgctcatctgttgtgcaattatggagctcatcagcccagagctcactgctggtgcttcttgagtttcagaaggcaccttgtcacttggagttggagcatacagttccctgtactcctcaaacaaagcacgaaaacatttgttcactgtttcccacagctttggtcctatgtcatcaccaaacatgaccatagttgccatcttcacataattagaaagcttgaacctaggatcaatagcaacacagaaaaaaataacaatgttaagcaattgatcccccttgtctttctctcctctcttctctctatctctcagagtctctccatatttctctccccaatatttgtaatacttggctaacattttcttgcccatttcctgacataatatatcttcactgctacaccattgtctcagcaaaaccaaaacatcagcaatctcatgaaagtatgtgtgagaggttggacgacttgtggtagagacacggagcgttagattatagaagtgttcaagaaatttagccattttccttgatttttcccaatctgatttggttggaactccaggaccattctgactctctaactctagcttataatatgggtcttcatcactatacctttcaaaggccttttcatattgttgggcaacatttagcattaggtaagttgagttccacctcgtgcaaatatctaggttcatcaatgccttggtctgaacctttgctaactcggcacatctcttgaactttaccaacctagatgttccacttctaatatacttaacagcagcccgaacacgagtgattgaactatcaatttccttcagcccatcacttactattaggttgataatgtgtgcaacacacctcatatgaatatactctccttcagcaaagcaaccttttgattcattcaagatcctctgcatgtacttaattgcagtgttgtttgcactagcattatctactgctattgtgaaaacattatcaatgccccagtcagccaagcaattctctaaagattttccaatgtcttcccctctatggcccttaaccatgaagaaaccaataatttttttgtgctataatcgagaggattgtcgatatattttagcatttttttatcatgtattactttaacaaaaatatagatgttattgagaacggtcttaggtttagagtcggacaccatgttatatgtatactccttgttctaacttactctataagttgaataatttataggtacatacatcatttgaatattttcttaagttgtcttgaaatttataaaatatattatattataggacatagggagtacataggtgtggcagaacctcctgaattaagtggcccacatgcacacatcattgtcccaaagacttctgatcgacgtgcacgagttccaaatgactcaagaagtctgtcgggtgtcctcgggaaacccgaatcatccacgtaacaatcttttcaggaattccctcatcaagcatcacagtattacaacatttcatagataagagaaatcagagtaaaagcggaaaggttacataacatagattgaaacttaagttcaaggtttacaaaccataagtatttaatacataaaagcttcggaactttatattacataaaccatagatcacacaacaagtttttacttgcccaaggtcacacatcaggttcatcatcatcactctcctccacaagagtaaagtaaccatgaccatcaaaaggattatcaagagattcacctgcaacaggggttataaaaccctgagtacaaaagtactcaacaagacttaaccgactagaaaataggtgaagactcaggtatgcaggctatagggattcaaggtaaagctttatcaagatcaagcatttcttttgcataaaagcttactaagattaaagcctactttcaagttttaactcaagattatcacttaaaactaaccaagatcattatccgactttcataagcaaatcaccttcttattatatcaaagattcacttattactacgatgatggtacgaggattgaggctccatatccgaggaaacacggcgattcgaatcgattaaacccagctggggattcagtaccacacgacatatgtagaacttaatcttgcatatgtcaaccttttctatagatcctcccatacaagaacgggtccagcgtcacccgagagtacagtacaccaccatcctacagccaatctagatgtttcccggtcatctcagatccgtaaggtgggtacacgctactctcgccatctctccactcccagtacgcggttagccgttctcaagtatcggaatagctataggtaaggcttaccgccgcatgtgggctgtactcaaagttctcaatcacaacaggccaatcaacggtacggtccttaatcgactcagttggagacactactttaagactccattcttaaagcaagtccaccgaccggtctcaaattgaacatcattaactataagagtattccacaacgacccttcaaacgttctcatttgaaaacttatctaataagcagggctaagcatactaagcattttcataaagcaagtaccaaggttaatatggaaatcatcaaggtagataatgcagcaaataggattcactcaactcctattcacctaatgcatcatattaactcaagtgatataaataactttatgaaaatacaaggatagggtttaatgtccggggcttgccttgatcggaggggacgttcggaaactcaactactctcgaaggatccacaaactcggaagaaacccactggtgatcagattcttccggagcgtactctatacgtaaaagtgcatatgcatgattatgatatactcaaggtatgataaagacaagttacatgttcttggatgatataacaaaatatgattatctcgagtacactttaccttcatggtaaagaaacaaacaaagctagctatcaaagcataaatcactactaaaccaactttattatttttattaagcaataattgtgaatctattataccataaagattatttacatgaaaataaaccataaccagggagcatatcatgctaagtaaccatggttgtcaaataatccaaaatatcacccaactcctaaagggattaattatttctatttcttttataagcattttaaatagctttatcaagaaacagagcatacttgatcaaacagagctgaaattaatcatggagctaaataacattaacacaagctcacatattaaatttcatgatttttggatatacctatgaactattaaaaatcatggaaggtttattcattaataaacaaaggcaatttatgtatacatgaaaattaccagaaaatcaaacctaacatttttcttaggctctatccattttatgtaagctatacaaaaattttcacaatttttggattagcacaaaatttactacacaaattcaaatataaaacaaaaactgcataaaaagaaaaagaaaaagactactgcgcagtgggctgcttggaaactgggccgcagaccggcccactgcttccggcccgcgtccgcgccgcgcacgcccgcgcgctctctctctctctctcagccactgacagggtagccccacccgtcagatctctctctctcacgcacggcggctcggccgcaactccggcgaccgatagtgaggccctcggcctccgcgcgcgcgcgcatcggctccgcctcaactccgcgactccattggtaccactcgcggacgctctacctcactgctaccacctcggccacgataggagcgggcggtcgccatggccgactgtcggccggccactaggacccggtagagagcaaacgaatggcgtagggaggttcaaggtggtgtagggaacacgatgctcacgtcaccacggtgggagaagtagctgaagatgttggcgacggagacagtgcgatcgggcgggcgctccggctccggcgagctcgtcccggcgattctgttcgtgcccaaagcaaaagagagagagcatgagctactagaacacaagaggaactcgaaacagctgccagggaaacgtgataccgacgagaacaccgtggccacggtaagagcaccacggcggcagttctggccggagatggaaaagaatggaggtgtttctgcgattgagagggttatgggacgagcttggtggtgttctggattcgcaaagagatggcgaacatcgtggacggctcaatttgatacgaggaggatcgagcacggccaatttggatgaggacggggtactgctcctcggtgctccggtggcggaaaggaggtcggtgctcgcgggagagaatggcacgtcgcgctccacttcgccagcagctgctccactttgccacggacgcgagcacgtgcttggacgagatgaatcggcagttcacgagtcggcaaacgccgatcgacgctcggcggcacaccgccatgaacagggtcgagcttatcccccttgtccccaaaataccctttctgaaattatgaaattactttgaatttttgaatagaagacaaaaatatgtcaaaatatcaaatgctcagaattttgaatgctacaaaacatctttagtgaccaaagacagatttgaaatggaaagggatgaatttgagccaaacagtttgaaattcaagcttaatcccaaatttttgaattagggcaaaacagaatttctaaaattacttttgattttacataacaacttgaaaaacttccaacataaaagttgttcaacttttcaaaccctacaactttcatgttgaccaattttcacaattccaaacagattttgaattggagattcaatttagaaaaaggggacacttttcggaaatctgtattttcaaaattactttgaattttgtactgaaacttcaaaaactcaaaacaccaaagttgtatatcttgacaagatctacaactttgcttttgaactcaacttcaaattttgcttagtttttaaattacacaaaaggggcaaatctaaagtttttgaaattagggtttcccccctttaagcttctcggaaaacttttacccaacgattttaaactccaaaacaagcacccatacataaaataaacacacttaaattcctaaacacattcatccaaaataaacttattttaggttaatgcattagtgtgtgcttaacatatttttgatgcaatgctcatgatgacatgtcccatttttagttcgcttaacacgagagtgttacactttctaaggccaggacgttcacatatcacaaaaggcagctcatcctctattatcatctcagctaaagacttcctaatctcatcaggatcaaatttccaagtagacaaagtaccactactattaccagcagatggttgtagttgtaaagtaccttgattatctactacaggtttgtgaggattctttttgcagatttttagatgagacttcatggaggacgtaccatttaactttgtgtcgcagcggaataatttgctgcagtacttgcacttgcctctctcctccccattatcaattttgatcttgctgaagtgctcccaaacatctgatcttggattaatggcttttcttttcttgctttcagtttcatctaccactgaatctccatccttgggatcttgttccttatcattattctccagattgtcattattctccagatttataacttcatgatcacggtcatggtcattcagtcgaggtgtatctgcaatagtttcttcagtgtcccccatctacaagatttaaaaaaacagcatcccatcaggccatcagaaactagtgaactactactgccaagttaccaagtaaagtatgttcttgcttccatgagccatcactccatcatcagaaactaaaatcagaaactagagcagtagagcttacattggaggactgctctgttcttgcagccagagatacttgattcaggagtcgcccagtcgcctgcgaggagatcctccggtcctcccgagtcccgacctccgccacgccaccgccgcgacccgcgaggtctaggcgcgcgcctgcgaggagatccaacggagtcgcccagtcgccgccagtcgcgcgtgttggccaggggatgagagcaaagaggagtcaggagtggatcagagggagttgcccagtcacgcgatttggccgggggatgagaggagtggatcggagcggagggagtcgcggcggctagggtttcagagggagttgcgccgtcgtgtcgtgcggtctgcggtgtcgagggtcgaggccgaggggaggggtcgaggggatgagagatgagagtgggagagagctgagcgcagcggtcgtggcctcgtgggcctgatgactgggccgagacgccgagtggttgagtggagtggggacgtcgggacgatttccattcctggttcaacttcggttcctcggatgttcggctcggtttggtactgaaaccgaagccgaagccgaacaccgaacttctcagaattggaaaccgacaccgaaccgaaaaatcgaaaaatcgactattcggctcggtttcggttcggttcggttcggtgttcggttttcggttgaaaagtgcccaggctgacttctaatacatgtgagcaccgagtaaatttgtataatatagaagaatgtttggaaaacacgatgtgctatgcctaaacacccgctgaaaatggacatcctgattcggagcaacttcagcactagctttcgatatagatccttacttttgcttgaggactttacgtatttttgatggtcttgatttttggctgcactccagcagtggttctcaaatgagggccctcaaattcattctagtaaagaatgacacatgggacccacttgtcatcgttttttcttattttctttctcattgactaaattgccctatagaaaagctagaaaagtagagaagaaaggctcgctggagaggaactgttggtgatctcgccaaatccaggaggtgggtggtgggtggcagacgacatcaggtgaaggtggtccatcgggtaagcccgaatccaaccaccatggcccccgtggcgctcccacagatgagctcggccataggtagacaccacatgtgatggtcctcggccccagctgttgtgagcaaggtgcgggcaagtagtgtcacatcggctagaggaggaggttcgccgatgatgggaaattggaggacaaggtccagcagcggatcgtgctcaaacaagagggaccaatgaccccaatagaaatatgggaacctcctccagggcccatgggaatgggggcttaggaaggatttgagggctttgtgagggtcgtagaaggggatttgctagacctcgttttttgcctcaagtcctcaaatttacttgtgacggctcaagtagggctcttatagagttgtccttacaagctaaagaaataaccccaatgagctaaagagcactagtttatttattattcactaatggcgcatggattcggctgccaatcaacatgcacgctaatgtggaggccttctttaaaatctctgctcacaggtgcttggtgatggcaaattggcaaagggtgcccttaagattatgtccattcactttgtgtgtatccagggatgaaggtcatcagcgatcacggactaaattaggattactacgaggaatgactctacccaaacgagcatgttgcttcttgccatgagcatcccctaccaggctggtaaattattagctacgaacttccaccatgcttcgagcatgaacgtttgggattttgagtagatgcaaaaaaagatttccaacctcttactcggtcagttaggaaaaaaaggattgtggtgtcggtgtaaaaattacgcttaagttctagtttctacaacaggacaatagcacaaagccgccttaacaaagagttagatgtaataacattgccatgagagagtcccttcgcctcatttttgcttgattgttggactggttccattcctcacaatacccgaggaagtcgaagctaagatgatggaaatatagttgcaccaactcgacaaagaatcaaagtgcattcattaaatgaaggtgcatttaggacaacttcatctatgtccaaaactcagtgtgaaaacgacacaagatgaagatgttgaccctcatcttaaagattgacattcaaaaagtcatttgacatattgtcaattggagccacttaatcaaagtgctacaagcccttaggccttgtttagttctcaaaaaattttacaaaattttcagatttcccgtcacatcgaatctttagacgtatgcatggagtattaaatatagatgaaaataaaaactaattgcacagtttggtcgaaattgacgagacgaatcttttgagcctagttagtccatgattggacaatttttgtcaaatacaaacgaaagtgctacagtgtcgattttgcaaaattttttggaactaaacaaggccttacttcccagaaagttttgcaaaatttttcacattctccgtcacatcaaatctttagacgcatgcatggaatattaaatatagacgaaaataaaaactaatttcacagtttggtcgaaattgatgagacaaatcttttgagcctagttagttcatgattggacaatatttgtcaaatacaaacgaaaatgctacagtgtccatttcccaaaatttttcagaacccaaaagtcaagcgcacttctgaaccagtcgataatgtgtcaggtctttcacaagcggggcatttgtcaagggtacccactttacccatgctatttatccttgccattgaccctttacaaaagatgtcttttgaggaaaaagaagcatacagaaaacatgatatgtgccttatattaattatatatatctttaaagaaatattagttatactagtaaaaatgctcgtgcattgtaggattataatttaattactatattgtcggcgatgagagtggtagcatgacagagccgcgtgtgagcatagcagccactgcgagaagacttaaaccggtagcacgataggtacggcagcacacatgtgcaatctcaccagagccacgaccaggcagcatgtgccccgacgcaccggccaccgtgcaaacttgggctagcactgcatagtgtgacaaggtgggcaacacagtgtccgtatggacatggctcatatgattgtgcggggggcatggcctgacagccatggttgagccaacttgcaaccttaatagtgtccttagcaatcgagaagagcagtgtcatggagaagacataattatgctagcgataacatagtggtttgtagagatagcctgaaagtagctagatatcattagggtttgttgattgctctactattggtctacctaacaccatgtgtaagctctcacattttcataacacttgatgtatcctctgtcttaactcgtcattattgttttttacacccttttgagagcccaacaatgaggagtatattccaaatggatgaaatttaaaagaaaataatatataaactatggaaagaaaactcataagggatgcaaacatgagaaaaaatagcaaataaataccacgaaaccaaaaaacatggggaccaaaaaataaaaaggaaaaatggatagacgcaaaaaccgaccaaaagaaatcaaaccaaaaaaagatcgtccaaacctaaaaaaatcatatgtagagtggatgatttttgcgctagtaacaagcgagatctagagcgccccgtgacaatgtattattttctttgcaaaatcatattgctattgttttatatataagatgaacgaacccatgcccatgagtcacaaccagaattttcatattctcctagtgatgtgggcttcttttaatattttagcattcaaaatttagtacaaacttttcctactaagtgtcttctagcaggattccctagtactatgagtagtggtagcgatttgctactaatttaaaacactaggagaactccactattttagtagtgagtactcaaaaagggatttgtgtcctattattaggacttttcctccatattactaaaatatgttttatttaatggtactcttgtcctagctgtattcacacaagtgttggacatgtattgggactaggattccaaaatgtgatagctatggacaatataaaacgtgagagctatagacaaacctgaaaggagactgtttctaaatctaatggagttagtggaaaacggacaaaaaaatagatagatgaaaaaatagactaagattttgcttctttattattagatatagaatatagatacagatatccacggtgtctgataataaaaggaaaaaatctattccccccccccccctcaactttcacgaaagttcgcttttcctccctcaactctaaaactgggcaagccatctccttcaactttttaaaccgtatattttacctccctggggcggtttcgaaggttgttttgctatagtgaacggtggttttgctacagtccggtggttttatctttttctttttaattattttggttgaatctttgaaaaattatagtaaatcacaaaaaatcatgaaatggaaaatccaatttttttgactctgcataagtagatctacacagtaagcatataatatagtatgctttagtataaagtttttgctataatggttttgtctttttcttttttatttatttggttgaatctttaaaacatcatagtaaatcatagaaaaattataaaatagaaaatctaatttttttggactctacatgagtatatataccatataatataggtatgctttagtccaacaaaataatcatagaagatgcagctatgaattatttcatttaattacagaagcatagatctaaagctacaccaaaatatttatactaaagcatactatattatttatttactgtgtatatatgctcatgtggagtctaacaaaattggacttcttattttatgatttttttctgtaattactatgttttttcaaatatttagccgaaataaataaaaaacaaaaagacaaaatctttctagcaaaaactttgtaataaagtataccatattatatatttattatgttcatctacttatgtgaagtccaataaaattagattttctattttatgatttttctgtaatttactataatttttcaaagattcagtcgagataattaaaaaaagaaaaagacaaaaccaccatcactgtagtaaaaccaccatttactataacaaaaccgccttcaaacccgctctagggaggtaaaatgcatggtttaaaagttgagagaggaaaagcagacttttccataataaaaaaacatcataagcccaaacgaaaggcttaggcttagcttttcggcccatgggccatttcacaaaaaaaaaattactgcgatccctcgctcaaaccgggccttgactgaatattgcttgatctttcctcctatatgaagaaaaaaaaattccctcaaaaaatgaaaaggggaagcagaataattgcttcagcaagcaactgacgctgcgagctttgctgtaggtacctgtcgacgttcttcatc

SEQ ID NO: 5089 - DNA, 1634 bp, Sorghum bicolor
  Intron number 4 from transcript Sb04g021990.2 (locus Sb04g 021990) derived from phytozome v7.0 (chr-ID chromosome_4; pos 51208124 to 51209757)
acactgaggttcttggcgtctccattgacagtgtggtatgttataatgccctggtattccatgatatgatagcatctgtcagtatgaatcagtctgtcaattgttcttaaggataagtgagtgtagttgacatctgatgcctccactgttcgtacggggattgttctctcatttgtcatattcgtagttagctgttgaagtacatttcagctttgatatgtgctagctcataactgaaatagaaatattatggttgaactgctcatataatgagaaattcatgtgctacttctaggttatctttggagcacaactgctgtacttgtatgtatggctcttgagcagtcacattatttctaaaattaattgtggaaattatgtttatgtggagttagagaaaagtagttatacaaatacacaatattctataacagtaaggtagtcgctgtgtaagggtggggcaggggttcaggggttttctcgatctgtgtgagaagatcttcttaagccggaataccctgggactgtctagccaccgtggattgagttatttttttataacagtaaggtagtgtttcctttacacttgccggtttcaatatttggcaaagtagtatgaccacacattctgcttttttttctcatggtgaaagatacgtgctgcgcattatcaatgtaactattaatagaaaaaaccatctacatgaacataacagcaatgacagtagggatgagaacagtcggaatggtactataatacagaatctgaaagcggttggtgccggattttcccctttttatcaaaataagtaatgaagaaaatggttgtgataaaatcacaaaatgtcaactttcatgttttgatagaaacggaaatgttatgataatacggaaaacgatatacctgctttcacctcttagtgacacgtcactatccaatatttatttccagattttctattgggactaagaactcacattgcacttgaggccttaaatttaacctttgttggtccaaagaaaatctcttcttagcttcataatcttattaaattgatcatttctgttcgctaaagtactttacaattacaaatctttggagaactgcatagtccctccatttttattttttaaatatgccccattgagtttttactataattttgaccaacaatattatttaattacttagataagtaaagtgaaaactaaatcagttctaaagtcaaatgtttatagaagagacaaatagtcaaataaataaaagagtcaaaggttaaacagaggagtactattaaaaatgccctaatgacttgtatatttgaagtctttatacagctatgcttgtatttgttattactccctctgttccaaattataggttgtcttggcttttctaatatctagacatagcctatatctaggtgcatagcaaaagctatttacctaaaaaaaccaaaacgacctataatttgggacagagggaatacctttttatatcattgaatgtatgtggtcaaaagtagaaatcttgacataaatagatcttgggttttggttactgtgatttcatcataatcataactgttgttaattgctttagtgtttgtttggatgcagttctcccaccttgc

SEQ ID NO: 5090 - DNA, 2114 bp, Sorghum bicolor
  Intron number 2 from transcript Sb03g011910.1 (locus Sb03g 011910) derived from phytozome v7.0 (chr-ID chromosome_3; pos 13636615 to 13638728 reverse strand)
cgattactggtaggtaggtatctattcttcaagtccaaagaagtaaggtctaccttaattcttagtcccaaatccgaatcattttttttttctatcggagctagttctttgataataaggatacttcaaagtgaagcttattttggttgtccttgcccacaatttggatatctattctttgtttgaagtaggtatttgttaatcaatcagttctttgtttttatttccttctgtttgttctgtcatatactcatattttactgcttctgcctatgtcctgtaaatgggatagacattggaatttgaaacaaatccaaaggtcatcaatcatcattgtcttatcgcgctagtaaagagaattagatttcacgatatatattatatattttttgaatgatgcttccctacggcgcagccttcatagggggccaggggtgtggccgagtggcacgaggattcaaacccccactggctctaccaaaccacaggcctgtctgcactgagcctacattttggcgcgggaacctttttgcttgtaattagtatgagcattttttttgttttaaagaaaatcctgagaaaaaacatggtagcaaattagctaactaatactgaatgcttggtatggcttgtagcggctcttgcttgtttaattaatgttttctatgtgactttgtaataggtatattgttatttttgtgtatccttaaaaatctatagtgggttctagatgtctgatttagtaaattactccctccataatcttttgtaggcgccgatagatctcacgtttttgacgttttataagtcgtggagtaggtaccgtggagtctaatcagtgtcctaccaaaatcttcggcaattactcattgatctaaaatcaaagcgttcctttgcgtgcaacccgggtcccggacatgaattgtttctgctgatgtactgcatgcatgcttggatacatgcagaactaatctgcggcaacaacgtggccgagtagagtacgacacatcatttacctgccacctccctctcctagagttccttggtacctgtaaaacgcctctgtgtgccttagaaaagattatggagggagtattccatagctacatttattctttggatcatgcgatggcgatgacaggaggtgatgagcgtcatccagtgccttattttgcattcagcttcagtactcagaacataagttattggattaatgttaagtggtagatatatttaattctaactatgagatgtttgcactgaaggcattgcaaaattcttcaatgatgtcatgtggggccactcctactccagaagtaaacacgccaggggcgcacgcagataaccgccatagtgcgcgatcaccgtatgagaggagtggccccacatgacaaatgatctaggatttattacacataaaaaataatgacatcttggactttatataaggataactccatgtctagtctggaatctttgattttgtccttacttttatttaaaatgcagagagtcgttttccagttcttctctatattttaatgcaagtggtctttggtagtttattttttggttctagtgcctgcttgccattaaaattctttcttaggtcttctcccttttgttgctagtgcttccagatatcaagaatggaagtaattttagacaaagtgcaatcagattttacagattcttgatagttgatactaaaactgttaaacatttatcagctgtaggtccataaaactttgttctcgtgttatttggaaattctttgttgatgttacttattcaagaggaatacattacttattgcattttgttgcaatctttatttattattttggtattcaaaattttgagtgacggtcatgtttaggaagttgagtatgtctgttaggtacctgtttaccatgtctaccatggggaaacaatcatttgtgatttgaacaaatcctgttagtaggcagtgctttgcttgtttgacacattatttccccctattcagttgcttgcaattttggaggtttttttttggtggcatttttagtttttctgcttaatgcttataagagaaaggtgcttcatttcttaggtcttggctaagtttgaac

SEQ ID NO: 5091 - DNA, 2512 bp, Sorghum bicolor
  Intron number 1 from transcript Sb02g008100.1 (locus Sb02g 008100) derived from phytozome v7.0 (chr-ID chromosome_2; pos 10559835 to 10562346 reverse strand)
tgcttgaggtgaggaagatgaaattgcaagcctctcttatttgttctcaacgcttcttgttggtatggcaccagtgagtgagacagtgtcggatactctgattcagtactgaccactctttttttttcactgtctatcagtgggcaattaagcggggttgccagcaaaatgtttgtcccttcatggtatttatatttgattgtggttttcttaatggcacattgcctggttttaagaatggtgtgcagtagtcttactactatatgtccccaggcgcatagtcataccgttgacagctgcaagtgttgttactttgttggtatagataaagtattctaggacaacatatctaacacaggctataggcatcgtatttggtgtttatctagtaatgctttcatcaaaatcagtgactccatgcttttctattcaatttacactttattttggcatgtaaatcatgcagtgttaattgctccctccattgaaaaatgattatttttagtttaagtgtatgcaatcaaagttttaaaactgaccaccaatgtacatgagagtatattgatttatcccatgaaaatgttacaagtagatttgtgatgaaaaacactgtcaaattacaattttcaatgactttcctgaagacacaaacgcctagaaaaagcaatggctcaagccatgtatttgatagcatgtccttttccaaagaagaggcagaagttattcactacagatgtaatttcttttccaacattactactatggaatgtggataaggtagtacgagtatcacttgagaatctaggcacaagtgtcgcaacaacaacatatatgttctgggggctcagcatgagcttctctaagtagccattatcgtttccaatattcgtgtaacacctttctaaggttaatagcttctaagtagccgttgttgttgcattgctatttctctactatgtagaaccaccataatttcactcctaactcagtgtttactgctctgtcaattttatctggttgtctgtttaattgtgattagtcaggctaattcgtcctaaaactttgactaggcactgcaactcgattagagcaataagaattctagtcctatgattagttgatggacaaatatttggacattgtaagctgggctgcaggctggtcaccgggtcacttggatttctttatttcagccaaatagggtttctctcacatgcacaacttcacagcagagtggaggctgattccttcccatatccatgtcatagtcaccagctgcaaggcagctcgtgtgtctgggaaaaacagaactgcagcacttttggctgctactgcattgttctctgcctgccgtgacctcctccaagctgctgctgcctctctcctttgcatccgctggtcagcggatctcgcggcacacaggagcagccacctcaggcagatcaagaactgtccgggtgcagaagctgctgccgccgtcgggtcactgctccaacagtccagctccaagggattacgaagatgagcttatcatcatttttcacaagaatctgctgctctagtgcttttatactcctgcttcttgatttatatatatacttcatagtatatatgccatagaatatactggacaaccatatggttgactaggctcaactagtcgggctggtttggctgattgcaattagtctcccggtcagtcccctggcaactaggattgactagatgaccagataacattatctctgtattagatatatttggtagttggatgagttaaattggccactgttgctaatatgtactccctccgtcccaaaaagagtgtcgttttaggttttcgtgccacaagtttgactcgatttgtagaaaatatgtgcaatatttatatctctaaataaatttgttaaaaaactagacttaaagatctttccaatgatattaattatgtattataaatattaatattttttactatatatttaactaaagttatttctcgggaagcgaaaacgacacttattttgggacggagggagtaccaaatatctaattaaagtattctgaacttctattccaggaatagaatggactaatttcatacatgtctttctgataaattaacacttaatctgatacaatcgataaatatttaacacttaatctgatacaatcgataaatatttactttttgcaaaatgtgtagagtgagttttgtggacatgctacatgttagtatgacggcaatgcttctttcacaagtcatatgttctttttgtttcccaaactaattcgtatattgaagtagtgaatttgattagactgtagagtattttgaataacaataattaatatccagcgatagttttctaaatttacaactggtacttctcatgtcagaaagtttgcaaatacaagtacctttccttttctattaacttctttcatcaggctacttaaatgttgattgcacttaactttactaaacgatgctttgctttgaaatgtaggt

SEQ ID NO: 5092 - DNA, 6667 bp, Sorghum bicolor
  Intron number 1 from transcript Sb05g006850.1 (locus Sb05g 006850) derived from phytozome v7.0 (chr-ID chromosome_5; pos 11506063 to 11512729)
caaggaggtccaagctctgaaaccgtcacttctttgttggaattggaatttgcaatttgttggaatttgccaagctctgctactcaccatacagttatgaaattggaatttgccatttgttggaatttgccaagtccctaaacgttttgccaaaggaaaaataagtccatctccaaatgtttggcatttttgacttggcatttcctaaaatagtggaccaaactatttttgtccgggatcttttttttgtttggcgcgcttcgcgcgagatttttcctctgcgcgggaatttccgttgcccgtcgccgtcagtccacgaagtcgcaagtcaccgccgtttctgtgaattgcggcctcccggtctgccagtccacgaagtcgcagttcgccagagttctgtcgcgcgccagtagtccacgaagtcacaggtcacagagttcacgtcgcgcgcggcctccaagtctgtcgcgtgaaggaaggagaggaggcgacgatggatctctcctagcctcgcgtcgtgtgaaggaagaagaggacgcggtgatggatcgtatctcctaattgcgcgcggggaaagaaaaaaggcggcgtgaagaaaggaggcggcggcgcgggggaaagaagagttcgcgcggggaggaggagtcctcgcgggaaactaccgcaacgcgtggggaggtcgcgcacgacaaggagtctaggaaactcgggatatcaaaattgccaagccattgtgcctatgcaaaaatgccaagtttggtccatcaaatgccaagtttgccaaaatgcataagtcaaatgcataactgttggagaacaatttttaaggtttttggcaaatttctagaatgcatagtccaattgcataactgtttgagatgctctaacaatactgatgactccattatctcacaaacagaacatgaatctgattctgagaaagatttaatggctatctccattcaggcaatgaatggtactgaagggttgaagactctcaggcttcgaggatatattcagggcaaggaggttttcatgttggacgaccagaggtagggttggtgtgggattgatttcatgattatggaattaggagtgcaagccattgagttagtgggaaaaaaagatttgaattcttcctgtttgggacatggagaataaagataggagggtgctaggcagggcatcaggaatcctagctttttcttgacctggggtcaacaaagatgtagacctgctacctgccattgttactggcaacaaatactattggtatggcagaccactctccccaccactattcctcgcagttcctttgagttgtgagcctttcagctgtgttgtgagatcggtgctcgcctcactgttcttgttgctgctacaattacaaggtacgtagccgtaattatttccttagaaccgatgttttagtgctagcagttgatcatacaagcacattggcacctggttcttatattgccgtgcgtgtgtcatgttgctatgccctgcgccaggatggtcgcagcgcccggcgctgggggaggccgctgcggccagcagcgcaccggcatgagaaaccgccgcgccactgcgtcttgcagcacctggccctggcatgctgcccttgggccctgtgtcagaagtcggggatgagagaaaagataggacaaatatgttttctcactgacatgccaagtctcgcataatttagacttcttcaatctgctggagcacgtatcctctgtagtctacaattcagttttttaaatccttactagattttaaaggaaaagagaaaggatatctggtggagatgctctaagcgtaacttagtattttttatataagaaaacttctatcacagacactttaatggtagatgtgcttcgatctcacatcttctggcattattattgtgccctacatcaacgataaccggtacatttcaagcaatgactagctccttggtctcttttgctccaatgtgtgcaagcttccatgcctcaactatgatccatacatctctttatggctttcatttgcaattttgagcatgtacaaacttatgaagctcatcttctctgtacggagcagtgaccgacagtgattgtttcgtattagctttgttctaaatcaaacatttatatttttgaccattgattttgaaaattttatgtaagttgttcatgatataagctttatgtttttagattctctatgggaagtactttctcataaactttgtgaaattataagaattctttaaaatagattatggtcaaagataataatgtttgacttaggacaaagctattgtgacatataaataaaaatggagtgagtacaaggaaaagaaaacattggcaagatgaagagaaaaaaaaacaccaactatgattgtgtcaatctaggcggttcaacataaattgccctagcttatcaacatgggccagctagatttttttaaaaaaagaaaaactaaattttgttagaagtcatttttttaataaaggatagttcatacccggcttcatctacgtagaatcagaccaattattacaaagtttagcccataggctagcatatgagccataaagtgatcttaaaacgaagtaaagttttttgactaaacgaaaccaatagacctatttgacaaccaccccttggaagcaaagaagtgcaaagccgatgtctccagatgttggcttgcaaacaacagctgatcctaatgatcatcacgccgctgcagtcttgcccattggcggagccagtgggttcccctgaaaagaacctgcaaaaaagaaaaaccacctcgtttcttgttatccaaactgcccaacacaaagctgatgccgcagtcaataacaacgaattatgtttgttaccacccatcttagaccacctgttaaacaagtcatctatactctgaggaggtgatattccaaacattaaatgtacagcgcgccacaagaattcggcatataaacaatcaaaaaagagatgttgaatactttctggtgagtgacataaactacacctcgtatcgccattccaatttcgtcgagcaaggttgtctttagttaaagtcacacctttttttagataccacaaaaaaatttattcttgtaggaattttaatttgccatatttcctgtgacactctaaccccattgttaatcaacgcatcatacatagatttgacagaaaaaattcctgatgattgtaaagaccacacaaacacatctgtaccctcctgtaagcttacatcatgtaaagaggcaacaattatgtgctaatcccttaggtttctgcccactagattccgacgaaaagaaatatttagtgggattgagctaagtacttttgctacagaatcttgtttccttctcactatattgaacaacccagggaatgtgtccttaagtggttgattgcctagccaagtgtcaacccaaaatcggatctgtgttccgtctttcaccttgaaagaaccaagactgaaaaaagtgtctttaacattcatcagaacttttccaaaaagggagtctgttgtttttttgacgcagctccctacagtcttgtctttgacatatttattcctcaagagttcctaccacataccatcttcatttaacaatttaaaaagccatttactcaataaacatttattttgtagatctagattttgtattcctaagccaccttgtacttttggctggcacaaaatttcccatttaactaatctatatttttatttgtgttggtcattctaccaataaaatcttgatctgtaacattcaattttttctagcacccctcttggggtttcaaaaaaagatatcataaacatcggtagactagaaagcaccgagtttattaaaactaaacggcctcctgtcgagagcaatttttctttccaaccactgagtctattttcaattctattctcaattatttgtcaatctttattgcttaattttctagtatgcatcggtgtgcctaaataacgaaaggggtatgtcccaatatcacatccaaatagttgcgaatagaacactttttgctcttttgctttaccaaaacaaaagatttcacttttatgaaagtttattttaagtcctgatagttgctcgaaggtagtaagaaccaatttcatatttactgccttctcaacatcatggctcataaaaatcactgtgtcatctgcgtactggaggatagacaaaccatcttgaataagatgagggatgaccccttctactagacctgcttcctttgctctagcaatcaaaatggccaacatatccaccactatattaaatagtatcggggacattggatctccttgtcgtaaacctttttttgtttggaagtaggatcctagatgatcgttaaccttgatattaacattcccgccttgcgtgaactgctcaacctaggtacgaaacttttgtgagaaccctttcatccttagagtttgttgtaggaagctccattttaccttatcatatgccttttcaaaatctattttaaaaatgatctcatcctgtttttttgaatgtaactcatgtaacgtttcatggagaaataccgctccctccatgatatttcttcctggaagaaaggctgtttgagttggtctaatgatcttttgggcaatagtattcagtctattggttgctacttttgtgaagattttgaaagagacattcaacaaacagattggtcagtattgttgaatcactttcgcatccttcgtttttggtacaaggattattgttccaaagtttaaactttgtaaatgcaaatttccctgatgaaattccttgaatagagccatttggtcaacttttactagattccagaaaacctgataaaactcaggaggaaagccatccaggcccggtgccttattatgttccatttggaaaatcgcagcccttacttcagattcagaaaaatcatctatcaagtactcattttccagtacagatacctgaggaatatcatcgatctgttgctcattgaggaatataggagagctttccgatgggccaaacaaattcttataatagttagtaatatgctttttgagttgagcatcaccactaattgtattgtttccatcctccaactggaaaatatgagtttttcggtgtctaccatttgccaacagatgatagtatttagtatttgcatccccttctaacagatgtttcaccttagccctttggtaccatttaagttcctcctctcgaagtaattcagctagcctttcatttaaaacatgttttaaatttaattccatttcatcaagcaaagaactttctacctttttatctaattcttcaagtttatttaataacatttgtttttcttttctatatgcaccacttatatttttagcccatcctctgagatattggtgtaaccttctgatcttagcttgccacctctctaaaggagtgccttcaaccagcacactttcccacacatcccgtaccaagtcacaaaatccctccctcaacaaccaacccaattcaaatttaaattgagattggtaagatgaggatgcattatttgtgcttaataacaacggagtgtggtcagatatctctctcgatagagcatgtacagtggtatgcgggtatttggattcaaactctgtacaaaccaaaattctatctaacttctcaaaagtctggttttgtaagtggttggcccaagtaaaatttctacctaacatttctatttctctgagattcaaagaatcaattaccgcattaaaaataaaaggccatctatcattgtaactaacattatttttctcgtcaggtctacgaataatgttaaaattaccacctataacaataggtaaagtgtcttttgaacatattcgtactacttcagataagaatttagatttcagatccacttgagccggcccataaactgaaatcaggttaaacttaaaatcgtcttccttatgtcgaaccttgaaccgaatagaaaagtcaccttcctcaatttcaccaatatcaaaacaaaccaagtttattcctagaagcatgccacgaccatttggccccatgcaatgccacaaaaaatctctaccagaagtcatttgagtttaacacttaaagcaatcaaaatagcttatcccttgtgttccctctttgtctattttatgaagtaatatccatataaataatctatactttcataaacatataatttcgtgaactatcatttactctatttttttaatttataactatatataagttcttccccttctgcgggtctacatgctgcttcatgtgtgtcccttaacatatataacatgcatctggttggaatagcgtttgatttgtatatatattatataataggtgacagacgatacttcgactagttcgtcagatggcgcaaccacaaagtcgccaggagcagtctgctactccaatggataggcgtctcctagcagcagccacaactggagacacaatagcaatgcagcacctggcttcacatgatccagctgtgctgcttggaacaactccacagcggaacacgtgtctccacatctcctgcatctatggccatgagggattctgcaaggatgtcctgacgctcaaccagtgcctcccacttctcgccgccacca

SEQ ID NO: 5093 - DNA, 523 bp, Sorghum bicolor
  Intron number 17 from transcript Sb08g016820.1 (locus Sb08 g016820) derived from phytozome v7.0 (chr-ID chromosome_8; pos 44973596 to 44974118)
acgtaagacattaatttttgcaatgatttgtaatttcaatttgctttcatttttctctcctcttccttatcttcatctacaaagaaaaaccaagtttgtagtgtacggcacacattggcggactcaagggggggggctggggtggctgcagcccccctcttggactcaaaattttttaacagattttctctttagcaaaagattctatgtatttggtatttttctatatttattctatgaatctttgcttttgagcactttgaatcaatattaaattattaattttaactatatctattagtgtattggattgaacgagaaaaattttttttaactatgttatttagcccccctcttggtccgtttctaagtccgccactgacggcacacactgtgccattttcttggaaataatctgttcctttttttttaaatagtctttatgtaatatttaatcaacattttcctttctgtacgtgcttttgcaggttgtacaagatttgctaaactgcctagacagccc

SEQ ID NO: 5094 - DNA, 2020 bp, Sorghum bicolor
  Intron number 2 from transcript Sb03g000870.1 (locus Sb03g 000870) derived from phytozome v7.0 (chr-ID chromosome_3; pos 696985 to 699004)
aggagtcttcctccgagctccgtgacggcaaagaggtgcgtgctctgcaacttgcattggcgtccatcgagacgcaagagcttacgtacttgttaatgtgctctgcaactattttttattgttatcttagcagtttgccattgaaagaaatctcaacgctaattatcaaggttaacaaattaccacattatgaagcagagagaataaaaaagaacaagcacctctctatgtgttgataaattacccaccaatatcattgcacaaaaactcacccaggaaatagcattgtctttgtatcactcatccattaattagtttgtacatgtaatatatatctaaactttttttttcaaaatacttgcaaaatctcttagatttagttgagggattttaagaatacattacatgtataaaactagtcatcaaagatacatatcaaagatcacgcaaagttaaacatgactaagtactttttttactggaggtagcatgtggtccaccctcatttttcacaatgtttactatcattctagttaacctcacacaaaataaggaggcacttattttgtgaccgtatctgtaaatcaattttacgaggcgaacaatcatgaccgccttcgtaaatgaaaacgatcgccttcgttaatcgtctgacattttccaagccggttggattttgtgaccatctcagttaatattatggcaccaccttgctaattcatttttgtagtagtggagaggtactattctcttactaggtactccctccattctgaataaattaacttagttgtgctaagtaaaacttttgtaagtttgacaaattttatagtaaaaaatattaacatccataaaagcaagtaatgacactagaaattttgttttcgtggcgtatctgttgatactaatttgtatcataacattcgttgttattttctacaaaatcgatcaaaattacaaaactttgacttagaaaaactttggaagttgatttatttagggacgaaggaatcatgtccggagtctccattagtagatacaaaaggttaattagggtgatgtatttgggtgttgcggatacaccgacaaaatgtagagacctaaggctatatttatttgtattttacatcgaagaccatatagacaaccattttttccttcaaactacataaataactagaaataccccgtgttttgttgcgataattgcgaagaatttggaatgatttttgcaattaagaggttagaagttaataagatgacatgacttttagtgtaagatgatatagataattagtgagaatgatatggatgttttgcataatgaaatagatttgcaacggagattagctttataagagattagatatatattgctaaataatggagttgctatattcgatatgcctggattgttatgaattttcaaacaacaatcttacacaatcaatcacaagggacaatttcaccttttttttttttctaaatatagctaaacaatagcgaaatgacatgttgcctgaacaacaacaacaaaattacgtacctgagagagtggctaaataagtttatgtgcccaacaggtaagtagcgtacaaagtggtggtactagcacggctcaaacgagccaattcatccagtttgtataaaatcatcagcatcatcgcaggaaagtggccacttgaatattcgagtgttgtcaatcttttttttttctcttctgaaatctcattcaataatatttttttttcataataaaatcagcaaacagtacttttaatcgtggattacactttttggcatgcgaaaccttgcgacacgcatgcatgccatcattgccctgtgtgccctgaattggtcaatcccaggaacgtgcgttgacaaggaaatctactcgatcaaaccaatgccaagcttgacagcatgcttccaggccagggcgtggtttaatttgagttgccaatgccacctgccttgtcttgtaggaaaagatcgcagcgccgccactgtcctccaagca

SEQ ID NO: 5095 - DNA, 6484 bp, Sorghum bicolor
  Intron number 8 from transcript Sb01g048850.1 (locus Sb01g 048850) derived from phytozome v7.0 (chr-ID chromosome_1; pos 71826224 to 71832707)
tggccgtggttctaaagtactaggaataccaacaggtatgctggagtagaaacataaaggttacatatagcagctgtttagaatctcattttttgtttcattgaatgggccatttcagttgcttccataactagcttgtttacttttgaatcagttcagcattttgcctaactaggaaagttgctagacaacaagacaccagtaagaaatgtgctgacactatgatgaccaacggtttcatgctggtttgcacgccccaatctgtaatgcacattatttggtcgtacttcttgaatatatagatagctgcccctttttatgttatgctctgtacgatcgataatgtaggtcatttgagttttgtgctgagtcaaacttctgactttgactatgtttgtagaaaaatcaccaccaacaagctagtttaatcaaatccaccatgaaatatgcacatggtgcatttattaggtatttagatgttaatatggttttaacaaacgtggtcaagatatctacaacaccaaatgagtttaatcaaatccatcatgaaatgtatgcatagcgcatttaaatatgttttttaacaaacttggttaaaactagagaagattaacttaggacaaaacaaaaaaaagacttacatgttggaacgaagggagcgttcaccaaaatgatacatatttgctgctctcgtgtaccaggttggacgatgtgacatcgttctgtttcctaatggttcttgctttgaactttattcttcaagaattgtactcttatatgttatgctgtctgtttcctttttttttttttaaaggaatggcaggagctctgcctctctattaagttagaaaagaggaagttttatgtacaggttgagtaaacagctgcttaatagcagagcactcagagaagaagaaacaaagtctagaaaaaagctagcctgctctctgaatagccctttctctttgcgctatgtcctctttaatctttgaagcaacctgcagcgccgcctcatatgcattgttgaaaattctacgatttctctccttccaaagattccagcaagtatagatgaccaagccgttgaagcgccttctttcttcccttgggattttcgttacagcctcctcccaccatgacttgatgctagaagggtcttggtggaattgggttaactgggtgtcgaagtgctcccagtttaggatatgattccacaccgccttggcgtacgggcatagaagggaaaggtgtaagcatgtttctaaggggccgttgcacagaacgcagcgatcctgatgaggccagcctcttctctgaaggttatccgccgttagtatgttgccttgcactagaatccaagtgtatactttgcacttattttctgctcgggctttccaaatgaggtcacttttgaaagtggcataagaccctctgaattgaatcctgtacgcagagcgggtggagtagcatccatctgcggtccatctccaagtgatggagtcctttacgcccggctgcaggtgtatggcttggattcttatccatagtgaaacaaattcttccaagtgttccgtggtgttgatacggttacttaggaagtgtatccatctgtcattgtccagctcctgttgcactgatctgttttttcttgcagccagctgaaacaagtgtggggcaaggtttttgggtgcctcaccatcaatccagttatcatgccagaagcgggccttggccccgtccccaattgttatcgaggttgaggctttaaagaggaggcggtcttcttcgttacaggggatttctgagccaacccatggtttggattcattggtccaatcctgccaaagccaccgcagacggagagccctcccaaatttctgaaggtcaaggattcctaggccacctaagtcttttggcctagccactgttggccaattgactaggcagtgcccgccatttgcattttcctcccctttccaaagaaaagatctccttattttatccattttcttcttggcccatgcggccagcgggaaaactgtgaggtgattggttggcatggatgataggacggaggaaaccaacgttagccggcccgctctgttaagccactttcccttccaaccggggagtcttttgccaatacgctcgatgagcggttggacatggactttttggagcttcctagtgtggagttgcaagcctaggtaagggcaggggaaggagcctctgaccccagggaagcaggagagtacttgctccaagtcaacctcattgcacctaatcgggtgcactgagcttttctgcaggtttatgtgtaatcctgaggatgaaccgaagatttggagaatcactttgagtgcttgaatatcatctctggacggattggtgaaaatggctgcgtcgtccgcatacatggagattctccatctcgcagccgctggtggaagcggggagaggactccatgctcggtggcgaggtcaagcagccgttgcaaggggtccatggcgaggatgaagagcatgggggatagcgggtcaccttggcgaacccctctgccatggcagaaggttgggccacgatgtccattgagcaaggctgctgatttggctgtgctaaaaaggatagacatccattcccgccacctttgtccaaagcccaatgcctgcatgacctccaagaggtagctccaattcaccgtgtcaaaggccttgtgtatgtctagtttgagaaagagggccggcattttgagcttgtgcattttcctgacagtgttttgcacatataggaaattatcatgaatgctcctttttctgatgaacgcactttggcaattagagaccatggagtccagcttgtttgccaatctattggctaggagtttggagaagatcttagcaatgctgtggatgaggctaatgggtctgtagtctgtgaccttgcgtgcatcacttttcttgggcaggaggacaatgtttgtcgagtttagtaattggaagctttgggagttcattgcatataggctgtttaaggcggccatgatgtcgaattttatgatctcccaggaggctttgaagaatgcaccagtgaagccatcaggtcctggcgccttatcaggtggcatagagtctataatgctcttgacctcctccattgtgaagggaagctccaggtccgagaggtctctcggcgtgtatccaagggagtgccaatccaggcttgactgtcttggcatggacaaaccaatatggctagagaagtagtcttggatcaccttttccttgtcttcatgagcgaagaccattccttcatccgtgtgcagacaatgaatatagtttttcctgcgccgagagcttgcgcgtatgtggaagtattttgtgtttgcgtccccacaacggatgtaggtgagtctcgatttttgtctgattcttgctttctctatggcagccagtccgatacttcgcgtttttagttgacgccgaagttggagttcctgatccgagagtgctctgaactcctgagcagcctcaagctgtaacaagatttctttaactatggctagctgcaatttggtgtcccccactttatccttgcgccatcgattgatagcttttgctgttctagacaatttgatgtgcaagcgcttcagaggcagtgctgaaaagacctccttgttccaggcttcctggactgtttcttggaagccctgcattgctgtccagaaattttcaaatttgaaggacggggcgtgtcgataatcaagctcgccttggagaagtagtggggtgtgatctgacattagggaaggaagggagtggaggtaacaggtgggaaacagcagctcccaatctggggtacagaagattcggtcgattcgggtcatggtgggagcatcctgctcgttactccaggtgaaaacgccgaccatttaatctaatttctttgaggccaaggacatctaacgttgtcttgaaggagcccatcagctgacgattaagatttgagttatttttatcttccgattggtaaattagattgaaatcactgaggatgagccatctgtcgtgatctgggcgtggaatgttttggagatcctgcaaaaactgcagtttctgggcatctccttgggggccatacaccactgtaatttgccattgaaagccgtcagctctcatggtgattgttgccgtaacagcatgtgtggatagcaggatatttgagaggtcaaagaagtcctcgttcactgcaagcaagatgccacctctagtctgttgagccggcagaactgtaaaggagttggcgaatttagcaccaatcgtgcgggtcacagtatgctggtccacaagctgcagttttgtttcttggaggcagactatggtggcgcgagtgtctctcacaagttcattcacagcatcctttctagcatcgtcgtttaaccctcgcacattccaattcagaagctgacaattaatttgtgccataaataaacgactaaaggcccatattgtaaagatgatagcaaaagagattgagctgcagcaaaacccatacaaagttggactcctagccagcatgactgaatgccgaaggctgccagcaggaggtgttgacacgaggaagataagcttcccgacgacggatgactcacatctagacgctccaggtcatggggaggttgcggtggtgactttgggcccctggccttcaccccgacggaccttacaaacgatgagcagggagacaaacgaacactgcagcttttacgggcagacaggggcaacatgcagcataacataattgtagggagaggagcccttggagaccttaagctgattaggcttgggacgccgtgactatgccgtcgtcgccgtcgagaccgcatagcgccgtcatcgctttgatggcctcattggtcaggggaccctggaagaggcccaggtactgcaggaagcgatcatctggggacagcgccttgtcttccgggacacccagtttcttcatcaggacctgtcgagccttggcatgggcatctcccctgggccagttcttggctgcaatgcgtatgctcttgcgagtcgctggtactgtcctccttgggaagcgccttgcttgggcagctgtgcgtgggggcgcttgcagcagcgccggagggagagggcgtgagacagcacggacaaaggtcagtgttgcagggtccatgctgctcccctcttccaggcgcgatctgtccagctcggttggtggagaagactgcgtgtcacgcggctggcgcgacgcagtctggttgggccggcgtctgacgtaaacgacgtcgggcctgaaccgccgtgcaggggagcatccgacgacagcaggcctttgaggcaaagccggctgcacgagaggaggcggatgcgccggctgcgtcagggtcccgtcaggagtcagcaacacgtccctgcgcatcggagaattgtcaggtgatggtggaatcgcacgtggcggagactctgtcatggttggcgggctcggtgagccatcgttgttcctgttcatgcttccaggagagcaccttgggttgcaggtctggcggcggttctgcggcgatggctctctaggctctaggcgtgccggggagcggcgctgtccttccttgcgtcgacggttgctgcgttcacggctgcggccgcgcgtcgtcggggaagcagcgtagtcgttcgtgtcctgaggtcggtgtagatgtgctgcggcgaccccattcgccacctccagtaggtcgtgcctccggtggcccccatgggaccggtcgtcatgacgccgtccatgtcttgattcggagcgctcccgctctcttgcaggggcgcgggataggctgcgaaggagtcgggacccccagttacggctgctgtcgcggcgtcgtccacggtggtcgtcgtcgtcctcatcatccctatggcgcctaggcctggcgtcgggtggtggtggtgaggcctgccgctcccgagggcgtcgttcgccgtcgacgaccccgtagtgccacgtgagctcccgagtcgaggttgtgccgtggccgtccggggactcgatgaggtcgaggtggaccaggactcggaaggtgagtccacgccgcccccttggtggagacggtccgtcatgtgccatcactgcatcgccagttaacgtcagccatgttacctttggaatgtcggacggattgtaggtccatgcccaaagacacagagctctggtgtcatctgggcacagggctctgttgtcgcgtcacagcgagcgcgggtcgacgtagtcgaggtcacatgatcttgccaccgcacgcttggcgatgctgctgtctgtttcctaacctaggtcattttgcgtagtcttctactattctgtaggagttcatatttgtttatttgatactactggactcaagtttttatatggagcactgatgtttttgtttttatactgtagccaatttacccgcagagaattttgctg

SEQ ID NO: 5096 - DNA, 4937 bp, Sorghum bicolor
  Intron number 6 from transcript Sb03g025250.1 (locus Sb03g 025250) derived from phytozome v7.0 (chr-ID chromosome_3; pos 50681814 to 50686750)
tgatagtttttacacaaaaccaaaataactggtacttatcctttgcattcatccttggtacttttcttttttgacatcgaattacaaacaagcattctgtgatgctacctttatcttttctaacataggggctctcagtaaacttgactaacatttatcctttttcaagagtacatactaaagttctaaggaatagaagtgaaacaaggacagatgttggtcgagagcagtttgaagtgggcataaaggattttgtttcctttttctcattcctactaggtagcgtgcccgtgcgttgctacgggatagctaatatttttatatttaaaatatatagatcgcatgataaggtaacaatatcgtaaaaattaaatactaacattaaaaagtgatatttaatctaaaaacaaagtttgtgaaatccatacagtcacgaagggcgcaacggctactgtcgcccggaaaccagaggcggatgcatgtggggctgagcaggtcttacggcccaactgacagctcctcgacaccaaaaggcgcacctcctcctgttcccatccgcgtcggtgttgcagcgtccgacggactgacttccaactctgtcacaagtctacagctaatatgaaaaaaatataaagtattaggttaaatttgaatggagggcacataaattaatattttagatgcgaattgtgaaaatatctaaaatatctcaaccttcttaaagtactctacaaggatgctcatcaaacatcaacataaaggtcaccttaaaacatatagtgaaatataaaattagggtgctaaacaaagcaaggccagcaagaatacctgttgcaaactataatttgttgcagtcccaatcctcaatccatcggcaaacagcacaacctttagttgtccatttagtacaatcaggactgtaagcattagctacagacatcaaagcaaatatttacataaggtcatgttgcaactgccagctacacaacaaacacaaactcaagcataaatgtaccttgcaattgtagccgtttttctttcttaatgccttggttagaagactttaatgtcccacaaggaatatcatgcagctgcaggtaagtttaagtgatcatgtatcagttggtcttggtgtttgattgaaaaaaagcttcaccaagatcaaagggcttatcaaattaatgagtggctcccccatgctcttttgtctaatacttatcttccaattctttgtccttaagccagtatgcttctcccactcattcaaactcatcatcctttccttgcaagccttacattgatatagtaccctgccagcaataactcaacccaaatcagcttacaaatagtagcatgtagaatcattgtaacacgtagactgctagtatttctcggatgcacaggaaaattgtgcatcaatatattaaagttggttgggtgtttctggtctacacagtcaacattacaatgccctccacccacaaaataatccttaagaatgagtattgcaataacaaaatcacataacacaaaatgtgagcctactctcacaacacattgaataatgttctattttttgtaaatataattgagcaaaaataagacagtaaaataatgtagggtaatggcaaatcctatgatagtaaaaataagacagctgtcttttccaaatcctatgacacaatgccaagttaacaaaaggtatttattaaatagttgcatataagcaataaggacatcaaaatgtcatcatacaatagtaaggaaataacctccacgttgttgcatgtcaggtcacattcaatgtgaacccaaatctggcactcatcataacaaacccgagataaagtgtctttcaagccaatacccagaatattcaaggatatacaaccaaagcatgtattcttctaagctcttacccagtttccaccatctgtgtggtgctaaattttcttgcatatgacatagtattatttcaactgcaataactacaaagtaatgcttatagacatgagtcatcgaaaggaagaaaggatgtgtaaagaataccagagatgaagtatctcacaactcaaaaggttagccacaaaccttttcgtagtgcctacagtctaccgagcacctgctgcaccccttgcttcctttttttgaaaccttggttggtagacgattatcacaactatcacaagatagtgccaattttccaacaacctgcaattcagcgaattaaattgagacccgctcaaaagatgtatcaagggaagtagctccacactgaacttgtacaatttcaccatatcactcttgctcgttatttgaatccgcctcttcctaaaagctattaggatcagactgcttatttacagacttccgcagtgagcgcaccccatcgattttgagataaaaaatcacgttcagtaagaaaagctacttcaattgctgcacagaatttgcttagtctgagcttatacagaggttgcctttgaaagctgacagaacaaaggagcattacatagagaccaaattagaaacacaatgttttccagaatttgacaattgagcatttgtctacatagcctaagcaaaagaaccaaacggccccccaaatcaatatcactgctccgcactaactgcacatgaaactgagcattcgtatgcattcaactccaccatgtgatcaatttttttaacaaacggaattgcatttgagactcatcgatcacccaataccattacaagatcagcaccaatttagcagctaaagcaaacatcaaagcatcaaatacacagaatgaataaaaataatttaaaccagagtgcaggagtgcttacaatctagttcctgattttggtgagtcgctgggcaagtgcatggatgcagtacgcgacatccgcccgtggccacgcaatggatgtcgctgccacaatctctacaacactggcaccaacaaaccatcagacaacaaactcgaactgagaaatactggagagaccacaacactcgacggccggctagacaaatgctcaatcttgaattttgaaacgtataagaagggagagggagccaggagatgaacacatatgccaatgtggcagcgcatcaatgggagggcggccaaggcatcgatctgactgacgacgacatcaatccgatcaccacaatgccacgagttcgacatcaatccattgtgtctggctccaccccatccttctccattttctcccacaccctgatgcagccatccatataccccctccgcaccattgtctttacagctcagtgtacacaaagacatcaggccaacacacctcattctgcatccttccaatcatttttagaagcctatcagtcatccctgcatgtgctagtgcacgaaccacgatgccaaacatcacttggatatactgcacgccaccctccgacatttcatcgaacagcttgagcacgtcctcgacgtggcccgcagcagccagcgcgccaaggacgcggttgcacgtgtggacctgcggctggacgtcgaactcgtggtggaagcggtggagcgcgtggagagcgcggaggggcgacgtgcggcggtgtggacgcagcgggcacgtgcgttgagtgcggccaccggcgagtgcaggtagcgggcgcgtgtggtgcgagcaggcgcatgcggaggcgttgggagggaggaggaggcgcgaacgggcgcgggccgtggcggcgggcagcggcggcaggcgagggtcgcggcggcacaaccacctgggagcgggcgcatgcggaggcgttaggcgaggaggaggcgcgagcgggcgtgcgcgttgggcgcggccacctgcgagcgtgggcagcggccgcgtgcggcggcgttgagcgagaagaggaggcgcacgcggccacctaggagcgggcgcgtggggcggagcgtgcacgccaccctccgacatttcatcgaacagcttgagcacgtcctcgacgtggcccgcagcagccagcgcgccaaggacgtggttgcacgcgtggacctgcggctggacgtcgaactcgtggtggaagcggtggagcgcgtggagagcgcggaggggcgacgtgcggcggtgtggacgcagcgggcacgtgcgttgagcgcggccaccggcgagggcaggtagcgggcgcgtgtggtgcgagcaggcgcatgcggaggcgttgggagggaggaggaggcgcgaacgggcgcgggccgtggcggcgggcagcggcggcaggcgagggtcgcggcggcacaaccacctgggagcgggcgcatgcggaggcgttaggcgaggaggaggcgcaagcgggcgcgtgcgttgggcgcggccacctgcgagcgtgggcagcggccgcgtgcggcggcgttgggcgagagaggaggcgcgcgcggccacctaggagcgggcgcgtggggcggagcgagcaggtaggggatggcgagtgcatgtggcggcgtgagcaaggaggggatcgcaaggatcgcgggacgaaatttctgtttcctaatacgagtcttggtcgcacggtgcgagtaggcaggacgcaccaaaagttgtccacactttagtctttttagttgtaggagatttgagtagaaatgtttcagttataaccctgatttcttgtgaaatgatggcatacattgtttttcagtttttgcgtacatgggaacaagtatcactagagtctaatatggtagcaatgtgttccatacgttatttactgcgtgttgcttgtcagacatggtcatgcggagttccattaatactactacattcctgttggtctgttatatcatttaaaattggatgacatcgcttgatttctctttagctctactaaaatgtctccacctagctcatatgtctactgaaataaaagatttctgtttcctgtagggtgccaactagaagtatcggccttctttcttaca

SEQ ID NO: 5097 - DNA, 22456 bp, Sorghum bicolor
  Intron number 2 from transcript Sb05g009960.1 (locus Sb05g 009960) derived from phytozome v7.0 (chr-ID chromosome_5; pos 20018927 to 20041382 reverse strand)
ctgctcagggctctcgggtcttgtctacgagattggtaacttttttatacaaaccttttttttcttagggtatcctcaatgtgggtttcctaacccacttatcaacacatctatatttttcaaactatacagaagagttttatctcgataaaactctctttactcccataaaaacttttatcatctcttttaattaatgtgatgtcacatcaacaaatttaatgttgatgaaactctaatgaaatctcattgaaactagccttagatcagatcactttttattaaataagttaatatcagtagaaaacctaatgacatctctaaagctctggaagtatatatatttactagtacgttgatgagctataggcagtagtagcacatggttaaacctagcgacgtgcagtactgccaaacgggtcaagaagaaacagtttttttttcctaaggtcctgttctccacttaaaaatttttcatccatgccatcgaatttttgaacacatgcatggaacattaaatgtagataaaaaaataaactaattacacagtttagttgagaatcgcgagacgaatcttttaagcctagttactccatgattagccttaagtgctacagtaacccacatatgctaatgacagattaattatgcttaataaatttgtcttgcagttttctgacgagctatgtaatttgtttttttattagtttctaaaaatctctcccgacatccttccgacacatccgatgtgacacccaaaaaaatttcgttcccaatctaaacaggccctaaaggcagtttttcagctcatcaggcatgcacagttatttgggtgacgctgaaaatactagtttttctcactttctctttgctagcatcttccatgactatctatttttaccaaatatttatgataatatattcgactcaactgataagctgctttctgaaccaaagccaagaaaaaccgattcactactcaagctgagctatatcaaatataagtccaaagacaaatgtggaatgtcaaataaaaaacggcgggattaaccataagtatagatgaccacaaggcctatagccattagcatggcccatgactcgatgttttggctcaacttaggcacgccacgaaacgattaccattgggcctgtgctaacaccataaggccgtgcttgggccatgcctctacgcagcacgccgtatatataatttctaaaagaaaatcaaaccctagctatcttatcttctcctagtctcctatatattctcgtgcaaccgccactttccttttctcaaggatcccactcctacaaactatggcgggcgcataggcaaggccgtgaggacggttgggtaaggctagtgcagttgccatcgagcaacggccgggaggcatgcgcttgtggaggctagtgtgcggcagcataacagtgcttgggccttctaggcacaatggctatcactactggaattctgttctttgccgactgccaaaagcagtcggcaaaggccataaaacaggtggcaaaagctttgccgactgctttacacgtggcagtcggcaaagaacacgtggcaaagaattcgtcggcaaagaaacctttgccaccttccaagagaaaagcagtcggcaaaggaaacgaacgccgtcgtgagatgacagagctctttgccgactgccttttttggcaggtggcaaagggctctttgcccactgccttttttggcaggtggcaaagggctctttgccgactgagccctttgccacctgcctttttggcaggtagcaaagggctctttgccgactgtctttattggcaggtaaaatagctttttctatacaatttaaaatatatttaatatacttgaataagaacatgtgtacaacactccaacatgacctaatacacacgattatatatattattagtagtccaacatgaatccactaaatacaaatatatcctagtgtcgcatcaacataacaacaaagtacacaaggcgcgtagacttttggcacccatctacccaaatcttctccaaatatttggcatcaacataacaaactctttgcacaaccacaaaactgagagtactagctaaacatttactaaaaggagtaacattggacaaagcacaggcaacagccttgcctttgtcgctgcagccccatatctcccttagctcgagttgcagatttgacaatgcaaccaagacagccacctagcactggatattcgtaattctattactcatctactgcctttcactgaaatttcacagataaaagaaaacgaaaatacagtactcctgcctacaacggtatgataaacattggttgatgagggtttaatgtacttgaaagaataagaatcatgaggtgtgggattctaaaataatagagataaacaataaaagtaatagaagtcactgaattacattttgctcaaatccaattttgtcagcaactggagagttggtgcaccaagaggaccctgcttatgttaaggaacaaattttaatgcacatatcaggactcgagaattgaactttctacttgccattaaagtggaatttgaacgcttctgtgaggtgatattaaatatacttagtagagtacagaaagtaggaagactacttctaaagcaattagacatgaaaaccattagtgcaaatcatgcagattaattctatccattgacatactatattaaaatcacaccatgtcaaatgcagaaaagacaacaaacaagcttctaatgtggcaacagacattcctcttttgccttaattttatcactgcatttgaagggaaatgtaaatgcagaaaagcagcaagggcatcaacgaatgtgaccaagaatgacaacggattctagtgattccttgcagccttgcatgttgaggacaaaagatttttcttttcgaacaaaaattgatcatgttctatcagagtgaattcatgtctgatttatcactgaagactgaacctaagaaacaataaatgaaacccccttaaataagaagtcatataaggccacacctctagatgaaggtgtggaaaaatcaaagaaccaatctgatatgcagaagcagcagtgccaaaaacaattcccttcggaaacattatcagattttactcctttacgctcagcaaaacaataaacagcacttgttgggatccttgtggtatgatgcacatcaggtcggccactctgattccgttgccctcgttgacagattccactgccccataaatcaaagtacaagtttcgtatcagacctatagatcaaatcgagagaaaacaagagaacgggatgggagggaacctcgggcgggtgaagttggttcttgcggatctccatagcaaaggttctttaagaacacggtgttgcgcctccgatggtgccggattcccaacagggatcgtcatagctcattaccaggcgtacctacgccacaaggaggatccacgatctgttggccccacccgctcctccgcgtggtgcgtggcctaagccgcggcagccgccgcctctccctctgcagcaatcgctaggtctgagagggagatggaaggaaaagaaaagggaaagagcgtgttgggtgatttctttttttttctttttttgatgcagcgcgttggccgccgccgcccgcttctgctcctgctccgcgtcggccgcggacccctccatcgctcgccgggctgggggttgggtgcggggcttttgctgcacgggggagagaagcgtggcgcacgggagaggggcggggcgcgggggagaggagcgtggcgcaggggagaggggcggggcgcggcgcaggggagctgggcggcggcgcggccggcaggggagagggcggcgctcagggcagggtatggccggcggcggcgctggggcaggagagggaggcgctgcgggtaggagggaggcgcagtgaagtagaaatgaggaggaatgggccggcccaattttttttagggtaaaggcctttgccgactgcttccaggtaaaggcagtcggcaaaggcactagaaaatattttaatataacctctttgccgactgccctagaccaaagcagtcggcaaagattttttatgtttttcccctcttttttttgcagccacaaattcctcttaattttttgaaatttttaacataggttccacatgtgataacattaaacctcaaaaagttttgtgattttttgacttttttttgctatatttcattaattaatttctttaaattgatttttcagcttcataattctactttgaactataggtgcatgaaatagtaaaacttagccatttgaaaaatgatattcatgttgaataatgtatttttagaccatatccaaaaactgacccaaaattttaaagtccttgtccacggaacatgatcatcgaagtgtgataaaagtgatttttaattatataaaactcaaacgaaatcagaaaattacgaaacttgttgaggtgtcatgttatcacataaggagcctatgataaaaatttgaaaaaatttagaacaaattgtgacgtcaaatgtacaaaacccaaacatttccgcatgtgatgacatgtgatcttattggaaatatttggtttttgttcatctgatactgcaacttgctccaaactttttcaaatttttttatagactccagatgtgataaaatgacacctcaaaaaattttgtgatttattgactttttttgctatatttcattaattaattactttaaattgttttttctgcttcataattctactttgaactataggtgcatgaaatagtaaaacttagcgattcgaaaaatgatattcacgttgaataatatatttttagaccatatccaaaaagtgatccaaaattttgaagtccttgtccatgaaacatgatcatccaagtatggtagaagtgatttttaattatataaagctcaaacgaaattggaaaattacaaaacttgatgaggtgtcatattatcacatgaggagcctatgataaaaaatttgaaaaattttgaagcaagttgtgatatcagatatacaaaaaccaaacacttctgcatgtgatcatattggaaatgtttgggatactgcaacttgctccaaactttctcaaatttttaacataggttccacatgtgataacattaaacctcaaaaatttttgtgattttttgactttttttgctatatttcattaattaatttctttaaattgatttttccacctcataattctactttgaactataggtgcatgaaatagtaaaaattagccattcaaaaaatgatattcatgttgaataatgtatttttagaatatatccaaaaattgacccaaaattttgaagtccttgtccacggaacatgatcatccaagtgtagtagaagtgatttttaattatataaaactcaaacgaaatcagaaaattatgaaacttgttgaggtgtcatgttatcacatgtggagcctatgataaaaattttaaaaggtttggagaaagttgcgatgtcagatgtataaaacccacacatcgtcgcatgtgttcacatgtgatcacatatagaggtgtttgggttttggacattcgacatcgcaacttgcttaaaactttctcaaacttttaacataggctcacatgtgataacatgacacctcgtcaagtttcgtaattttccgacttcgtttgaattttatataattaaaaatcacctttgccacacctggatggtcatgttccgtggataaagacgtcaaaattttgggtgaatttctggaaacgaccttaaaatagactctccaacatgaatatcatttttcgaatgactaagtttcattatttgatgcacctgcagttcaaagtaggattatgcggtggaaaatacaattaaaagaaattaatttacaaaatatagcaaaaagggtcacaaaatcaagaaagtttataaggttcactcttattgcatgtggaggctatgaaaaaagttggaggaagtttggagcaagtgacgacatcgaatgtctaaaacctaaattcaaattttaaaaataaaaatttttatctttgccgactgccctaacggcttggcaggtggcaaagggaacggagatggatgccgttagctgccagccacctttgccaccagcttttctttgccacctgccaggcagccacctttgccatcagcctttctttgccacctgccaggcagtcggcaaaggatgtctttgccgactgcctttctttgccacctgccaggatagttgggcagtcggcaaagagaatgtttgccgactgccctttctttggcaggtggcaaaggattttagcagttggcaaaacccaattttcctatagtacatgctagttgatggatcagccttacacagcccgaattttatagggcaatgcctaggccgtagatgacacctacgggtaggtatggcataacctgaggagtcattgtgccatgccagcttgacctttattggaacatgccttggtcgggcttgggctatgctaggccagccgggctatttggccatccataactactcaccatttttttaagtggtcgtatttggtttttgaaaaatgtaagagttaaggcatgtttagatgcactcaaaaatccaaaagtttacagattctccatcatgtatggagagagttgtactactccgcatcgatctatgcaaaattaatgcatgtggaagaaaacaaggtggttaagtgtgtgactccccgaaagaagcgtttagactgtaatatgtctgagggtgtgtttagatgtaaatttttttggattttaacactatagcactttcgtttgtatttgataaatattgtccaatcatagactaactaggctcaaaagattcgtctcgcaaattacaggtaaactgtgcaattagttatttcttttatctatatttaatgctccatgcatgtgctacaagattcgatgtgacggagaatctaaaaaaatttgcaaattttttttgaactaaacaaggcctcagtaaataagcaaattgttttgcacttgcactaaacctagctagtattttaatattgagttttattgtgtgtgtgtgctttgtaaacaaagaggtctatttttacttctaatgttgttttagagaaaattaaatatgaagatacaatgaaggttttgtttcgaagaatataagaagaatgatgctttttagtataagttaagaagatttatgtaagattcgcccgctagctactcctttagcttgaatgcctattgtagtccttaatattgcaaaagaaaacaaatgctataatgtgaaattcaaataaactttggttatttatattttttttcctaattttgtatttcgcacaagggcccaaatttctcggatatgtccaagattgggatttgggaaggctttgtaatgtcaccaaatagtcgtgtgtgtttgggaacacacatgtttgatatagagattgatcccacatgtaagtgtttgagggcatggatcgcaaacaaatcaattcagcatgaaacttccaaaaccgaccaagatggttttataaactagccaggactgttttaataggttttcaacaaaaacacctaggtttacacgcaaaccagcaaaacatacctgagaacaactagtttctaagtaaattagcaaagaaaccgtcgatgctcctgctaagagcaactccaaccattatgcaaatggacttggcatttaccaaaatgcataaaactccaaaaaaaaccctccaatcgttatgcatttggactttgcattttacatagctatgcatttggagggggaaacttagcatatatgccaaaggagtccggctatgcaaatagagatcacgggattctcggttccacctcgcgggcttttttcttcccttcgcgcggtttcccttcgcgccgccaccacttcgcgcgataggagagaagcatcgcacgtcttccttcgccagcttcgcgcgcgcgtttggacgaagcagcgcacaataggacgacgcagcgcgcgataggacgaatctacaacgccttcctcatcaacgccggccaggtacgcattcttcatcaatgcgatatctagggttttgctgttgacggcttgggggttgggctgcttttggcggcttggggattggatcatgggattggtactgatggccaacagacgccgatcgcagtacctgtacgacgacgaactgatggccaacagacgacgaattggtacggtgaacgggaactaacggaacgggagatcggtactgcgaacgggaacgacgaactgcgcagctcacgatcggtactgcgcggctgtttggcgcgtgaattggtgaacgggagacgacgacgggctgtttggcgcgggatcgattggccgcgcgggaaggagtgccgcgaaacaaaattttcgggaaaaaaaagatgatggacttggcattttgcataaccggttggagatcacccgattttagccttgctattttcatatgggggtttgcaatttgcctaaaatgcataacttcaaatgcataatggttggagatgctctaaggaggtactccatcagggcttggcactagtacattggcacactatacaggcggttggtaacatatttctacaggtgttttccggatccgcctgcgctggaggccagtacaaatcgtccatttccataggcggtcacttgagagccgccagcatttacacaggcggtttcctaagagagccgcctgtgtaaacctattaaaatatgtattatttatttattttttaatttatctatttatttatttattattttattgttattatttaaatatattgatattggttggtcttctaacatagcaacatgtaatttaaatacttcatctcatacatacatttgtatacatcaaagtttggtgctcaaagacataaagttaattacaagagtatatccatcatcacacatcatatatatatacatcaaagtttgtttctgtcctctaataaccctctttagtgatctctgttagcactcggaactttggcctggataattggctttcatcatcatgatatttgccttcacgtggaatgacatgcttcatgatgaacgagcagatgtcctcaactatgttgtctaaagcacgttcgttcatgcgctccgccgtcccttgcttatatacctgcaaaggaagtttataaacattatatattttatgacttccaactttaatagactattacttatattaccttgtcagggttccttgcatatcgtccgatttctctcatgttctcgcacacgtagtagccacagaggacagataacggtggttgcttcatgcactgtataacaggagagtggttatttaattatagttgcaactgtggtcgtatgtgtatgatttgtattcataatagtaaatttttatacgtaccggccagttatgtataacctccaatggttgccctggtctcttggactcgcactttccatgatttatcttatagaacctgtatgccctatgatctcaaatagaatcaccatgttattgtcaatttctcactatgcttaagtatgcatgcatagcttgacttacagctctagcagtttgatgaatggagcatagctttctttcgcgtaatctgcggagtctagtaccaacacccatccctccttgggataaatgatgaagcatatccagtgcctcctgctcgaattaaatctatgatgcatttatgcattggaataatttagatagatatttgtaaactgacacttacccaaagtggtacggggccaccaccactttcctgtcttgaaactttattagtgaatgtccaatgtagaaggcgtatttggcttcaaaatcaagtttcaactttcagagtttctcatcccgttctgcaccttccaaaccctgtacctttgtgctgtcattcccgatccggaatgtgtgccgatctttggctatatctattgggcagagatagacattcctttcttcggcacaataatttaggtccgaaccaaaatacatatcttgttgatcatataacattctgcaagacagaagcatgtcagatattgaaaattgatgcaactacaatgtgtgtaactatgtaacacttacaatgcaaatgccgttacgatctgtacatctagcatctcgtggttcatcagtgcccacatgtcatcaaatgtaagcatgcatttgtcagtactctggctgagaaatgctatttgtggtctgcacatgcttatggtgtcgatgccagcagaagaggctctcatgtaccagtcatgaaacctttttataccacttggtttcttcataagtttgttctgactgagtagaggctttccccgcacgtactttttggggatagtcttgtagtcttctgcagttggcaccttgaaattgacaggagttatgaccttaggcaccgacacctctgactttgctagctcagaaatctcatgctcttgtattgtgcgtttcgaagcaatgcctgacaaaaaatttcacttgcctagctgattttttctttggcttgaatggtgaaatcaacttaggtatcggaaatactttcttctttggcacctttggtggctcacttattggttctggatctttgagttgtggagaaggggtggaattgaatggtggtggagattgtgttgactgtggggtagaaagatcatggagagaagatggttgatggagggaaaacatggagaggtgattctggtgggtcaggaagagactggggaggtgaaggcggtaggttaggaagaggatcgacatgagctgacgactcttgggttagtggcatctcttgagagggtggtggtggctcccttagttgcacgtccctccgaggccataggatgaaattgtttatcacatgtcctagtttcacaatgtcctcgggaccagggatgtctagaatctcgtcctcatatccttggaccacgattgatacctctactctgcagtagtctttagggatgtcagcaccatggtatttaggtcctcctgggatcgctttgcccgtggctacttcccttgtacgatgattgttaatcccatatcttatgacaagggagcaaggtgtagaactaacaatgtcgtcaactagatggtgatccttatttgccgtagatgcgacactacttggaatgattgtttcacttgatgccaccaacggttgcgacaccactgggactagctgcatttggggagcttgagtgctcatttgggtagctgcatttgacatggcactcgctagtttctgcatcaactcaggaggaggattttctagcaacttctccatcatctcttggaagtctttcttagcctcttcctgaaaataatttgccatttgatccttgtaccgatcacatttcttatactcatttgcccattgagggccgaatccatccttccatccttctttggaagagatgcctcgaacacggccaggatgctcggggttaccgaggccaacactaaggatgtccctctcccttcgtggcgtaaacttgccttcctgctgcatgcctgccacagcaaagatgctcttcattgcttcatcaagcattgggtcttcaaaggacacacccgtcttggtttcctttggtttccgagcacggatccaattcatggacctttcaccgacttgctcggacaacactggcaactctactgccttcttcgcagcctcttcttgcctccatttaggaacttggtgccggtaaccacctgtgcctagatggtggtggtacttgttcctctttgcgagctgggagttggcttcgctccgagctaagaagttagggtcattcctctgctctagaaaaacaacccactgccctttagtaatattgtatttggatgtcggatccatccctgtctttgcatacttgacattcatctccgacctccaatttcggaaactaaccgcacattgcttcattgtatatgccttcactaaatcttctggcacattcctaggaaactggaacctggtcttaatcttatcccaaattttgatcttgtgattattcgacacaccggcccagttcttaactgtgatatcaagaaagtccctcacacagaaaccaattgcgttcctatatttgggtagggcctcctctggagctaggggctgttcggtaggactcacatctatgatggcatatgtgtcatctagaaattggttcaaccctctctcacctcgtttcaaaccttgtcgcttcctttttctagactgacatggcctctcagggctcgtcgttgctgtcgtcggttccagtgcgtcttcgtgtgccacttcctcctgagacatcatctctctaaactgagacattgcctcctgagtatagacatgtgaatcatgggcgtgtttatatgtaggaactatgaatagaaatcatttaattacatgaaatcgtgaatgtctctaatttacctcatcagcttctggattgtaatcggggtcacgtgccaattcacgacgagtcttcctcacttctggaggctccatgtcgtcgctagcttcttgttcataggacgaacctgatgcttcgcccgtttctacttgtttcgtgacctcacgagcttgtttcatagggtcacttgacccttctacttgctccgtgggatgggactgcagtgcttcgtccttgtgcggagaactcatcgcagaaatctatgtaatttatgcataaaattaaatgatttacatacactaatatatacactaatatatacataatatatcatacactaatatattaaatgatttacatatacactactacatatataaatagattaaatttacatacactaatatatcatacactaatatatacataatatatcatacaataatatattaaatgatttacgtatacactactacatatataaacagattaaatttacatacactaatatatcatacactaatatatacataatatatcatacactaatatattaaatgatttacatatatactactacatatataaacagattaaatttacatacactaatatatacataatatatcatacactaatatattaaatgatttacgtatacactactacatatataaacagattaaatttacatacactaatgtagtagtgtatgataaatttacataaacagattaaatcccagcccaacaggcccagcaggccgtcactccctctcccttctctccctctctctggcaggtgggccccacctgtcggggtcattccctacctccagccgccgccgtcaccgcaccgccctttccaccaccgcacaccccacaccagccccatcctcttccaccatcgccaccgcggccatcccttccccttccaccaccaccaccgcggccgccccccttccccgtccgggcagcgccaccatcgcgcccccaccaccaccgccgccacgtcgaggatgcgcaaggagagagagagagagagagagagagagcgagcaggagaggctctcaccgcggggcggcgtcggcgttgagggcggaggagacggtcaccgcacgacggcgtcgaggtcggcaacaacggcggcgatggcggtggaatatttcactcatgtgtgtcaaatattttggaagatatgatttttttactcattttcataattcctaaatattgaggtaggcaatacctaaagtcatctgaacatgcattagtacaggccggtgggtttcctcaccgccacgtacaatgcatttgtacaggcggttgactaagccaaccgcgtgtactaatgcatttgtacaggcggtttgcttagcgaaccgccagtactaatgcattggtactggcagttggctaagccaaccgcgtgtacaaatggattttcagtttatttaaagttttgcttatatatatttttagaaattatttaaatgatttaaaaaatcatatcttcaaaaatatttgtcctaaattagtgaaatttttttgttgtgttcctcttgaccagagacacatgttaaaaatatgaaatttcatgtttgaggtacttttgtatgcagctttatttaaaatgatttaaattgaatatgtgcctcatatcttgtttaatacataaataattctaggaataccagaaaaatgtaaatccaattttgttagctttattgtagtgtgtaaatgctatgaaaaatatattcctttgtgcaatttatctttgacataaatgtgaggaacccatatgtttgagcatagttcggtggaatgactcttatatgtttgtgaagcatgtatgttatgcctatctccaaatgtcttgaaatttttttggcaagcttctacactcaaatgataaccccacacaagatcttaggattttctggtcatgcaagctattattacatttttctttgtgctaaatgagatgaaaaatggtggactatacctagatcccactagttttttccaccaaccacaaggaagttttatttcctatggtatataagaccctatggagaagtttggcaccatttggagtcatttcaggggtagacttagttcaagcgctaattagtgggtgacgtcgcacggaaattcaattaaaccggataaagtaacaaaccacatcagaaaaatcccaaacttggtggattgaacatcaatggcactagtaacccttagtaaaagtttgagaccaatacgacatcaatggcactagtaacccttacatgtagaaatagaaaagggcacatagcataaggtacacattttatcataaatagattacatggcaaatgacaaataaaatctaggcagctactgttcttccttgtccatcgtgacgtacctagggtaacgagctctgtggaatgcttcgctcaacattccttatctttactggatggtcgtctacaaagagagacatgtcactgaactggttaaatttatccaagtcatatacaccatcaactccgatggcttgttgctttccagggaaaactatgtgctttggatggtccgtaattttcttcttatcattaggagagagaggacctgctcagcatagaagacctgtgcagcacggttagctattatccatggatcatctttgtagcctaccttgcttagatctagaactctaatttcatagttgtccactatgacatgtttttcttcaacccattgacaccgaaatacagggatctgaaatgtaccatagtctagttcccatatgtcctcaacgaagccaaagtaagttgtttcctcaccggtttcagagtctaaggcgtcgcatcgaacaccactattttgtgccatgctcttttggtctttggacttggtacagaacgtgaagccactaatgtcataggtttgccaagtcgtgacctggcatgatggcccagatgtcaagaccttgatggtgcgatcctcgagtgtttccccatctgaaatgtcctgctcccttagccatgaggtgaactgattcttatgttccatcattatccattcatctgtgtgcccatgattatgtttttgaagctcttcaatgtgtagattgatcaaaggctccattatcgagagctgatgcaggacgctgtgatgtgcttcgaggactgaattgtaatcttttgggacgtatgatttctttcccatcctacctcttccattcagcctaccctcatgtcgtgacagaggcaaacctattgcaacctggtcttttaggaccctattgcagaatggacctccggactcaatggcctcttcggttaagtacccctctaccatagacgcctctggacgagcacgagttgatacatagccatttagtattgacatgaagcattcatacgtccacatctcatgcaaatacatgggacccaatgcctctatttgtgaaaccaagtgcaccacaaggtgaaccatcacatcgaagaatgctggggggaaacacatctcaaactgtgaaactgtctccactgcgaattccttaagagacgccaactcatcacgttcaatcaccttctgtgagatcctgttgaagaagtagcacaaccgtgtaactgcaacctttatccacactgggtttatagccctaatggcaatagggagaaaagtagtcaatatgacatgacaatcatgtgagttgtagttggtgagtgtaaggtatttcaatgacacaatactccgtatgctagagcagaatccagatgggactttcaattccttcaaccacacacacatctcatgtttctcttcattgttgaggttgtagcttgctgccgggaggtggtacttcccattttctaacctaacagggtgaagtactttttttatgcctaactgtaccatgtccaagcgtgaatttaatccttcctctgtcttgccctttatgtccaacaaggtgccaattatgctttcaaacacattcttctaaacgtgcataccatcgatcgcgtggcggacgtctaactctagccagtattccaaatactcgaagaaaattgacttcttcttgaatgtagcccctggagctggcttgacattctttcttggttttccatcttttgtcttcttcccaaaaacaaatttgagtttgctgactatgctgaaaactctttggcctttactgttacctgatggagcagtagtctgtagttcactattattgtcaaagtacttatccatctttttcagccggtacctgtgtccttttgataagaagtgtctgtgcctcatgtacactatcttcttagatgcagttagggacacgtaagcggtgtcatctatgcataccacacaacctaactttcccttgaactgccctgataatgtaaagagagctgggtagtcattgatcgtaacaaagataattgctctcagtgtgaatgattctttgcggtactcatcgaatatttgaacacctgtttcccatagtatcttcatgtcttgcattaagggctccaagaaaacatccatatcaactctaggttgtgtaggtccagagataaggatggttagtaaaaggtacttttgcttctgcatcaaccatggagggaggttgtagatggtgaggatcactggccatgtgctgtgcttgctgctcctctcagcaaatggattcagtccgtcagtactcagtgtgaacctaacattccttggttcattagcaaagtccttgtggtttccattgaaatctttccactgctggccatcggctgggtgccgaagcttcccatcgtcattgtgctcatcagaagcatgccagctcataagttgggcatcctctgggttagcaaacaggcacctcaatcgatcgatcacaggaaggtaccacatcaccaaagcaggaatctttttctgcgcataatagtctacttcttccttttctttgccggtgggttttgaactactcttctgggccttttgttgggccttctttcattttttgcgcttaggcacagaggcaacacactcttcctctatgtagtctttatttgtcttgtacctacttgcaccacacttgggacagctgtccaagtctctataatcatcgcctcgatataggatacaatgatttctacaagcgtggatcttctcaacacccattgtgagtgggctgattagcttctttgcataatatgtgttagcagacactttgttatccttaggaagcatgtctgcgataatgcttaagaacgcatcaaagccagcatcagaaagaccatatctagctttgcacaccaacaattttagcacagaccgcagcgtcgtaaactctttggtgcaacccttggactcatcatacaaaggctcttctactgccttcattagggcctccatacctttcatgaagaacactgatggatcttccgcatgacgacgcaacattgcctctagaaattctgcatcttctgcagccatgttagtttcggtgccatcttcatttcctccaataaaaccatgatcaggaacatttggcacaacatgttcagtggctagaccatcggtattaggttgttgtgtctcgtgtacgaactcaaacccgtcaacaattccagttgtataaggcgcagagctaccctctccatgctttgtccaaatcaagtaatctttcataaatcctcaacggaccagatgagtaaggatttgttgaatgtcatcagatacaacaagatttctacaatccatgcatggacaatgtatgtgcgtctttcttgttcttgaagcgtggttttgagcagcatcaataaacctctggacctcagttatgtatgatggatctagtcttgataaattatacatccaaaatgacctctccatcactacctgtaaaacaccattcatatgatctaagggtttacaaaggatttatctagggtttattagctagggtttatggttaagcttgagattaaaggaaaaaacctaagttacataattaaaaaataatctaagtatagcataactatataaatacatcattcattataaatagatagatgatgtggaaggtgataataaaaaacctaactaccatataattaaaaaaaatccacaattatctctctacataaatatacaaagaacacaccattagtttaatcttgtaaaaactagctaaattgagaagcaaacatgttgagaggcattatccaaccatattaagcaaccccatctaaccatatcaacaaataaagacaagaagctagctattcttctttctcactcataaaacataaatacatgttgataaataaattgaaaaatttataaagagagagacataaattagaaaacctaagtatagcataactatataaatacaacattcattataaatagatagatgatgtggaaggtgacaataaaaaacctaactatcatataattaaaaaaaatcaacaattatctctctacataaatatacaagaacacaccattggtttaatcttgtaaaaactagctaaattgagaagcaaacatgttgagagacattatccaactatattaaacaaccctatctaaccatatcaacaaatcaagacaaaaagctagcaattcttctctctcactcatggtgaaaccctagatccaaaaagtggctcaaattgagctagaatgagcaaattgaggcaatagggacataaactaacctcttttagcaacctccttcctagaaatgaagatcaaaacctccccccttgtattttgagaaatctggaactccaaaatcgcccccaatggaaggtgggtgcgagatactgtgttctggtcagggaggaagaaggggtatttatacagagataacacaggcgattgcttaaatcaaccgcctgtgataaatgtttccacaggcagccgaaaatctctgacaccgtccgatttataccacaggcgcgtcgtaactggaaccgcctgtggtataaaaagggggcgccagctatgagcctctttctactagtgtggatgtcaacgagttatccttggtcagccaacaaacctagctatgatcttcggttgtcaagattagatgatgaacattgtatctagattggaacatgttaaaagttcaatgagtaaaaatgggtaatatgttgattttggtatgatcaggtcacttaatcagtggtggccctttatatttatatagtgtgggacagacttatcccatgggagtccaaactcttacaaatcgaactctgagcttgggctattaaacccaacctagtcagttttgaaaaccatggggtgaatcttcgtgagcctgaaatttcctctctgcactccaaactgaatatcatatatatgcattttgatcgcgtcggtaagaggaatgccatggtgaagtctatttttcaatttaaagaagatatcaaactattttgggaaaactggtcaggtcaattttcctagatttcctagaatcatctcaatctagacaatttggttaaattcccatgtgttctccaccaaaacatgcattatttcagcatacgggattgtattagtttctttagagttgtttctgatacaccaaagatggattaagacacacagtacaaccatgtgaaagactggaacatgcaggaggaggggtagggtgttgaatgggagctttaaattttttacaatgctagctaaaatcttgtaatctgggtggacctacagacccttaaaacctaggcaaggaagatgtggaagcgaacatatgtcaaaacaagtgaagttgagcaccctcagcaaacaccgacctaataagctggttttgaaatcgaggagagctagttttactattttcatcttttgacactcaaaagagtaagtcaaagtccaataaaacaatatcaaaaatttatgaaattggctggaggaactataatgccctagagtccaaacggctcagattcactctgcacgctgagcgaaccatacctaccaccatcccaattatgcttttgtcctcgcttcgtgtaaaagggttaacccgaggatggtgggatggactctagaagccttatatgttggtctaacccatcctaaatagccaaggtgggactaaatcctccataattatctcgtaacatacacatgggctaccaggggccaaatttcaaattaggccgggtgtgacatacaccccccctcaaaggacccaacgtcctcgtcggcccaatacacccacaaccgggcaaacaatgactagaaacgttccctcttagtagggatgaaaacggatcggatacggacggatatcatcattaccacatttgttttcatatttttggtcgaattcggatttgaatacggataatatcaatcatgtcggataagatatggttgtatgtcgacatcataaatatacgatttaagtattcggatacggatacggtatcggatgttgaatattcggactcggatacggacaggtctaaacccctctaaacgaattcggtctcgaatacggtcggaaaatatccgtaccattttcatccctacctcttagcatacgtgaccatacatccagtgtcggcacatgtgccaagccatgcaccccgcagggcctatacgcacaatgaaccccatctccgcgccgctgacccgcacacgcctatggccttgaaggtcggctctgataccatttgtaacgccacagagtccaaacaactcagatccactctgcatgctgagcgaaccacacctaccaccatcccacttacgcttttgtcctcgcttctcgtcaaagggttaacctggggatggtgagatggattctagaagccttatatattggtctaacccaccttaaacagcgaaggtgagactaaatcctccataattatctcataacatgcacatggtccaccacgggcctaattttaaattggaccgggtgtgacaagaaccttatgagaacattatctagattaaagaaagagatcatagtgtcaataggcaacgcaagttgacatggtagtttgatgttggacagtatcaatagacggcacatgtggaaccaaggccatgacaggtattttggttgcagcgtactgcggcgaccatggctagccctgtggtagcaattggatcgatgtgggataacatcgatgatgacaacgcaagtggtgacaatggtgtgtcggcatgatggctttgtcgttcgggtttactgtggtcctacagtttagttgtagtgtggtgtagtattgtagtgttgtaaaataagtgtgtctacatgatggctttgtcatcgaggtgataccgatgcagcatggtaattggtgggtggtgagtggtgctcgtacaatttagttgtagagtgccatagtatggtagagttgtaaagttggggcgatgtggtgagtgatgctcgtatatataatttagttgtagagtgctgtagtatggtagagttgtaaagttggggcgatgtggtgtggtgccggacatgttgatggtcgacccagtccaattggctatcattatatttattattatatagttgctttctattgctagccagaatattctatttttttattgtccgactcttttgggggtctttatccttttatagtgtgctgtgtaatcgtagagtctatgtgttcccctttgtccctatttgcttcaacttatctgtcaaatctgtcagtcattcaatagtgtttttctcataaaaatcagtgaagaatactttcagccatactaccctacctaccagctcctaccagtgacgagttggactcatccaggaatgtcactttataaaagtgaaaatattggtagttgtttggattttctggttgaaaattttaataatcacattataaaaatatctatacataatgtcatagtacattaaaccctcacctgctatatgtagggccgttgcttttcg

SEQ ID NO: 5098 - DNA, 1615 bp, Sorghum bicolor
  Intron number 2 from transcript Sb01g008130.1 (locus Sb01g 008130) derived from phytozome v7.0 (chr-ID chromosome_1; pos 7017610 to 7019224 reverse strand)
aggtatgtttttttcttattgccctgatttcatctattgtacttttcatggaatcgtatccaagaaaaaaggaaagagaatcaccgattacaagtgtaccctgaacataaggttgtcttgataacccaaaaaaagcctttcatattgacttgcaatgaacacaatgtaatttgccctctagtctaattgttttatgtgtagttattctgaaatctcataacagaagtgactaagtctgttctgaagaactcattttattattatacaactttgctttggtttcagctaactctcttttggtttggtaggatcctcatccttacccagcaaagaataacaaacaaaaaaagagcatgaacctgtttaaactatgataatcgaacacgaatcttgaaataaatgcagtgtgcatcttctattttttttcttagtagtaaatccatgatgtttttaattgtgtccctgtattttccatgtttttttgcatacatctttcatgtacatatccttggtcatatgtgtcattacacttttttttttacttcgcgtcactgacactgaacatctgtgaactacccaatgcaaaaaggtactttgctttgctagctggtgacaataggagacaatgagtttagccagttagagcaggatacaactttagtggttgatctttacttttccctaccatgtgttcacaaatctaaaatgccaaataaaatagaatggaggtcttttttttttaaaaaaaaactgaaaagtacagtaactatttagtttgtcgatactggggtggcacgcacaaccacataagctattacccacttttgcataatatttttctacaatttgaactgatgatgtttaccttctgcctactttacatgctctgttgtttttggcttagccactttacagttatggtttatctaattatgatgctaggattctaatcatgaactactttgacctacttatcactgatcatttcgaaggatgcatttatgatagatagttttgaggaagtttcaattccatatctaaattgatttcttgtaagagaagcaaattgatgtctaaaaaataggttacagaagaacacaaaggctaagtggtagagctagaaactctttttttctcaacttctgccaacgttgctgtgccttgttactccctttggcttgtggcttgctgcaccctgactgggcagaatgagtttttgtttgctattttctgtatccgtaacaagaaacgatgttgatagtaaatcatttttgacttgcatatggcatttgatcttgaaccatatggaaagttttattcgcgtggattgagcaagtttgaagtatttatcatttgggttttttctagttgattggcctttgcattttgttgggaatcgactgctgattactctaaaaattagtccttgaactatgtaaaatttctacatcaaggtttcttcattttaatagtatttttgcatgtgccaagtatgtgctctagactgcagctttgcaatttcttttttttttgggaaaatgatttgacatgctcccttcccaagatggagttatattctgagaaattcttcataatgcaggatcaccttgcgctg

SEQ ID NO: 5099 - DNA, 1938 bp, Sorghum bicolor
  Intron number 1 from transcript Sb03g040740.1 (locus Sb03g 040740) derived from phytozome v7.0 (chr-ID chromosome_3; pos 68260533 to 68262470 reverse strand)
ccagacgcgcagcctctcctgcgacccgattccaggtaacccgagggaaagaatccagcaatcccccaaatcgcctgtgtcctcggctcttgtaattgtaactcctcttcgtgtcccagtccagatttaattagactccacgtagtagtttagggcttttgaatctgtcttctggaactccaaattcgtgggtatgttgattagggaacgcgtgtggcctggcttgcactccgattcgttttgaatctcggacgagacatggtagctgctttagttatgatatttggaagctatggcagccttaattacatttgcgtcttctgggattactggatcacgggtcgggaggaagaaggtggaaagggaaattgtggcttagaatgtcgacagcagaaatctgggaattttacaaaaccccactaaatatcagtcactgccacccaatcccctgattgtcaacttggtttgttagccgtttgggacttaaactcataggtcgtaacaaaatttattggcattttgtagctgtactcctgtgtttcttccagtttgctaccaagtttgttgatatgtcgtgccacttcttttggaatgaaactggtgggttgccctgcccctacagataatactaatatatatggaagtagtttgtacaaacaacaaaaagaagcaaagggtaaaaaggaactaaaccagggggagggggttaaggaaatatctcttgccattctgtgatcttggggaagtacttttgccgataaacaatttctgcaacttggagtgtgtctgttagacttggttgaaaatatagctgtacgtgctaatccaaatggtccaagccacaaggattatgaccgaatgatgaaaggcactgacaaagatactttgaagtcctctagcagggcaaaaggtttggtaatttcgtgccaccttattctgagcaagttgtcattgcattgctgtgaactgtttacttctctaaaatctctattcaatgaaattggcaccggtaccggtttgttctgtgaaccgtttgcctagccattagagtgcttattacatggtgagaggtcatcatatcaagaagcatgtggaaatttagcagaaaattatcttatcatgtcattacagaagctgcaccccgagcatctccaaccaagtcatctcagtctgcactgcacgaaacactccatctttgactaccgctcatgttcagtcacagctggagctgccttatggactcacagtttcctgttcttttctcttttaattagaagttgtcacaggtgatgtgctttggctaatctcctctcagaaacttctgtggagaacatcatgatgtattttgatgtctaaaaacctttgtgagaaacatatgaaattgagcaatcttttgatgtataatattattttggatcagatgatgcatagcttgtaaatctgtctagctgtgtcagcacattgactgacaatgaagtcagacatatgcttgttgagaaatcgccacaaagaaaataaggcatggtggtattcctcatggctgcctatattgcccttccccaaggtcaaactggattcataataagttattaggcagtcatttcgggagtgttgacacttgatagcttccattttgatcagccactctgggttttacctggtacatatataaattccaaacatggacacctattgattagatattttctcttggttttccctgtccattcttgtaatatacatatatacatatcatgacataacctgtcacctgtatgtatccacgtttcacttgccctaaaatttccttgtttatcatgttcttgagcgttcaaatttaatcatagtactggagtgctaagtaatattgatggttgattagaattgtgttgccgttctgcagattcaccgcttcgttcagagcttgcaggtggcact

SEQ ID NO: 5100 - DNA, 963 bp, Sorghum bicolor
  Intron number 5 from transcript Sb01g017540.1 (locus Sb01g 017540) derived from phytozome v7.0 (chr-ID chromosome_1; pos 18051748 to 18052710)
ttatcgacttgctattgactggtctgagggattcagtatgttcttatcctgatattatgatgtaaaattttgattttattttccagaacgtggtggtaatatttacagttatatgattgcttgtattgtaccccattttgttactttctctctctttgcttgccggcttatatcctcttttccctacaaggaccttcacctgccagtctacctccactgcatttcaaatcttaacaaatattccctcgtttcaaactgtaagtcgttctggcttttctgattacatagcttttgctatgcatgtagacatacattatgtatagacgcgtagcaaaatgctatgtatctagaaaagctagaacaacttacaatttggaatggagggagtacataaaataaaacacacacacagagccttttattgtttgaacttctagaattattcatcagtattactgaactttaaatccatttattaatcaattcttggtttgattgcttagaatcgagttggtgaaacttttctgtgtagattcctgtatgctactatgatttgtgaacagggttgcttcaaacaacacaactgcctcccactctaaggacatgaatgcaggagcaatggtggtatctgaaatgaaataaattctcaaaactgtgtatatgagaacttatgtacacaatttgaaatcatgactcactgtttcatgtactttcttaggaaaacagtagggagtctggcctacttgctactatgattttttgcatgttaaaataccaaagtattattgggccatgaaatgcaattactagcatttgtcatcccagatgaagttgcattaagggaataagttgttagttattcatctttcccatttagtctcaagcactgctgtttttgaaaggcaaatgctctttgattctgtgtcaggatacaattgtaaggtggtctgctgccaaaggaat

SEQ ID NO: 5101 - DNA, 5506 bp, Sorghum bicolor
  Intron number 5 from transcript Sb09g008793.1 (locus Sb09g 008793) derived from phytozome v7.0 (chr-ID chromosome_9; pos 17501449 to 17506954)
gaattaacggatacaaggtacccttgaataatgcacatatatgttaatttattttatagaatgctttgttcatcaaacacacaaggctcagttgtctatcaaactataccggtccccattttatttttaactattttttaacaatattggcatagtccacagtaaaaaaatcctatttctaagaaactaatgttcgatacataaactacttcaacatcatctaaactgccacacaaccatatattcatttatttttagataagaagaggtaaattcaggcctttgctatgtggccattctttctttcattatgatggggttatgcatccacaactccacaacattaaggttaatatatcatgttttaatcagattatggaataactgtaccataggtccaatttctaatattctaattacaaaatttctttatcttttcctagatctaggttttctttgtgtttgatggtcataactgctcaaattattttcattaacataccagcaatttgatttcaatgcaagcaactgataacgtcattccttctagtccaaacataatggtttatttaaatcacataaaaagttatatagaaatatgatattagaaccacgaaataagacatacttttccactcttttggtcatgcgagctatttttatcacaaagaaataattgaaaattgggtactgcttaatacaagtaacgttagtttgtctagcatattaaaggatcatataaatatcatatgctaaagggtggcaacaaaattattacaccctatgtgccataaaaatccaggatgacgctaacatcccttccctcacaccaaagtgtcaaattcggcaacaaacacccaacatcaaagtaaaagacagaagcaacactaagaacaaactaagattaagatagttccatcactcatttcaattaaaccacgaatgatcactatgactgataaacaaactttattacaacaagtcataaacaacattattaactgtagaactgggtgaaacagtgaatgtgctgctaatcccatccattcaagcaaaacgtccaaatcaggcatctagaaagataatgaaggtgagaataaatcttagcaagcaaactgcctaaacatgtaaaactataagttcattagacatcgatttaaacatagaagaatacatgtcataataaataaggttcatgataagaatatttatccaataaaatatcgataagaaataaagcgacaataaacaaactacccccataaataaataaaacaatattccccatataaataaaaagaatacttctcgaatccacttcatgccaatatataacttcaatacaaatgaacctcaaagagtgcaaatgcaatgcaatgcatatactactgttctacaattggctatagaataacttattctttagccactttgagttacaatgattactaagcttatttacaagacaatagtaaccacttactaagtggtttactataatgttattgtaaatatgtccataggttatagttacacaagtatcgtaaatatgtattcaccttattgtaaattattaagtaaattatcataaatagaatatatttatacatgagactatgtacttaagatatcataaaactatatgcatctactactgtcgagaattttgacaacataactacatcaacaaacaagaacaatacaatccaaactaaaaagggctcagttgatgtctacgtcgaaagacatctattaaagtcaacaacttgagtataatttttctatgattttttagcacatagtagcaaaaacaccaacataaactagaacagcacaatttgaaaaaaatagtggagtttaatcacgataagaaccctaaccctgttgattaatcaatgaatacgctaaaacctagcatggatttcacatcaaaatagtgggaaaaagtgagatattaccccctaacaacaagtaccacaaggatcctcaatgatttatctcctatttttgcccccttcttctgtgtggcaattgccagcattacacctctgtcaacatgatctactccacgcataacatcgctatcaaaaacaataatgagaggcacacaattgtggggcaaatggaaaagaagaaaatgaccatccaattttagatgatgaacagatacggtggtgaaggatggtcaagccctccctctcatctctcctctcttcacatgtgaatacagggtggtgctggctcaagggattgaagtggatttggttttgtatagtaaccacatgttattgttcatatttttctccaatcttgcatcttctgatagctatatctttataatctaaactctgaacagtgcatacgagtagtaaaatggactacgttcgaggagctctatgcatctatggtctctaatcatctaactaagtgatgtatagtttttttggcacatgttaaaaaatctcgttgaaccatttgccactttacatttttttaaaatacaaaatgtattttggagtagtacacatacaagcgcaaaatgctagacatcagaggcgagggtcatgagtcttttaattttataccatattaattttcattcaatgagtatttaggtaaataaggggccaaactaaggttcattggaaaataaaaaacaacactattttaactacagtagccatgaccatgctaatggttatgaacatttaaatataaaattatataatttaatgtgctaagaggttaatgccaaaataaacaacatttcatgtgacatgttcatttgtcacatgatggtaccattacacctaacatggcgtggattagccaatttataaacctcttctaactaaggcctctaatttcaacctagtcaaaacctatgtaataaataatttctctagatgtgcaactaatattatgctaggtgtgttctatgctatctaccgcaaaagaattatgcaccataggttccaatcctatcaactctatcaaactaatctaggaaagtaatcatacaactaggatacataatataaacgcaaaaagtaaaagggtgatagagaagcaaagtttcatcgatgactccgcttgccaaagtatcgagaagttctttctttcccctagtccatgttggacatcctaacatggattccctagcaagagccaagatcctagttgggtaacatcatcgatatcccctaggacttccacacatggtagtgggtcttcaagatggcctttcctgaactgctccctgccgtcttcactattgagcttccaacaaacttgccgcaggcctcgttccctctagtaaaatggtagcggccacaccacaaatgtggtcggtgtagtctcaaacgactacaagccctccgatgaacaacaacaatgaccaccagcacctaatagcaagacatgtgtaaaccttactaagcattaggcctaaactagagcaagagctaaagttgttgtctaacttagctaagcactctacaaggcacctatgttaatcaccaagtatatcacttagcacctttgtggctagaggtgctagcaaggagcctcgactcatgcaagtcttccttgagctattcataccctcaaattgacaattggggttatagccccaagttgaggatatggattagtaggcaatgcatattggttgtgttgtgtagcatgctatcatggaggtagtcattgaacacgtcacatatgatgtgcctaaatcctagctccatcagtcatagggagcgagttgtatatttatggtgtagtaaatgggcttggcctctaccctagtggtgggcttgttatgaaggcaacctctaaaatggacctattttaagaggtacgccttctacgtatactacctatagaaattattttttcaaaggtggactttggctgttgtccctaaggcttcaagaggtggtatatcaaaaagcccacttgttggaaataaaagccaaagtctactaaaattgactttgtgatagtcgtaattgatccccttgttttgtgcctaggtaagaaagatttgttgttggaactctatgttcatccatccaagtagttacagtggagtctgatcacatttgaagttttaatatgaagaatcatatgccatgtcaaatgtgatatgaaggtccacatagtctactactttgaagaccttatatatgtcacagtccaaaactagactaatgtgtagaaaaacaatgaagcactaatttgtggctctgtcagtttgtccatactatcttttaaaacttatgtcggctttaaatgaactcaatcaatacattattttccttttatgttttttatagtattagtcttcattttttggtgaattaaataatatagacatagatattcctatggaaatgcacactcatctatgctaacctctgcatgagcacctttggatgagtaagccaaagaatatcaaagttcatgaaaccaccaacagcatcactgttgatcactttacctaccatcaaaagaatagcattgataagtcttccaatagatatatgaaaatacgaacatatatgggccaagttgtggacttgaacctgggtggagaagttcatccccaaagaacctaaccatcctttcatggattggaataccctagaaatctatttatctctagctaggacctaccatggacatggaatccatatcacaatttcaagttcaatgatgatgagctaacattgctcactcatgaggagcccgactagaaattaacatatttatcacaagtggcagtcccaactttaagacatggaattgttgtttcatgcatgtttccatgctaaacctagatagatcatgcattcttggtaaccctagaataaataaaacatctatgccaaataattgaatattcattgaaaatgattccgagaaaatagaatcatggaacattgggagtcccattaatttcttatttcagttaccaaagccccatttaagtcttgtggttgttgggttcagtagcttggaggatatatatgtgctttagttactctagggctttcacataaaatggaagagggcacactcttttactgtgtcaaaataagagattactccaaatcacttcacttacacacatttatatgtagttctcaaaggattgcatatttcataaatttcctcaatcaacaccatttttccaacaagaaattgatgcaatcaaaagaaaaaaattagtgggactacgataattaggtaaacaaaaattgaaaaatgagtacattgtttcgtatatgtgtggttacatatatatcaaacctagacttctggtgtatgctaggtaagagcaaggcgtggatgttatcaattgttttacacattagggaatttattgtaaaatctaggtaatgcacacattataaattgtaccaaattttattaattatgtcatgattcatttggtaataatttcatggcaaagccagactaactctttttatcgcaggttttc

SEQ ID NO: 5102 - DNA, 4990 bp, Sorghum bicolor
  Intron number 1 from transcript Sb09g008090.1 (locus Sb09g 008090) derived from phytozome v7.0 (chr-ID chromosome_9; pos 15046954 to 15051943 reverse strand)
ttcccgcccatccatcaggttggtgccttgctaccggtgcaccgatttcagatggggttgcgtgcggatttggggatctcggtgggggaaagccgggacctttacagaggaatcgaatcaaattggcttattctaggtggatttgcgctgctgcgaatgggtaatttgctccctgttgaccgggtcacttagcttcgaattaattgcgattagaatgactaattaggtgcgtttggattgctcgactgtaaaaccatctgcgaattgggccttctttgtcagaagatttggtcagttttacgttagatttcagatgaatcggtattccgctatggatctgagttggacgcgttatgctacatgtagtctctcctagtcctagccaagctggtctatttggatttttcgaggatacaaatattgcatttgttcttttccctagctgcaaatgctttggaatagtgagaaacaaaatgtcaagatgcttatttgtttcttctcggtctcattttatcctcttagtaacagttgacgtacctaaaaggtactggcatgctggtgctttatgtagtctacctaggaaatgcaatactacttctgaacctaaatgatctcgatcatgatcaattgttgaaaacatagactgttcactttgatggagaacgagatgaactggaagagaacagtatacttggatccataccattagaagatcctgactttggaaaaaataccatcaaaagattcagttttagagaaatagcattgaaaggttgctccgttgttgatttctaccattctgttaacttgccgttgatttgctcaacttgctcttaaggaaaaagaacggcaggactcacaagaaggctgccatgaccaaatccacggccatcggcgcagtctggcctgcgctgcagttcaaggccacggcccacggcccatggcctatgtagctgctcccctctccttcaccacactaagctcgccacgccatccagagctgctgcttgctgtccatcatctccattttttcctctgttgtcaagcacagaaggagtttgcacccatcgatccaccgcgatccgattccttcgacagtgagcatccttagactctcctccacctttcccaagccatgccccttcctctccttgtctgtaccgagctgctctcaagctttagagtcgcaaccatggccgccaatggcgctcaatactcgaagtcgatactcccctgcttcccctccctcccccatgctgggaacccctaaagtcaacccctcatcctcctctctctccctgtacccttggatttaggaatggtagcctaggaatggatttcagcgaagctccattaagcgccatggtgagcacggcggcgctcatgccaatggtcatcgtcgtcgactcagcgcaggccggacaacggcaaatcaacggcaagttaacagaattgtagaaatcaacaacggagcaacctttcaatgctatttctctaaagctgaattttttatggcatttttccaaagtcaggatcttttaatggtatggatccaatcccatccttttatcatgcattcatgcatgattcacctggtatgatctgagtctctgagatgaccttatctttgagttttgtttactaggctcacttgttgatgtgctcggccttgattttatttaatattctcttgttaatctgctgttattttcattttttatttttgataaaattattgcgcttcttgttttggatgaacttgctgatgtaagtttgtagccaatttttctctctttctagttctccccattgagttcacaggtgacaggtcaagaaataacagctgagctaaatgaaagggatataagttttcctttattctgtgactgattttttcgttgtccatagtaggaacttgtgcagagtttatatcttcttactagatgataccgcgcccgttgctgcgggaattttataacgttgtgcgtaagcaggaaacatgtcatttttagcaactattagacacttcccttcatgtagagaaaaatgcacctaatatattatattacaatattccttggcttcttcgtgaatgtagctaaaaaatttaatggaaaacaatgatccaagctgataaagcacctattgaccaaacattatatatctctttatgaataaaacagatgtatatataaataaatttcaacatgtaaaattgtctttggagcttctcagatgctcgcatatagcacaatactgaaactgggttggcctatacatgtggggcccgctaccatctcaaacaccgctacctattgtttcatcgatgtggccaaccttcttccggatggatcaagcttcctctgtcgtgatcaggtgcttgcttgcatcaagttctcgctgacatggctgctacgatgttcaacaatgcagccgacctggtagccgtggccgtggcggcctcaaccagcagccgatcatcttgacctccactgtgctgccaaggccgaggcgtgagggcgtgccggcagtcacactgtcccagccctggcggaggccacgaggcgggcgaggtccttgccaaccttgcgctctgacctcggccacgtcccgcttcagctccaccatggcctcctagaagctgccatgtgcgtcatcgaggcggaggaaggcgtccaggcggcggttgccgctgccgccagctgagaaggagagcgccgtgagaagatggtctgagcgatgctatcgttaccttgggactgtcccttggtctgcggcgagcaaccgaggcagcccagtttgctcatgatcacagtggcacagtagatggttcagctagctttaaagggtggcagcttgtggctggggaataggaacagacagaagaagaccaatcaccaacggcccttcagttctgtaacttcgcataccactaccaggtttgggaatgggaatggagtcaccaggggacgatgcttcatactgacttgtagctgtggggtccatagattacgtggcgtgctgagacctcagagaattcttgtagtgggtttctcctatttaggtatagtagatgatataggactctgattaattgaagaaagctcataggtgtttcgaaatctatagctgctttgtttgagatgggtttggactttggagtaataattgtttagtgtatgtggtactagcatgtaacttcaggtaggcacgcacatcaggcgtgctagaatgttgacccatgatgctccttttatttattttcgtttattcccattggttttgtctctggtttttgtaaggtggattgatctttacttgttccttattaaatgatgggcagctcctgtgaaaatttgaagtaagaaaaggtattcttggcaagtcaagaagtgaactatcagcctaaatgcaaacataggcagttaggcaccttcaaactcttaaaccaatgcaagaataccctattggcacttgacaaccatgatttgatttgcatgccatcctagcggacagcacagtcttgatgtggcatcctaatcatggaaaatctcaaaaaaaaatatttgtaccattggatgatgtaagacataatctgctgccccctttctctcttcttcctgtccaggacagagacatggtagtggatcagatcatctcatggctggtcaagtctctagtcctgtagagtataaggcaataggccatatttgtactagtagaagtacaccagcagtatggctggtactagtgtagttgttggctgatttcagccttgtaccctaggtgtatgtagttggtagagctgtaccttagaaggtacatgtattggtgtatataaaccagcccaatgcaatggaacaagaagcaagttcattgccactcattcagttccagtttcagttcaagtctgaaactgtgtgtgtgctgtgtgcgtgtgcagtagtagctcagggcttttcttctaccttggagcaagggagagggagaggggaggagagcaggtgctgctcacctcggtgcagggttgctgtgccaacagatgaatgatggcagcttggaaaaggggaagcaggtggtttggtctttcctgcattgcagttcatacgagaatactaaaactttaatattttttctaaattgggtgccacattatgaggtattttgcacagtttttagaatttgagggagccaaatagctgtttggaagtcgaggcttgatttaacaagcttcctctggagataaggttgcttgagatcttggattgtcttgttaggagcctatgcctgcatggaaaataaggtggaatccttttcgaatcaagaggaaagttgtctctccacctcatccatgtatcctccccttgttgatttttttgctttccttttttttttttcaaataagtctgggtccaggaattactaatcagtttcctctgtgtgctaaacttaataatctttgcttatgaactcataattgtaaatgacacacaaacattgtggagttggtaatcaaaccgagtgctagttagcaagccaggcagtggagtggcacctgggcatgtttggatggcagcctaggcagctgcctgccaggcaaatgattctggccacaggcagacgaagtccgcctggtgttgctgtctgggccaggcaagaatgtgacgccaccatccaaacacgcccgcgcctcctgggcaggctgggaggtgattaagttccaccttggcagtcacctttagagcagttttcctattcctttgatctgtgcagtttctttcaggattatccaaatgttctgtggaaccacttcaattcagaggaaacatgcaaattttttcataatgctagaagcatatataatacagtaggcaaatgaatatggttccattttgtggttctgtaaagcttattcgtcaactatacccctgtcagtagaatacttccatagttgattgctgaatttatttgcttttttaacagtgtcaaa

SEQ ID NO: 5103 - DNA, 936 bp, Sorghum bicolor
  Intron number 1 from transcript Sb10g027430.1 (locus Sb10g 027430) derived from phytozome v7.0 (chr-ID chromosome_10; pos 57189358 to 57190293)
ccctacctccaggtaaacactagttctactgaactttctgatatcatttcatttcatttggccctggttatatatagaacagtacagaagtcccaaacaacattggaaatttggaattcgataaacacacacacacacaaacacacgtacattggaagatattgtacattatattgtttagatcatgagaatgtgataggattttggcacaaatgtcgtaacgtatttcttaatacgcatctttttttggctgcacgaaattggtagttgctgcattggatatgaaattgcagatggataagcttccactgtacagatgcatatgtgacctagtatggaccaaatgaattgaacggaataaataaaaggaaaattaaactgaatcgtggacacgatatatcaacatcatccttggtacatggtactggtaggtactaggtagcaaatggacggcttcacattcgctttcatcaaaatgatagctgactatatgtatactgtagtgagtactgtacattggttcatccgtcagcaactaaaacgagtctcttaactaaaataatgttctttttgtacctgattccgacctccgaacaaattagcggctactaattaggaacggttgacgctgaaattaaaacccttagcaataatcagtgatgtgcttctagaagtgatttgctcgtgttcatctgtcatgaaaacgacgtgctttcaagctagattcttgggttttaaataccacaactgtcgaaagcgatggtcgaacgcgtacgcacgcacattccaggggcatgttggtctctcccgccgccgccgccgccgccgccgccgccgacgatgatgatgacgacgacgacgacgaccgtttaatgttcttggtgcatgtccatgcccgcaggcggtggtgaaggagacgttccggcggcacccgcc

SEQ ID NO: 5104 - DNA, 1086 bp, Sorghum bicolor
  Intron number 3 from transcript Sb07g025480.1 (locus Sb07g 025480) derived from phytozome v7.0 (chr-ID chromosome_7; pos 60586976 to 60588061)
tttaaggtaatttttccaagcacataacttgtatgatcttgctagtacagaatttatctgtagtttaaggcatctgaaattgccaccatttgaagactttatgctcatagatgcactctatagtaattataaaaatgaagaaaaaaacatatcaattttgtaaaaattcttgtgattttccaccaggttcttcttagtaataatcacggccagttgcccactgttgagcattacatacccattgacttgctatttggttaaacatgctcttgaaaggttttcattatccatccaattttgaacatgccaatccaaatctacgaaaatcatatatctatgcttcacatggcttctactagacaacatttcggataatggttggttcttttgttgtctatttgaattctcacatggctcctaacatattttttgccgataatttgctggcatgacatttcaaatatcattgctctagctgtcatgcatgactcaatgatgctatcacctactcctatctttgtttggtctccctttgacctggcatggacttgccattacatttgcacatgtttagagttcagacttcacaatgccattgtgttcctttgctctaccgacagtctgaagtgaacacttttactgaatggctgaaccctgttagcccatgctaggcatggatggccagccagctctttttgtcgaaatgttgccaagcagggagtgatcctatctgtacactgtacttggcaccgcactattattgtcctattgtattaacaatagtatgaaactggttagggaaaaaaaaagcaacatgaaaccaaccgttcttactgtgctccctatcctgaccaacagcaattgacaatctgaaaatcttatcaaaatgtgaaatttactcctgtatgtatgttacagtagttgtccaagaactgcaatgcaaaattctatgatcctgaagcttcgtgaatgtggttttactttgcttactcactgtcagaagcattgatgcaatttgagcttggtctgaccgttgtattgctctgatcagctcgtacgcggaggtgagctcgtcggcggaggagc

SEQ ID NO: 5105 - DNA, 5530 bp, Sorghum bicolor
  Intron number 2 from transcript Sb09g017290.1 (locus Sb09g 017290) derived from phytozome v7.0 (chr-ID chromosome_9; pos 43182327 to 43187856)
cgtcgacctctactccaacctcgccgccggagagggtaagcaggcacactcaatcgtcacaaaacacttgctcttaggtagagccgctaatcatgcgaaactaaggccttgtttagttaatttttttttttgcaaaatttatcagattttccgtcacatcgaatctttagatacatgagtattaaatatagacgaaaataaaaactaattgcacagtttggtcagaattaacgagacgaatcttttgggtctagttagtccatgattcgacaatatttgtcaaatataaacaaaatgctgcagtgtcgattttccaaaattttttggaactaaacaagacctaattctatacaaacaaaaaactttctgcaaatctggctataaaatttcattgaaactttcttttcatgtctcatcaaataagtcagttttggtcatgaagttttatactaaagatatttctaaagataataaaaatatcttaagctcaaatataaagctttaatttttattctgtaattaataataaatatggtaatttacactactacaacaatctttaaggaggtgggcgttttagaattttggaggtgggaaaacaaccccctctatttaaaggtatgcacaaaccacggagtcggacgctttgcccgtctcggttaatcaattagaaaaaagaaaacccgttgatgagcccactaagcccatctacaggcccggcgagcctatccacatgccgtcaccgccgtcgcttgccggtgcttgcatcctcgttggaccgtgcgcaccgctagatccggcctcccacccatggggatctggccacacgccgctaggtcgggccgcttgccgccgcccaccgccgcatccgcctcgatctgtcatccaagctcgtggatcttgcctcgatctgcctcgatccaccatcaaagcttgtggatcatgcctcgatcctccagaatctgcctcaatctgccgccgagttgcacgatccccaccactggagggtgagggacactgcgaggacgaaagacgaacattgctcgatcgggagatcgcgaggagagggcgatctcgaggagggagagggaggttgcaaggagagggaggtcccagagggagagggagggaggagggggtgctgttggggctcagtctcaaggagagggagtcgtgagggagaggaaggggcgtcgctcagtgtcgctgtcgaaggtgagggagtcgttagtggcggcatgcgaggggaagggcaccactcggctcagtctcaaaaacatgattgaacaagaaaccctaagttgatgtatttatattcaaagataattattgggcctcgcctgggtctattgggccccgacatttttggaggcaagcattatagtgtgcccgtctctagaaaatttcttatggaggcagatggttttagacaaccaacacctccgaaaatagattcttttttaagatttgccttaaagtgaccgcctccgtaaattaatttttagaggcgggtattttttgacggtctctctaaatcaatttatgagacaaacaaaagtgactgtctccgtaaacaaaaatgcccatctccgttaaccatcctgtattttctgaggcgattaaattttttgaccgcctccgttaattaaagtgcaacgccacataaaatcaatcctgtagtagtgttatttttctttaatataatgtttcctggcttttagaaaatatgatatgagtctcacaaagcatacctaccttataaatgtccatacacacatgcacacacttaactctatatgagcacatatgagatattgaatagggtgatggagactgacaaaaccactttaagaaaattgctattaatcgtacaactcaaccagtggtgccacttgtttgtagagtacttcctccgccctaaaaaatttgatgttttaagatactgtggatagattagtgctcaacaaaaagtggaccatgctagttaaggtcttgtttggactttggatgcacttgtgatccaccttgatctatatttgttggagtggatcaacacacggatgaggtggttacaagccctaaaagaaatgtatggagacatacaaatcacaacctaaagctaatatacatgtgcctaatatattgttcaagatctagaacatcaagttttttgaggtagaatcctataacatcaaattttctaggatgaaaagagtaagtctaaacaaatatgagcacaagtttagaacttaactttggtgaacatgttactccacaagatcgagatgatctaacgaatagtgtgttagtatagttttcttttgacctatctttttttttcgcgagtgggttgaacccgtatttcattaagaggtcttttgacctatcttacaatgtgtaactgacagccgagtatatacttgattagttagaattataacggaggatgataatccatcaggttctgtttggtaaaaagtgtacagaaaaaagaaacatgttggtttttctttattacttattttataggttgtagagctgcatctttcaaagtcaaaagatgattatatagaacagtaaaaaacataatgttattttattttattttagatgtagttttacattaatttaacctctgcatgatcgaggcatgtgcatacatagccatcctttaggacagaataataacataaaaactaagaaaaccattccaatccactcgtcacatacaactgaaaccaccgtcggtttgtttgattcgagcaaggcagtcagggatgaggacttttatttatgtaattatgattggaatcaaagtagtaagaaattggccctagccgatcttggggacctctgccacgttgccggcctcgttgaagaagacgcggacgcgcttgttgttgaattcagtggtcacgaaggtgccgtaggccagagcaaccacctggacgtcccggcggtcggccagaatcttgtgcttggccacctcggccggcagccccttcacctccggccacgccgacttctcgctgctatcgctcatggccgctgattcaactagcgcggtccaaccaacacagagagcgcgcgcgtggtttgcctgcggccgaagcttggtatttataggtcaggcgcccgcttccctttgcttgtctacttttctacgagttaatggcatttttttttcataataaatcagcggacagtactttcagacatgactagacatgactttacaagtgaacagactttgcacgaactgatcagccagaggcatcttgatctcaggctggatgccttggccttgcacgaaccgatcagccagaggcatcttgatctcacactggatgccttgcgtcatctatttggcttcaattcaagctgacatttggtgcaagcaaacaaaccctcggttctttcgctcgttgtgctcattgtgggtgtcggatgcttcggccggccttggaccaactctgtgtccacggcatgcgagttaaattctagcgaagattggccggcgccgggcgctggctttgcgcaaagttccgcaccgatgtaaacggcggatttatttctttgtaggattggcacatatggatattgaaaggattccacaattttttgaagttactgtttgtctagaggctttcattagtttttgttcatgggagcagggtcgttctgatgctctgtttcgacgagagcacacaggatagtcatcacgcattcacgctctacaaaatactccacgtgtcctgaaacttataaggaatctaaatttaccatagttcaaactgtggccaaactatatttcacgaacgtttagtgaaaacgaaagtagcggtcaatttccgacagccattctcttttctttttagaaaagtacatatgttactttctatttttggatagaacatgaaatcgtttctttttctcttttgaggcattcaattctcttttcactttcttttgctggatcacccaccctttaatttttttatttttttaagaagcatgtgctcataacttataaaatggaactaaaaagcatatctttcacgataaacttaacagtactaacttagaagtgcttctagacaacataatttcgagaaataactcaatattgctaacttagtcattctctaaaagttataggataacttatgtacataagtttactcccactctttcaaattataaggcatattgacttttctaaaatgaacttactatatatctaggcacaactatatatatacacacatagcaaaatcaatatatgtagacattttataatttggaatagagggagacataagttacacaatacaacttatatacataagttacacaacttatacactagtgtatatagaaagttatgtagttattatacacaaacataagttatacaatacaacttagcagaataggttagcagcataacttagcagaataacttagcaatataacatatatgttataagttaatatacataaattgctactagaaaaataaaaatcttcaaaacatatagaagtggggtctagttttgttcgcctcgtcacgttgaacacaccggtatagacggaattaaaaatagatacatcattcaaaagttatagtaatttgaaataaatattttgttttttttaagaggaggtaaaaagaaaaggaaaagggaagtgggggggggggggggggaggagggtgggcggccgacatgcatgtcggatcgttcgctggattgaaaactactgaacaaccatgagaatggaattgagcaaaccggtatacttcgacttagaacaaactagaatcctttagacttgaggtatttcataaaggagtaatggtaaaactatggtgaatgaatattgaaatattcccctgtccatatataaatagtgaggctaggcatatgcaaacagtagtatatgtttttgagtaaaatatacaaactattacttttttttgtagtactatatactataaatgttgcaatatccaaattaaactagctataaataaagctaagaatgttagctggagcatctctaagagattagccaaatcattttctaaaggtatatttggctattgttgaagaaaaaacgtctctaaaacagactctttaaatgactcttcaaatttagtagctcttcatcccaccttatttgctctctacttttggataacctacctcactagctatccttttatagagtttgttggagtactctaatatctttttgtcaaagctattttagagagtagctaaatcagtaaatttggctagtctttttggctaatcttttggtgatcctcttactgatgtgttgttaaagctaattttggacactgatgacacacatccagttgactattgaaatgagaagctagtattattttacaacttctggtgcatagtaatagtaattgggaacattcctgaactaactgaaataagtatatacgtttgcaatggcaggagtagctttttcagagttgtgtgaggtacaccgt

SEQ ID NO: 5106 - DNA, 1332 bp, Sorghum bicolor
  Intron number 1 from transcript Sb03g036750.1 (locus Sb03g 036750) derived from phytozome v7.0 (chr-ID chromosome_3; pos 64838023 to 64839354 reverse strand)
tggccaaccacgaggaggattcaagtcgtgaccaggttcgtttgcttgcttaatccatactagcatgtcgctccctaccttttttttgtgtttgtgtgtttgtgtatgtatatgatttattactagtagtatatataatacctctgctaattattgggcactgaggaggcttttagtttgttcacgtgtgcgttagttaaaatgagctaaaaagtgtatttatggctggaagacacttccatttctgtttctgccccaagtcatacctactaggatttgtagttattatcagtttttcagtcatttatgctgacaatcagcatgtaccaactctgttgtttgaactagttgctctattggtacttcttctgatcaagtacaattaggtttgtcctaagtcaaactcttttacctttaactatccatttctaaaatttaacattgattgataacacagttcacattattactaggttcaatatgaaaaatactatcataatatatagctcttcccatttaagacaacatattgctattgctatacaaagtgtcatactggagaccgttctgatcgaagggactagtgtattgttttagtagttagtggtgcttgttcagaactaataagtttgcaaatacgctgggatgattcgggtattatcgtacaagccaagctgcagatatggaaccatgcagcttccacaaatagtcagattggttcctgcttttaattcttgggatttgaaagtcatgtttggtcaagacaaggacattatgacactgtatgtatattctacatccttttattccctcaattggtatgctattacagtaaattgttataatttcaagttgaggacagaaggtttactcatgaaaattgaacttcgatttcaccatggtccctatagtatgtaagatagactccaacgctgagcaaaaagttggttatgaattgtgacttcaatacttcacattagagttccattttgaaaaatatattattgtaaaataaaaatattctccatattttagttcttcagtctctgaaccatgcaaaaatgtatgtaagctttcacaactttctgtttgtttgtacacatcattctttatgcatgttttgagttatattgaaattgaccaccatctatatgcgagtataaaacaaatagcattgtctatatgtttgttacttacagtcatgtaaggtgtatatacatcagatcaatgatgaatgatgcacctaaggcttgttgattttcactttttgagtattaatccatgtaaacaatgagctaaaacccttattatctgtcatgatttgcaggtaca

SEQ ID NO: 5107 - DNA, 2249 bp, Sorghum bicolor
  Intron number 6 from transcript Sb03g013900.1 (locus Sb03g 013900) derived from phytozome v7.0 (chr-ID chromosome_3; pos 18478681 to 18480929 reverse strand)
gcaacctacgggccttgctatcaacattacaatatgttagtatcctgtttccattatagatatatgatttcgtgtccctttttccatggaaatacgctttctgattgcagtcgctgcatggttgatgggatcttgcctaacttaaatggggtgccagtgctgaactgctgattagggagaacttacacctttagtgtttggctggggcttgaggagtttgtcatctccttgcccttgcaccaagtgacaattgatttgttagttgaggttatttttctagtggaaagcatgtataagtgttgtgtggtgtttgtatggttctaaatccttttatttctcttaatataatgataccctgctctcctgtgcgtttgagaaaaaaggctccttgccatatctgttgttaagttccagtaccttttttttgtgtaataaaggcaattatggaaaacattgttattgtcagtttaatcttttgggcacatggaatttgaggtaatgtatactaggagatagttaatatatgcttttagtagtagactcataatagggttgaccatatccccccaagtgttcagatgatcattgcaactcaggccagtggcctggtgaatatgatcctgggtgtcaaatgtagggatggcagtggaccgggtaaggtgcgggttgagtagatacctgcccgcgataaattacctatcaggtaaaatttcatacccgcggataagattttgtacccgtcaggtacgatacctgctggtatccacacccgcaagcttgattgtcactagaattggaattctttgtatttttaacactaatgggtgaagtgacatactcacacccatacccgtgggtagagtcttatacccgaatctgtacccgtgggttgattttgtactgacgcccacacccatcggtacgataccagcgggtaggattgccatctctacaaatgcctttgcgaaacttttcaaattggttttgaacgtccctagctcatactccctccattttaagatataatggagtgaagccttttattttgcatatgcgaaggtgaaaatctggaagagagacagaaggctgtagactatgctaccatactaatagacatgtccaatagctcaaatttctctggtgtctagcttggcagggggtaataagtgtgcagcttggttactcctagaattaagcactaccggccttgcccctttttaaaactggatgcccctttagatagcatcatccatgattgaactctgctgaaacactttgtgtttgtgcctggtgagaatttccacagtaaaagggtatactgaaattttaaataaaatgcaagtgtggccatgctgttgctaggttatatatacatctcttggttagtacgagaattagtctgcataagagcatctccaagagattagccaaaaagactagccaaatttactgatttagctactttctaaaataaatttgacaaaaaaatattagagtactccaacagactctgtagaggatggctagtgaggtaggctatccaaaagtagagagcgaataaagtgggatggagaggtactaaatttgaagagtcgtttacagagtctgttggaaatgtttttccttcaacaatagctaaatttatctttagaaaatgctttggctaatctcttggagacgctctaagaatgtattgtccgtctagtatttcctatcccctgcatgagaattagtatgagaattatgtctatttgacccaagcattatatattattctgaagcatggaagactatcaatggcttcactatctcctagtgaatgaagaacaccatttgatgtctagatgtttcattttctcataaaaaaaattatgctgtaatttaaggaaattcttacatggggtgaatgatatgctgtgcatgactaaaattagtataatgtaggataaattaatcattgtgcctacagtatagaaaatagctggttaagtaagtctaataaacaaagtgatgatatgatgttcagtttgagggtaatttcaaaataattgtctcacgtgcaggatgttgtttccgtttcaaccttttgtattacacattgtgctataaaatctctttttattttatattttgggaagatgcttaagtatggctattgagtgctagaagattagattttctagccttttgttcttctccaattgctatactaatgcttgttgtttaattgtgcagattctttggcctga

SEQ ID NO: 5108 - DNA, 2026 bp, Sorghum bicolor
  Intron number 1 from transcript Sb09g005900.1 (locus Sb09g 005900) derived from phytozome v7.0 (chr-ID chromosome_9; pos 8274634 to 8276659 reverse strand)
tcttcgcccgccgagtgagtcccctcgactcttacagcggtttcatctgattccgagcttcgatctcagattccgacgcgtagatgtcgtatggtaggctccgtcccgtgattcgggttggggattgctctagaggaatccgagctgaactgttcccagtaatcgatggattctctcatttttttaaatcagaatagtgtgggcttatcctgtggttgcgacagtagagggctgtggttgcggattcgtggcgcctctttggtaccttagggttcggcttcgaaattggttgcggatttttagctgataggttcatgttcatcggtgctatagtgatattatctgtatgttgctggactggtacagccttatatacatatcatccggatttgtactgcgagtttggactgtcacaagatgaagggtagttatcactcatgataaatagtctttcaacttagaggcgaagttgattcaccacttgcctttattcctgtgaaaattctagcacctgaattggttgtttacaggctccattttcattcaagtttgaattaacaatatattttccatgcacttcagactttgtgatcttgggctggaaggttatctggacgtgtcagtgatgacaatgttaatatgtagttcttacagatgatttttatatcatttagttccatgattgtttgtgctgcatacttagtgtctttggcgaaaaatgattcctggttccttaacaagggtatttgaagcattattcacgattagtttatttcaaaaggaagaactggagtgtgcatcacctgatgcatagaggtattctataaattactaataatattatgccactttgctgttgtcgaaatctacaaacgccactcgtttttttctttcctcttttgcttttgctggggcatcattgacagtacaatatatcatgaagacacccctttgatgttctttgattatagggcccttgatactggtgattactctgccaatcaacaaaataatttgattgaagatgtttttgtcggttgttaaaatccgtagatctggtcatctgaaactgtcaccatttttgtaccagctgaaatgatcgaaccagtttggcctgtttttctgaccctgtgacctttagctctgctaaattattcctatttgaatttgttaattgaggcatgaggttctgatatgggtttttgagccagtttatgaactcatgatttttgtactcatcttctatcctctatagtgtccactgtccattcaccaaacacatcaattgagcaggcaatcacctccattccgcttcaattgccaatttgactattagcagtctccattgtgcaccctttgatccttacctgttctaattatatgctggccaaaataattaaactattctgtgaagcatcaactaaaatcatttgtatgtgaaaaatatgaataaatgaaaattagtggccaaagttataaaatgttggctgttggcacatgcattcaaatgcaacaagcaaaagagaagagacaaaacatcagagtgatatatgcagaatcaaccacaaatctataatgcaattgagagggagtagcttatgccagtaactttagccttgccattgtgcttatgcttctaattgcaaatttcgtatcttgattgtatattacctaaactaatagagcaaggtattgtccattggtttactactactgctcttatttctgctcatgcattagttgtaaattattaccccctctgtttcaaattataagacgttttggattctctagatacatgacttttgctatgcacttagatatacactatgtctaggtacattgcttattttgctatgtatctagaaaagccaaggtataatctggaacggatggagtactaatttctggagactttttactaagaaacaagtacaaagtccttttgctttgaagctgctttggaatgtgtgctcacttgccttcttcaggtactacaaatcacttccacctataagcaaggcat

SEQ ID NO: 5109 - DNA, 803 bp, Sorghum bicolor
  Intron number 4 from transcript Sb10g003750.1 (locus Sb10g 003750) derived from phytozome v7.0 (chr-ID chromosome_10; pos 3255910 to 3256712)
tatagttgttatttctactggagttctgttgacaggtacaatattcttctaaaatttaactaccgaatattcttctaggaattatagttgttatttccagtttcatttgtagctactgaatatgacgaccagcctttcactacattctcttgggagcatttcttttcattttcttttactcttctttttctttgggctgcatgtgcttctggttgtgtttggccctgctatggtagttttcttgtatttgttctctccttagtataatgatgggctgctctcctgcctgtttgagaaaaaaagtaaattctcttggacaagcatgtcagaataagagcatgtgatatatttgaccatcttacttgattcaagttgacttcagcaacttgtaatgtcaacaatctttgtttttaccagaaggccaaaatgtaattgatgttcttcataaaaataataaaagtacatgtcaaattattgttagcattcataattaaatggatatctgggagttctggatgttaatcagtttcatcactctgaagtagtttttcagaggatgtgttgttaaaaatagtcagctccacatcatgttgaattcaccaaagttcaatacactataatttgcagtaaacttgaatttagtaactgaatattttccttatcttagtcaccatgttaactgtaacatgctgatgtgtagttcttgtatgagtactaaaaagactattggatttatcttttctgatttagcaatattattttcatcagtttccaaggagacagagtttgacttctggggcttc

SEQ ID NO: 5110 - DNA, 5209 bp, Sorghum bicolor
  Intron number 2 from transcript Sb09g008793.1 (locus Sb09g 008793) derived from phytozome v7.0 (chr-ID chromosome_9; pos 17493447 to 17498655)
ataaaggtaatttatcctccattatatgctatatttctactatgatgttttttggagaaaaaattttccgagctttatttagtgcccccagcgcagtcggcactgagaaacggcgcccgtacaaatgtgttctcaactgcctgtatagtatgtctgtgtactagtgcataaagcatacctagaacatttaggcatgcccccgacatagcttaagctgatcgcattacagatttgtcattgcaactcaaacatacagcttcaaccattgaataagtcacaacggtggagctccctacaaaacgcgagtccatctatctctcccccactgaatcatgcgtcatccctggggccttctagtcgattcttagggtttgatccatgtgcttctccagatgttgcacaaacgattccttccaattttccgacatcagcttgaagtaacattatcatccgtcttcttagcatcctggcaatgcatcacaataaacttttctccccggtggtctcgcccagaaaaacacattttgttccatagtatccagaacaccagagtactgaagaaataatagtattaaagtttgcatgcttcttattcacaatccaacgagaaaataagctcaaaatcacagccatcatttagatgtaacacataaaaaatattagtctctattagctacatagcaatcaaagaacaaatgaacatctctcttgttttctttatagaacaaacaagactaatccatgacctctctacgctttgcaaattatctattgatagcaacctgttattagcttacagccacaaaaagatcagcactcttggagcttccaaaaagcatgcacatagacaagcataataccttgatgattaatcacagcattagggacttgcccaaaagtttatcattggagctaaagctgaagataatctgatcctgttgattcaggagactgtcacacccaatttttaaagataaattaaattcaatatcttatgcgcgtccagagatcaatcacagataagcgaacaaattataagaagtatcatcacaactacaaaataattcacagagtctttacacaaatatagcggaaatataaagataactctctcatggaagctccatatcacagatacatagaattcctcacggaagtagttgtaatagtcattagccgtgttatttgttacccatctatgattttatccaaataatgaaataaacaataataagtacatcttgtaaataacaagtgtaacatggggttcatgaggctcaaaaggcaagacactagtttactgcatgcagcttttagttatcacaatttgagcacctaatttagttatcacgtggggttcatgaggctcataatttggtaaagtgagtaaagaatagcataaacaacataataacaataataatagtcattagtgatcatctattccataagggttccatggccgctcgtgaccatgagcacggttcttatatcatttttacactctacagaggttatattctttcactgtgagtcgtgattcccatattcctgtggtagctacaccccaaagcacatccaaggtgagcggacagggttcactatgaagctttttcaaggttgtctaacaagttggggccactagtttgccaattagcaaacatatgtacagctccccttccaaatggcacaatgacacgtggcctatacacataggacagaggctgcactattcctgattcgtcaagcccctattgtgtcatcaaggtaaccactaacaagctataaaaggtccacttatataactaatgccggagccatgtagccctcatagttatactgtaagtcctggatgttcacttacaaataggtccttatcgagagaacctaagcaccatataaatagcccaatgctctagccctctttaccaaaattgcttaaaagtcatattttattgtttattgcatattccaatagtcaaattacaagatcattgtctaagtgaagcgctagcaatagctaaccaatgtaaaatctgtaagtgacaaggtataagatcaagattacaaaatccttaacaagatgacacatgcaatatgaattaactgtactaaagttattaggaaaatatgaatagtcccatgctatacattccttgatcactctgctcttgttgatcctatttgtagatgaactcttgatcacacgcaaattgctcaccgtctatagtcggtcatcacatcaacaataatcatctagagacaatcatagaaaggaaacaagtctataattagaacagcacaccaaaaatataaaatcaagatgaaaagtttgtaaaatgaaactacgtctcactatgatcacacaagcatgaagatcataaaaatggaactataacgaagaagttatgacttaaacaaaatttactatagtaaaataatagattaaatctaagctcaaaatttaaaagttgtaaacatgtataacaatagtattatgatgtagattacgtaaatacgaatataacacaatttaaatgggtcaaatcgaagttaaaatgatgttttatgaccaaaacaaatctggtgggaaaactttgaataaagaaagagtattttgaatctaaataactaaactttaatgtccagaaaaagaaaatgtatttttaaaacacagcaaggactacgggttctatactcaaaaagagtaggggctttttagcaaaaagggtggccgaaggagtattggccgcttgtggccattggatcgagattagatggtgcaaattagacggggagggggcatgggtggccgacgatgagcacagggcagcaccatggtcgaagaatcagtgacctcactaaagttcatcgatacggtgaaccacaacatcgctagccaaaaataaaaacatggggaggtagaggcagcacgcgcaaactcatctaggacctattcgaggtcggggaaagctcgatgatgaatgtcggctcgggatggcagcagcagagttcctgcgagacttcaccgaggtaaagtgagtgaaccagagcaggaaaaaggggaagaagaggctcagtgacttcatggggacgatgcgaagctcgatagagagcttacggaggcaaagagatgacagaatcgatgaatcaagctcacggcctcggttgctagggttttgatgggttgcgagcccaggtggagatggcgctacgctagggttggtatagggatgcaatgtcagacttgaggctttcttatataggggtgtatgtgtggaaggcacgacatacgcgagaaatcacatggtggctggtgtcctgctcgggacagagtatagtccgaaattggctcaaggtaggagatggggacagggtctcaccagtgaggtcagggtggcaacgacacagggcacggggcccagatgtcagccaaggatatacggggaccatggccatcttgttgctgggcgccccatgagcgatggagaggatgagcgagcaggccagcttgggatggagctcgagctgggcctgcggtgagaggagagcaaggcagtccacgggaggagcggggctaggccgttcgggccataagcgagggagggtgtgaagaaaagaataaattttattttctgctttttatttgtatttgaacacaaattcaaatagatttttgaaatccttttgagttttgaatcaaaccacatagtacaaaattaatatgcagcagcatggatgcacatacacgtagctaggccttatagttgattttaaattattaaaaattattacttctctaaattcagtgctcacaaaaatacatagataaatcaaattctcctagtttgaaaacatgcaaattttagggtgttatcaagacttatactctcaaccacctgcgaaagctcataccataaatgcatgtctttctaagacagaccttctgaaagaaagtttagaaacctccccatcccaaacctcactaacgaatttaccttatgttcattggtcacatacaggatcctagtcacataccaaggccaaaattgagaggctaagctagatttatcaaaccagtgacccccctagaaatgaatcctcctaccattaccaaccttccttgtaatacccatcaaagcagccattgaagtccagaaaaccgattttcaaaaaggtgaactaaaagaatttgggcaacaaaacatattaggaatattcatcatgtatttattgcccacaatttttgtcgaaatagaactacagtttaaatggtatctaaaaatcaagtcctcaaaagtaaaaggtttagacttcttcgatcagggatcccaaagcccccctaccactttgtttggagatactagctgctaattggacaaatgatacttaagtttatcatattcgaacagaaatgatatctgagagttaatcatcttcagatctaggaaacttaatgatagacaagaagtaaatgggaatgctagctaaacaagccttaaggagggtcaacctacctgcataagacagtaacctgcccttcgaaccagcaattcttctaatcaccttatcaaccacaggttgcaaatcttctcttttcaattatgagaagtgtaagttgacacctaaatgttttatgggaaaactccaatctcatgcagcaaaagattttagcaaactcatttgccctatcctattcaaagccaattactaagcaaatcacttttgtcataattgtttttcataccagtcatgctaataaaaaataagtaaccatttcagattctttgtcctttaaatgtcatcatttgaaaactgtgaagtgtcatcagcatacttgaaactaattatatcaccatcgactacttgaggtaacgaaccagagatgtgcttatgtctagctccttagcgtttagcgtttgatgattagcctcctgaggttactaattgccaattaaatgcagtcaatagtattatcaaatcatgggcctatatggtccatatttgtagaggcttatcaatgtagccaatataagaatcctagcaaatatagaaatatgtgataattatcaaccaaatattattttcagcatttaagcatatttaataaaaataattatttatatgtaataatggaactttggaaattagttttttacttgtgcacataatggcactccacttactgtttttcttctcactgtaggtc

SEQ ID NO: 5111 - DNA, 645 bp, Sorghum bicolor
  Intron number 7 from transcript Sb10g004010.1 (locus Sb10g 004010) derived from phytozome v7.0 (chr-ID chromosome_10; pos 3543161 to 3543805)
tgcccagtgagactggtactacacattgcaatctgatggtcctaacttattattatgtcttcagtagttgcatttatgttattttagaccaatggtcaacagctcaactttatcttttattgaaactgaatgatagtacagcgatgttttgatgagacaattccctaacaaattagcaatgcatcattgcaattgtcaaaacccaagcatatattcatgcatcaatacggagacatggcatgtgcattcctgatcaaaatgagtgtgagtttgaaccagcataacattcagcaaaagtacagactagtggaatgaagctgctcatcaaccacttaatgcataagcagcattctaactgtggctggtgtagcagttgaagtagcaacttgtggttttgtgcatgatttactgcactaaaacgttagggcaaatctgaaaaaaggtgtctcgaagaaataacttaacattagaccaggaaggcgatatgtatgggaaaaaagtgactcgaagaaataattacacaaataaatcttatgtttattctgggtatatggttctccatattattttgataaagttttgacaactcaaagatgataaatgaggatctaataatctctactgttcacagactctcactcatcc

SEQ ID NO: 5112 - DNA, 1736 bp, Sorghum bicolor
  Intron number 1 from transcript Sb01g002880.1 (locus Sb01g 002880) derived from phytozome v7.0 (chr-ID chromosome_1; pos 2360940 to 2362675)
tctaccgcggcctttcgtggcactccgagcaatccgtaagcccaacccccgtccgctctcccccctccccccagccccggtgatttgggatctctcagctccccgctcactgattcgctgcctgattgtgctggattggaccacgccctcgcaattaccgatggatgatgcgcggcgcggcggcgtgagcgctgtcccgtggtttttgttgttgttgcctcgcttggttaggtccatgcttggcttggaccatttaacactactgcgccagttcgtcttctggacggacgccaagcgactgtgttcacgggcgcatccgatcatttttgcatagtacatgacattcagggatcccattggagtattggacaaacgtgtttgctagcttgttaaaacgtattccatttcccaaattaatttacttagctttttgctctcggtatcaaggttaggtttcgttttttttttttttggtgtacgagcaaactgtggtagtggagctgcttaggatgaatcatgaatatctttgttgttcagattagatgttttgcgtaggcatcaagattagattagattacttctcaatgttcctcgtaatgtcagaaccaagtatctgctttgcttagttacccatttgctgcctattttgaagaattcgaccatggccttgcagattaggaatgaaaaggtggctttgtgagtacattcgcttgattgtttgttgtcaagtgtgcttcatgtcatggttgtcagataaaacctgtctgctttgtttcatgttatgaaaggatggaatgcacctgtattgttgtgtacctctgtattgtagctttgcaagctttaatatgatgatctagcaatctcattgggcgtacatatttgccatctgttgcatgtacaagcaattggtgttacaaattatcctatttctcaaattaagttctttagcatttctttttccagtatcacagttattgagtgcctggtgcaaactgcagtaatgggattatgaaactacctgggatgaacatccttgttgtttagataggatgtttgtatgctgcagtctaaatagaaggttaaattacttatgttcttcatgctataactaatgtctcgtttggtttggatgctcacgtttggttcagtgttggccgttgggacttgggaccttcccaatcctctttggccctgaaatctgaatagcatggcttattttaggctacaatttgtcttgatcttttcctctaggtcctgccagaactcggtgcacctttaattgaagtgtcaccaaattctggggatcatatgcttgcatttctgtgtagcttagaaaaagacttctgtataactaggtttgcagtttgcgatgagtggtgtttgtatcggtgaacccctgtgtgattgaatgcagaattcatgttataggctggatgtgatttgccgatttcagctttaaatgagattgcttcttaacaaaataaacacctagactcactggtcctacataaataatatgcttttatttaagagcacgggatctgagttatagttttgggctaccttagtcaaggcctgtgttttctaaaatatccttaactctagcatcttgtgtttcttcttatttcaaagatgttttttttactgtagtttactgtattctttgtatgcatatgcttctgagccgtgtgttaacttttgctgtcgtgcattgcagaagctagaaaaggcgaaaa

SEQ ID NO: 5113 - DNA, 2878 bp, Sorghum bicolor
  Intron number 1 from transcript Sb01g048200.1 (locus Sb01g 048200) derived from phytozome v7.0 (chr-ID chromosome_1; pos 71248604 to 71251481 reverse strand)
aaaggtaagaaagctcgggaatcacgtatgtgcattatttagattttatttcagatcagttgactaggcacatgcattcagcgacgaatgtctttgatcagggtgtggggttaagataataagcgtactaaacgtgttctaaattgtaaaaagaagagataaccatgtgctgataacacttgcatagtacatactagcttgcaataaaacaaatcagtgttaccaagtaaccaagatgtatctttgtagatctcgatgctggtgtccaacttcatgtatttaataacacaagtacttctgtacttgtactaacaatcatatgttccgacatgcaagatgtctatgagattagcctctattttaagacactacagttactgctacagtttgtttttatatcagcaatctaattgcaaattgatgctcaccaatatgtcagtaatctgtgttgtctgtgctcaactgtgattgcatattggtgtcacctgcaactggaagccttttaaacagtgtcagtttttcaagcctagttcaggaattggctcccaacaattttcagtagagtactagcacacaatatgctcaggtcagaaagtaatggaatcgcctggcatcagtatgctcattttgttccggaccgctaaatatgtactcaggtggtccccgtctcactaatacagtcagtttatgtagaatgaatttcagagaatgtacccatagcatctaatgtcacctcaagaaaagagcgtgccacattttctatgttattgattatgcttaaccacagaattcaattttgctgtttgcccttccgaaagtagaagcgtaagcgtaagcagacagcaagtgttgacactgattcttgttgttaacagcaagcttaactaaatgtttatacattgtggattgactgattgactgccaccacactagttctaagatttcaagtgttgacttaggatatagggacctcatgtcagtaagatggattagctgtgctcaactgtgatcgagtaactcacttagagtaatagcacacaatatgctcaggtcagaaagtaatggaattgctgccatcagtatgctcattttgttctagaccgcaaaatatgtagtactcaggtggccatctcacaaatacagtcaatatatgttagaatgagtttcagataatgtacccatagcgtctaatactctaatgtcacctatcattgcctagcaatgctcaggcaaagagcatgcctcatttttatgctattgattatgcttaattacagacttcagtttttctggttaactaccttgatctagaatgactactcatcaggatttgccctccggaaaacgtagaagtataagaataggcagacaacaagttaaactgaaatgtttatactgtgcattgactgtcacccacactacttgtaagattttaagtgttgactgtgttctgtcctgaacatgcattagattgagcatgtatgagatttgcttctacttccacctcatttgtttcatgtcagcaatctgatgcagtttgatgttctccattatgtcagtagctggattatctgtgctcaactgtgatcgcaactcacaatttgtgccccctggaagctttttgcacagtcccaccctttaagcatagttcaggaatggattccaaccatttcatagagcctccgtcccaaaatgagagtcgttctagcagctggagcgattaccaaggaacgaacaaatgaccatggatacccctatactgcaatcaagtacgtgaccaaaagctgctgccgattggacctgagtggtgggtaccgagcggatgtgtatgagtagagggcaaaagctgctacccctgcattggctagttgctgccccggcactagctaggctgctgcgactgcaacgaagctaaaacgtcaagctttttggtacatcttttgaatgctaaaacgtctttaattttgggacagagggagtaggacacaacatgcacaactcagaaagtagcagaattgctgccttcagtgtttagacaacacagttccaatgtattttgcatgaatatcatggtatgctcattttgttccggatcgcaaatatttactgtactcaggtgaacacatctcacaaaatagagtaatagacaatcagtttataaacactgattaatgaatatcagaaggcttgatctgagttgatcacctgtttttcagccttagttggtttctgttgcttggtggttcaactgttctgttcttctttagctttttctcctccttgtaagctggtaactccagcaggtgtggtgtgtggctctaaagctgttcttacctttgctgttttctataaaagtagggtatcacctcgaaaaaaaaatagacaatgagtttatactgttagactaattaatatattttgatattgaacaagcgctcagggtttggctttctgaaaaagcagcataagtgggggcaaaaaggcacgtacaaaacagctgtattaactgaaatgttcatatgctctggattgactgtcaccctacactgggttgcagaggaagcagtgttgactctgttctgtcccgaacatgtattagaatgttcagaaagttgggtcatcaacacttaatgttactttctgttgattcagtagccaaaatatagtttcattttcatttttgaacctcaacgggaagtgtggcctgggtatcacaaacagttacagataagtagtggcctctggaaacatgaattctgtagtacaagttggtagatttcatgttactacatttagaacaggttggtcagtaccttatgaacatgcaactttgaacttcccagggtatttcaagaacacggaggcaacacagtcaaca

SEQ ID NO: 5114 - DNA, 328 bp, Sorghum bicolor
  Intron number 3 from transcript Sb01g005970.1 (locus Sb01g 005970) derived from phytozome v7.0 (chr-ID chromosome_1; pos 4994566 to 4994893 reverse strand)
tccttcctacgagtggtaatatatgcttattatcaacttactgctgatgtagatgattagtttcaattgatcatccagacaactgtgcataaataaggccttctacagtgtgctcatgtccttgttcaaatgctttccagaacttcaattacagctgtacccgttagtccctggcttgcatttgaacacctgtattcttggaatattttgctaatgtaaaatcaaaatctatgtaatgactgcttatagtatgcttggcatcagttgattttaaaatacgtttcgtagcactcatcattctcttaaccatttctctttgtaattacag

SEQ ID NO: 5115 - DNA, 2370 bp, Sorghum bicolor
  Intron number 3 from transcript Sb02g036880.1 (locus Sb02g 036880) derived from phytozome v7.0 (chr-ID chromosome_2; pos 71335682 to 71338051)
ctggccacaaggtacttcctcttaatcatacgaaattacatgtgctttgttcatgtgtctcaaacaaatgctgtgatgaaaggatgttgagaactgttacctattaattgtattattatgtggcggctgtggctgtgggcttttgtcactaactgcgtcgctggttttgctttggattgcactgagcgacaataaatgtggactgatctgacgtgctgtttgatggaattgttccctcatgtgatgcttttatgctttctttacgtaatattcttcctcttttaatttctatacatatttttatatcattttctactctttttcctccactgtacatgaagatttctgattttttttatgggacatgatttttttctatttcttctcaaggtgattttcaatattagtttggtagttttgtttgttttggtggggttatatttatttgattcaagattggactaaactcatttaaattttacaaaaagtgtacaattatcaaataataaattctataccccgttgcaacgcacgggcatgttttgctagtagaattttgaagagtcaaaacattaaggccatgtttagatccgatatttttttagattttgatactgtagcacttccgtttgtttgtggtaaatattgtctaatcatagaataactagggtcaaaagattcgtcttgtgatttacagtcaaactgtgtgattagtttttattttcatatatatgtaatggttcatgtatatgccgtaagatttgatgtgacagggaatcttaaaaactttttggatttcggggtgaactaaacaaggtctcagtttgatcaaaattataaaaaaaatataaagttttgaaacatcaaataaatatactataaaaatataattaataaaggacctaatcatacgtagttaatatcataaatattattatttatcatatgaatttgatcaaatttgatatgttttaactctcgaaaattttaaaaatggtttataatttgagatgaaaagagtacatgcgtacatgttgacttatacgttatacgcggtacgcgcgtcattgttgtcttaccttacatgctttcgttttccgagcgtgacgaagaatcaaacaacatgtactgtatcaagcagacagcacagatcgtacgcacggcatgattttccaccgcgcaagggggacaggcgcgaacacacggccggaaacacgatccgattgccgttaccgggcggctggtgccgtcctaagctagtacggagtactctagtctctctaaccattgttgttgattttgattaattatatttgattgtttgttttatttaaaatatttatacaaattctaaaatagataaattattgttaaaatatctaataatcaaataagttatattaaaatagatgatatttgtaaaaaggttataataaaatagataattaaataatatatctcaaaatcaacgacaacggtggttttgagaacgaacaaacaggcttaaactgcaagcataacgacgacgtactgtcctgtactgtcgttttcgtcgacacaggagagagagaagtcgatcgatggaactgtgtggtcgcctggtccatccccgacgagccgacgtggcgacgcgcttctccactccaaccagcggatgcgttggccggccgggacacgattgagtcagcagagacggcggccgcacgctaacgctagtccacctgcgacctcgccgatattctagcttagggctacgacggctaggacaaggagaagcacaagttggttttctcatatccgatgctacaaatcggcggccgttatccgtcgcttgggaattttatcctgcctgcccacttggatattcattcgaccttcaatttccttcgtttttcatactcatttcgttctaaaagaaccaatatttttactttaaccaacaatatttgatcgttcattttattcaagatttttataattctaaaataaataaatcataattaaaatatctttaataatcaaataaatcatattaaaatagacgatatttatataaaaagttataataagacaaatagtcaaataaaatatctcaaagttaataacaacgattttttttcaagacgtgagggagtatgattttcgctccggcgtcgtctaatcatgcgcctggagtggaccaactgatgccaggattaaaagtcgtttacagcgtgcttgactatttttggcccccctgctgctttgcctactctacacaccactgtaccgctcctactctacacaccactgtacggcgggcggaccgcaccgttgcgtacactacggtcaccagccacttttcacggcggcgaccggccggaccggcgg

SEQ ID NO: 5116 - DNA, 2273 bp, Sorghum bicolor
  Intron number 3 from transcript Sb02g009310.1 (locus Sb02g 009310) derived from phytozome v7.0 (chr-ID chromosome_2; pos 13339909 to 13342181)
caatccaggttacagtgacgttcttaattgaaaagcatgcatatggaacatatgccttattctccagagcacatgttttcaggaatggatagacatttactataactacctattattagttcattcgaacctaatttcaacacatatttgtagtagattttgttatactaacgtaatgaattcaccttccaaatataatccaatgttgttaaactataatgaatataacagcaattgtaacttcaaaatatcatcatcttacaacataaataacacaaaattaattgaatcaaagggcactagatacagttaaaaaatttcagaactgggtaacagtaatccagttttaacaagttttgtttttgttttttttgcaaaagaaggcagctcaattgatctgagtacatgcacattagtgtaataactatccgtgtgacaaaccgaaatgtttgaccaaatatataattctgagttgttgtatgatagtagagatattaatttgaagaattttcagctgttacttttagttagttgttggctacttcaaattgctttcagtattaattagccatacatctcaaggttactcttgaaaaagacagatggttcatgagtatctatctatatgatgattatacctaatatgttttttccctactggagactaggtctttgcctagtgccctaggcactcggcaaaggcctaattgcactcggcaaaaaaaaaatatcggcaaagttctctttgccgagtgccttttgttgggtactcggcaaagactctgtcgagtgccgccgcggcactcggcaaagaaaaggccccgtcatggcggttccgccgttaacggtgtctttgccgagtgcctcgggcacttggcaaagaaagtttttttctttttttgaaaaagtctttgcatgccgagtgcctccaacaagggactcagcaaaataaataattttttataaaaaattttttgccgagtgcctccagaaaggcacatgttttcaggaatggatagacatttactataactacctattattagttcatttgaacctaatttcaacacatatttgtagtaaaattttgttataataacgtaatgaagtcaccttccaatataatccaatgttgttaaactataatgaataaaagcaattgtaacttcgtttaaaatatcaatatgttttttgtgtcatcatcttacaagaaaataatacaaaacaaattgaatcaaagggcactaggtacagtttaaattttcagaactggataacagtaatccagttttaacatgtctttgtttttcttttttttggcaaaagaaggcagctcaattgatgtgagtatatatatccacattagtgtaataactatccgtgtgacaaaccaaaatgtttgaccaaatataattctaagttgctgtatgatagagagattaatttgaagaattttcagctgttagttagttgttggctacttcaaattactttcagtattaattagccatacatctcaaggttactctttaaaaagacagatggttcatgagtatctatccatatgatgattatacctaatatggttcatgagtattaatggcatctccttttccttttttggacaaaagaacaaagttgtatatggatttatctaaaccgtgagtgagaacttacaactatctatgttacgcgcacttactagttatttaggagtattttataacttccagagaagagaatgtgtcaaacaactagctagctaaaaggaggtagcgacgtttctcactcattttattaaacagagacaagcgcaccaaatgcaagacactatagagcaaaagaatgtgctgaaataatacagaatttttaagttgtctacacagtaggtttattcttgtacaattatcatgtgtcgattcttgattgaccgtacaatgacaatttgtgagtactgtgtaccttagcttgctaacctcggagatatcctcgaaataattttctaattaacagttttttccatcttcttacaagtacaaataattgttaaaaacttcttaaatgtaaaaactgtaggtacatttaaaaccatgagcatggaattcatatattgtttacacaaacttcataaatgtgtccatcttcatacatttcacacgcgtcacgtgtcttgtgtgcatatgaatgctatttttactccatgaacaaaggcagttgcccattatattgaagtacattttacatatgaaatgtatggattctgcagttctttg

SEQ ID NO: 5117 - DNA, 6595 bp, Sorghum bicolor
  Intron number 1 from transcript Sb04g032650.1 (locus Sb04g 032650) derived from phytozome v7.0 (chr-ID chromosome_4; pos 62669899 to 62676493 reverse strand)
cccaacagcccgacgacacccacgccatcgtcgtcgtcgaacggctcgtgccccagggatgcgttgaagctgggcgtgtgcgccaatgtgctgggcctgatcaaggctcaggtcggcgtgccgcccgcggagccatgctgcccgctgctggcggggctcgtcgacctggaggccgccgtctgtctctgcaccgccatcaaggccaacgtcctcggcatcaacctcaacgtgccactcgatctcagcctcatcctcaactactgcggcaagaccgtgcccaccggcttcatgtgctgatgagcgcctggatctcagcgccttgagacatcttgtcttttaatttcagctcggttttaatgatgcgttgttatttgattgcttttccacgtagtatgatgtacgactagtcacatacatgcatgcacgcatggccggccgtgctgtcaaattgtatttttttcatttgttgaaaaaaagccggcgatcacttgtatgccggtgctaagttccaatcaagtttggtttgcgatttatttcacagtttcgcatgcatgttctggttatattctagtcgtacttgagcatatgaaaacgtactgtctaccacgtacttattctcttgagtgtcactgagaaggaatgtgtgttggtaagctttcttgaatctgacaaattatgtaaaataaatattatcaatatttacatcttcacgtagtttataataaaaatatattcaccgatctatctaatgatactaattttacaccataaatactaatatttctgtatatatatttagtcaaaatttaaaatgtttaacttctcagaaggtgagaatgatactatttgtcagacggtggtgcggggtgtcggacaaaaatcagacggtggcgcagtgcatgcggccactagcagcggtgcgcgatccacacttcctccagcgcagcgtttggggcaatcggcgatggcacgcaggccctctgccggtagcacgcggctcccttcctctagtgagcgtggatccgacgagcggatccagcgacaatggcagcacgtgaatgggctcggcgggccttgtggataggcttggagggcctcatcgatgcgcatgccatttcttattttgttaacacagatgagcaagtgtccgcctgcataaatcttgatttatactggtgttgaaggagaggcagacgtactggctgcccgactccaaaaaccaattatggtcacctaggaaaattgctattgtggtggtgttaaccgataaaacatctaaagctatttttttagaagctactgctttcacagtataattttcacaccttgaaccctacttcttgctttcagttattccaacttccaaatgggtggaaatatagcaacatttcataatcatttcaagagagattagattggataggtatgaggggctcatcctccttatcttttgcatttagcaatttcttttaaactttaatagctacaaacttataggagaggctttacatttccaatggcagtaagaggggctcgacgccgctcgactacgtgctagatccacccctaataggttttgtagttgctttaaccaaacaacttataatttttctagagcgcatagctcacatgagctttttcatagttatctggtgacagttgaactatacagacccggagttaagtcgtctgcgaactaagagccactcaactgcctcctctcttcctcatccatgcatgagccactaatgcatcactcttccgtccccatggatgatgcacaccgcttcgccgcctctgtccctcagccatgcttgtcttgctttgccacctgtgtattttctccatgtgcgttatacatgggcggatccatataggatctactgggtgcggccacacccagacaaaaatacaaaatatgctatactttgcatgtttctatggtattcgcaccccctgaatccaaacatctgcacccacaactctgctgagtcgatcgagagaggccacaacagcccacaactcctcaacacatagcccaatatcagccaggcccctgtccgcatggaatcatcgacaactcggacgccacttcaactcaggcaaaactgtcacacccatattttaagaacaaaataggatgcataaaagactcatatatgtcccagaaacagtcgcacacataagtagacaaatctcaaaagtaccattgcagtgtttattacatagcggaactcacatagtctcatacaaaaatgatagcataaagtaaacaacgctctcgacggaagctccacacagggacactgttgactggttgactccaaacctagtactcataacggtaatcctcattccaagcatcatcattaacataacctaaggtgttgggaaattgcaagagtgagcacatatcgtactcaacaagtataaccaggggttcatgaggctcaaatagctgacactggtttgactgcatttagcttttaatagtggataacatgtttaatcattggatagcaaatatcaaggtagcataaataatccattaatcacatgatcaagtgtaagcataattaatctcatagcataaacgataatcaaatggacataacaacttaataagctcatcgtcggcgcagcaagaacctccaaggctgctcataaccgtgagcacggctagtataccagttttacactctgcagagtttgtacatctttacccatgagtcatgatttaccctttcgcccgaggtagctaatctcttaacccccttcctagggaggtcggcagggatcactatgaagcctttcaaaagttcgtctaacatgttagggccgcaaggtttcctttgcgcgcagatatagatacccttttccgaatggcacaatgacgcgcagcctatacacatagggacaggggctcgcactatacccaaaacggttcagcccctccgccctttcgggtaacctctaacaagctagaaaagtcttcatactgagctaaagccagagccattatagccctcatggttgcactgttgtcccggtgatcacttacagacaagatctcatatagttatttgtcatcttttaacgttcattgcatagctattaattatcttacaagatcatagattatatcaagcactagcacatctacaccaaatgcatatcaagtaggtaacaaggaatacaggtaacaaacatctatgattttgctaaggtcgacaaggtgatagcatgcatatgatatatatgtgtagttataagtgaataggtaacaaggatgatcccaagttatacttgccttgctcaaagctcttctgagcttgctggtcttcaaaagcttggtcttgatcaccaacgtacggctcaccgtctattcccaatcatcaatcaacaacacgcaatccaatgtagacaatcatacacgaagcaaacaagctattattagaacaatacaccaaacagtagtaaaacaaatataaaagcttatcaaaatattctacgcagcgctatgatcacataaacgtaaagttcacgaaaatcggaattaaaacgtgaaagatatgaattttctaagatttcctatagagaaataattaattaaatagtaccaggaaattaaaaggttccaaaacagtaaactaacatttctaacatgtagagcatgtaattacgaatctaacggaatttgaatggacaaaaacggagttaatatgaatattttataagcaaaacaaatccagtggcattctgtaattaactgaaataactgaaaacgtattttagattcagccgaccagaatacgctttctgaaaggaaacgtaaacttgaaatacgtaaaggatgacgagttgaatagcaaaaactccagaggctctttaacaatttttcctggcgaaggggtatgttttaatctgggcccttgatcttcagatggacggtccccaggccaccagggaggggccaggcgacggccggccgtctgcctcctctctggtgcggtggtcgccatggacagggaggtcgagctcgccggcgtccgcggacttctcgtttccgagcaccgtttcaagaaagaaaaacaccgggacgcggagaagcttcacgcgaactcacctagacgctcggttcgcgctgattggaaggggatagtgctcgtcacggtgaaggatgtgcgcggctgtcggcgagatccaattcgcgtggtttagggcggctagggctcggtttcgcgattaggatgcagatgagaactcgccgcggtgcgcaggggcttaaaagggcgcagtttagccaaattggcaaggaaatcccgcttccccggattcggttcggcgctggagagtctcccggccgaaaccggctcgttgacgctgggaagaaggagataggcgctgacgcgtgggcccgtgtcgtcagccgcagaaaggagggagagggagggaagtggggcgcgcctgctcgccctgggccgtaagctgggccgcgggttggggggagaaagccaggcgctggctggccgccaggccgacagggagggcttccccctttctcttttttttcaatttcttttatgttttcttttccaaaaccttttccaaatagcattttgaaagcacaaacaataaaataaaaacaggaacaacacacaaaaaatactatgatccagcatgaatgcaagattcaagtttctaaacttataataaattttaattttgacaaaaatattttatttactagattaaatgcccacaaaaattgcttaaataattctcattaaatcctattaattcaaaaacaaatttttgggtgttacaaaaactgccgacgcatcgcctccccttggcgacagcgtgaactccggtggatggtgacctactaccactggtcgtcgaccatggccgattggccatgggcattgttgtgctctgtccaagcttgtagccttagggtcaagggcaccaagagcacatcatagttcgccccgttgccctggctatgatcttcaatattatgttcatcattcaaaagtcaaagtaagtaacttccaaggttctctattcttccaatttcggtcttatgagcatccaaattgtctttcattttgtggttctttccttcttactagtttgtccaaattctaggactagacttttttctttctctaatgtttgataattgatatttatgaaaaagatgaagcaaataaattggtttctgttgcttgattgctcagcccactttccatccaaagagatccatttcgtgattttaatatgggtcaatcgatggagctagaaaatgatgtagaattaatatataaaaagtaatgcatatattagtttgggcgaggcaccaaaattggtataagcaccatccctaaaagacgcggaagaaaaactacaagcatgaccgcaacttcacagctcttttatatattatgagacattcattctaataatatattggatcaccgtgcaaaagaaaaaaatatttttttagcaaactcctattatggtctaaaaaacttgtgatcggtggcaagtggcaacacaccacgccatagaaaaataaacatgtgatcggttgctaggtgcattatttatgatcacaccccctccaaatttctctagatccgccactggcgttattcttctgccatctcaccatcggttcttggctagtggccgtcaagtcactgctgatatgagatgcaaaccgacaatgatagttgtcatcactgccggttctgtcacaccggtacccccaagcattttttggttgtcagggcctagaaacggaagtaaaggggcatcactacctgtgctcctaattccatcaatgatgaggccggcagtgatgactgaatctgtagtagtgaaacttcatccaatccagctagttcaatttgtataccagcaccatgctattcctctaggtagccttggttcctgcgcacccattcttaatgaccacgcgccacgccacgcattcattcttaatcaccagctgctttgctagcttgacatccaatgtcctgcgcaccactccttcggatacggcaggatcccgagctgaaatgacacctaatgatcatacgaaaacaaatgctagtatacgagctggccatttgcggagccaaccgaagccgtgcacaaaatatttgataccgtatcatggataacactagttatacaatataggcaaataattcagaacgaactcttcctcaccggccgggtttacctgcatatgtattcgaatatgatggtcgggttcatatgaacaacactatcgtgcctagtagtgcgctaatttcttaatcccgaggctggactataagtacccctggtaacaccccatgatcaaagaatcgcaaacaagctgctaatcacttgtcaagagctccctaactacattagctctagagtgatccgcgagcttggtagctggcttgtgatcgagcagtaatgacgtccaaggcgttcgcgctgttcctggccgtgaacctagttgtgctgggcgtagccagcgcctgtgcgcccaacagcccgacgacacccacgccatcgtcgtcgtcgtccg

SEQ ID NO: 5118 - DNA, 3353 bp, Sorghum bicolor
  Intron number 1 from transcript Sb10g025990.1 (locus Sb10g 025990) derived from phytozome v7.0 (chr-ID chromosome_10; pos 55311580 to 55314932 reverse strand)
tcttcggtcccttcgccggcgacgagcactgccaggtacgcgcatcccggtgtcttcccttccctgctgtgcgaaaccgtgcacccaaaccctgtacttggatctgatataattagaagtgtatacatgtatatgcttactaacttcaattgttttgcaaaaaaaataatatcgggtgtacatgtgtacacccatgtcgtttacttggtccgcccttgtcccttggtatagctggaaaagtagggtttcgtgttatgattatgaatctgtgctcagattgttacttcagaatcaggctctatcgttgcgtgcctagatttcgacttcggaaagagttgccaaaaaaatatttgatgcacttgacttggtgatgcttttgctggtagtgaattcgtgaatgtgagctgtgtttcattttgtcaatttctagtatagggaactatttagactgaattgtcaatggtaacacaaatttgatggttgcttgtaacagtttgctctctttagtagcgaaagtgcagcaatttgggaacatggtgtccagggggtttaatagttctcaaattgtagatttagttgtgtgaactcttaggtgctgtttggatgggatcaagattcttagatctaggatcccacgtcatccaagtttcattagatttaggggttctaaaaatttgtgagtagataatgcctgtttggatggtgtagagatttttctttaatccaagttctcagagccccaaaggatccaaatgcgctttagattgtacatgtaaattagtttatgcaaattccaaacttaactgttcaacttaagatattatgtgatgttttaatatattgtacttttagttattttctacttctatactgaaacgcttggcaaatttatggttgtttagctaattgctcattggatcatatcaaattgtgtattggtgcattggcttggcatgcactcgaaattaaaatcctagattggcctctgtttgtttctaccactggccgaggggctaatctgtttgagaaatatcattatagttgacacaagatagatgttgctagaattcaatttgtgccattgcattacacatacttttgttctacaaacacacatgtatgggcattccatgtaaaacattgttaatacttttgttcatattcaatgtacagaacatttagcttatctaggctcctctgtaaataatagtgtgtagtgatattctatggtactgaggatcgaaattaatgcccctgcgtgttttagctcccagcagaattcaggttcacatacaatttgcattcacgcacataatgtgctgcatcttgctagcttctagacccaaagccactccagttccagtcaactttgtgcatggctgactgtcaccaagccaaaaaactctgaccttgtgatgtcttcctgttattctgctgcaacacctaacatcttatctgtgttcactcctgccccgtggtccctgcgaagttctcctgtgcctcctacaatacgtggatacatctgacacatattaatacatgggccgatacatatctacgcgatggatacggcccaaccaacccagcaagaggcagaccgcatagtagtaacctgcccacccctgaccctgaccctagcttagcccctcccgagtcgtgtctcatttgcgccgcctcccgcactcggtagcactgagcgccgacgaagcagtgagaggagcgagtgctgccgcttgctggccgacgtcgacgagtctccgcaaaaggcagtgaccacaccggtgagttcttccttctctgccaaactgccgatccacacggtaagagccatcatgacatccacaggactggggattggggagaaatccgttggcacagcgtggatctggcgacctccgggcttcggtgtgtggtgaccagtgagtttatcgccttccggccttgcccattctcaatctactctgttttttcagttcttgttctccacttcctctccctgtttctgattagtgttatttctgtccaccaatctagtatccagtagatggcatctctaatttgagtagtgctagtgcttctgctagttgcctctccctgttcctgattagtgatatttctatccacttatccaagtatccagtagatgtcatctccaaattttctccaaatctgagtagtgctaatgctagtgtaggatatgtggccaacagacattaaggctccattgtggcatcatgtcaacattctggagaggcctaggactggtggagggagtgcgttatcgagatgcaaatattgtccaacggcgaatgcaaaagctcagtagctgcactagagttgaagcacatttgctgcaaaaatcaggaagggggataagtaaatgtccaagggttacatttgaaatgcttagtgaaatgtggaactagaggaaagagggaagcaacacactgaatgatagcaaaagattgctattttcttgtttgtcaatttctcatattatggacttatggtgaactcactaaactctagtatggacttgtgtttgtgaatttcatgtatcactataatgtatgcagtatgcagtatgaacttatgaagttatgtattaaaattttaattattgtttatttgtattaaaaaatactaaatgtatctgcatattgtttttttgagaaattgtcgtatccacatatccgtatccttccagtaccgatacacgtatccgtatgtgtgctgcatctcatgtgacctgtggccagttttggtagctgacactactcccttcagtcgcagaagactggtgttttgtagatggaccaggtcccccgaacagaacttcaacatttctactataatgtatttgtagactgccaaagttttttatgataatgaaactattttttgagaaaaaaaatccatcctgtccattttcaaatgtttggtatcaccgtaaacaaatttaattgattatcaaaattttgattggttgattgcatgtaaacgagatcatggttatatatgccaagtttgaactagcttcagctattgtttagttatttttccacacatgacctaacattttggcttgatcgttgctaaaatgctgtttttattggcatttgttatatcattttactatttggatatactgagctggggacttcacttccattctttgtcaaagacactgatttgtagagataattcgctgtgattctatatacatggttataaaatgtgattctctgattctctattgtggtctgtgtgtgatactgtgatgtgtgatttgggcagctatcttataattttccttgccacaggaatttgatcttatatatacagacttcaag

SEQ ID NO: 5119 - DNA, 822 bp, Sorghum bicolor
  Intron number 2 from transcript Sb03g040550.2 (locus Sb03g 040550) derived from phytozome v7.0 (chr-ID chromosome_3; pos 68173234 to 68174055)
aggtaccactacacttctcttctgtttcactgtggttgcatgttgttgtatctgttgaacatgtgaatgtctctttaatgatgcacccatcaaaggtcacattgtatattgtttatagtcgctgatatggctagctgtgcttagtagttacccttgattcgctatgtgagcctctaatgtagcatgtgtttagctatgtggagatttatatagatgtttgatggtatattttccattcctattttcattattaactgtttgttttgttgacctgctgcaagatttgaatgtgaccataggcagcggatcagattctgtacattttactatgttgtagaatttggcaggttgaaattagtctgctggctcttttgtatgacttaatgtgattttttgaaattagcatgccagcaattctcttagtgctggttggttccttagctgtacttatgtaaatgtgggaattggggaattatctaacttgtttgtcttagcagttggagttttcagggatttttctgtcttattagcccattgcttgctgcattagatagaatttatattctgcaggttcagttttgtaagatacttctgttaggtagctagttgtttcctgttccttttggtttaacctggtgcaatcatatgtgttcccttgaattagtttcttaacaaatgtaatgtcaaaagatatatgtaagtctaagacaaactttgctatgcagatcttagacagtattgttcgttagaaaaccccaaaggccttaatgcatcatgcaactaattgtttcatctttccttgtttcagtaagctgcagagtg

SEQ ID NO: 5120 - DNA, 2904 bp, Sorghum bicolor
  Intron number 1 from transcript Sb01g037120.1 (locus Sb01g 037120) derived from phytozome v7.0 (chr-ID chromosome_1; pos 60693363 to 60696266)
tgaagaacttcctgctccacacgttgcagctccaggtgagtcgtgcaaacctcggaatgacttagtaaatggcacttcacttgtggtgtagtggcatactttgctgtttttctttgaaaatgtagttttagtgaaggtataattctatttgtgaagttggcggctgtctgattgctctggattatttacttgagtaaccgatttagaacctgagaattttaacctctggtgaacaatcatttaaattatagctatatgcagtctctaggatttagacaccctaccagaaaattgaacggttgaaaacattggagtattggacagttcgattaagaaaataaaaagttttctgacttcatattcttacctagtacatctagtccagcaataccataaactgctcaagtgccatttctgtaagaagagggcacacattgatcatagtggccattccagcagctgccaagaggtttcgaatgctgagtcaagatcacataaaaaacaggatacctgcaatttggtcgcatcgtttttgctcagaactcttttggtagggttgctgcacaattgttcacttaagatcctcacagttttgagggatttgaatgtcttttggcgcgtgcgcgagcagaactagtttgacagtggtccataattctgttggactaagctaatttgagctattttagttatctctttagctttttttatttattagattattaggattatcatgtagcattagtgatatggccaatatagctgattgccttagggtatttgccgttagttatgaactgaagctttgtagtcatatgtaatccataggcacacattacaatgctaagtgtaaaatatgatgcttctgtatctaaaagtagcccacatactatgaaccagagaagtgtaagagtctgttggtttgacctaccataaatggtactcttggttgtctgtgggcatataaggttaagataaagaaagttacagaaagattacattatcagtttagaattcaatgctggtcaccattgaggttcctgttccattcaatagctatgccctccatgatcagatcataaggccttgcaaaactaggatcatatgtcagcatttagtttgtgaatattgatgcttgttgattatttataactatttatatgtatgctaggaaagatagttaaaatgatattctcaggtaaagttatcagagaagggaatctactcaatctagttttatcacatggatatgtcatgcattggtgacttggattgttttaaagcaatttggtacttgattttgactaatgttattgaggatagagatatggagaactgatatcggagttcggagacatatatgataaatgttgcctcgtcaaaacaagcctatcatttttttttctaaccatcccaagtggtatgcatggaagtacacctataccacaatttattatttttgaaaaccctgtaaaatagtactatacacacacaaacacaatgagtacatagagaaatgcactggttgctttactggctcaccagtcggctagtttatcaccccaattctgaacctttggttccctcatactagttagctcgagcagcagaccagcacactgagcaacatgcccaaccttgtgaagctatgttcccatcaacttgttgagtacttgagcctttgcattagctgatcctgcctcacttgtctactgggagaaatgatgtcagggtttgtgtgggctggtgtgtgtgaagggacaatgtaatcaaattgcctagcattattctgtgatgtctactatactggtatatcatctatgtgatgactattgactagtctgattgtgtgactttgtattatttcatgatgctctttcgtatacaggcgatgcatatgctcttggacatccagaacgatgcggatttgctgagggacaccgcggaaagctacatttgctggtggacactcctgacgcggccaatttgccacaagacaccatcttgcccgaagggaggaagggaggctacgaatagaccattttgcccctggctcttcttctctatatctgccttccagttaaacacatgctcaaaactatcatcctagccaccaaggatctcatctagtgccatttgtcgaccatcccacacaacgtaatatgagatctgtccagtcaagacaggggtgaaatggtctattcacagcctctcttcctccctccgggcaaggcagtgtcttctggcaaattggccgcgtgatagagtgtccaccggcaaatgtagttttttgcgatgtccctcagcaaatccgcatcgttttggatgtccaagagcaaattttgcctaatttctaatacatgtacagcctcctttttcaaataattctcgacctatttattttcttttcacaaatatacttggtactttatgattcccaatgcatgcaacaacaaagtcttttatgatcccaatgaatacctgtggattgatccatctaaatatattttacctttttatgtgtgcttgaaaattattgagtggtactttggtcaaattttatccaaaatctttgtgcttagctatgtacgtttggtcagaactgttagtatttgaaaagggaggaagtaattgcctaattggaatcttctgctgaaatgattaatttcaccaataccaaaatcctagctccactgatcctccagtgttagggtgcttttctggttgattattgggtagcttaggacgctgcattttaataggtttctttgcatcgtggcatcatgctgctagctcatgaatgttttcgctcactctaaatatcaaattagtaggaaaagtaacagtttcctttattttggtctattagagttgggagaagaccgtggattgctatagtcctgg

SEQ ID NO: 5121 - DNA, 2262 bp, Sorghum bicolor
  Intron number 5 from transcript Sb03g041110.2 (locus Sb03g 041110) derived from phytozome v7.0 (chr-ID chromosome_3; pos 68653422 to 68655683)
gaaaggtgagcttatctccccttattctttcatgaactatatgttttcttgtttctgttacagcttcgcaggatattctgttaggtcacttgtaatctttatctaggcactgtttacaactttgtgcaagtatccttttgccttgctcttgttttcatatgttgaagatttgcaatttttagcataacagtaccgatttacccagttgttttaggtgcataaattaaatgatggtaatcaaacttccccatcacaaccacattgtgggggtatatttgtccatgattgtgacattgcatgcttgatgaattctcaatgtagcgaaaagtcaggttgaatgatcaatcattctgttacaaaagttgattcttctgaaattctgcatacgcagggagaatcttaggaaatatctgatctgtaggcttatttttcaaatcttaacaagtagctgtgtagcaagtttatgtattttttggtcgagccaaataggtcactattatgatgatgaactaataagtttgtataattctactgcatgcggtaaacctctttgttgtgagttgtgacacatgctgttggtgtacagtcttgttcggcaactagatggccttcacatatattctttgatagtgcgtttcatttttagctatggtcacaagtgctgaaacaacaaaggatctgaaattctcttgacaaacgcttctaatctggatgaggagtcattgtcagcatgaggtgctggaacattttctgtttggtttaatgaggtaatatgtccacaagggatgttgacaccagaaaagtggagcagggctatttgataacagacatccacaaaagaggttcttatcctacagattctccatgttccgataaaatagttcacctttggactgttgatggagggttttagctaagtttcgtgtctataacaacattgtcatgaataaataggttctggtaggtttattactagctagtttataaggacaaattttctgcagtcttattttctgtcatttcccccctttgttaagtataattttctgaatacagaagtgcaactatatcgataaagaacactatccgagtgtcgcgcaaaaaattcgagttcactccatattataggaaatgtgctctcatggctagcatcaagtttgatatgaagatttttgtgtaccaacttccttttaagaaaattcctaacagcagtttatacatccgcaactagttggccaaccattgagcttcatgcatatgtcatagtgctaacttgaacaagattgtagatcctatttattatttatgttttgaattcgatgcttcttctgacttcctttttgaacataaaatgcatgtggagcctatttggttcctcttgattcttatggcttatattatgtattacccgctaaacaccactatttggcttgcctgtgaaattcttttagcactactaattctgaccaagtcaaaatattcattctttgctctagatgactagaatctatgcctctattatatttttacttcaatgaatgatgcagtgaaccattgaataattgttgagtttatttgttgattgaatgaatatgaatgttgattatagccttgagtgagctgattgattgaatgattatgaagtaatgggcatgatgacatgtctcctagagcttttgacatgtattcaagttttatgagttcatggaactgccttagttctatgtttctgttcataattaactgaaaaattccatgtattttttttgataaaatcactacccctatatcccgctatagcattttatagcttcctgaaggaggccgccactaaatagtttagccccttcatttaaaaccttggttttgagttcattatggtttatgctgacatgcttcgtcacaacccacaagcaacttgcatactatttatatttatgttttctatttttaatgcaatagcagaacggaatcgtaccacatgaaagccacccgatcaatcaaatataagtttcttgacacctcagaaattctcatgtaggattagtgaattttcgaagctttgcacgtttagcacaaaatataaacagcaataagtcttatcaagtgcaaggaacagattagtgttcccattctgaaattttgtatatcctgaccttgtaattcactctgtcctaataaagtttgttaatatttatctaacaggctattcatatccactcattgattacagtgatacttgttcatgtagcttgcagacgt

SEQ ID NO: 5122 - DNA, 17690 bp, Sorghum bicolor
  Intron number 10 from transcript Sb02g013390.1 (locus Sb02 g013390) derived from phytozome v7.0 (chr-ID chromosome_2; pos 25327970 to 25345659)
accccattatttactgatatacctcaggtaacacttatacatgtcattgtgacaccttttccttaagattaagctttggtattgtattttgtctatccattttgaaaccctatgtttcatctacgtgggccatgtcatctccgccgacggcgtcgccatggtcataggcaaggtccagcggtgctagagtggcctgcgcccacaattgtctctggccttcagggattcatggggctactaccacaaatttgtgcacgactatggcttgatcaccgcacccctaagccttgaccaccttgtcgtaaagggagtggttcaggtgatcagacacggccacaacaaccttcatcacgctcaagacgacacactgcttctgtcctggcactgccggctttcttcagtcaaccgataactttcttcagtcaaacgaccgataactttcttcagtcgagcgaccacgccgcatcatgcttccttggcagcctatgagcacgagctcatcggtctcctccacgccatccgccactggaggcctttgatagacctctataactcttgtgtttatctagagtagttggtggatgtgttagcacccttatcatctatcttattgttagagtaaataggaatagtaccatattgtgtagccacataaggtgtcacataaggtgttagtcctatgtaccctatataattagctcatgaggcccaatgcaatatatcgaatattccaccaattatattctccttcatggtatcatttgtctaggtttagattctaaccctagccaccgccgcttctgcactgcgtgccccgggtagaggtcgatctccaccgggggcggcgcctctctttaggcgcccgatcctattgatccggctaccatcgtcgtcgcacagcagatcgggatctcccctacgtcattgccatgttgccgccgcctcgtccccaggctcaccgtcggctgtcgccatcaacacctgatcatcatcgcatggaggcagatggatctcgccccgtcccgtgtcgccgtggtggcggctagggctggccacaagccttgaccctgtgctgccatggaggcagccagatctggcgtgtcgctattgccgggcggatctgccatctccacctcgtcgatctgcgttggcgccatcgaccctgcatgttcgtgacccgccatgcgccttgcgccgcccgatcaagactgggtacacccgatctgctgctgctgtatctttttggtttgcccgatcattgatcgggattgagtcgcccaccgctcgtcgacctcgcgcgttctactccaacatcgacatcgacttcatcgacaccgtcttcgagtactacgtgcatcttcgccgagcaacagggctgctgttgtgtagcctcatcgagccacaacattgttgtccgtgtgtacgctttgccgttgcatctccatcgccatcatctgtgcatcgacgattgtgttgcgcaatccctgctgcgccatccgtctgcacaggtcttcgtcctgattgggtcttcgttatcgagctgccagtacccgcgtcgtcgctgagacctactcgtcgacgcgtcttctcccgcattgcttcttctttgtccagcacaaccacatggttggggccctctcccttgtacgcttggtattggcaacactgacacgtgctttcatccccgatgcgttgctggatcaggcaaatctagctgcgcctcggcgctcaggcggcttgactgcatcgacttcggcatcgaccctcccgttcctaccccgtctgccttgattgcgtcgtcgcctttcttctacgacggtccttattgcatcgacttcgacatcaccccctcccacgacgattgcctcgacgcatctctgttattaccatggcgctttttgtgtgcctgtagctccatcaacacacaacccaaccacaactacgtcgacctcggccatcttcagcacgacttcttcgaccacggctactgcgcccttacgctcggctacctcgacatcggcacaaagggctaccgccttgcatgaggactgatcagcttctccagccatagcatacgcggcgcatcgactgttatgactacggggggatgttatcaacttcttctccagtcttaccgtctatagctctcccactgtgactgcggggggatgttagagtaaataagaatagtaccatattgtgtacccacataaggtgttagtcctatgtaccctatataatcagcccatgaggcccaatgcaatatattaaatattccaccaattatattctccttcacttatcataattagcatttgctttagcatctactttagtagttggaatatgttgtagccttcttaagttgcaatctttctatcctatatgtacttagaaaaatcttgccatggtttgtggctaacaatagagaaaatctgcgcccaaacccgtgtttcgttccaacaaaagccttacactagggctgccgcttcctggtatgcgtggatcattttagcctcaagttcctcctcaacaattccgcaacatcattaggaggggaagctgctgggcttcgatttcttggagtacaaaccgggcagcaccaacatcgtcgccgacgtgctctcccatgttagagtatgagtgtattaggctcatgaggcccatgtatgtcatactatattgctacccttctagggttagcccaataatccaattagacattctatcatcccatcgcgatgtcgactcagcctcggctttcctgttggccaccacatagttcaccctcatcgacccgctgcgccaagccaacaacaccgatcccgtgcccgtggcactgctgcaggacatccaggcaggccgccatgccatgccatggtctctggtggatgggctggtcaccttcgacgccaagctctatgtgccccctgtcctccatgctcttcctagactaggtgttcgacatccacaacgacggccacaagggcatctagcggaccctgcaccagctccaccgcgacttccatgcccctaaccttcgcttagtggtgtaggatttcatctgtggctgcctcactgaacagcagtacaagactgaggacctcctcccaggggtcgtgctcctgcctgtgcccttgccatctatggtttgggttgacgccgcacaggatttcatcgaggggctcccaaaggtgggcggcaagtccgtcatcttaatatggtgaactggttctccaaaatactgccacttcatcccgctaggtcacccttacaccgccgagaccatctccaaggcgttcttcgccgagattgtgcacctcactgcacccgcaattactcgcctccgaccacgacccggtgttcactttggcgttctggaaaggagctcctcaccctctttgcgccaagctacacatgacaactgccttccacccacaagctgatggccaagccaaagcagccaacgatttcatccttagctgcctcacctgccagcagtacaaaagagtgcctcctcccaggtgtcctgcccctgcccattccatccatggtttgggccaatattgcgctggatttcatcgcgggtgtaagatataatctgctgtccctcttgtacttttgtcctgcatttggcaggttcaagtggtcagctcttggctgccactgtagaagtatggcaataggccatttagtcttccatagttggtagaagtacaccagctagagtagtgggctggtttaagctggtacaagagtaggtattggctgagataagccatgtagagtagttgctggactggtgtagtcaccatccaagtagtgtaccagcaggtacatagtttgtgtatatataccctacctattgcaatggaaaaactcagttcattgccactcattcagttctccaggtttcagttcaagtctgaaaactgtgtgtgtgtgtgctgcgtgagtgagtgagggagctcagggctcttcctcttccttggagcaggggagggggagagggaaggtgagcagggtctgcttacctggtgcttgtgtgcaggtgccaacagcgggggctccaaaggtgggtggcaagtctaaacgtgcagagtggctgacaattcgactgcgggggcgtgttagaataggcgccctatcaccctatgggctagtcatgggcctggctgcttaatattatagtaaataggaatagtaccatattgtgtacccacatgaggtgttagtcctatgtaccctttataatcagccatgcggcccaatgcaatacatcaatcaattcctgagatctattcgctctcataggtcatccacaccatcatgtacaactccatcgccagcaatgtccttgatctggaccagactgcacgacatttgtacatcactgccaaagggcttttgcaacaaggagaaccatgccattgtaatcaacgagcttcatgggctgcagcaaggcgatctctccatcactgcctgctggacggagcagaagcgtactgctgatgctctccgcaacacctattaccacatattggttctcttttttctcaaacaacgtaggagaactgcgcgtcatttcgttaaggtagaaaaaaggtaaacaggtccaagagacccaacacacacaccccacgcactggacctatgaaaacaggaacaccacacaaggaacataaaaacgaccaaaaaacctccaatccctaagctccagaaggtagcaacctacctaacaacaagttcctggagcttggaggcccccgctgagcaccaaagccccccctctgagctaatagccgtaaggactttctgaacacttggcctcttattattgaagacacaagtattacgatgcttccaaatctcccaagcaaccaagattatcaaggaattgaggcctttatgcgcttcctaggggatagcagcagtagatcttttccaccaacctgagaaacgagtcacagaaggctgtggtgccagctgcaacagccccaactgctgcaaaaccagagaccaaacttgtcaagaaaaaatgcaggtctgaacaagacggtggcctctgcggccaccgccattgcaatatcgaccatcctccccaacttcgcctctaccagcgacatcctgctgtgtgagaagatgcgccttgccacctccaccaaggccgaagctgacttcgtgctgctctccactaccaaatgattgttgccactttgcaaggggaccgcatgtcatggcggctgctccaacaagaagcagtagaagaaaagcaatgtttctggtcaggccggccagggaggctatagtcgaccccaaccaccatctggcccatgaatctgctttgactcaggcagttagacagtgtcagttcctagtggttggagcactgcccagtggtctagtcgtcttcccactggccctggaccccatggtccagggccactgctgctcctctctactagtcacaaccgtcgattcccattggtgctcagtcttcgtgggacagcgccagccttatagctgcatgaacaacctacaggtcggcaacaataggctggtggttgactccagcgcctccctacatatgaaacccgatgatgtcagcacccctcttcgtctcctttctcgtactccatgactgggaatggagaatggctcttgtagaatgatggaaagattaggagaacacctctcacccaacgtgggggggtgacattgatatatatagccaatgcaatggcaggttacatgcaatacatggcaggtgctaatcatactaaatatagccttgcctaatatacactttcctaatgcaatacatggcaggtgctaatcatactaaatatagccttgcctaatatacactttcctaatagacatctatcagcccgcctcagtcgaagcgtcaggatgccggatgcacacactggaccgaaaatcctcaaagagctgaatcggcagccccttggtcatgatatcggcgaactgatacttggagggcacatggagaacgcgaacctcgccgagagccaccttttcacggacaaaatggatgtcgatctcaatgtgcttggtacgacgatggtggactgggtttgctgtcatatagacagcgctgacgttgtcacagtagacaactgtggcgaccttcaagggaacatgaagttcctgaagaagctgtcgaagccaacagcactctgcgaccacatgagcaacagctcggtactcagcctccgcactggaccgggacattgtggtttgccgtttggacgaccaagacaccaagctgtcgccgaggaagacgcagaagcctaaagtggaacggcgggagtcggggcaccctgcccagtcagcgtcggagtaggcaatcagcttgtcgacaggtccagtgccgatgtggaggccagccgacagtgtgcccttcacataccgttgatgtggaggccagcccggtgatcagcgcaaggtgagcttcgcgcggatcatgcatgaagagggacacctgctacacagcgtacgccatgtcggggcgagtgagcgtcaagtactaaagtgagccggggagactccggtacgcgctggggtcggcgacgggagcgccctccgtggcagagagcttggcacgagagtcgacaggtgtcgatgtcgagtgacactcggccatgcccgccttctgtagaagatccaccgcgtactgcctttggctaaggaagagcccgtcgaaggagcgagtgacagagatccctaggaagtgatggagctccccaaggtctgtcattgcgaactcagagtgaaggcgatcgatgatgcggcggagcagagcatccaaggaagccgtgaggacgatgtcgtcgacgtagagcagcaagtaggcactggcgccgccctcagtgtagacaaagagggaggtgtcggtggcagaagcgacaaagccgagctgtcgaacgtacgtggcgaagcgctggtgccacgcccgcggggcctgcttgaggccgtagagggagcgctgaagaagacagacggcgtcggggcgcgtcgggtcaacgaagccggggggctgctgacagtagacggtctcgtgcaggtgaccatgaagaaatgcattcttcacgtccagctggtggataggccaccgatgctgaggacgacccgaatcgtggcaggcttgacgaccgggctgaacgtctcgtcgtagtcgatgccatgttgctgggtgaagccgcggacaaccagcgagccttatggcgagccagcgtgccgtcagagtggaacttgtgcctgaagatccacttgccggtgacgacattggcgccgggaggccgggagacgaggcgccacgtgttgttgtcgacgagagccttgtactcctcagccatagccgcgcgccactgagggtcagcaagggcccctctgtagtcacggggaatgggcgaggtagtggaggaggtagcgacgtgagcagctattgggaagccataacgagcaacaggattcagcgagccggtctggaagcgcgtcaccggccggctcgatgtaggaggcggcgaaggaggcggggaaggcacctgtggggtataaacccctaaactctcatgggcctatatgggccgcaccatcagggtggctcggcccacaggatgaagacgtgcggcgcacgactggtcggcgtgcaccgcaaggctacaagatattgtaccaaataggatactttgcttgtaactctgtcccttcaggatatataaggagtggcaggggtcccctagaggacagatcatattcaattcatctcaacacaatccaatacaatcagacgcaggacgtaggtattacacccacacggcggccgaacctggataaaaaccttgtctgtgtcttgcgtcaccatcgagttcgtagcttacgcaccgtctaccgataaactactaccgtgggtataccccaaggtagactgccgactagctttcgtcgacagcaccacaactggagtagaggccggctgtacaaggacaacaggcgcctgctccacaccggtggagaaggtggtgcagcggctgtcgcaggggctggtgcagaagtgccagcacgccgccgagtgtagactcgtagaggtggagggccggctggagcaggaccagccggggcaggggcaaggaccgggccaatctgtagaataggtgggtcctcagcaagctcctccaaatgaccactattttgtggctgcgcagcatcagctggtggcggcgtggcagtagtacgaggcaccggtgcaggaggacctgtaagaagaaagtccagagagcttggcagcacactgggagggttagtactgaacggaaattgcgtctcatcgaagtcaacatgacgggagatgatccgtttagttgtgaggtcgagacaccgataccccttgtgtgaggagggatatccgagaaagacacaagctgtggaacgaggggacagtttgtgtttggaagtggcggtgaggttaggatagcagaggcaaccgaagacacggagaatggtgtagtctgggggttgccggaagagttgctcataaggaacatgatgctgaatggctgaacaggggcgcctattgatgagatatgtggctgtagctagtgcctctgcccagtatttaggtgccatgtgagcgtggatgagcagcgtgcggcatatgtcgttcagggaacggatgatgcgttcagccttgccgttttgagaggaggtgtaagggcaggagagacgtaggtgaatgccgctagaggcaaagaaggtggcgagggcattgttgacgaattcagtgccattgtcagcctgaacagccttgacaggaacgctaaactgtgtgtggacgaaggcgcagaactgagtaatgtgagtagctacctcggacttgtggactagggggaaggtccagcaaaaatgggtgaagtcatcgaggatgacaaggtagtactgtgcaccagaaatgctagcgaccggggatgtccaaacatcacaatgtataagctcaaacggtaaagaggaaactgaactggaatttccaaatggcagccgcacatgcttgccaagttgacatgagtgacatagagtttgggctgatttattacaggaaatcgaattattttgtctaagaaaatggagggcagcagctcctggatgaccaagatgatgatgccataggtcggtggagatggcgaggttggcctgtggcgtggcagggacggtgtagaggccgtcggagctattggagcgaagaatcacgcgtctggtctgcaggtccttaacagaaaaaccaaacgcgtcaaattcgatagtgcaatggttgtcacgagtgaattggcgaactgaaagtaagttgcgcactagagaggggacaactaaaacattgtgaagcgaaaagggagacgcgtggcctggtaatgtggagctgccggagcaagagacaggaagatgatgaccattgccaacagtgatggatggaatagaagagggttgacgggagaggagtataccatccgaattgtgcatgtgagaggtggcgccggatgttagaggtaacacagattttgattagccttgaggcaactaaccccaggcgtctccttcatatatatagagaaagacagatattgcattgattacaaacagctcactagagctttaattagacagactagctgcctgggtacccgcacaactcttgggctacccaaggcctttaatgacagaaatttaactagcacagttatctaagaaatgcttaggaagcagggcttattaactacatttctccccctaaggcctgcttcaattaatcttgatctccttgatcccaatcctgctcctcatctcttccagcttggttttgcccaaagctttagtcagtatatcagcgagctgatctgcagtgggaatgaactctgtcttgatgctaccatcttccacacaatctctgatgaaatgatgcttgattctaatatgcttgctcctgtcatggaaaacaggattctttgccaaagccagagcagacttattgtctactctgagttccaccacttcaacttttcttcccaacaaatctgcaaacagtcttgacaaccacaaagcttgggttgcagcagttgtcatcgccacatattcagcctcacagctagacagagcaacaactctctgtttgacagactgccagctgaccaggctggttccaaggaagaacaaacatccagttgtgcttttgcttgaatcaacatctccagccaaatctgaatcactgtaacccacaaaccttgctttgcctgttgatctagtgtagcaaagcccatgatctagagtaccagccaggtatctcaagatccttttcacagcctgaagatgttcagttgttggcttctccagaaatctgctaacataccctacagcaaaagccaaatctggtctggtgtgcactaggtatctcaaactgccaaccagtcttctgtactgagttggatttacttcttttgctgtgctttccttgctcaatttcagcctttcttccatgggtgtggtggctggattacaacctgccataccaccaagctcaagtatcttcttagcataatgggtttgcttcagagtgatgttcccttctgattgtctcacctcaactcccagatagaaggacagaagacctaaatcactcatttcaaaggtttgcttcatctttgccttgaaagcttcaatcttctgctgattggctcctgtgatgatcaaatcatcaacatagactccaattaccagtaaggagtcacctgatccctttctgtacatagcagcttcatacacattcggctcaaaacccatctgcttgagagtgaagtcaagcctggcattccatgcccgaggagcctgtctcaggccatacagggccttgtgcagcctgtacactttcttctcttctcctgttacagcaaaacctggaggctgtgtaacataaacctcctcctggagttctccattcaaaaatgcagacttcacatccatgtgatgtactgcccatccctcttgtgctgctaaggcaagcaaaacacgcactgattccatccttgcaactggtgcaaaagcatcttcatagtcaactccttcctgctgcacaaaaccacgggccacaagtcttgccttgtgcctaattacagctccatgttcatctttcttcagcttaaacacccattttagtgaaatgggacggtgaccaggacggggagaaacaagttcccaagtcccattccgctctactgatctcagctcctccttcatcgctgcttgccaatctggatcatctttggcttcttcatagcttgtaggctcaccagaatgggtgagattaagttctgcaaacagccgctgcgctggcggaggggttggctgatcaccaataatgtcatgaatcttccgatagcggagttcttcatcatcatggtaggcatccaccctttcatcatcatcttccaggggagtcacatgctcaacctgaggacttgctggagctggtgtaggtgttctgggtgacgcaggcgcctctgcctccgctgcgggctcctctgcttctgctgcaggctctcctgcatccaccggagagaaaccaggcgatgcaggatgtggcggaggagatggtgaaggcgacgctgaacttcctgcttcagggagttcctctgcccatgggaattcaacagaaaactcactgcccgctgcttctggtgtgcctactgctggtgatgcccagtcccagccgcggccttcgtcaaacaccacatcacagctgacacgcacgcgttgggacactggatcatagatacggtatgccttggccccttccgcatacccgataaacacgccagcctctccgcggtcatcgagcttgcgaagctgagtaagccgccgggtataagccacacagccaaagaccttgaggtggccgactgttggtgcccgaccatgccacgcttcataaggagtgacattcttcagcgccttcgtcggggatcgattcaggatgtgtacagccgtcatcacagcctccccccaaaaccgagagggcatctggcgttgcttgagcagagctcgtgccatggccaccactgtttggttcctgcgctcaacaacaccgttctgttgcggtgaataaggggcactgaaatgccgtttaataccttcatcagcgcagtatgcagtaaactctgcgacggtgaattcaccgccattgtcggtgcgcaggaccttcaacttgcgcccgctttccacctctgctgccaccttaaccttcttgattgcttctgttgctgcgtccttggatggcagcagcacagcccacataaagtgggtggcgtcatcgacaagcagcaagatatagcggttgcccgccggtgtcgctggcgtgaccggaccgcacaagtcaccgtgcaccagctcaagctgattctgggcacggtatgctgctgcagccggaaaggaacgccgcctctgcttggtggtaacgcaggtgtcacacacctgctcaacatggtcgaccaccggcattccgcgcgccatctcctccttgctgagtcgccggagtgcatcgaagtgcagatggccgaaacgctcatgccactgccacgcctcttcatccttgcgtgccgcgagacagacaggttgtgcagcctcaagatgcagaatatacaacctattcttccctctgcgtaccttggcgagcagacggcgactcttgtcccaaatgcgaagcacgccatcatcaatctcaaccttggaccctccttcatcaagttgtcccagacttatgatagagttcttcagcgccggaatgaaatagacgccatgaagaaccctctgctcaccggtcttggcttggaaaacaatagacccgacgcccttgatctcaaccttcgacgcatccccgaaccggaccgttcctcgaacgtcagtgttcagatcagcaaagagctcttggcgcccggtcatgtgatgcgtcgcgccggagtccaggtaccagccgctgtccacctcttcttcgtccacgccgaggtaggcacgagcgcgtggctcagagagctcgacgtgctgcgccgtgtagctgtgcaccagcgtgctctgttccaggctgatgaagccatgtgccagaaacagagcaccatcttcatcgcactcagcgtactgggcgcgcgtctcatgccttccttggttcccaccacgctgcccagcctgatttccgccgccacgacctccaccacggttgccaccaccgcggccagcacggtttccccctccaccgccgcgctctgcatcttcacggcgcggctggggacactcacgtgcccagtggccttcctggttgcagttgaggcaggtgttggggccaacacgaccagcgcctttgccttctccacgtccgccaccacggccagcacctctgcctcgtccgcgtccaccaccacggccgcgtccgccgccaccgctatgctggttcttgaaccagaaccgccagcttcttctgcgccttgcttctccttcaaacgcgcacgccactgctcctcggtgtacagcagcttgccgttaatggacaccggctctgtcacagcttgcgcttcacgttcatccaccgccttgagccttcctgtcacctcctcaagcgagagcgcctcgaaatcgaggaactgctcgatggcgacgacaatctgcgtacttggcaggcaccgtgcgcagaaacttctccacaacacgcttctcgtcgatgtccctgtcaccatgaagaacaagctgctggtgcagagttgacagccgcagggcaaaatcctccaccggctcgccaggcttgacatccatgttctcccactcccgacgcagccgctgcaacgtcgctcggcggaccctgtccacaccgattcgagtcgcagcgatggcatcccatgcctcttttgctgtcgccttgtcaaggagcgggagccccaactccttgggcacagacgcgacaatcacctccaaggctcgcctgtcgtcgcggtactgcactgggcctccttcgacagcttcccagagatcgcgcgcctgcatcctgagcttcatcgtctggctccactcatagtaatttgtcttgtccagcattggccatgatgtgccgctgccggagtcgcggtaaaccaccctgccttgcggtgattcatagcggccgccgccacgacgccttctgttacgcagtggtgactgcgaacggcgcctgtcccgcgatggagtcctctggctcctcaagtcctcctcttcctcttcctcctcttcttctcccttctcagcagcaatttcggcccgcagctcctgcgccgtccttgctgccgcctctgcagcagccgccgcctgctgtgctgcctggactgccagcgctgctgcttcctctgcagccttcaagcgcgcagccttgagtctggcaacgcgctcagcagaggtcgacatgggtggaggaggagaggagatggcctcgtggctctctggtgtctaacctagctttgataccaaatgttagaggtaacacagattttgattagccttgaggcaactaaccccaggcgtctccatatatatagagaaagacagatattgcattgattacaaacagctcactagagctttaattagacagactagctgcctgggtacccgcacaactcttgggctacccaaggcctttaatgacagaaatttaactagcacagttatctaagaaatgcttaggaagcagggcttattaactacaccggagtccatgacccagccggagttctggagcgccatctggttcaaggcggcgatgaggccggactgatcccacactggagcggatggagctgttggagggggagcgaagacggtgtgggcctgcggactggcgcccatgatgccctggccgcgctcgcccagatcaccgtgagggggccagccgccggtgctgttgccctgctgccacccgctgcctggaggaggaacgccgccctggaaagcccatgggttgtagcagaaccagggcctcatggggcgattgccccattgctgtccactgccgctgccctgctgccagccagcgtcgttgccttggctgcgccaactgccctgtttcttgccgcccttgcccttcttgccacccccaaagctcttgggagcagcaccagtggccaaagaggaggggcggcacccgcaggtggagccagaggcggccaccatggcagatgcagccgtggtcttctcatcgttggcgaggcgcagctctttgagggagagcatttcgcgcgccctggagaaggaaagcagcacggtggagttggcgatgtcgtcagcagtggcggtgtagcgcgggttgaggccacggaggaggttgaggacgagctgggagtcctcgattgtgtgaccgacgtcccggagggcagcagccttgatcttgagcctctggcagtactcgtcgatcgacgaatcaccctgcttcagggaatggaattcctccagcaggaagactgcccggggcgcacgattggagcggaagagtccctcgatggcgacccacaactcgcgggcagtctggttctcgtcggtgatggcgaggtcgagaaccgagtcgtcgacggtgttgaggatccagccacggacggtgcactctgcgatgtcccacaatggatccgcagcggcaggaggcccgtcgatgtggggacggaggctgaatttcccgcacagagtctggaagaacgaagcccacttggtgaagttgggtttatctccagggtcaccgggatgtgagttttcacattgacggctgtgtagggggggacgatgacagcctggggtggagctttggcagctgcggcggcggctgcggcagcagcagcggctgcgtcgtcgtcgccaggcatggctgctgggagaggtggaggggaggaggagcggaagcagaaggtcggatcagggatcaattgatcgcggctgaaaccatgtagaatgatggaaagattaggagaacacctctcacccaacgtgggggggtgacattgatatatatagccaatgcaatggcaggttacatgcaatacatggcaggtgctaatcatactaaatatagccttgcctaatatacactttcctaatgcaatacatggcaggtgctaatcatactaaatatagccttgcctaatatacactttcctaatagacatatctatcagctctagtattccaatttcacacagtggtcatgtacctctagcaacacccactggctctacatttcatctccacaatgttcttcatgtcccttctattatcgtaatctcttatcagttcgtcaattcactagagataactctatggaatttgcacacgagggccgtcatctttcactactatagcgagggagatatctacacctttgctcaccatccatggccttgtaagataatctgctgcattctccatttgttttgctgcagcaaggagttggcaataggtcatttcttctgtcctctatctactgtactagtatggcagtgggccaaccatgtagtagcttacaacagccatgtagagtacttggggctgagatcagccaagtactagtgtaccttatgtagttggtaattctctatcactacttgtatatatatactctatgtattgcaacagagaaggtagtttagttgctgcacttgtatgtgctgtgtgctgggttcaacaccttcttctacctctagccaaggtgtgtgtgggtgggtgatagttctaggaatctggttgttctattgatgaactagaggagaattacagtggctaaacctaacaatggcagcagcgatagagctagttctccctccctgggaggctctgaacaagatgattctatttctgcttgactcccctaatcatctgtcccttagttataacactaacaaactgctaacccatctcctattttcactctctagatcctaacttatagaaacagatacctaacacagataactatggcttaaaattaggcactggaggctggcgccttcttcctgctgtactgtttcccaatgaaagcgtccacaacagtgggtgattcaggtgctactcacctgtgcagcctggctggtttcgaacaggcttccgccttcctgtctgctgcaaagcttgctgatgtttggcacgtccacaacacttcaaaaatcctatgccatgccctaatatttcaagatagataactgcattagtgaggcagacaacatgaccttaaaggattagggtattgttctccatttgtaggaatgacttgaaatgctctagagacaatatcaaaacttaaggaaacctgcttcagttaggtggaaagatatctttaaggatatatatgcaacgaacaaggtatctagcaattcatatctgtagtttcgtactaggggcataaaggtgggttcttataccacatgaatagatattttgtttctatagtaccacaacagcactcactgcacagctgtggtgtaaatgttcataatttatactatgttcaacttctgcatttagagtttactatgataaataaattatttaatccaaagtacacatatatgctaatttaatctcagcttttttccccagtgtgcattggctgcaattgtgatttctgctgttac

SEQ ID NO: 5123 - DNA, 2403 bp, Sorghum bicolor
  Intron number 1 from transcript Sb02g028870.1 (locus Sb02g 028870) derived from phytozome v7.0 (chr-ID chromosome_2; pos 63994865 to 63997267 reverse strand)
cgacctcaacaagtgcgagccgtgggatctcccgggtaaggatcggaaaacaattgtatatatatacacgcacatgtatgcatgcatatatactcacgatcaaatgaactccatatatataaatgattgatcatcaaaattcagctacacttttttcttaacaataacatccgcgtgtttagcaatccataattattatatactactttgctctctctctctctctctctctttcatttttagggaagaattgcatatttatctacacataaaaatctggtgcatcatatatatgttattgtttacttatttgttatatccaccgaaccaaatatagatagaacacctataggtacgtgtagatgtgggcatggttaatttccaagcatctaccttacctaggaaaagagttttccaattgccatgcttttggtgcaagtttttcaaaagctagaaaaagcctcaaaccaccactactcgttcagatcgatatcctacatgaatgggtctcaaagttttctttatttgttaagttttttatactcttgctgtctaatctgtcgtccttagtttagcttggtttgctatacctataatctatgttaaatgtgtattttgtctcatcttcgtctctttgcatgcatattttctcttctaaaagaggtatatggagatttcaagctctcatggagtcatggtcttaattagttatttgttctcaaaggcacaactatttttcatccttgattttactttaattctcagtatatctaattcgaaattattggcgacactggtgaacgactggatgtgtcattaataatacaccttctctatatcttaggtgcctgattttttctgttgttcagaaatcagaaaacatgcaattttgtcattgtttggctatagaaaaaaatatttttatctcttgtgaattgttcgtttcattgtaataccaattgtctcttgttagttgttgcctgaaatttttaaaaaattgaggcacctaaaatatagcaactactccctccatcccaaattgtaagtcatttcaagaatcttggagagtcaaacttttctaagtttgaccaaatttatatgataaaataataataattatgataccaactaagtttcattagattcttccttaattatattttcatagtatatatactcactttacgttacaaatcttagtatttctctctataattttggtcaaacgtgaaaatgttttgactctccaagattcttggaatgacttagaatgtagggagtacctaataatgttgttttacatcttcgtgtcaacaaatatgtccactatagcaatataaactatctgcaagatatggcaaaattgtataaattgtttttcatggtcttgatggtcaaagtctttttaaatgggtgtattgcatatagaactcagatgacaatattttgtgagagtggatgaagcattttttttagaggaagatatctacgcttatatattttatttaagttctagatccaaatatatacttataatttgtccgtccagaaaaagtaaaatccagagaataatagtgagatcaagttggataccatgatatactatctcttgtacatgtcgttttggagtttggacatgcttgccgacttgtgctctcttgatcactggaccgtagagtgagagaactgctcagcccaaagtttttcaactttaactcttaataactaatacctccgtgtggaaaagaatgcaattctagttccgtctttagtgaaactatttagagtttaaccaaattcataaaaaaagagcattactatttgacactaaatagacgtattatgaaaatatatttcatagcgaatctaaagatacttgtatggtatcacgaacattgatatatttctgtataaacttggtcaaactcaatatggtttggctcgatactgatatatttttgtataaatttggtcaaactcaatatggtttggctcgatactaaactagaattaatagaactagattcttttcttttcttttcttttcttttcttttctggaaggtgggcatagaccggaaacatgaattttactatggataccttatgataatatacttctcatgggctatcatcaatatatatataactggttaaaagttagcattgaaaaataaagttgcatttatttattcacgaaaaaagaaatttgtatttatttgttaaactgatgccagagagaaagcgaagctgggagaaaaagagtggtatttcttcagcctataagagaccgaaagtacccaacataaagttgcatttatttattcacgaaaaaagaaatttgtatttatttgttaaactgatgccagagaaagcgaagctgggagaaaaagagtggtatttc

SEQ ID NO: 5124 - DNA, 10406 bp, Sorghum bicolor
  Intron number 2 from transcript Sb06g003053.1 (locus Sb06g 003053) derived from phytozome v7.0 (chr-ID chromosome_6; pos 6217492 to 6227897 reverse strand)
aatcattggtgcacgcattcgtgacacactatcaggtagaataaagtatgtcctatctctacccactataaaatagccatctcagagagtggttcaagttatctgttttctttgatagtcatgtgtttctttcctccatactgaactgatgaatacaaacaatctttctagtttctaatgccattgtttatatattagtattcctaaacgctacaaatatgtaactaaagtaattaaataaattattagaccactttctgatttcaagttatacttggttttctttctaggctaaataacttgcatatgcttgtgttggaagttacacatcacaactctttcgtgatatcctagaaatatctgtacaattacaacaactaagcatttaaataacaagaaagttgagtaggtagatgcatgtttgtactttgtagatgatgaaatatattctgattgcttctgcagtttttgttcttgttcagaatctgatatgggttaagtatttatgttaattcattctgagttctggatggaggcctttaatttaacaacaaactttagagctgtgaaacttttgtcttcaattgttacttaatgcttttttaccatcatatagcactgctgagtttttattcttatagagtttgacatagggttattaaatgaccattttagtagctttctcactgttttcacagttagctgacaacctgttgatactatgatttatgaaaatttaaattacatgttgtgttagtattttaacaatatatagttctgatcgccgaagaatgctagatcagttggtctaggcactccggccatccggcggcacctcccaggtcctgagttcgaattccagtgggagcgaattttaggctgggttaaaaaaatcccctcgcccgtcctcttaccaaagcactgggggcttggcacaattcccacttgggtgacagaaaggccaccgtgtatggatgggggtgggggttcgggggttttcttgccgggtgagaagtgtcgaggatatcagtaaggggtaccctcaccgacgcatataacaagattacccatacgcaggtcgaggccctcaactcgacgctctggtcatacatgtgtgcggtcgacggccgcagcctcgaagacggaaacagcgtcgagcgaatcagtcaggggtcgagcgccagctaccgtcgaatacggagacaggctcgagcgaaccaggaggcgtcgagtgcaaggacactgtccgccgcctgacgcgcgcacgagagccggggcattaaatgcgcctgccgctttcccacctaacacgctggtcacgggaagcgtgatagggaacaggcacccatcccgtcgttctttttgcagccttccccaccaagcgacccagggcgtgtcagggcgcgggaaacagggatggaatgtctaatcaggaccccctcgagacaaccaaggtcagcgctccggacatcagggctttgcacggggtctgaccctcgaccggacctggttccttcctagggacgagttgggcgtcgactgacagcaccgcaaccactccgccggatctgccgccgtatcgtacaggcatgcgaccggtgaaccagcccaagacggcgcgcagagcaggctacaggggcacgcgtaatcatcaccaggctactaagacgggacggctcaagaccacgccggtacgggggcctcgagtaggtcagcgcgccatgctcctatcgacccctactctgacacctatgcatgtaccctgggtctctccttgttgctataaaaggaagggcccaggaatagatagacaccaggcaacacttcacccacacacgggagaactcccatacttcatcccgctcacactacgcttgtattcacccctgtacaaacacttaggtgcaaaataatacaaactctccccaccccgctggacgtagggcgttctcttgcccgaaccaggataaattcttgtgtctttttgcatcaccatctggaaaagcgagcacgcatacaaatttactcgttggtgtgaccccccgtggggaaaacaccgacagttggcgcgccaggtaggggtcctgcgtgtttttcatcgatttcccattcctttccagatggccactctcgcctcgctgatcccacgctccaccgtgatttggttcgggagccttgagttcatgtcgaccggctctggctacgacatgatcttgctctcggtcaaaggaccggaaggagcccgcgttgcgccagcacggttgagggccccgagatgccctcgccaccacgcctccccgcccaagaagaggcgtggacaacatcatcgtcgcccctctgcctcatcacgaccagcagttcgcgctaggcaggaggtgacgcaggagtcggcagccccgcgtgccgggaccatggacgtgccggcccagcatcacacgacgacaagaggtgacgcgccccgcgcgctctcccccgccgccagattacttccccacgggttgtccaccccaagaagggcactgccattcgggttggacaacgccgcggcgtcgctcgccagagcaatatgcccaaacgcccagacatacgtggagagaccaatggtcctcccacgtgactctgaagcactacggccgacgtccgaactgccggatttctcccaagtgcgaggcctccgccgcctaggccctgggcgatacacgatcacctcactcaggcaacggctgctggaggagggacgtggatgtttctacgccgccgagccggactccgactccgaaactgatagctacgaccctactagggaatgctatcacatcgacggggcagtagaaaccaccgacgaggacacaggacgcagctgcgggcggtcgagcccctgcaacaagggaagaccccaggacgcctggggacggcggacaagtcgacccacttccacaggaagatagggccgcgcagcttgcgcagctacgagagctcaagacaaagctcgacgaggaccgagagtgcctcgtcctgctcgagcaaatcctcgaacaagacttgccttacccacccggcggaagtgtccgtaggcgagctcgagaggtacaccggcaaatcgtcggagacgcggagccagagcagccagtcagccgtttccctcgagcgggccaaaatgtggtggcagcaacgatgctgctacgcaacatgccagagccatcgaactcccaagctcgacgcatccgagacgaggtgcaaactctgctccaggtagcagcagtacaacaagccgaaagctcggcatctcgacgacgaggagccgccaccgaaaagcgcgatgagccaccccaaaacgaaaaggaggcgtcagtccatcaacagcctccccctcgaggtagaaagaccgctctcgtcctccccgtcgacaatcagcgtcgacacgacgcgcggcgtgacatcgaagagaatcgacgccgtaggtatggggatgcggaagagcgcggttacagcgcgcatcgcggtggaaggtacgacagcgacgaagatcggatggcccccgagccaccaggcccacgggtgttcagcagggcaatccgcagcacgcccctgcccagtccgttccgaccgccgaccagcatcgcaaaatacaatggtgagaccaaaccagagttgtggctggccgattttaggttggcctgtcagctaggaggcgctcgaggagatgatcgagccatcatcagacagctgccactcttcctctccgacaccgcccgtcggtggctcgaggaacttccagctaatcagatccacgactgggtcgatttggttaagagtcttcgagggtaacttcaaaggaacctacatacggcccgggaactcgtgggacctcagcaagtgtaaacagaagtcaggagactcttcgagagtacgctcgacgcttctcaaagcagcgcaccgagcttttgtctctgttaccaccagtcgagacttagtgcgggaattgggtcggaatcgacctcagaccgtcgacgagctgatggacgtagtagcaaactacgcggcaggggaggaggcagtcggcgccttcttcagttgcgaaggaaggaaagacaagcaacctgccggtgaagacgagccccccaggcgagggctcaagaagaacagaagaagcagaaaatgcgacagttcaagcaggagaacttcgacgacgacctcgtcgccgccacggagcggaagaagcctcgaggcccaccagatggaggtatcttcgataagatgctagaggagccgtgtccttaccataaaggaggagccaaccataaactcaaggactgtcgaatgctgaaaaagcatttcggagaaaggaggcgacaaggagggcgacaaggacgacgacggtttccctgccgtccacgattgctacatgatttatggtgggccctcgatgcagctgactgcaaggcagcgcaagagggaacgccgtgaggtcttcgcggcgagaatggcagtgccccagtatctcagctggtcgagcacacccatcactttcgaccgagaggaccaccccgacaaagtggttgccccaggtgtctacccgctcgtcgtcgacctcatcatcgtcaacacccggctctcaaaggtgctaatggatggaggcagcagtctcaacatcatctacctcgagaccctcaacctcctcggcatcgataggggacgactccagccaagtgccggtggtttccatggtgtcgtgccagggaaaaaggcgctgccagtaggtcgaatcaacctaccggtctgctttggcacgacggccaaggagaccctcacctttgaggtggtcgggttccggggcacgtaccacgccatcatcgggcgcccgggctacgccaagttcatggccatacccaactacacctacttaaagctgaagatgcccggccccaaaggcgtcattaccatcagctcctctttcgagcacgcctacgaatgcgacatcgagtgcgtcgaatatggggaggcggtcgagaactccaccgagctcgtcgcgaagctcgaggccctggctgcagaagccccagagcccaagcgccacgcgggcaacttcgagccagcagaaggaaccaagaagatcccgctcgaccccaacaactccgatggcaaggtgctgacgatcagcgccgacctcgacctcaaataggaagccgtgctcgtcgactttctccgtgcgaacgccgacatgtttgcatggagtccctcggacatgccaggtatcccgagggaagtcgccgagcactccttggagattcgagccggttccaagccagtgaagcaacggttgcgccgattcgacgaggagaagcgcaagatcattggcgaggagatccacaagcttttgacggctggattcatcaaggaggttcaccatcccgactggttagcaaaccctgtactagttaagaaaaagaatgggaaaatgaggatgtgtgtcgactacacgagtttaaataaagcatgtccaaaagttccctttccattaccgcgtattgatcaaattgttgattctactgcgggatgtgaaaccctttcttttcttgatgcatattctggttaccatcaaataaaaatgaaagagtccgaccaactcgcgacctctttcatcacacctttcgggatgtattgttatgtaaccatgccgtttggacttcgaaatgcgggagccacataccagcgttgtatgctccatgtgttcggcaagcacatagggtcgacgatcgaggcctatgtcgacgacattgtcgtcaaatcaaagcggcaaggagacctgatcatgggcgcaggaggggtgtcggcccgagggcggtgagatccgctcggaccctccattggagcttccgtccgagggacatcaacgtcgcctcgaggcggaccctcgatgatccggtcaaggcgagacgccatcccctcagagtcatcgctgcccttgtcgtcgttatcatcttcgctggaggattcttcctcaggctcccccctctgcctggatttagctcgacgcgcatctaatgcttggcggtcgaggttcttctttttctcccctttccttgcagagtccttggcggacttcagcttttcggcggactggcgccgtctgttgcgatcgacctcgtcctccttcacagggggcctcgaggaccggatatcaatacgtccctgccagaacaaaggaaggtttaaaaaggatcgaggaaaacccagaaccggagttatgtgcgagaaaaaagcataccaggtcgaccgagccttcgtcgggcctcatagggaagccgttgacgtgcttcgacttaaagtcaccggcgatggccgccctaactcgggcagcggtctcatcgtctgccagagcctcgttggacatccggcatgcctcgagatcccgggacgaaacgcctggccccatctcgtccatcctcaacggccgagacatcagaggaaggacccttcgacgatggacggccgagaggacgagagcggcggacaagccctccaggcgcagcttcttcatggcgtcgaggaggggtcgagccgcgattggtgctcttggacgacgccgtatgtccagttgtccggacgctccgtaatcagacgaccggtgtaagcggggaagagaccgtcgtcgttcctcaggtagaaccactgcgagtccacccggcatggttcgatgacaaccccaccgggatgtactcgcgcggcctctccgtcttcttcgtcttcaacaccaggttgaggcacccggcccgcacgtgcttcctcacgccggtggttccggtgggggcgttgaaaagctcgcccctgtagagatggagccacagatcccagtggggcatcatccccagatagccttcacacaccgcggcgaagaccgccgcgacggtgatggctttcggggagaaatgctggagctccaccccatagtggaagcagagggcccgcatgaagcggctcgggggagcgcccaggccgtggcggtggaatttggcgaacgacaccacatagccctcgggcggctggggctccctgtggcccgccggcggcgtgatctactctggagacgacaacgaggtgcggcggcgcaagagtccctcactctcaagctctagcaaccggtgctccgtcatcgacgacgggcgccagtcgtcggcggcgacgagtgtcacaggcatcctggttggaaggacggtggattcgctaccgctcgagggggtgcgcgcgcgcgtaagacagcgagagtgctaaggcaacgaaaggatgaaggcaagaaggcggaacaaagagcagcggcgctaccatggcgtatttataggcagcgatccgccaacgaatagatccgagaaataaggtaactcccccataaatgcgccacctaacagtcctcacccccttcacagatgggacgctctgaattccacgccgacgcagtgtcgtaacgtcacccgcctgaaaaggcgcgcccaacgggcaaaaaggcgaaccaccacggcctcttccttcccttgtaagccaaggggcgtatccgcgaaagcctcgagaggtcgcagactggcccaccgaaagggttcgacagccgatctcgagcaccagagtcagggatccccagcgagcggtcgaaaatcgaggcccgcctcgaagactcgctggtgatgtccaaggtagggtcgagacagtcgagaggaatccccctgacgggaggcgtcgagccgctggactctatcgaatgagaccagtatccccgaccacgtcgactttgcttcatgagaacgcctccgggctacagctgaccccctcgaaaggggcacaggttctcacttggactatccgctaggaactcaacctggggtagaagacgctcgctctgtcgagagtacgtcgaaacctccgcgcaaaacaagccaatcagaaccttccaccactggtgtcgatagcgtttctgcgaattaggcaaaataaccctcgaaggagtcaaaaaactcctccaagggctcgggggctacccccgcggggtcgctcgcgcgcccccacggaagctcgacccaggaatacagcctccactcgagcgccagcgctcaaatggagactcgggggctactgtcgaggatatcagtaaggggtaccctcaccgacgcatataacgagattacccatacgcaggtcgaggtcctcaactcgacgctctggtcatacatgtgtgcggtcgacggccgcagcctcgaagacggaaacagcgtcgagcgaatcagtcaggggtcgagcgccagctaccgtcgaatacggagacaggctcgagcgaaccaggaggcgtcgagtgcaaggacactgtccgccgcctgatgcgtgcacgagagccggggcattaaatgcgcctgccgctttcccacctaacacgctggtcacgggaagcgtgatagggaacaggcacccatcccgtcgttctttttgcagccttccccaccaagcgacccagggcgtgtcatggcgcgggaaacagggatggaatgtctaatcaggaccctctcgagacaaccaaggtcagcgctccggacatcagggctttgcacggggtctgaccctcgaccggacctggttccttcctagggacgagttgggcgtcgactgacagcaccgcaaccactccgccggatctgccgccgtatcgtacaggcaggcgaccggtgaaccagcccaagacggcgcgcagagcaggctacaggggcacgcgtaatcatcaccaggctactaagacgggacggctcgagaccacgccggtacgggggcctcgagtaggtcagcgcgccatgctcctatcgacccctactctttcacctatgcatgtaccctgggtctctccttgttgctataaaaggaagggcccaggaatagatagacaccaggcaacacttcacccacacacgggagaactcccatacttcatcccgctcacactacgcttgtattcacccctgtacaagcacttaggtgcaaaataatacaaactctccccaccccgctggacgtagggccttctcttgcccgaaccaggataaattcttgtgtctttttgcatcaccatctggaaaagcgagcacgcatacaaatttactcgttggtgtgaccccccgtggggaaaacaccgacaagaaggcactttcttcttaatttgaaagctgtggtggcagtcttaactgccctgatcgagttttttttaatatatagttctgatctcaagaaattcttgcaccttaagatgtctatatgaagttgcttttaactatgatgtttaaaagtactgcattttcttttgaaatgacttattgctttagttatttctttgtttgttgatgttagcattattaatatttaacagaaatttgaaacaaaggatcactttgtgctttctttcttaaggatttttttaggtagacaattgaaactgtggacaataatccacctccctccgggaatggaaacttcaggcgatactctgttcgcctattgatcttgctctagattagatgctggccttccaagatccattagcctgatttactattcagttcattgccaggagcctaaaatcattaaccataaacagtcctacatggctacatccttaatctattgctacttgctaactaacaggaatacaatatgtttggtaaaattaagatgctgatattttttttctcaaaaatatgtggatttttttattaaaacaagtatggatgtgtatttcacacttaatatattttgcacttttcatttagttagaagatcgttctgcaatatgttaacatcttgacagtaatcatttatatctgcggatgatggctgctacatggcaaaaggactgatgtggctatcgtgtcacccaaaaccacccaaaagaaggaaaaaaatcttgggatgttatttgaatttgttttgagagctggatctggttttggagatgaagagccaaaatgaaacattgagaataaaccttctcatttttactatagcaacatgtcattgcacattctgtgtaattgtggattgccaacttgacaagtattttggccatactacatattttggcatatgattctgttttgttggttgccccgtgttaagcacatattatgtgaaattgactgtgtcatccacttcgtgttttaataatacaacactgtctagagtattgttgcttatgtaactgggatatagtccttgcggtgacttaatgcttgcaaatgcgtcatttttttccacaatgggaaacctgaattccattaccgtaagcaatgaaattacagcaaagattacctgaattgtcacctaatacttgcaaatatgtgccaggtaaggagtttgaaaccttcgcaaaggtggttgtt

SEQ ID NO: 5125 - DNA, 11483 bp, Sorghum bicolor
  Intron number 2 from transcript Sb07g026180.1 (locus Sb07g 026180) derived from phytozome v7.0 (chr-ID chromosome_7; pos 61350378 to 61361860 reverse strand)
aggcacgagagtcaagggtcaactgcaatatacaggttaagcataaatatttgataaaaataatacaaaaatatatatcactgcttttgtacataacgcaactgcacaaagggtcatctcccatggtccgtaaatccccatttttaaacgttagagatttaccgtcaacactttctttcttttcagaattttggtaacagttaattaaccatgaaagatacaagtttcttccaaaaaaatgcacatgcatattgaaaaattagacatctttttccccagaggccacacttggagctacataccctgccctaagcttgctagtcacgatgaacatattttttttgcgcgaatatgtatatgcgtgtgatttttagactttggtcccgtgacccctccaccccactttagaaaaaaaaacactggtacatttagttggtataaatgatttgtacatcgacggtataaatagccatttcttttttgagagcgtgttcaacatttatttcattaaggtcaatagagttttattagagttttatggacattaaatatgctgatgtggtattatattaatgaaaaaaagatatgataagagttttatgggagtagagagagttttatgatgatgaaactcttttacactgtttctaatatggatgtgttggaaattgggtcatgaaatctccagtgagaatggcctaagaggagttagaaaaaaaaggtacacaatatcatttcatcttgagatgccattagtgatagggtaaacaccgacacaaagcaccgcgaaacggtggactacattgaattgtaactaagtaagaaactaattgcgcgacctaagtagcgtatgtgctcacagcaacgtgtccattgccctgcattaacgcgaggcgttcttggggaatagctctcacatcgccaccctcttggaagatgacagaggattcgtgaatgtctcatggaacatgttggtgatggtgttgcctagtgtttttgttgctttggtctccgagcgtttcatccatttgccaaggagcacacatctcccctgcttcttaggaatcgagtcacggtaagtcgacttggtggcaaggtggtcactgcatcgtggcaccagatcacgatcgacctacttggatgtagtaggacacggcagaagccaagattggctccatcagaggtttcttaagggatgcgatgaaggtggcgacctcaaattgagtagttgtcggcggctatgacaaagtgaccaccatggctgaatatgcctcgtcaggttggtgtttgaaggagttatgtgggacttctccacttgagacccaacgagcattagaaccacaaagttgagggggctgaagtctagagaagcttgtggcccagtaggtagcgccacaatggcctccgaaggcgacaaaattgaggttgcagtttcatccagggtgcccttctccaactcctccccagacgagaagttattggggagcggtgtgcagacagacggtgcggatagccccatttgcctattgttgtttggtggacaggcaccgtcaccgtgctgccacaattgagaggaatggtctagtgccacgtagtgtgcagagctccaaatagatgactgttgttgggacacagcttgcgacagctcaattccgaccctaatggcctcgacattgtcccctagtggtcgttgatcctctgagactagcaacatttgatctaggcgagtgggagattttgaattgctgtgagcgtagtttgaaattgaaagcaaggatgggtttggcctgtagcggtagaggtcaattagctcctgctgatgtcggatggaccgatgaaaggtcctataatatgactagaggggggtgaataaatataatgaagaagaaaggagttattcctcaagtagatttatgtttctactgaatgaataaatatgatatgagatggagggtcacacttgcgatggcacacaccacacttcgagaggaaggggtctttggttcgcacctatttaaaaactctacaaagtactagagcaaaaggttagtaaataacaaagtaaagctttttgctctagctctaattaagagtttataagctacctgcctcaaaaattctagttagtaagatcactaggcacacaagagctaagtcactattgtgtatcataaatgtgaaatatcaatcatacacgtcatctatgatataccaaatatgtcaggcaccataactttcataagataaataaggcgcatgctgatacttgacattgttcaatttgttttttcattgaaaaaatccccaaattctaaaggaggtacaatctaggaaggtcacattcgagaatttaaatatgatacgatttatcttgacctaatcatatgaagttaaagattaaacctatttgttaagaagaaagacagagatcaacacctaagccacatttgggttcctccaatgcattgacttgacataagcaagacataaaattagagaggtcaccaagattattagattagatcaagaaccgtacctacactaggactcaaaagagagttgctattatgattctgagtttcatggactcctacttgcgtgttgggggactttagaggatactatataatcaaagagttggaggccatgagggccatcaagccattaataataaactcatggaagtattgtaagttgcaactaagagggctcaaaacaataagctatgaaaattctaaagtacaaaacttttgtatatttcaagattttttttagacgagggatcttcccccatttccattgaaaaacaatggaaataccattcatacagagagtttgtagagcagaaagtaaactagagtaaagcttacatgaatgaacactcaagaccgcgacaagtaaagcaactatggcttaccaacaaacaactgtggtagcacaaaagagccaacaaggctaacaaacgattcaaactgaggaaacgtcagacaacaaaatagtcacatgaccagcagtcttcaaaagaaggattccttgagagcttctaacactattttatccatatgacacctcaattgctttgttcatcaggcttgtcatcttgatcctttgacttggcatcttctaatgagtggttcctttgtacttttgcctccttgcccaccagctgcaaggcaatttttagcattgtatttgccccagcaactagttgatccttgtcatcatccaagaacaaatccacccaatattccataagtgaacaagcataacaaataatagaaattagacttgtaacagtctttccctcaaaacaaacattgttgcgtgttttccaaatcgcatagcaaatagccacaatgcctaaagcatgaaatttctcacaaaaggtagccaatgctcacaccatatccaacattgatcaaagtttctaggtacattagaagcacctaagtaatgtgccacaatggcccacacagccttagccaaactacactgaaataagagatgtgagacagattcattacactcacaaaacaagcataatggatctccattccatttcctcttacacatattatctctggtgagtattgcattattgcaacaagccataaaaatattttgagcttagcagggatatttcctttccaatttttttataataagggccatcatcatttgaagtaagagacttataaactgacttaacagagaagcaaccattcttaccaaatttctagaaaaccatatcctcttcatcagtcaaagtaatcctctcaaccttgctaaggatattatcccaatctaatctcatattatctaccaaccatctagtgaaactagcagaactttgtttcatttgtgacacagaaatatcaggttgcaagcaaattttaaacaaatctagaaacacacactcaagaggtgtttatcaaatatctaactatccatccagaatagagtcttcttaccattttttactttcagctttcgtccttgtaaatatgtgtttcttatttttaggagatcaacccaaatcgttgactcgttctgtccgtgtttcacagtacatatagtgtctttcctcaaatatttgtattctataatgtcttgccaaaggcctttctcattatcaagcttccaccaccatttacaaagcagactaatattcattttcttgagatctttaatacctagtcctcctttctttttgtgcttatagatttttatccactttatcaaatgatattttttcttagtacccccaccttgccagaaaaacttccttctaactctgtctaatctgtcaatgatagttttgggtagcggatatatagacatatgataaattggtgaattacttaagctagaattgattaagattgtccttctagcaatagacatcatgcctcctttccaagagtctagctttttactatttttttcaaccaaaggaagccagtcaataacatgtaatctacttgggctgacaggaacaccatgatatttgatagaaaaaaataccagtttgacaactgaaaatatcagcatagatactagcccaattggcattatcatttataatcggtacttcacttttatagaaattaatcttgagtccagccatcaattcatacatatataaatgcaacttcatattcctagctccctcaagattatgcttgagacaaactatagtatcatcagcatattgtaacacagctacacccttattcacaatatgatctcctaagcctgtaaaaagatcgtttgattgagctttgcgaatcattcgagatagaccatcagacacaaaattgaacaagattggtgataaagaatcacccaatctcactcctttaaaacttttaatataaggactagatatattgttcaatttcacactaacagtcccctagagactacttgttcaatccacttgcaccatttagcacaaaaacctctagcagctaaacagctaaataagaaattccatttgaccttatcattttttcaaagtctaatttaagaataaccctaatttggttcctcctcttggtctcatgaagtattttatgtaacaccataaccccactcataatatttcttcccttcataaaagttgtttgattaaggtgaataagcttgtctaccactttttaaagcctcaaagtcaatgtttttgtgatgagcttgtacaaatagttcaaaagacaaatatgtctaaattgttgaattttagaagcatgagtaattttggataaaagggtaataataccataattgattctactaatatcaattgttccttcataaaaatcactaaatagctgaattatgtcatctttaacaatattccaacaagtttggtaaaactcaatagaatcttatcaggaccggctgctttattttttttcatgtgaaacaaggcttcttaatttctgccttggagaagggtttagtaaaagttagattatcctcactagaaaccttttccaactcatcccataggctattatcaatgtgaatattatgctcctcaataggaccaaaaacatcagcatagtactcagttgcatgttttaatagattttcatcgccctcaattacaattccatcactttctaaaaataaaactgaattcttcctttttcctgccattagcaatgctatcaaagtatttactattactatcacctttaagcaaccatttatcatgacgtctctttacccaatatgtttcctcttgatctagcagctataaggattcattaatcagccaaactttcctaatcataagttcttgagtgagatcatcagtctcttcaattacttccaactcaaataattcttcactaatctttttcctctgttttctcaactccccttgtaaattgaatccccaacctttgaagtattgtttcaataactttaatttctattgtattctatccaaagaagttctagcattacactgttttgaccaaattttttcaactgccactaaaaacttaggattatctagccagttaagctcaaatctagactgtaaaaatttcaaaggtttatgataatcagaggtcattactaaaggattatgatcaaatatttctctagggagtctcttaaccataacaattggaaaaaaattcccaatctttagaaaccaaaatcctatcaaatttttcaagagtgggatcctcgtggttattagaccaagggtaaaggccctcagtcataacaattttttaagctcatagaaaccaatcagagaattaaagaggtttgaaaacttagttaaaccatgaggtttattcctttcattagcatatctgaagatgttataatcaccacctatcaaaataggatttgaatttcgagaacaaaatgaagagggttcagagaggaactccatctttttatcatcatgtgctgcttcatataattacttttatcccacaaattcatttgaagcatgaggtcacccttttgaaaagatccaacatcataaaattcattctcactcccactagaataccactagatctcctttagaaggattgtatagccacaaatagtccttatttgaatcaaacttcctaagaatcttttcatcacaatctttaatcatagtttcttgtaatccaataaaatgaaaacaattttgaaatatcaagtctttgagaaaggtaaacactccttttttcctaagaccctaacacttccaaattattccattgacagtcatttttagtttttttggaattttttagaacagtaaccttactagatttctgtcttgttttccttagatcaccaggattttcctatgtgattttcttactattttgtaaggtagaaagcattaaactttttctttgttctcttttctcttccttgattcaacaagaataaaatcttctgattcaaaagattcctcatgaatccactcagctcaaggaacattatcctcatgaatcccctcaaccgactcagtttgaggtttttgatttttcaacatttgcttttggtacagatcatccctagctttttctaggtctcttactagattaaaagtatcaaaactattatcctcaaccacaattcccatacaaaaggtaacatgagcaatatcatcatttagtaatgcagaaaaggaattgtaattataagagttaccttcaagatttgttttatgagcattcctctccacctcttccacatttgtcagagttgcatctttcttaagcctttcacttcttctttcttgtatttgatttgttgcaagaatcagattgaggaggagcctcatccctctgagtagtaccatcaatgtccatattttcactatcttgagtgtttataatgttatcatcagataggaagattttaggagagtgtgtgttgatagttatactcacaccttttctattaccattatagatcttgtcagccagctcatcatgtgacatatctttgataacaacatttgaggtctcattcgtaaaccatatttgctttgaagtatcctcttgatcaatttttgaagactgaccatcaccacccataccagccaatagagctaatttctgagcaaatgagtcactatcagaatcaaaatcttcaagagtgtcaggaatgtggactttttccccatcatcaacattacacctcttcttataagttttttagcatcgctcatcagcttggttggagtggtatgagttgtgtccactttaggaggagctgaccaatatattttagactgtttgccaaagttcttatcattgttatgattattgttgatctctatgctatgagatgcatcctttttctcctcttgctgactctgttccgtttctatactagatttagttcttttagcagggggctgaaaatcaggatcacccactataattccacttttgagcatcttgggtccactttctatagcaacttccctttcaaaaccaaaatctatcaaatactccctccgtcccaaattataagtcattccaagaattttggagagtcaaagtttttcaagtttgaccaaatttatatagcaaaataataagattttttgtagcaaccaagtatcattagattctttgttagttatattttcatagtgtacccattttatgacataaatctttatatttctctctatatttttggtcaaacttggaaatgctttgactctccaagattcttggaatgacttataatttggaacggagggagtacattcctagcaaactttcagcagtttttggcactctagtgacatccctgcaagctatcttcagtcaaacataatcatatttgtatttggatccttcatcaatttccataactttcccaaccaggccacctatcttagctagggttttgatagatcttcgatcaatagggaccccactaaatctgaaccaattaagcagattgcaaaacacctttagcacccacagtaggagaccaagcctcaatcataatttgagcttcatttcttagagtcagattttaatatgactccactcattcaccatcttagcattaggaaaccttagcaaaaacctcgtctcagctactgggcatactatccatctctacacataggagtcgccacatgagccatccctaccacagattataggtaatccccattattgatggtaataactatcagtctatcacctttgccaaggagcatcgtcaggtgggtcagagagtggtagccattactgtgggtagtgattatggcttatcttcttgtccatggtgaaggggaaactagagttgatgttgttaatttggtagagctttagatctactttagatatgatccactctagatccatggatatggaaatgaaatctagatatagatttggagccctaccaaacaagacctaagggttgcttagtatagtggggtatcacaacaaatcactagtattgaatttgtctacatctattgggacaattgtgatcatagatctccgaggccgccgacaccttattgaccccatggacgaagtcatcatcatcaaagtagtagtcaatatcattgcaatttttcatcctcatgatccttgttaggatctctctctccataacacccatcttccttagatcatgttcttctatcccattgttgttgctcaactctcattgcacgtactcctcatcctcctacgcctcctcctagggctccaagtcctcgagccacaaaaaaaggctctaagtcctcttcatagctacatgaggggttcatcctcgacaagtagagacattgtcgtcctctacctcatggtctctttgttatcttcctcattctattacttgacatggaaagccacccaccagatagtaattaacctcataaaggagaataatggctacaacaacataaaccacccataaggtagctatagcagataccaatgcaaggaaaatggatttaaagaatgtattcatgtcctattgaccttacatattccatataagtgaactcgagcaccctacgtgataacaatgctatcatagatgggttaaagcaaaagaccaactcgtctagatctataccatagatggttctctttttatgagccatttgtgaagtgggtagtcatcggtaattggtagatcgatttctatcatatctcctttgactcattgtttttgttttttctgtttgtgatattgtctttatcacagtctggtttggttttccttctttgatatgttagagatgtggccttctatatcatcatgatgtaaaataaaaggaaagaaatgtccacatcaccatgcaagtggcctccaagttgcaacaatgctagctgaataaacttcctgtatttgatatagatcttgtatcttgatggctccgatacttttccattggacataattgaagaacaatatctagtccgtttcaaaggaaggcaaaagctttgccacaagttttattatgagaaaacaaaaataagagttggcctagtatttaaggaaaattctggcattagtgaattatgttgtgaagtcgtatgtactaaattttcttcaacaaccacgatcatattatgatgaaaatgtaactatcatgtgttggtctcgtctcccccggcggcaaataataccatcagccaataggtgcagaccagtatgttagtttcaatctcatacgctaattcactttgggtgtgtttggttcgttttcttagacaagcctgactagcaaaactaagacaggctagctctgaccagctttaactaatgcaagtagcacgtgtttggttgcctgtactagctaagcttggctaagaattggtgtgtttggttgcctggtttactttgagtagactcacctcttccttcacctggtaattttacccccttacggaacttaagtcgaacatgttgtgggcatggtggacgccgggatgcccgcacagcagcttcgggcacatccccgctgcgcgccggaggtccgcgggcggcacgccggcctccagcagcaagtggtgttggaaaagagagctgagggaggggcagggcagccgccactgcgccacgcgcatggactggtacgcgtggctgtcgcggacggggctggcaccgtcgctgacgtacgtgtacgagcgcctgttcagccggaacgagctggagcccagggacgcggcgcacttcgaccacgacctgctcgagatcctcaagctggccaagaagcaggccgccgcggccggggatgacggagcggaagcggcgggggcgggcgccgcgtccacggcctcgtggctcgtgcgcagggccaaggtgcctgtcccgctgcatgcgccggctggcagaaggaggagacggaggcgggaggagacggaggggcgcgtcgtcgatcaccgtcgacccgaggatctacagtggcgatgacgacctgcggccttctcgcatgggggcgcacttgtcgagatctgccagacgggggactccgcctcccagtccgcggcggccggcaacgacgacctgcggccttctcgcgagcaatgcgtgggtgaggaggaggtgagcgccgaggcagtgaagaaggtgaggggatgtcgctgcggggctagccaagcctggcttgcagagaacggccgaatcggccgtttccagcaagccacccaaatcccctgatttgggcttggtggagcctggctagcaggccatccagccaaccaaacaagtccaggttgtattccataagcctggctagacccttatgcaggcaaccaaacacactctttatgttctacctcatggaatgcttttgcaaaattgaacaaattgattattattggaagtccttttaggaccccttatctaaacattatgcagtttgttattgatatgtcaaatatgtattctaatcaaaaggactagtgtgattttctcatagtatgcatgttttttcttgctttccctgcagctttctcaga

SEQ ID NO: 5126 - DNA, 58439 bp, Sorghum bicolor
  Intron number 7 from transcript Sb02g012440.1 (locus Sb02g 012440) derived from phytozome v7.0 (chr-ID chromosome_2; pos 20998801 to 21057239)
cccgctgtgccgcgcacccataatcgaggtgatccgagcatacttcatcatgtagatacaaggaagacagcaagaagatagaagaagcgtgaattgtttttggtctgtgtggagttgttagcgggtggtgtatgattgtattcaattttgttcattctatctaatgtgttggttaatttttctctgggttcatttcgttttggtctgcctgccctattgtaagtaatgtacggttttgggtgtggcggcagaacggggaggcggtcttctctgattgcgacttgggtcactgctaattttgttccacaacgagtcaacgactaatggtggctggggtggttgaaacatgaaaaaggaggaaattactggtatctttgttcgtgcagcacggtgtgcggcttggccatggccgccttggattgttttgtgcgattttgatgtgggtcttggcttccttaagatatggtggtggtcatgatggctcgcttgttttataagatctttttttttgttagccagtagtgtttatctttcacaacaaatcagcgaatttagtcatgacttttagacaagcgaatatgatagatatttcaggtctctagttcttagatggatgcgaaagtggtgctatgtatcatggtgatgctgtttcccggatgcttgatttttattttctcggacaactgaggtcttatttggttgcacttcaatcactccaattcgggttttttgggtaggtgccgcgtgctgcgagggagaatcgtgtgttgtgaggagatggtatacatgattcaatttttatgaaattttattacagttaaagcatacaataattagctcatcataaaaatttcaccacaattagacataaaaatcgtagctatgaattattctatttaattacaaaaaaatatggatctaaagctataaaaaaactttgtactaaagcatattatattatatgttcactgtctaaatctacttgtatgaagtccaaaaatttagattttttattttttattttttttgtgatttattatgatttttcaaagatttagatcttgtttagttcgcgaaaagaaaaatttttgggtactgtaacacatttgtaaccatagtaattactatccaattatgaactaattaggtttaaaagattcgtctcgcaaaatacatgcaaacaatgtaattagttatcttttaatctatatttatgttctatatgtgtccaaacatttaatatgtgaaaagcccaagtttggttttggtaattaatgacatcaagttgctaatgtttttatgttaaagtgatttgagttagatatagcaacacaagtgatgaaaagagctaagtggcatgaagtggtggccactagatcacaaaaagatggagcatgaatatggaaatgaagatcatgatgatcaagcacttagtggtagacaaggagcaaagtaatcaaggcaaaggtataactacagagttttgcttttgccggtctaatatgagtagagaagtgattgaccggatttaggataaatagtcgactgtcaagagagaaaatcacggtcatctctcgaatcaagtgctactaggtcgacatcttgagcatatgcattaggatctactccctccatcccaaattgtaagtcgtttgacttttttaccctaagtttgaccactcgtcttattcaaaaaaattgtgcaaatatagtcaaatttaagtcattcttgaagaacttttattaataaaccaatacacaacaaaaaagtgatattttgtacaaaactttgaataagacgagtggtcaaacttgatattaaaaaagtcaaacgacttacaatttgggatggattgagtagtaaagtgctaacctgactcttttgaagaaaatgttgtgaaatactaacacacatgcactttggtgttgacaaatttgcaaaggacgtggagcttgaagggtagagaggggtttgggttcctctctccctcctgttgagcttgctaggctggattcggtgcttttgagaaaataaaatatatttttttctatggcataggaggaaagtttcagaaaagtcatacaagtgtttttcgttgtgaaattgttgacgatagataacgtctacttttaaccgtcaaccttccttgaaaactgcaacaatatcatagaataggaggttattactaatcatttccacgagttttggtgaattgtcggtttttcagggaattatccagaaagtgcataattgaagattaaagtgcataaaagccatgaaacttaaccgcgacggaaaatatcgctagagggatgaggaaggatctaaagacaccagaatgccagccccaccagccaggccggccggccttctagggtggcccccacctgtcagcctctacgtacctttgaggatgcatcttggccctacgttaagtcggtttgatcctacggttgatgttcattccaccaggctatttaaacggagctagacccccctagaggagagccagatcaatgaagagctgaagagtcaaaaaccctaattcctatctagtagatctaggttggcaatcaagaaagctagttcaatctagaactagttcttatttagagattagagagatagagttggagagtagagttctggagttccggcctatcggtgcttcttcgttgctatattctttgagataaacctcctcgcccggagtttgcatcttgagatcatttggtagtcaacttctagttaaagtaagtgttttgttcatattattcttctagtttgcaactcttattgagtactttgatctagatagcttcttgattgaagtagtattcgtagcgtagacgtggtgttcgggctatgtttacttgtgaatgtcccctgtttttctagatagtggtagctcacgaaggtgactgatagcttcgttgaatcctctgtagtccacttcccatcaataggtttgacaagcaaaaggtgcttggtaggagagaactctgatttctactcctatcttattaagttatcgctcgtgatcatatgatataaaacaaccagttcaaagaccagaactagataatccatattgttctccttgttctcgctattttctagcttgattgtgcattgggttaagtttatagacttagtcatcgtcacctactgttcctttgggtttgatattttaaactgggtttatcttggtgaagtgctacaacggtattgtatcgtgcggttgcggataatcttgtttattgcgcacatttaattaataccaacaagcatttttggcactgttaccagggaacggtttgctaagattgactttaagtttagcttaatttctgtattatacttttccttttttatttagttttttcttagttttcgtttttatctttttctatggaacccgtagcacaactcttatatcaatacagggcaccatcgggctcacatttacagccagtagaatcatctaaacccattacatcatctggctatgagctatgcccggggttaattcatttagttcaggaaaatgttttttctggtagttctagcgaaaacccctattcccgtttgaatgattttgaagaaacttgttcatgtctacacattaaaggaatggcagatgaaacactaaggtgaaaggttttttcgttttcattaacgaggcgagctaaacactggtataagcgtcatgttgggagtagtcagggagattgggaagcgttatgttctagcttttatcttaaatttttccctatcgagaaagttgctaaactacgttttgaaatcataggttttaaacaattagataatgaatcattaggtaaggcttgggaacgttttgacaattttataaattcaggtcctagtattgctttgccagaacctatgctcttacaaacacttctttttgggccttaatgaaaagaataaagaatatcttaatttggccgcgagaggagcgttcatgtatactactgctacacatgcaaaaactattcttatgaatattttgaatgatcttcctgaagagaaagtagagtcaatagctaagtctgaatcattgcttgaatctcaacctttagctattttgaaacctgaacttttgaatgaaaaagaggaaatcccatttcctgattttatgctttaattagaagattatctttttgatgattatgggaatacctctaattaccaagtaattatgaaacctcaagaatctagggaattcaaaaatatcgatttcattcatccttttgaggtaaagttttttaaaaagtttaccaaagagttagtctttgtcttaagtgaagaatggttagaagaatcaaaactttcaaaagatgtcatctgtttgaattattcttatgttacttttgagtgtcagattgataaacatccttttactacacattataatccaattgtgggtgttaatatcatgtctctttcgtttgctaaaagatttgtggaagatatgccattaattccaactattaaaactttgaagagtctttcaggtcacattattccaagtttatgagtcttatgttctcttcctattttggtttatggagttcaagttccattaaattaccatatctttggtgtttgggagtttgatgtgttaataggtttaccaataggaaaacttattagagaaggtcaaaaacagaaattagatattagtcttgggaaaggttacaagctctctacgcctatatcccataccttgaaaactagagtagaactacttcctgagcgagatccaatagaggagattaatgctgcttttattgataaatttttagaaccatctatagatggcgatgacgcccaattcttcattgaagaagaggaagaggaaccatctaatcctgaacctctcgatgaattactagagcctcctaaaccccctattgagcttaaacccttaccttctggcttaaaatatgtttttctgaataatgcccaggaatctcttgtgatcataagtgataaactctctcaagaagaatctttacgcctaatcactattttagagaaacatcgtgctgctcttagatactcactccaagatcttaagggaagcagtcctgttctttgcacccattgcataccaaccaatcctgaagttacacctactaaagaaccccaacatagacttaataatgcgatgagagaggtagtaaaaaaagaagttttaaagttgctacacgctgggattatgtatcctatgccacatagtgagtgggtaagccctgttcaagttgtacctaagaagggtggtatgactgttgttagaaatgataggaatgagttaattccttagagaactgttactagatggcgtatgtgcatagattatagaaaacttaataaaacaatgaggaaatatcactttccactacctttcattgatgagatgttagagcgtttagcgaatcactctttcttttgctttttagatggttactaggtagtgtgcccgtgtgttgctacggaatatctaatatttttaatttaaaatacatagttcgcataataagataataatattgtaatctcctacttattggcatatctgtttgacatatctatttgttggcatattataatctatttgtttgacattctaatttgcattgcagatatagcttctaatgtgtgtatgcaatagttgttcagatgaaacatatgcagtcggctgccttatgtggtgagccttggtgctgccttactttaaaaaaacaaaaaatacagaatgattgtcaaatgcacacatgcttatacactcgtatagagggataggaatacactcgtacttagggatgggaagctagatacggtcacggctgttacaactacttgacaaaatataaattgtagatacagggtcacgactgttacaactgcttgacaaaatataaattgtagatacgggcacgactgttaatatactcttcccatcatgttataaattttacaattgttaggagatttttagcacaaaatgatagctattcataaaatataatttatttatttacaataaaacactctaggtaattatgccatcacataagtatgtatagagtatctctctgtagagtttgataagccaattgaaaatccataagaacaataacaaatatggagatagtgagatattatttgtgcagaaaaatttaaattaaaaaaatgcaattatgaatcagtaaagtaatattacctcatctatggcgttaggacctccttgtatacaatattttttctgagaacggcctgtgcgttgctaacagtttatactaaaaatacatagatcacacaataagattttaatactgtaaaatttaagtattaacattaaaatatatagaggtgcggagcgggggcgcagggaggagtgtcgggggtcgcggtggttcaacggcctggtgcggaggcgacttgatgacaacggattggagacggtggcttggaggtcgaactgatcgtgggggcgcacggtgcgggggcggcttggcgacgacggcttggaggtcgaactgatcgcgagggcgcacgtcgcggtgccgtgcgagcggcagcttggaggtcgagctgattcccacgaggatgaactgatcgcgaggacgaaatgatcgagggggtgacgtcacggtgtcgtgcaagcggcggcttggaggttgaaatgatccggcggcttagaggtcgaactgatcacgagggcgcacgtcgcggtgtcgtgcaagcggcagcttggaggtcgaactgattcctgtgagcacgaactgatcgaggggttgacgttgtggtgtcgtgcgagcggcggcttgaaggttgaaatgatccctacgcacattgcagtgccggattctttttgtgcagtgtctgtatgagattttttttttgtttccttctgaaatctgaactgatcgcgggcgattgaaggatttttgtttccttttgaacggtgccggattccttttgtgcagcgcagcgtgcgtatgagatttttttttgtttccttttgaaactgaactgaccgagatcgcacatcgagttgctgggttgcacgtcgggttgctaggtttctttttcatccgtacgcgttatggtttccttttggagctgcgcaggatcgcaaggggagatgaaacttgaggttacgccaaaaccaaagttgcacgaaaaaattatcttctttttgttctttttagttgtaggagactctggataccaccaaattcctattcactctgatgatcaaagcaaaaccacttttacatgtccctatggaacttatgcttatcatagaatgtcttttaggttgtgtgatgcacctgcttctttccaaagatgtatgatgtctatattttctgatatgattgaagaaatcatgaaagtttttatgaatgatttttccatttatggaaagacttttggtgattgtcttgaaaatttagataaggttttgtagagatgtgaagaaaaacacttagtccttaattgggaaaagtgtcatttcatggtaagagaagggatagtgatggggcacttagtgtctgaaagaggtatagaggtagatagagctcaaattgaagtaattgaacaactacctccacctgtgaatataaaaggaatccgaagttttcttggtcattgtggtttctatcgtcgtttcataaaagagttttcacatattgctagacccttgaccagtttgttagctgttccctttgagtttgatgatgcatgtttacaatcttttaatctctactataattgaaatcttctccaggcaaatcccacctacaagatcaacgactcacaacacatgtcctacagattagacggcccagattagaagtatgatcacgaccttacacaccttcagcctcgcgtcatctctactctccgtgaaaactccgtatcgcagaaaacctccaccatgcgtgcggctccgtcgcccaccgcgagcgtggccgccgctgcccgccccggtgctgcgccgcccgccgcgcccgccagagctgtaccagtccgctcgcccgcccatcctcgtagcgcgctgcccgaccatcgcccgccacccgccgcccgacgtcgccgatcgtagaaaaaaaggaaataaaccgcccgacgccgccgaggggtaagtcgacggagccaagggtccggctgtggcacccaacgtcgtacctccgcagcgccgcgaggtgctctcccgcctctgtgagcatcgtggtcggtgacgcaccatcagggcacgagcacccgttgatcgatctcgccgccgctgctgccgcaacttatagggcacgccgcgatcctaaacgggatcggccacgcccctcggtgcatccgcgctgtgtcggtcccagcgtgacgatgtcgctcctcaccgacgacgacccctccaacgacgccgcaccgagccgcccaccactttcctgctagcgtgctacactgctgctgctcgcgcgatccgatctgagttgttcagatccgttcatctgtgtagagataccgatcacagtgtacatctcattttcaggtaaacaatttactatgcaatgctttattttattttttttctttcggatgaacaacagggaaactatccctagatgttcaattttatgcgtagtggttgcaaattaaaataaccacaatgcttaaaaatatctagctaattacaacctatgtctccagcacactagcttcctaataaatactgattatggcacatgactattttacttattgggaagaaaatttctaacctgaagtgtacggctagatgtgaattttatgaagaaaattgtgcttactagaatgtagtcttttcatgttgcttatactggaaatggtcattgatccattgttttttagttgaaacgtgacttatttttttcttgattgggcaattgttctctgttagttgactgtatcttttgtgttcaatacttgttatcagaccagccttttatgggattcacattattttaataatgcattgttggtttttgaagttaagaaaaaacaatttttatgaatatagtttcaattgcatggatatgatcatacatgaaaacaagacgagactcaagggtagtggcgtggtgctgctctctgcctgttgccacgctgctgttgctcctctcttcttgccgacacaaccaaggtgagttggaatgtatttccaggttttcataaaacgagtttcaggtagcaaaagaaggaactaaaatacagttaccaattaccatgtagtatttcaatatcaatgcatcagctatcctattgagagaagtaggcttcacttgttttcacgcaatgagtttcaggtagcaaaagaaaaaactgctctattgcagtcctatgtatctgattgctgctagcctcgattgagaagtaggcttcacttgtttttttcatgagaaatagaggtcttcagtagtaacacttgtccggtgcatcacattatcatcgatatattatactaaatctggcacttaagaaataattgctttaccactttattgtttggtagcaaactgaatacctggtgtaacaaaatgtttgctctaatgaaatgtgtaagcaaactattgagatgcagtgttgcttgtatttatgtgggactgcaataaggaacttgcactaagaaattgctcgcaaacaggttgctgcttcgagagaggacggtggtgcttgtttcttgattaattgttcgagtagccaactaggtgtgttggattttacatgaatttgtatttgctggaatggagctgattacagatgggttatatatgcactagcctgctcaacacacagtctataggtaagccattcgatgaaatgctcttaaactcatcctaataggttctgtgttggttgtaccatggcctacatcagtgaaggactaggggtttcccctccttccagtttttagcaagttgtgttcactgaattttgttgttacatttctgacagcttgtactaaatctttgattggaggcctttaagggcctcaaattattttttgttgtctagagagttgacattgatatgtagggtgcaaccgtctccaagtgatcaagtttatcaagaactcatgttacctggcatttctttgccattttcctataaatgtttggtcactattaggtttactttgctaatatacaatataatttgcattgaaaagtatatactatttcgtgcaggaaaatggccaccacctcataattgtcgagaaagacacgtcatgctgggttgcataaggcttggttgagcacgcgtctggcactcatccaaatacaaggtagtggaacatgccaaattgttatgaaaaggcgaagctgatgtaagtccagatgagtctcaaattaagatttgccaaaattagtgagccacaataaaagtggtgttttttgaacataaatttttagtctactgcattattggttgtttgatttatatttatatttaaatatcaccgtagcgttagcacgggcaatatactagtactcttaaagaggcacttatttctacaccaatcattcaaccccctgattggtctttaccttatgaaattatgtgtgatgctagtgattatgctgtgggggcagttttggaacaaaccaaagataagaaacatcatgctattgcttatgctagtaaaactatgacaagagttcagcttaattatgcaacaactgaaaaagagcttttagctgttatttttgctattgataaatttagatcttacttagtgggagctaaagtaattgtttattctaatcatgatgctcttaaatatctgctcactaagaaagatgctaaaccccatttaataatatggattttgttactgttgacggtccttaatgctcacatttaaccgtcaactaatcatggaaaaggacctatatgcaaccaacatccaaaattagggcttcatctgttagaattccatgagttttggtgtttgtctatttctgaaggcccacacgtcgggtttacatagagatattaacgtgtgcgccaattttctatcatctagaagactccagaagccacgggaacgaacgggaggccgagcgggcccgggggcagggcgcccgccctccccccttgggcgctcgccctgccctggtgaccaatcagggcaggtctcgcggatcgtgctccaccgcctttgaggatcaaggaaaaccgtgcgattaaggtcggtttgatccgacggtccacgttcatttggaagggctatataagcaggccccctggcccctagagaacatatctcttctacagaatcaaagctagggtttcaattattcatccaagtagagaggatccctctagttcatctagttctagttctagttctagttcatctagttctagttagttctacttgtaatctagaaaatagggagagagaagaggggagtggaggaggagccagatctatcggatctttctcaacattgtacttttgcagcaactggttcattctttatcgttctccaagttcttcaattcataattcctgagttctttaattacttttatttacattcaagttatttattggattcctgcttgcatcaaattctctagtctttgcaacgctagagtagtaattaatagattagacgtggtgtttagtctttcaattacctggaattgcatccaatcctgcggattgttgtggtagccctagggtagtgacatccctaacggtcgacgtattccacctcgtttggatcggtatttgtaggaccgtagtcatagcttcctagccctcttctcatctctttctgtggttagtgttctgatgtcccgaaataaataatctttgaggtaattcttgattcttagatcaactagagaactctcaagaaacatcctctcttcccaccaaaaataattatatagttatccttgggcgatcttgaatcttaattagtacactcatgttccctgtggaaaatcgatactctggaatactcccggtgaaagcccaagtttggttttggtaattaatgacaccaagttgctaatgccttgtgtctaagtgatttgagttaggcatagcaacacatgtgatgaaggtgcatggtggcatggaaaggtggccacatgatcacaaagggatgaaacatgaagtggagatcatggtgatagacgaggagcaaagttatcaaggcaaaggtataaacatagggttttactttttccggtctaagatgagtagagaagtgattgaccgggcttatgataggtagccgactatcaagaggggaaatcacggtcatctctcgaatcaagtgctactaggtctacatcttgagcatatgcattaggatctggtaaagtgctaacgtaactcctttgggaaaatgtttgtgaaaagctaacacacatgcactttggtggtggacacttgttggtgttagcacatttgcaaaggaggtggagttcctagggttgagaggggtgtgggttcctctctccctcccgccgagcttgcgaggcgggattcggcgcttttgagaaaaataagtgtatattttctattgcgccggtgggaaatttggtgaagtcgtgggagtgttttctcactgagaaacactcaccggacgctgagtgcagaggcaccggacgccggcctcagagtctggtgtgcttggccttgctagggttaagcaccggacgctctctgagtgcgtccggtggttagcgtccggtgtgaggggtttttgcaaccctctctgcgcacgagtccggtgagcaccggaccgtccggtgaccagcgtccggtgaggtcgtgagtttgacaaactctcggcgcacgagtccggtgagcaccggaccgtccggtgtggaactacagagcgtccggtgatgcgcaggtgaccgttagaatctgacacgcgggattcaaagaggacacgtggccaactcaagtgcaccggacgcaaggagtcgagcgtccggtgctcacttagtagcgtccggtgcccccgttttcagcccagtgaaagtggccaacggctagtttctttgaggggcttataaatagaaggtggctgtcgacgaaagctagtcggcagtctaccttggggtatacccacggtagtagtttatcggtagacggtgcgtgaactacgaactcgacggtgacgcaagacacggacaagctttttatccaggttcggccgccgagttggcgtaatacctacgtcctgcgtctggttgtattgatttgtgctgagagaatatgatgtgataggggggtcccttgcccctccttatatagtctggagggcagggttacagatctagaaactaatcctagtcggttacaattgccatagataattcgatatcaattcctattctaaccgactagaatcctgcttgatctccacgtcttgtttccttgtgcgaaactccgagatgtcggatcaaaccttgaactcgtctcgtagtgggccaagcttcctggctaaagtctagccgtaagggtataggggtttatacccccacagctagtccccgagcaccatgtattgtgatgcaacacgccgtcttgagcttcttcgatcagcgaggcttgtcgtcttcaataagttggaaaatcgcccaaacagttgcaacggttccttgaccaactcgaaagacagttgatcaacattgacgtcgaagaaacaggttgtttgaagaatgcatggtgctctagaaaaaatttctttcctggtgaagtgtgcccactttacctttttgaaaggtagaggcatcaaaaaagcaagcaaattcaccgctaggtgaagtgtgcccacttagtccccgagcctggtagtaggtgacgtaggcacgtggtgccagggtcaaaagaaaattccccaaagtagttttgagacagagatgcatcgctagatgcatcgtaccgatgtagtccccgagcttgctggaaggcaaagtatgagccttgtagcaaggtctaaaaaattgaatttaccagtctccgagcatgtcatgctcgtctgcaatcgaaaagaccaatcgaccagtcccccaagcacttagtgtgcttcttggaattatatgttgctatactgtacgaccagtccccgagcgtcgagtgctcagtggtcggtgcatgctttaaagctttgagctgatagactgagcgaccagtccccgagcgtcgagtgctcggtggtcggtgcagtccttgaagttccgtgctgatagaatgggcgaccagtccccgagcgtcgagtgctcggtggtcggcgcagtccttgaagttccgagccgatagaatgggcgaccagtccccgagcgtcgagtgctcggtggtcggtgcagtccttgaagttccgagccgatagactgggcgaccagtccccgagcgtcgagtgctcagtggtcggtgcagtccccggattgttgactcactggcgtgtgtgtcttcttacttttgaaaagatctttccagttaaagttgacgtgacggggtctcctgacgatatgtcagacggatgcatgaaaagctgcacctggcaactgtacaaccgctctttgcatggtttgagaaaaggaaaccatcaattggtacgaaaactccgccgcattaattgtctataatcattgtaaaccgaaacgccgcgtccgccgcatggcctgcccacttcccgagaataccggaagtgggagaggtggggtcgcaggtttataagggcctaataggaccggctgtaccgcttctcctgccattgccttcaaaccttccgctctcatcttctccaatctcctgcatcttcctaactccagcccgcattcgcacctctaatggcgaagagcgactccaggaagagggccgaactgatggccaaggagtggaagaagtctcgcagcaccacaaaatctcttggtgacctcgtcgatatggggcttctgcacggcgcagagctcggcggctggagggcaccggatggggagagctaccccgaccctcgcgccggtgagatcgtcgtttttgaagatttcgttaagagaggctttggtgtccctgttcatccttttcttcaaggtcttcttttgtactatgagatcgggatttgcaatctgcacccgaactcaattctccttatttccaccttcattcacctgtgcgaggcctatgttggcatagagccacacttcgatcttttccagtatcttttctgtctgaggaagaagggagcagttggaggctccaaggttgcaggtggagtatacctcaaccttcgtgatgggatgaagaatcgctacctgcactgtccatggaacacttccttgaccgaatggtacaggaagtggttctacatcagggaggaaccgggcagctccacgttctgcgacgtgggatacgttcccgagaagagggcaagctggaccgaccgcccggagttcgacggtccagtggcggatctcatgaagctgatcgactggtcgcgcccagacgggcttggcgtggtcgacaacttcatttgccgccgggtgatgccctgccagaagagggtgcactcggcgtacgagtatgccggaagcgcagacccgaccaggatgcggtcggagatcttggagaaagcggaggtacaacagctgttgaatgagctgtttaacttcgcggatgggggcttcatccgtggcagtgatcgggtgcaagccttcaagttaggacgaccagcaccaaaggtatgtagcagagtctgtttgatcattcgtatatcgtctgcagttaactcatcgctgttgcttttgcaggtcggtgatgtcgaccggtgcgcagtgtatgtatcactggcaccggggatggaagatcctgtgggagaggtcccgccagagggggacgctgctcggtgtgctcattacaccagcagtgaggaagaccgagcccgccccgtcctgacctccgaggagagggtagcggggaaaaggccattgccggcagatcccttgccgacaccggagctgccggcagatctaccggcggagagcagccaagcgccgaagcgtcgtcggctcgtgcggatcgtcgacgacgacgacgacgaggaggctgcgccgtcgttggtccgacggcctcggagccgcccagacactgcgccggtcgccactgatcgagtggccagcggcgccgctgccccgcaaggtgtcgagacgggggcacaggtgccgaccggacgggcgaggaggaggttcaccgcgacccaccgtcggtcagacctgtaagtgttcgacttacgtattttggactcctcttttttttttaaacttttgttcctgtagtgcggcatcggatgtcgaccctggtcaaactgccagccagggagcgggtgagcctgcccgcggttctggggatgcggccccccagaccacagagcagccaacagctgcagtcgcgcctgggagcaccgaggggctcccgagcgcggcgccgactacaacaagcagcccgaccagggctggagaggctcccccaactgactcctcggagaagggaagatctccgacggctcctcctgccgggggaagtgaagtccccccgccgccccgagcaggagcctcttcggctgcgggctccccaggtctggtccaagggacagtaatgcctgggaccaccaccgggggtgacgcagcaccggaggaggaaacccgggcggcctccgacgacgaggtggaggagatcgagggtcgtccccgtgatggccgccaacacgtatatgtgtggcgccaacgcggggatcactttatcggtcatgaggaggtcgccgagaccgaagaggccgccagggtggagcgcgcggccaagcgccttgtcgacgaagtcaaggtaagcggctttttgtactgctgcgcattcttttgccttgtcttgcttgatcgttatatgcttgctttgtaggacgtaatgaaaacggcgaagtaccggaaacggtgctttgaccagatagaaggcgtcatggccgagaacaaggcccttgccgcggaggtagaccggttgcgggcggaggtcggggagaaggtggtcgagatgagcgccgaaaaggagcgtcgtctcgacctcgctcgtcgtctggccgaccagtaccggctgcaggaaggttagtcacacgctccgagcagtttcgcgtacttgtatagtttgctttgctgaccagtttaggattcacgcagacttggaggaggaggtggcgagcctccaacaagagaaggagcagctcagccaacagctcgccggtgcgcaggagtcggggcggcgagcggaagaggagttgggtcgaaaagaccgggagttagctggtaatgggtgccgccttgttggttgctgcctgcccctttgcttgtctggtatgccgaaagtaacgtttcgttttgtttgcagtgctcaaggtgaacaccaaaaagcacctggatgacctgatcaaggaccgggactcctggaaggccaactgttgcaggatctggaaaggagtgtccccggtcctagatctgctcagccccgagctcctggagagccagccccgcgcgccgcagttgaccccggtcgagaaggcgcaacgggcgtgggactggctccagcagtttgtgaaggacgccggggagtttgccggcgcgcacgtcctcagcatggtgcgcgcccactaccccctggtcgacttgagcaggctggagaaggggtacccgaaggaagtcggcccacaggaagcggacgaacttcggggtagtctgctggacttgtcgtcgacagtgatcggcgacatcaatctgtgcgggacggccactcctccagaccagccgagctcagataggtcggccagggagttgtcgggcgcgtccgttgcgggagatgggcggtcgacgcgtgcggtctcgaccagccaggcgccggtggccccgaccccttcgtccgggcagcagggccaggcgggtgatcagcccgagcagctaggccaataaagtagtctgtaggaatagactagtgtctgcccgtcagggtatttattgtaaactttgtatgtaaagtctgtaataaagtttgctttctgtcatgactgttgttttgagcgctgtaagaatatctgagtgacgtgtcaccgtatttgtcttggttgtcgctaagagcatccgttgcaggagttttgccgagtgctgtgtgtgacaaggtatgggccaaaaaatagagaatttcattatcaaaaattataagatacttacaaaagaaagtcattaaaaatctttatggatagaaacgtcgcagcttgtcgatgtgccaagagttaggcactcgtgttccgtctgggtatgccaatctgtaggacgtaggtcgtgtgacctcggtcaccacaaagggtccttcccagggagtggatagcttgtgcattccctcctggcttgttttccatcgaagcaccagatcgccgaccacgaaagaacggtccttgacattcctgttgtagtatcgcctgactgctgcgagatattttgctgttcggagacacgaaactaaacgcttttcctccatgcaattgatttcgagtcctctggcgttgtcggcggtcgcctggtcgaagtgctcgattctaggagatccgaagtgtatgtcagacggcaagaccgcctctgcaccgtacaccatgaagtagggagatacccctgtgtttcgactggtctgagttcggaggccccagaccactgccggcaattctttcatccatcgaccgggtgctctgtcgttttcggtgtacaaccttttctttagggcatcaacgatcattccgttagcacgttcaacttgaccgttggcacgtggatgtgccactgacacatattttatgactatgcctctgtcatcgcagaaatcccaaaaagtggtgctagtaaactgagtgcccaggtcggtgattatgctgttcgggatgccgaatctgtgtatgatttgactgaggaactccacagccttctcggaggttgccttgaccaggggcatgtattcaatccacttggagaacttgtcgattaacacgaagacaaacttaaaattgcccggggctggtttaaatggtccgatcatgtcaagcccccagcaagcaaagggccaagacgccgggatggtttgaatttcatgggcaggtacgtgggtcctcttagcgaaaaactgacatccttcgcaatgccgaaccagtttttctgcgtcgctgaccgcggttggccaataaaaacctgctcagaaagcctttccgaccagcgttctagatgtggcgtggttgccgcaggatccggcgtgtatgtcctccaagagcttgataccatcatcttggggtatgcacttgagcagtacttcggagcttgcgtttttccgcatgagttttccgtcgaccaggatgtagttctttgatcgtcggatgagacgctcgttctctgttttgtcctgaaaacctgtcccgtctgagatgtatttgatgaacgggatacgccagtcacgcccaccggttgtcggagtggcgtcatctatgagcattgcctcggtgggttgcttgtcgaccaggggggagcttacgctcggctcatggatgtcctggacgaaaataccccgcgggatttgggcccgagacgagcctaactttgacaacgcatctgctgcttggttcttatcccggaccacgtggatgtactctatgccatagaagttagtttcccatttgcgaatttctttgcagtagagatccatcttctcgtgggttgcgtcccattccttgttgagctggttgatgaccaaagcggagtcgccgtagacatagaggcgcttgacccccagttcaacggctagtcgtacgccttgtaagcatgcttcgtattcggcgacattgtttgacgccggaaaaaggatccgaaggacgtagcggagtttgtccttgttgggcgatacgaacaatatcccagcgcctgcaccgttgatgttcaaggacccatcaaagaacattgaccagtggtctgagacatctggaacggaaggctcgttgagatccgtccattcggcaatgaaatcgaccagggcttgagacttgacggtggtgcgactctggaactctagggaaaatggacataattccattgcccatttcacgattctgccattggcgtctttgttgcgcaggatgtccccgagaggaaagctggttgtcaccaggactcgatggccgtcgaagtagtgcttcagctttcttgatgttatcaggatggcgtatataagcttctgtatttgtgggtacctggccttggattcgtttaaaacttcgcttatgaagtaaacgggtctctggaccttgaagacgtgacctggttcatctcgctcgaccactattgccgtggaaacaaccctgtcggttgcagcaatgtaaaggagtaggtcttcattgggctgaggcgctgtgaggacaggcggtgaagtgaggaaggtcttaagctgagtgaacgcagcgtcggcttcctctgtccaagagaatttttctgacgctttcagtagtttgaagaaagggaggcctttttctcccagccttgcgatgaaacgactgagggcggccatgcatccggttagcttctgaatatccttgacgttcttcggtggtcgcatgtcgagtacggctttgacttttgaagggtttggtcgtatccggccgttgagtcgaccacctcgtcgatgcgaggaagaccaaaaggatctttaggacagtgtttgttgagatcggtgtaatcaacgcacatctccattcattattctttttgcgtacgagaaccggattggcgagccaatcgggatgatacacttcttttatgaatctggctgctagaagccgtgttatttctgtcctaatagcctcctttttgtcacgagcgaaccgtcgcagtttttgcttgattggtcttgcggtcttcgagacgtttaaggagtgctcgatcaggtttcgtgggacaccgggcatgtctgcgggtttccatgcgaaaacgctcacgttgtcccttagaaacctgacgagcgcgtcttcctattttggatccaggttagccccgatgagggctgtcttctcggggttgccttcgaccagctgcacttctttgtactccttggatttcgaattctttctggctgtctcctgctcaggtaatcggagctggtcgggaggcagctgtgcggcttggcttgctgtttccgccatgcggattgagaggtcaattgcctcggtgatcttgaagctttcttcttcgcaggtgtacgccgtgtagacgttgcctctgacggttaggacacccttctccgtgggcatcttaagcactaggtatgagtagtgcgggactgccatgaactttgtcagcgatgggcggcccagtatggcgtggtaggtcccgtcgaagtccgcgactacgaagttgatgaactccgtccggaagtgatcgggtgtgccgaattggacaggcaatgttatctgtccgaggggcaccgaactttgacctggcaaaacgccccagaattgggcgtcgtaaggttttagttgcgccggtgatatctttagggcgggcaggctgttgcggaagagaatgtcgatggagcttcccccgtccacgagcacgcgctcgaatctgatgctattgatgcagggatcaagaatcagtgggaaacgtcccggctctgggatagcggcccactggtccttcctgctgaacgagatctccctgtgggaccacgcgggaaattttggatctgcgatcagcccgtccatgctgtctatgttgaggcaggctctctttaacagctttctttctcgtttggactcagtggagaccttgcccccgaaaatggagtggaccacgtcggtggggctgacgtattggtgtcgggggtccctgtcttggtcctcatcctcatcttcgtggtcgtgcccgtcgcgtttgttatttttcttggcggagtcctcttgggcggcccgccgtgtatagatacttttgaggacgcgacactcttccatggtatggttagactttgggtgtagctggcacggtcccttcaacgttttgttgtagtcgtcttggtagtcccgtcgtccgttgggacgtttgaccgtatttacttcgtggtcgtattcacgagggcgctttcctctgaagtcgtcgcggctgtcgcgccgccgatcccaaccctctcggtgatcgcggttgtcggagcggcggtgatttctgttgtcgtagcgaccacgaccgtcatcccgccgagaaggctggtcggggcctctcgcgtcgtctcggattagtttttctgcgtcatcagcatcggcgtagtttttagccgtggcgaggagctctgctaccgttgatgggcgtttacgcagcagcttgttcctcagcgcttcatggaaacgcaagcccttgataaaggctgatatggcctcgtcgtgagaaatcttcgggattttgaggcgcatatccgagaatcgtcggatgtaatcgcgcagaggttcattcttcctgtctcttatcctttcaaggtcatacttgttcccgggctgctcgcatgtggcgatgaagttgtcgatgaaagcctgtcgtagctcttcccaagattcgaaggagtcctcgggcaagccgagaagccactgatgaccagcctggtcgaggactacggggaagtagttagccatgacgtgctcatctcctgccgctgatcggacggcgatttcataaagagtgatccagttctctggattttccttgccgtcgtattttttaagtttttcgagcttgaaattgcggggccacacgacctggcggaggtgtgaggagaactgccttaggcccggaggaccgtgggtcacgtcgtactcgatgcggcgcaggttttcgtggactgctctctctgcggcgcgcctgttgatgcggtcccgggcatctttgggagggatgttgtggcggagatccctgtgttgatcttcttcttcttggccgcgtacacggttctgctggcggcgaccatcggcgtcccgaccaccatcgtcgcgccgtgagtcccctcgacggttgtcgggggagcggctgcggcggcgcctgctgggtgaggcccggctgcgattagtctggtcggaggcggcttccgtataagagacgtcctggactctcttgagcagagtggctgtctgtcccattgcggcgatcaggtgtgctcggatactggtccggactccctggcattcgggggtgtcaggaagccgatccaggttggccatggcgacagccacgttggcgcttggcgttttgtagaccggctggtccccgaccatgtcaaaggcatcgttgaggttgcttggtggcatctgttgttgctcgtccgcacgccgtcgggcgcgatcggcgttacgctgttcgcggagttgcctctggtcatctgtttctccgtcaacggccggttcgtcggcgctgacattgaacacgatatcccctcgccgagggggggaatatcgggaatcggtcgaaacccggagggtgtgaaggaaaatccaggtcgtagccctcgtcttcggtgtttataacctcggtggggacggagccggtgcttgagttggtgctggaaacctggccgtcccgtagctctcggattgtcaccatgttgacatggtgacgattgttccttgtcggcgaccagcccgctttgctgaaaacggattggacatgctgtgagtaaacagaggccgagttattcaggccgcaaggatagtctccctttttgagctcgacggatcgtcctgagggggttgaggttatcgtcagggacgttcccggccgttcgtgtgtggtgacacgagttggccggcaggatttcgaaaaatccgctcgagcggcttggtcgggccggcggagaactccatctattagttgggagacttcgagcagcttggagtcggcgcgatcgagcgcttggaggaggtccgagcagtcgatctcctttcccttgtagagtgggaacggtggtcgggagcttggtgccgtcatgcgtgtggtcggagacggcgtgatctcagattggatctggatctctttcggaaccgtggtcgggaagccgccgctgcacgtcgtccacgtgatctggccgacggtgaacgtgaggccttcgggcacggtcgcggaagctgggatcgtgaccatcttgttcgccggaaaagttgcacgcacaccccctacctggcgcgccactgtcgacgaaagctagtcggcagtctaccttggggtatacccacggtagtagtttatcggtagacggtgcgtgaactacgaactcgacggtgacgcaagacacggacaagctttttatccaggttcggccgccgagttggcgtaatacctacgtcctgcgtctggttgtattgatttgtgctgagagaatatgatgtgataggggggtcccttgcccctccttatatagtctggagggcagggttacagatctagaaactaatcctagtcggttacaattgccatagataattcgatatcaattcctattctaaccgactagaatcctgcttgatctccacgtcttgtttccttgtgcgaaactccgagatgtcggatcaaaccttgaactcgtctcgtagtgggccaagcttcctggctaaagtctagccgtaagggtataggggtttatacccccacagtggccggctttgggagggtccctcttgaacatttgatttcttgagacatacattgagctagagaacactccctccactcatctccttgcttgattgctaatcctagtgagattgagtgagattcaagtgcattgctttgagagttgcatttagtggcacttgattcttgagtttgctgcggatttcttgttactcttgggtgtttcccgacgccctagacggcttggagcagcggtggtgttgagctcgtgattggagattgtttcgagcctcaccaagtgacttgtgaggggttcttgagccttccccgtgggagatcgcaaattggttactctagtggattgctcgtggcttggaggatccccatcttgtgagtggatgtgcggcacccgctgagggtttggctttggattgccaattagctcatgatccatcaagtgggtgtatcgccacaacgaggagtagcttgccgggaagcaagtgaacctcggtaaaaaatcttgtgtcatctcttgtcgaggattctcttgtgattgtgaatgatcggttggatatatctctactctacaacgttggtataaccatcactctcaactcatttacttacttgtataccttgctagttgtttagcttgtttagtttagtcttcttgtttaggagtgtaactagccttctcttgttgttgtgctttagtgtttagcctagtactaatttgtataggtggcttgcatagcttagttgagctagtgctagatttgcttcgccatttggtttactaactcacttgcttagtgaagtttgtagattttttaaataggctattcacccccccccctagccatttggacctttcacccgggtgaaagctacatcggtatccatgcgcttgcggatttttctgtatgcgtttaaaatacccaacagttactccaagaatttgacttagaaataaaagatagaaaaggagtagaaaactctgttgccgatcacctgtctagaatgcagtttaagaattcgtaggaattgcctaccaatgactcattgagggatgacatgctattcaaggtaactagattagacccgtggtatgcgaatattgtcaactttgtggttgtaggttatgtagcaccagggaaaataaaaggaagctcatttacgaaagtcgtctccacatatgggatccttcgtatctctttagagtatgcgctgatggcttgctaagaagatgtgtaccgacagaggagggcattcagtttattcaaaagtgtcattcatcaccatgtggagggcattatggggcattccatacacatgcaaagatttggcaaagtggattcttttggccatcaatgtatgaagacgccaaagattatgtctagagatgtggctcatgttagagacatggaaatatcaattcacgagatgctatggcactcactaccaatcttaagattgagctctttgatgtctagggtattgattatatgggaccatttgtcaaatcaaagaattgcgaatacatcttagtgccagttgactatgtgtccaagtgggtagaagctataccatgtaagaacgccaattcaaaaaactcaaggaagatgtttaaagaagtcatattcccaaggtttggaacatcgaggatggtgataagtgatggaggaacccactttaccgatacaaaatttcataattatttgaagagtcatggcatccgtcacaacgtcgctactccttaccaccctcagacaagtggccaagcagaaacattgaataaatagattaagaatattctatagaagacggtcaatgaaatgggtactatgtggaaacaccggttacccgaagcactctaggcctaccgaacagcctacaaaacacctctaggcatgtcaccctatcaactagtatacgggaagacttgtcacctacctatggaattagagcacaaagctcattggccattaagagatgaaatatggattttgaagttgctaggaataaaagaaaaatgcaattatcagaattagaggaatggagagaaaagtcctatcacaattcaaagctttataaagaaagaaccaaaagatgacatgacaagaggatcaagaaggagtttgcactcggagataaggtactactttttaattccagggtcaaattatttgggcttgggaagctgcggagcaaatgggaaggaccgtttacggtggttaacgcgtcatcacatggagctgtaactctccaatcacatgaaggtatgttattcaaggtaaatggtcgtcgtcttaaaatctttcaagaacctattagtcctcgagaagtagttgaggaattggagtttatccaattaccttgattacacttatatttaattgaatcgatcctaatctttaaacaaccatcatcaggaagtaaatggagtacataaccaccacgagaaaagtcaccccgaggggatgacatgtggggccggtcagcctgggcaataatgctgggcggcctccccctatttcctctcatttgcattcaattctctacccccttctggagtattccttgacagaatcccataggtttaaaccacatctagtttggcaatcgtatgcaccctgtatgatagattcaacccccgctgcaagcctgatgcccgtataaatacgtacctagacccttcttaacctcattccatctaagccttccctctctcattcaaagaaaatccatctagatctagttcaaagctgtagttctaatggctgagaaggagatcgttatctattgagctgactgttggtatttttagcatcacttcatattaaattgtcatccctaacatgatgccaaaaccaaggataaaaataatctacacgcaatatctctaaatagaatatatccacaagcgcacagataattctcctgttgcagcatttcactcaggaagtatttagagtatcgttgatttattttatgccaaaacgataaagcatcattctatttattaggcctaggtgatcttgtattaactaaggaaactataattatgcaaatctatcataaccaatagaactaatgctttagcgataactaatcgataaaatatgataaatgataactgagtaatgaagtaaatggtattctagagatagaaaataaagactcactaatgtagcaagacaattatgatattcaaataaaagaaacctatgtaattactactataaagtctacagcctacgccatgctacacattttcatctatagtgtgataaactcagaaaacatcataaggagcatcaactaatgagggttttaagacgcaaccgtcacctccttcatgaccgcgctctgctagtcctacatacggggggtggactacagaggaaccaacacagctgtcacctacacggactaccacacgacccgacacgtcagggtgcctccgtaggtacacaaaatatctagacaccacgtctacataatgtgcaccacctgactcacttgagtactgaatcaggcgctttacgatcatataacaataatcatcataaaccacatctatatcaaatatgcaactagaataaacttagaactgaataaatagcaatatattgaagtagagcaaagtcataatgaaatacaagataatattaacaatttctagaagacagatctagaatcccgagcggagcgcctgatctctacttcaaccttgctagatgcctatactaagaacttgaagaactagagctctacttctaatgtctagaaaccctaacttctgactactcttaacaaatgaagcaggaggaatgaattgaatctggggtcctctctgggaggggggggggtctgcccctctatttatagcctgctggagtgcacacgtgccgttggatcaaaccgacttaacgagcggccgagatggttcctcagaggtggtggaagaagcttccagaaggggggtcgaaccctaactgcaggggcggccggtagtgctcacttaaatgtaaccaatagtttaaggagacacacctagtgattaagtattttcgttagaaactagatgccaaaagaacattgccactaatattttcagatttacaaatttagaatttgcggctaaactattatacactagcacttttgtcataattttttctaaaaggtttaaactttgctattttcaactaccaagcatttcatatcatagtccaaactttatactagcttgacagaagcaaaacattgttgatggttgttaacaataaaaattatatgtcaactaaggagaagaaaggggataaaaactgaacatcaccatagacttagagttttcactgacaatttccacgagttttggtgaatgtctatttctatagggggttatcagaaaataaacaaaagaggctcacatgtcagatttacatagagagaatatgtgaacaactactcaaaactactctagaagactcggaaagacagcaccccaaagctagggcccacctgccatagggcaggggcgggcgcctaggggggcagggcagccgcctgggggtatgaaccaattaggttccacctcgcggatcctgcctccactgcctttgaggagtaatcttggccatcaatcaaggttggtttgatccgagggctgtggtgcttcctaggtgtgggggtataaaaccctatacccttacggctagacttgggccaggagatttggcccatcacgagacagttcaaggtttgatccaactactcggagtttcacgcagggaaacatgacatggagatcaagcaggattctagtcggttaaaatagaaatcgatgtcgcatcatctatggcaattgtaactgactaggattagtttctagatctgtaaccctgccctctagactatataaagagaggcaagggaccccccttagacaattcaattcaatccacagcaatacaatcagacgcaggacgtaggtattatgcccacacggcggccgcacctggataaaaaccttgtccgtgtcttgtgtcaccatcgagtttgtagcttgcgtacctgtctgccgataaactactaccgtgggtataccccaaggtagactgccaactagctttcgtcgatagtggtgcgccaggtagggggtgtgcgtacagctcgtgtacctgtctgccgataaactactaccgtgggtataccccaaggtagagtgccgactagctttcgtcgacagtggtgcgctaggtagggggtgtgcgtacagctctccagatgaataagatggtcatcatcctcgcttccgctgccgtggctgagggcctcacgttcaccgtcggccagatcatctggacgacccacgccggtggtcttacgaccatgacttcgtaagagaactagatccaatttgaagtagcggaagtggtggccccgatcacaccgaccacgaccactatgactccgacgtctcgacttcttcctcctcgctacaagggaagtcgacgattctgatctactcaaagccatcgatcacgctaatcatagacttctcaaagtctccgatctggtggattcaatctcataccagaccgctcgagcaccggcaccaaattttttcgactcccgtcgaccaactcgtgccaccacaccgaatggctagggacgtccttaacgttaacagcaactcctgaaaaatgaactgtccaattcaagaaaacctctccaaacgggagtcttcctcatggtctgagtaacgcagccgaccaggtctcgcgccatacttgatctctattcaggaagatgaacctgtcatcatgacaacccgcgcgcccagcacgccacttcatcaatatggtttctattcatactttgccagtagacaacaccaacagcacaaactcaagtacaggctctgtctctaccgaggttttacgccccgaggacgaagtttatgacttagatctcttgccttaccccctgtggttttcccgcttcccagtttttccacctcgatgaggagatttggttttcaatgtcagcaacaacaaaccagtcatcgacgaagaaagcgatgagcaaaggtagcagcgcgaacagcgcaacgccgatcgtgcttagcgacaagcagatgaagagcagcggtagctggtcctgaataaccttgatgacactttcgacatggtagggaaccagcaagtgttcaagacaccaagtgctaatgtggctgtcgccatggcaaatctcgaccgactcccagacacctcagaataccagggtgttcggactaacataagggcgcacttaattgctgcaatggtacagactgcagatctcctcagaagggtccaagccatatcctactcggaggtcacctccgaccagacccatcgcagtcaggcctcaccatgacccagcgggcatcgtcacagctatttgcccatcgatgaccataggaaggaagcccatcacgatgatcgtagtcgggacgccggccgcaaccgcgaacgaagacgcggacacaaccaggaggtagaccagggaataaaccgtaatctacggcagaacctctcccacaaggatgcccgcgagcgcatcaacagacccatgaatgatagagcagcacacgaaaacgtgcgccgcatcgagtacgatgcagctcacggtcctcctggcctaaaacagatctccttgcatctctggcaagtcgtccggccacgcaatttcaagctcgagaagctcaaaaaatttgacggcaaggaaaaccccgcgaactggatcaccctttatgaggtcgcagtctggtcagcaacaggggacgagcatgtcatggcaaattatttcccggtcatcctcgaccaagctggttaccaatggctccttggcttgcctgaaaactcattcgacttatgggaagaactgcagtaggcattcatcgacaccatcatcgctacctgcgagtagccaggaaacaagtacgatctcgagaggataagggaccgaaaaaatgagcccttgcgcaattacatctgacgcttctcggatatgcgcctcaagatcccaaagatttcccacgatgaggctatttttgctttcatcaaaggtctccgcttccataaagctttgagaagcaagctactgcgcaagagaccgaccacggttgccgaactccttgccacggccaaaaattacgccgacgccgacgacgcagaaaaactcatcaaagaggacgtccgaggaaccaagcagcctccccgacgagacgacagccatggacgtttcgacaactgaaactctcggcatagcgataactgcgaccaccgagatgcgtgggataggcgctgcgacaactgtgatgacttcagaggcaagcgacctcgtgacaatgatcacgaggtgaacatagtcaagcattccaatggacgacaagactatgaggaagattacaacaagaccttgaaagagtcatgccaacttcatcccaagtctaaccacatgatggaagaatgccgcgtcctcaagagcatctacacgcagcgggccgctcagggagacgccaccaaaactgccaggaaacacgataggcgcaaccaagaggacgaagacgacgaccaggatagggacccacgacatcaatacgtcaatccaaccgacgtagttcactccatctttggagggaaggtttcgatcgaatcaaagcgggaaaggaaacttctcaagagatctccttcagcagacaagatcaatgggctgccatcccagatctaggacgtttcccgttaatcctagacccgtgcatcaacaacatcagattcgagcgcgttctcgtagacggtggcagctccatcgacatcctctttcacaacagcctgcctgctctcaagctaaccccggcgctaataaaaccatacgaagcccaattctagggtgttctaccaggccaaagctcaatacctctcggccaaataacgttgcccatgcaattcagaacaccacaccactttcgcacagagtttgtaaacttcgtggtcactgatttcgatggaacttaccacgccattctgggccgtccttctctcaccaagttcatggcaattccacactattcatacctggtcctcaagatgccaaccgagaagggcgtcctgaccgtcagaggcaatgtttacacaacatacacttgcgaggaggaaagcttcaagatcaccgaagcctttgacctctcaattcagatggcagaaaccgtgtcccaagcggagcctcattcgactagctcaagctacccaagcagcagaccccaagaaggaacatcaagtccaaggagcacaaggaagtccagctagtcgacggtgatccagagaaaacggctctcatcggagccaatttgaacgccaaataggaagacaggctcgtgaggtttctaagggacaacgtacgcgttttcgcgtagaaacccacagacatgcctggtgtcccctgaagcctgatcgagcactccttaaacatctcgaagaccgcaagaccaatcaagcagaagctacggcggttcgctcgtgacaaaaaggaggctattaggacagaaatcacatggcttttagcagccggatttattaaggaagtgtattatcctgattggctagccaatccggtccttgtaagaaaaaagaataatgaatggagaatgtgcgttgattacaccaatctcaataaaaacactgtcctaaagatcctttcggtctcccccgcataggcaaggtggtcgattcaacgaccggatgcgaattactctcttttcttgactgctactctggttatcaccagatctcattaaaagaggacgatcagattaaaacctctttcatcactccctttggagcatactgctataccaccatgtcctttgaactaaaaaatgccagagccacctaccaacgtgctattcagcaatgtctccacgacgaaatacgcgacgatcttgtcgaagcatacgtcgacgacgttgtcgtcaaaaccagagacgccagcactctgattgacaacctagaccgcaccttgaaagcactaaacagatacaagtggaagcttaaccccaaatcctgcaaggcattttcatccaggacattgacaaacctagcatcggagacgacatggtcgataagccaaacagcaaggcacttctcgtccaggatgccactccgacaaccagcagcaacgactggcgcaagcctttcatcaagtatctcttagatggttctggctttcaagacaagaccaagaatgaacgcctcatttgacggtctagaaactacatactggtcgacggtcgacttatgcgcaagaacgctaatttagaagtcttgttaaagtgtatcacccaagacgatggcaccaagttgctagaagacatacatgctggatcctgtggcaatcacgcagcctctcgaacgctggttggcaaagctttccgagtaggattttactggccgtttgctgtggctgacaccgagaagctggcccgacgatgtgagggttgttagttcttcactaagaggactcatataccggctcacgaaatccagatgataccatcatcatggccattcgcctgctggggcctagacttgattgggccattcaaacccgctcccggcaatttcaagtttgtattcgtgctggtcgacaagttctccaagtggatcgagtacatgccattagtcaaagcaactttagattaagttgtagaattcctcaatcaaatcatacaccgatttggggttcctaacagcaaaatcaccgacttcggtacccagttcaccggcactatattttgggacttctgtgatgacagaggcatagccataaagtacgtgtcggtagctcatccctgagccaacggacaagtcgagcgagccaatggaatgattgtagacaccttaaaaaagaggttgtacaaggaaaatgataatgcaccgggaaggtggaagaaagaattgtcagccgtggtctggggcctccgaacacagcctagtcggaacactggtgcatccctctatttcatggtatacggggctgaggcggtgctcccctccggtatagtgttcggatctctaagagtcgagtagttcgactagtcttcagcagaccacgctagagaacttgaaatcaattgcatagaggagaaatgactagattcttgcctctgaacagcaaagtacctcgtggctatgcgatggtatcacaacaaaaatgtcaaagagcgctccttcatggtcggagatctggtgctcaaatggaaaacaagccaggaaggaatccacaagctatcaacgccctaggaaggaccttttgtgatcgccgaagtcacgcgtcccacctcttacagactggcttacccagacggaacaagcttgcctaactcctggcacatagacaaactacggtggttttacccctagcagcagtccatctgaaaggtcctaatatggctagagggggggtgaatagcctatttaaaaattctacaaactcactagagcaaaaggttagtaaataacaaagcgaagctttttgctctagctctaaaggggtgtttgcaagccacctacccaacaattctagttgctaagatctctatgcacacaagaactaagtctctacaagttacactagagaactaagctacacaagtcaaagtaagcaactaaactaattacactagtttgcggtaagtaaagataagatgagatatttataccgccatgtaggggatgaaccaatcaccaatataaacaatcaagcactgggagaatgccaatcaaacacaattgagacaccgatttttctcccgaggttcatgtgcttgccggcacgctacgtccccgttgtgtcgaccaacacttggtggttcggtggctaagaggtgtagcacgaacctcgtcctcactaggacaccacaagaacctacccacaagtgaggtagctcaatgacacgagcactttactagagttacctttcggctctccgccggggaaggtacaaggcccctcacaatcaccgggagatggccacgaacaatcaccaactcgtgccaatcctcctccgctactccaagctgtctaggtggcggcaaccaccaagagtaacaagaaaatcgcagctaaaacgatccccaagtgccactagatgcaatcactcaagcaaatgcacttggaatcactcccaatctcacaaagatgtataatctatgaaggagatgagtgggaggtgtttgcttaggctcacaaggatgtcaagtatgttagaatgccaagagggtgagccccaagccggccaaacacatatttatagcccctcaaacaaatagagccgttggctcttacactgggcgaaatacggggtcaccggacgctcttaaaggggcaccggacgctcaacacctgcgtccggtgctccaacgtcagccgcgtgtcagagtctaacggtaacctgcagtgcaccggacgctgagcaagtgtccggtgcacaccggactcatacgcagcgtccggtgctcaccggactcacacccagagaggtttgcaaaacgcgcggacaccggactcagaccaccggacgctccagcttgcgtccggtgcctggtgtccgatgcctaaccctagctgagccaggcagcctgcacaacggacgctcagacacagcgtccggtgcctctgagccagcgtccggtgagtgttcctcagtgagaaacactcccgcgacttttccaattttcccaccggcgcaatagaaagtgtgcacttcattttcttgaagtgtgccaacaccacaacgtgtgtaccaacaagcgcacgtgtgttagcattttcacaaacattttcttcgaaggagttaagttagctcactaggttctaaatgcatgcacaagaacaatgacacctagtggcacttgataaccgcttagccaaagaattcccctctttatagtacggctatctatcctaaatgtgatcacaccctctatggtgtcttgatcaccaaaaccaaaaccctaagcaatacctttgtcttgatctccatagggttttgtttttctctttcttcttttccaacttgagcacttgatcatcttgtggtcatcaccatcatcaccatgatcatcacttgctccatcacttggcatgtaccaacctcattaagtctacacacacttagtatagaggttagtacttagggtttcatcaattatccaaaaccaaactagggctttcaccatcttaattgtatctttttccttatgaataataacaagtttttggtttttgctccatatctctttttatgcagactattcgacaagaatgatattgtttgttctccacacaacacaaaatgaaatcaaacaagggtatccaacagacttcatttcagtgatacatcactctcataaattatttacagtgctaaaaaccatggtttacaaatctagactttattacaaactttccaagcaaagtttacaataaaagcccctctgggcggttcctagtctaaaactacagactaaactcaggcctactgctcgggctactcgctggcatgggcctccggtgccgtcaaagaggttggggccaccggcgcctggctggtcgagaccgcaagcgctgatcgcccatcccctgcagtagacgccgccgaccactccctggcagacctctccgagcctggttgattcggggggtggatgtcctgcagaggttgacgtcgctgatcaccatcgatgataggtcgagcatactgacacgaagatcatccgcttccttcaagccaacctccttggggtaccctccctccaagcgagacagatccatcagagggtagtgcgcacacactatactcaagacataggccccggcatactcccctgtgtccttaacgaactgctgaagcctaccccacgcatgttgtgctttctcaactggactttgcctctgcacgcggggctggccttcggggagctctggactgatcagatctaacactggggccactcccttccagatctggatacagttggccttccatgagtcccgatctttgaccaggtcctcgacatgtttcttcgtgttagccttaagcactatgccaaggttaaaaaaacaagagggcagtcaatatcaagatgtgaagctaaaagaacttacactcgccacgtcaaaactgatcttaccagtgaggtcccggtttctagtcttcagttcttccccgacctttcgctcgcactccagcgcgtgagcacgctcctggtcaagacggtcattctcttcccggaggcgttctatttcctccttcagacctacagcagtaactatttgtcaaaggaaccaaacacattgtcaaacataactagcgccagtaacaagacttactatttttctcacggtccttttcaactaaccactgagacaggtccagcatgcgctcctcctgaacagccctctccttgacctccttgtcggcctccaaccgaaggcggtccacctcgatgtcacggccttgttttcggcgaccaccccttcaatctggtcgaagcatcttttacgatacttcgccgttttcatcatatcctgtggatttcaagtacataaataggtgtacatgccaagacttgtatgctttaacaaaatgcgagggcacataccttaacattgctaacaagacgcttggcggcccgctccaccctctccgcctcctcgacctcggcgatctcttcgtggccggaccagtggtctccacgttggcgccatacacggatacgctggcgtccatcgttggggcgcccttggatctcttacacctcgttgtcggagtccgcctgggccctctcgccctctgcgctcctccccaccatggtcaaggacatcattggtcccttaccgaggtcgggagtaccctccggcgcggcagcctcgacaggcggctcctccaaccgagcaggggatggagctttgttctcctcttctgcccgactgcctggtgggggagtggccatagcaacctcatccctcgacggggcatttgcgtcggctccttctcgggacgggtcctcggtgatctctgccgtcgtcggggcaactgcgggtcacgtcgtgggctgctccgtggtagcttgccccacagtggtctgacccacgacagctgtttcagatggcctcgagcccaaaatggtgctagggtcaacatccgaggcagtgctgcaaaaattccattcaagtataaccagactggaattataagttcatgaaaagcatagctattttttttcttaacttacatgttggagctcctgtgagaagctgtgaagacccttcgcctagcacgactagccgccacagctgcttgtgccttgcttgggtgcgtctgctcgatgtgtgcggtgggcggatcttcagcgatccgaccaccatcagcaggggcgatgtctgggcggctgcagggcttgtggaccaaggtcagggccgcttcttcctcttcatcatcgtcgtcgacaactcaaagcagtcggtgatgctttggtgctcggcttccagaggccgagccttggccagcaaaaggccctgggctgctattgctagcgccgctcctgtttgggatgaccccatggccatcggtcatttgccggccaccctatcatcggtggtcggcgccggtcggttgtcatcttcgttgctgctagtgtaccggtaacaccgagcagcgttgtctgccggcagatccactctggtcgggtgctccatgccgggcgccaatgacacatacactatcgcccggtcaatgtctccgatctgcaaaacaaaagcgataagctgtaagaataagggtatcacagtttacaaaattacaaactgaccgaagtcatcatttaccttgggagctggccggcctagcttataagcgtgcatccggtcgtcgcttcgcacgaagctgctgtcggccaggttgaacagctcgttgatgttgtgctagatctccggcttctccaggttatctcagtgtttcctggtcgagtcttggcctccttggtactcgtatgccaagtgcactctcctctagcatggcatgactcgtcggctgaggaagttgctgaccacaccgggcccgtccaagcgcgaccagtcgatcagattcatcagctccttcacctgaccagtatactctagtcggtctgtccagtcgaccctcttctcaggaatatagccgacatcgtaaaatgtggcgctgtccggctccaccctaatgtagaaccacctcctgtaccattcagtcagggatgtgtttcaggggcagctaaaatatcggttcttcatcccgtcgcgaagattcaggtatactccacctgcaatcttagatcctccaaccgctcctttcttcctcagtaagaacaagtaacgaaacaaatcaaaatgtggctcaatctccacaaacgcctcgcagaggtgaatgaaggtagccacaagaagaatcgagttcgggtgcagattgcaaatcccgatctcatagtaaagaagcaaaccctgaagaaaaggatgaaccggcaccccaaaaccccttttgaagaaatcctcgaatactacaatctcaccggcctaaggatccgagtagctttctccctctggtgccctctagcggccaagctcctggttatgcagtagccccatcatctcggccctcttcttggagtcgctcttggccattttctatgcaaagaaccttgaactggatctagtgggcttggaggcagtgaggaagacgaaggcaggaggctagcgtgcaactgctgggagaagttctaacaatacaccttttagctctttataacagcagcaccaccttgtccacttcccgactcctggggaaatgtgcggttttacagcggcaacagcgtttctgttttcaatttctattgcagtaaatttggcggccttttttaatgattattggttttccttccttggtccgcgtgatgagcggctatgccgttagaaggcatctcttttcatgcgccggactgacgagatggccggacgtcttgtcatgccaccaaataatgaagagaaatgatatttctcaaatttaaataaacaatttactgaggataagaagtctgttcggattcatccaaaaatctagggactgcagcgaccaccgagcatggtatgctcggagactggtcgactagcctgcccaaaagaaagctggggactgcaccgaccacggagcatggtatgctcggagactggtcgaccagcctgcccaaaagaaagctggggactgcaccgaccaccgaacatggtaagctcggagactggtcgagcagcctgcccaaaagaaagctggggactgtaccgaccaccaagcatggtatactcagggactggtcgaccagcctgcccaaatgaaatctagggactgtaccgaccaccgagcatagtatactcgagggctggtcgacgagcctgcccaaatgaaatctggggactgcaccgaccaccgggcatggtatgcttgggggctagtcgattcgtctatgaacgagccagaggtgatattgattttaattttttagaccttgctacaaggctcatactttgccttctagcaagcttggggactgcatcggtacgatgcatctcaacatcagacttttcttttaagatttttttcttttcggaccctggcaccacgtacctgcgtcacctactaccaggctcggggactaagtgggtacacttcaccttgcggtgaattttcctactttttgaagacttttactttttagaaaagtaaagtgggtacacttcaccagaaaagaaatctttttttgttaaaagcaccatgcattattcgaacaacctgcttcttcgatattgatcaactgtcttttgagttggtcaaaatattgttgcaattatttgggcgactttcattctaatcgaagatgttaagtctcactggtcaaagaagctcaagacggtgtgtcacaccataatacatggagctcggggactagctgtgggggtataaagccctatacccttacggctagacttgggccaggagatttggcccatcacaagacagttcgaggtttgatccaactacttggagtttcacgcagggaaacaagacatggagatcaagcaggattctagtcggttaaaataggaatcgatgttgcatcatctatgacaattgtaactgactaggattagtttccagatctgtaaccctgccctctggactatataaagagaggcaagggacccccttagacaattcaattcaatccacaacaatacaatcagacgcaggacgtaggtattacgcccacacggtggccgaacctagataaaaaccttgtccgtatcttgcgtcaccatcgagttcgtagcttgtgcacgtgtctgacgataaactactaccgtgggtataccccaaggtagactgccgactagctttcgtcgacactagggagctttaatagaaccctgacgcccctagaggacaactcagagttgagatgagagattaagaaaaacaaaattatttttattctcatctgagaattaaaggtagccattagagccagggatgagagatagattatctactcctaatcttcatcttctacataggattagactagatagaggaagagttaggcgcctatgctcggaatttctagatcgtcatcatcaaagattggtattatcttttatctttattttgactttattctaaataccattatgtttctatttattatgttcctagtttattctagttctacatttgatatagttatgattgataatgagtttatgtatatgtttgcaaagcgcttagctctctttgcgggagggttaggtgatagatgtcatgtaagcatggtgcttagatgtcgtttatctgcaattacacccaattggccgggtcgtgtggtagatcatgaaagtggcagttctgttgagtcctttgtattccattccctattggtaggataggtagaactgcagttgcgtaggaagtctagctttgtcttggctttttatagcaatgttccttatacataaatgaagagtcttttgtgctatatatgatagtgtagcattagagtagataaatgacttgataaattagaactacttaggattttctatctcttgaactaatcaaacgtctacctactattaagctgagtagtctatatctaatctatatgtgatttatcccctgggcttttatactttatatcatttatttatcatggtttaccttcctgccaagtatgtgattaagcaactcaatcactcataagtagtcatgttttgcaagttgatctcattgtttaagtccttagttctttcccttgagctaaatataaataacgatacctggaatacttcccgatgaattgctacaatggtatttaatctgtatgcttgcggatcctatattcattttattagtgggcagtttttatactatacttttggcaccatgctagggatgacaacttagcttaactggtgttagaagtgtcaacaagcatttctagcgtcattgccggggaaggaataaactttttgagaaaaattgcctaaacagatacttaataaatgagtgatagtttgctagtcacctctacttggcaggtttacccctgtttgtttttttttgtgtttatattttatacagggtaatagcaagattgaaactgattcacacaactcttcatttgaatcggatcaatcaagaaggaagcttgttactagtacttgaagctatggctaaaaagaccttgttggagttcgctactccaacagtggagaacatctgcactggtccagtactagaaatagaaaatcttgagtttgagctcaagccaagcctcatcaacatggtacaagctgtccaatttagtggaaaggtacataaagatgcaagtggacatcagcaagacttcatagagatcagaaacaccatcgccatagaaagagttaatcaagatatcatactacttcacctctttccattctcgctaatgggaagagcgaagcagtgttttattataacaaataagatatcaacacatgggcaaaatgttccaaggcctttctagcaaaattcctcctaataggcaagatcaatgccttgagaggaaagattaccaatttccaacagcagaagatagaaaccacttcagaagcatgagagcgtttgcaaggatatattcaagattgtcctcatcatggaatggaagaatggttactcatgcaaggcttttatcatagattaaactaaaagatgcgtgagcagctagatgccaccgctgaaggatcgttcttatcacttactcttaggaaagctaagaaacttatggagaagatatcaaataatcaaagctggtcccaagacaagggtgaaaaagcaattgaagaagtaaatgcattgtctaccaagatggatgatctgctccactagctagactagagggccaagtacaaggaagatcagagggcaattgaagtaatatataagcaagacttaagccccaccatcaggaaagttccacatcaaccaaattggagacaacatcaaaatggccaaggtatgaattcaggtaattttacaaagcaaccttctttaagagaattagttatgtagcaatctaaaatcaatctagagattacagctaggcttgctattaatgataaaaccttggaagatataattaataaaatggatagtttctcatctaccattaatgaccaacttgagtatagtaaaaagatagaagcaaagaaagcatagttggctgctgcattgcctgttgccactaaccctgagaaggtaaaaagattatcactacaagaagagagagttctaccaaagatcctccctatccaaaaggtaacaaaaggtcagtggtgataccatcaacattaccaataatggtagaaaaagagaagaacattcgtgaagaagtactaccagaaccagtccaagactaggagatgagacaagattttcaagacaccaactatatctaccatttcctcattggaatagaagaccacaacacatagatgagcagtttggtaagttcatggagataattcaaaaattatatgtcaatatacctctgatggatgccatacagatccctacatatgaaaagtacatcagagacattcttaacaagaagagaccactgccatccactaaaatgatcaagctcacagaagagtgcagtgcggccatccttaacaagttaccagaaaataaaaatgatctaggatgtgtgaccattgaatgtacaattggagatcaaaatttcaaccatgcactctgtgaccttggagcaagtgtcagtgttatgcccactgctgtttactacaagctcaatcacactgcacttgagccaacatcaatgtgtcttcagctggctgatcaatcagtccaatatccattgggcatcgtcgaaaatgttccagtcaagataagagaactcttttttgctagtagactttgtggtgctagatatgcatctagaatcaaaagtgtcactcattcttgggagaccatttttgagcaccaccaatgcacacattgatgtcgggaaaggatctatcgaattcaccatcaacggacaagaagagtagttcacattcaagtcaaaataagaactcaactcttctacgaagatggtagatcaagacaagacagaagaatcaccagagtcacccaactctaggatcatcagtagaataaataatttagaaggtccagttcggaggactttaaaaactttgaaccctcgtcgaaaggtaacttggtatttacccacatttttcaattcatagtcatatttactttacaatattgcattataaaattcaatgccctatataaatattttttctgatgtgtaacaacctattaaaaatatttattgtggtggcataaaaaattgatttagttcatatatttattcttgttttaattcggcaacggatctagtgcaaacttatctctcatgcaaactgtgcaaactctaatctagaccgcaggatgttgatctaaggggacgcatgagagaggtggaaggagggatttgtaaaagtgtgattaagagtgggtgattaagtgcaaaattacccaatctctccgtgccccttggatcaacatcctgtggtccagattagagtttgcacagtttgcacggaagttgagtttactagatcagttgccttttaattcctgcattatatttatatgtactgtatttcatacatggtgggctcaccaccatgggtcccacatgtcatagactccacctcacatacatcacatcatattatttcatccacttccactcacctccactcactttctcatttccaccggccaaacccaccaaccattcttttcctttgcttaagcatgaagccaagatgatgccacaaaaatctgagtgggagaggggccagcacatgggcgaccgcccacccccttgggcgcccgcccggcgacctcctcctctataaaagcccttcctcccttcacgtccatacaccacacacaaccaatttgagtagccaaccaccttgctcttggcctccatttgtccagagagagtttgggagagaaggagagggtaggaagagtagtgaaatgagtgagaagtaaggagagtgagcaagagctcaagagttagtgttgagaggggtagtgctgcaagaatctcagaaaaatagtggaattgctgttcaaataggggttaagaattctaaaattgaggagaggttctgtcgaaatcaaaactagaaactataaataatattgaaagaacgactaacctccagacagctaaccactaacccttgactaaccccctgcactagtattgttgtcgtttttgagcatttgttgtaggatgaagagctaggccaaaggaatcaccaacaaggtcacggctaggagcacaaggagctcatcccgatatgcttcatcaagggtcggctctgacatgagcactgatcctctcgccgtccctcagccggcatcctcttctgctgcaccaaaaagaattctcctcacgacatctcaccttgccctaagagattctagagagaataacatctacaacaagctgaagaatagaagcttcgtacatatgccagtcctcgatgaggtattcctctgtgaagcaggtatggccattgaacatgataccatcttttagtttgttggatggagttctttcacaaccataactgagttagggtctaagcttttaactatagaatttatctgcactctataactcatagaaataggaatttgttttagattgtttacccaagaattttgtttcacatggagaaaccttagtgatcttttaggcttccttccaaacacatgcatagacatagatgaagccttaaaacattatggcacccataaattttggactaatatttctaaagagcctttctttcatggcaaccgaactagagacatagagcaccccacacttaggttcttgcataagtggttgggaacaactttcatcccctgggatgacgctagcaaaataagagtcatagatttacagctgatatatgcagtagtaaagaaaattagagtgtcacctatgcatgcttcagtagatcactggttaagtattcctgattacaaagtaggggatatagctatttactccattgttactcgtttagccattaagctcaaaataattgctgcttctttagatttcattgatacacatagacaattttatggatatgaacactttaatcatgctcacatagtaaaaagaataaaaagagaattatttgtcacctatggtgaggccaagctctggttacctaacctagagatggcattgtattctatccagacattgcacattgaattgcaggctagaccagtgaacagaagaggagtagcccctgaaggagcaccttagaggacaacctctcagagattcacacgtcagcatgagcctgtttggctcggagctaatcttgctcgggaggagccaacacataccagttataatgattggcaagcttgccagcgtcatatactgaaccccggggtgtatcctccataccatccagtctatcaaccatatgggtactatcagccgccaccatttgtccctactagggaaggaactttaggcgaagcactaaggcattcatttggtacctatggtatgaggatggaagaaaaagaaccaagagatgactttgagcaaggacgcaggtatgatgctactgggttcttttatacctagcagcattataatgaacagatggctttccaaaactacgtcaacacttctcttgctcataatgagcaggcttggaatgagcagcgccagtggaatcaaaacatcactcaaatttggccaccattagagaaggacaagaccaagtcaacaacactttaaatgacatcttcacgttcctgcaaatcctgaaagaagactagcttgggggaggaccccagttatcaaggtaagttctctttctcttcatttcaatttatttgctttctttattttgcatgtacaaacttagaaaactaaatatttattgtttaatttaaagtttgagtttgtttaagaaaatgaaaaccaaataaaaagagtgtgtaaaataagtttgctttattctcctattaagttttctataaataaaatatgtagagatgaagaatgcatgatggatgatgaatagttgctttgtcataattcttttcaagtacctagctttaaatttaagttctcccaaggattggatacactgttagacaactgaatttactctactctttaaatctatgggagcatatgcttaaactaagtctagatagttgatggacatgataggatatagtatgagttgttgtttattatgttccaagtgctactaaattctggagatttgtttgcgaaaaattaaaatgatgagttctatgtatgacagagagtatagaattcctaccacagcctatttatttagaataggaagcctccacatatttgtagggcttgtgtttgctcgagctgtgttgacccttaggaactcatcatattgctaatccaggtatcacgcacactcatgttcacccttttactgcttctactctagaagtacgcatcacatatatatatatatatatatatatatatatatatatatatatatatatatatatattccgtttgtacctatttaaaaatgttccactcttacactgagagtgaacacaaaaaatatttcccttgttcaattgctagccatatataactcttataaagctaaaccccactaggtaaattctctcttcatgaacatcattccccactaagtgactcactaaatattctatctctccatgcaaggtgtccacatcattccccactaagtccatgtcatcccatgttaattacaaaaaatgaccatgtcatctatatcatgttacatactttaaatctttaatctattaacatacaagtcatgtacatacactatttgtttcatcgccaattaatttctctataatgtaaccaaatattagtttttgttctattagcttagcaaaatttttactagatctaatacaataaaatacatgcaagtcaaattcatatatatacatacataatagaccaattaattcttctataatgtaaccaaatattattttttattctattagcttagtaatttttcactagatataatacaataaaatacatggaagtcaaattcatatgtatacatacataatagactgaataccatatagtaatgctatacatataatgatttattttaagaaaatcccgcagcaacgcgcggggaaatcacctagtttacctcaagttcaatgctccaagtttcatttttcattcctctacaaaattttcaaaaaggaagttattgggctgcaagaaaaataatggacaaaagtcccatgtaaaaaaaggagagataaagaaagatttataagcctaagtttattatcaagttttcaatttcaagattagaggaaccatcttccaaataaaggagcatctatatattatttttgcaccccttctccttccacaaatattctttagtttagcatctatatataaaaccacacatgcacaaaccggttggttatgtggtgagttcatttggatccatggttcaatcagactcaatgcattagttatctccacacctatgagccccacataagctttcttagatttagggtgagagagagtgaaggctgtataaaatgccttgtgctacaaatactacatatcttgagagcaagagagaaggcatcactcctttcaatgccttagagaggatccaaaaataccacatattgagagacttgaaagggtcatactaaagaactctgagttttattttaaatattataaaaactctaggacaaaggtggaacaatagagcatgagacaatagtgcttggtttaattgttctatctttcaactgctcaagacctaagtataggtaaaagtctcatgattggaagaaacatgagtaagtttggaagttatgatagtccactctagtttggggatgagtttttatttaaatcatgtgtatttgtaaagtgtgaaagcattgtagcaactcctgatccatcacttgtagctatttgctcaaggacgagcaaaaggtaagcttgggggagtttgttgacggttgttaaccattaaaattatatgtcaaccaaagagaagaaaggggataaaaactgaacatcatcatagacttagggttttcactgacaatttccatgagttttggtgaatgtctatttttgcatgggggttatcagaaaataaccaaaagaggcccacatgttagatttacatagagagaatgcatgaactacaactcaagaatactctagaagactcgggaagacaaccccccaaagtagggggctcacttgccatagagcaggggcgagcgcctaggggggcaggggcgactgcccgggggtatgaaccaatcaggttccacctcacggatcctgctgttgatatttggtaacgcaattagaaaatgatccgcaagcgcatggatatcggtgagcatttcacccgggaggttttccagagttatcgtatttatatttttaccactgggagaaagggtgcatctgactaaccaaatctattgctactatccctttaggctacaaagaatgtttctcgatgtgagcgatgtatagagaagactgcaaccgtagtctcgttctaaccttggtaaggatgatctactgttctattggggaggctcacggaatctagacaacacaaaggatgttcgacccgcacctataaacctacccgtcctgctaacaagatatgggatacaaaggtaactcagaaatgtcacgttcctcgctactaccacggtccagctagtcaggggtatctatgagtaccctagcctaaacaccacgtttacgccagcaatgattactctaatactcaaccggaagaggattaaagtaaactcataaaccaaagaacaataaaacaagaacttactagaattagaagtcaaattactgaagaatcttagaagcaagcctcgggttaggagacttgatcccgcaggtacaactcggagtagacaccgacaggccggccttcctccgatctacacctccactctatctctctcaatctagtagaaactagaagatctatttctacttacattggttgctaagcctaaaaagaaatattatttagagaagaggttttcctttgagggcacccctcaatctctatgataatttcttgtctcctccaggggccaggggggtctccttatatagtcctcctcctctatgcgtttttgggtcggtaggcgatgtggtactatgtttttcttgatccaataggtcggtggaacatcccgtgcaaagagagtcctgaacaggatccagcagggggcgggcgccctgggcctggcctctttcggcctccgcttccttcccgtggcttctggagtcttctagatggtagaaaattgcgcggtgcgttgatatctctatgtaataccgacatgtgggcctttcttccttatttcctgataaccccctgcagaaatagacaaacaccaaaactcctggaattctgtcagataaaaccctaagtctagatgttgatttcattttgatccttttctttgtttatttgataattaaatttgataattaaggaccgtcaacacctgcctccaccgcctttgaggagtaatcttgaccatcaatcaaggtcggtttgatctgagggctatggtgcttcctagggggctataaatacaaccctgacccccctagaggagagcttagatatgagatgagagattaagaaaaatagaattatttttattctcctttgagaattagaggtagtcattagagctagggattagagatagattagctactcctaatcttcatcttctacataggattagactagatagaggaagagtagggcgcctgtgctcggaatttctagatctttatcatcaaagattgggattatcttttatctttcttttaactttattctaaatatcattatgtttctatttattatgttctagtttattctagttctacatttgatatagttatgattgataatgagtttatgtatatgtttgcaaagcgcatagctctcttcgcgggagggttaggtgatagatgtcatgtaagcatggtacttagatgtcgtttatctgcaattacacactattggccgagtcacatggtagatcacagaagtgacagttccgttgagtcctttgaattccatcccccgttggtaggataggtagaaccgtagttgcgtaggaagtccaactctatcttggctttttatagcaatgttccttatacataaatgaagagtcttttgtgctatatatgacagtatagcattagagtagatgaatgacttgataaattagaactacttagaattttgtttctcttgaactaatcagatgtctacctactattaagctgagtagtctatatctaatctctatgtgatttatcccctgggcttttatactttacatcatttatctatcatggtttaccttcctatcaagtatgtgactaagcaactcaatcactcataagtagtcatgttttgcaagttgatctcattgtttaagtccttagttttttcccttgagctaaatataaataatgatacctggaatacttcccgatgaagtgctacaatggtatttaatttgtacgcttgaggatcctatattcattttattagtgggtagtttttataccacacttctggctccatgctagggatacaacttagcttaagtggtgttagaagtgtcaacaaacatgtagatattatttaagtaatttgccaagttaattctcttaaaagggaactctctaaccttaaactatgttatattttttgttttcagaaattgtttttcataccaaacaaatgttaaaacaccgaagtttgattcattgatttctcttaggcttaagtgaggtgctaagcgagctcgtaacactgagggtgttacacatcttgaccttccaatatgcataaattgcaccatcaaagtaaggtgcctttttggtattgttgatatgaagactaagagccatttcttcaccgaagattgttaatccttaaccaaacggtgcctcggctttgataccacttgtaagctcaacaagtgtgttagcaaaataaatggcaaagcaattctagcactagcacacctaagctatgcaagccatctacacaagtctagtataaggctaaacactaaaccaccacaacaaagcactacaaaacttagttacactcctaaaccaagaaactaaactacacaagctacacaactaagcaaggtaagcaagtgagtaaaggagtgagtgaagattcttataccaacgttgaagagtagagatataaacaagaatcaatcacaattgcatccataagatgaaattctcagcaagagaagacacatgattttttaccgaggttcacttgcttctcggtaagctagtcatcattgtggtgatacacccacttgacagatcacgagctaattggcaatccaaagccaaaccctcaacagctatcgcacattcactcacaagatggggatcctccaagccacgagcaatccactagagtagtcaattgcaatctcccacgagaagactcaagaatccattacaaatcaattggtgaggctcaaacaatcttcaatcacaagctaaacacctttgctgctcaaagtcgtctagggtgaaaacacccaagagtaacaagaaatccgtagcaaactcaaagcaatatacttaaatctcactcaatcttactaggatgagcaatcaagcaaggagatgagtggaggggatgttctttagcttaaagtatgcctcaagtattcagatgtgcaagagagagctccccaaacatggacaccttctatttataatgttacccttatgggctagccgttaggtgcaaaattgagggcatcagacgctccgacacttacctgtcggacgtgccccgacgtccgatgctcgcctgccatacgcgttagatcgctgccacgtgtcctcagttaaatgtgacccgtcgatcgccaactgtcacttaaacgttaatgatcttttgaagcacgtgtcggacgtgtcaaacgctaagttttgaacacgccaccttacaccgaacgctactcagagagttccataaactctctgggatgcgtcagacacgtccgatggtgtggcatcacacgcacgccaacgtctaacacacataacgtcgaaacaacactgctacagagcgagtaccggatgcaccgacgtgtgagcgttggacgctctaatgcataaacaaaatctgcctcactacattgtactcgttggaggcggcctcaacgtccaacgctgtctgactcaacatccgacaagtgtttcttagcgagaaacactcacgtgactttcccaaaactttcctccggtgtagtagaaaataagcatttcatttttccgaaaagcgtcgaatcctttgcaaacccctctctaccctaagaactccacctcctttgcaaatgtgctaacaccaacaagtgtaccacaccatatgcatgtgtgttagcatttcacaaactttttattcaaaagagttttgttagcactctactactagatcctaatgcatatgctcaagatgttaacctagtagcacttgattcatgagatgaccgtgattttctttcttgatagttgactatctatcctaaatttggtcaatcatttctctactcatcttacatcgacaaaaacaaaaaccctatggttatacctttgccttgaactctatgtccatcacgtgcttgatctccatgtccaagttccatctctttgagatcatgtggccatcactctatgccactttgctctttcatcacttgtgttgctatgcctagctcaaatcacttcaatacaatagcattagcaacttggtatcattaattaccaaaaccaaacttggactttcaatagcttcgccatttgttttactaacttatttagttgagcttatagaatttttaaataggctattcaccatcctctagctatttgcaccttataatatgatgggcaaaaagtttttggataaaaactaaatagggccctagccaaaaaacaaaaaaaacaaaaacataaagtcgcattttaaaccgcttataataaagctagaaagataagataaatagttttagaagttaagggaggcattttgtctagttttaaaatttatgaaaaaaacaaacttttgagaaaattgaaggaggtaatgtagactttcctcttcttcttctttcattctcttcatagatattgcggtgcctttcttcttcgcttcctctttcggtcctagtgccaggctaaggccttgtttaggtcgtgtttagttttcgatgcaaaaaattttgagacactgtagcactttcgtttgtttgtggtaattattgtccaaccatggactaactaggtttaaaagattcgtctcgtaaattttaatcaaactgtgcaattagtttttatttttttctatatttaatactccatgcatgcgtttaaagattcgatatgatggggaatcttgaaaatttttaggtttttgggtggaagtaaacactaccggaatccgcatctttgccgagtgttaaatactttgccgagtgtttattttcgggcactcggcaaagaagctctttgccgagaacacttggtaaagaccttctttgccgagtgtttttttaacactcggcaaataagactctttgccgagtgtattcttttgacactcggcaaagagcttctttgccgagtgtattcatttgacactcggcaaagagcttctttgccgagtgtcaaaaaataaacactcggcaaagaaaatttaaaatcgaattttgaagccctaaacgaattcaaatcaaaaagtttttaactacaaagttgtataacttctcaagatctacaacatttattttgatcatttcttcatttgacaaagcaaaaataaatttgtttacaaattttacatctctcttttatagtttatgaaattacaagagagatatataagattttagaaaaatattagaatcgccatgtcggataaatatatgacaaaataaccaaaataaactctgtagatcttgagaagttatgaaattttgtatttggcaactttttcatttgagttcatcttgtcatgcaaaaccacgtttttaattgaaaattttaaaatttaaattttttaaacaacctcggatggaaaagatctctaaataaactctgtagatctcaaaaagttatgaaactttgtagttggcaactttttgttttggaatcatcttgtcatgcaaaaactacatttgaatttcttaaatttaaaattcaaaatttgtaaacgacttcggatggagaaactccctaaataaaaattgtagatcctaaaaagttatgaaactttgtagttgacaactttttgatttgaaatcatttaggaccttaaataatcattttacacataatttggtataatatttgaggaaccgaaatgcaatataagcacaagtcatagtgtggtgcagtggttaagagtgagtacacgcgagcgagaggtcacgagttcgaatcccatgaaccgcaaagatgcaaaaaaatttcagaagttggctggcaagaagagcccggtgggcgttggcctcctgaaaaaaagatttttttctcttttatttcggatctttttggattttttcgtttttatctttgccgagtgtcgcaaagtctttgccgagtgctcgaaaaataacactcggcaaagactgctttgccggctgaaattttgccgtgtggtctttgccgagtgtttttaggcctttgccgagtgccacagacactcggcaaagcatgggtgtcccgtagtgaaacaaggccttagtacaccctgaaaaccaagaagttttcaagattctccgtcacatcgaatctttgggtatatgcatgaaacattaaatatagacgaaaataaaaactaattgcacagctgtaaatcgtgagatgaatcttttgatcctagttagtctataattagataatatttgccacaaacaaatgaaagtgctagagtagcaaaatctaaaattttttcacatctaaacaagacctaatgggtgtttggtggaggatgttaaaacctaaacaggcggttcccattgcatcgcacttcaccccgtggaggcctgcagatttcggccccctagagcacctgtgcggtgtgggctgtgaccgggcccatcctatattaaataagggagcgccgtcccacctttccacattgaggccttgtttagttcgcaaaaattttcaagattccctgtcaaatcgaatctttggtcgcatgcatggagcattaaatatagataaaaataaaaactaattgcacagtttatctgtaatttgtgagatgaatcttttgagcctaattactccatgattagacaatgtttgttaaataaaaacgaaagtgctacagtagccaaaaactaaagtttttgccaactaaacaaggcctgaatgaattgaagtatagagagaggcacggcgaggtagtggtccttggccatggcgactctggcggccagctcctccgtgtccgacgacaccgactccgactccgactcctctcagttagcctctcttccctagtccctccccctaaacccttccgattccccggaaccccgagttcaatctactccatgcgaggcgatcgatttggttccctgccttcccttctctttcggggtgctcgggatcgcatttctgcatcacgcgcgcttgacgctgttgctgttgtgggtattgatttcgctcttcccctgttgcaggtgcagcgaggcaagcat

SEQ ID NO: 5127 - DNA, 1835 bp, Sorghum bicolor
  Intron number 7 from transcript Sb01g033390.1 (locus Sb01g 033390) derived from phytozome v7.0 (chr-ID chromosome_1; pos 56707713 to 56709547)
tgctagatttcatcgacgacaagagcggcaacgtcgtaagtgctcaacacgttgattcccaggctaattatgtatgtacgctattctttgctaaagaaaatgtatttctttgctcaagaaaatgtatgtatacactattccttcaacgtacatgtagtctcgcacaacctaaaatcttgaacaaatcacaattcgtggatatgattggattattttttttaataacccatattcatatttgtatctacatttgggagttatttgtgtcatttttttataactattgaggtggataatttagcattactttatgtatatcttttataattatggaggtggataatttttagtataaaatactgttgatgattagcatctacaaaattaaagactataatatgtttatatttatttattgtgagaatttctacgaattgtcatgtatggtgagaatgaatcatcatggagattctcttggtgtatccaattagtaatagtatttatatattttttctataaggatcaatgttacagaatttaaacttagaacaaaatcaaaacacttatattttaccttttttataaggatcaatgttacggaacaactcagagcaaaaccaaacactcatattttacttttgataaggatcaatgttaccgaattttgacttagaacaaaaaccaaaataattatattttacaacatagagagtaatgtttactgctggtttgtgaaatcttacacaacattaggatcataataatcctccagagacacactacatgaagatagaagtcattgaaaatcatagaaagaacattataataccctaccaccaatttggatggctataactagcactgatgataataatcattggtctaatttgcttcagaattacccacacttccatttatagaaaacaaactaaagtaactctatgaaagataatagaaacaaatccctaaatttgtatctaaattattgatatatgctattatttaaataaacatacctatgttgcttaaaaaaacatacctctacctatatacgattattagtactcccatatatgaaataaattttatatcaactataatacttcgacataatataggatatgttgcttaaagaaacatatttctacctatatatgattattagtactcgtatatgaaataaattttgtatcaactataatacttcgacatgatactggaactgcgcggcaaggcctcacgcctttctagttttaactaatcacgaagcaatatgtttgtacctacccctctagatgttctagtactccctgtgtctctgaaagtttcaattccgagtgccagtcaaacttgtttaactttgatcaactttatagaaaagagcatcgatatctatgacataaaatgagtatcttatgaaaatatattcaatgataaattaaatggtattaatttggtactataaatcttagcgtatttttctataaatttggtcaaagttttaaaagtttgacttaggacaactctagaagttgcagctttcagggacagtattttttacgcgctttctccaaccagtcatttgtacagttttcgtccgttttttccttcactgagatctagaattcgagatgctataacactattccaatcttcttttgttccgttatctataaaaaacattattccaatcttgtgtttttcctattcttatttttaaatagcccttcattcaaaagaggctctcagcctctcaccattaacgaagcttgataggcctgcttgatcgcagtagattttttcttttttaacttgtttcccttttctttggcagg

SEQ ID NO: 5128 - DNA, 6389 bp, Sorghum bicolor
  Intron number 2 from transcript Sb05g007060.1 (locus Sb05g 007060) derived from phytozome v7.0 (chr-ID chromosome_5; pos 12313740 to 12320128 reverse strand)
gggagccagcgaccaacaagaaggtcaccatccaggtactatcctgtatagatccgtgcatttgctcttatgttttgatgtcttttggtggaatatttcttgatggattcgtatggcatgctgtgcttatagatagaatagtctgctggacagttctgaatttttacatgtgtttacatagtgctatgtggctgttagtttgtactgctcgaataggaggctaaaaataagatccgtgcatttgcccacatttttggttattttatttggatttgacagatctgcaaataaaatggtattttaatttttgtttacatgctagtatgtgtgctgctaattagtacataagttccttgttcatgtgcaagctgagaagaagtccctttttcttattgaatcttgaaaccatattaccattatagttctttaagatgtaagcttgttttttctgtacatatttgagatttgttacctaaatcattgatctatggttttctctatggtagccaacaagaagaagtagctccttggatctttgccctaagaaaagccgtagcaactacagacaccttctcaccaagcattaggagccagctcgtggattagacttaggagtatcatcaggtaaagtgctctctaccgcttcactatagttgttgatgcttgtcttccatggaatcttatgttgaatgcgattgacgatatgtatgcacaatgtgcttgaatttgatgccatgatctacttttgtgtttatatttttagagtctatttggtcagcttctggttgtccctagtaaaagctgatggataaatcttggattgatgatgatgctaggtaaatacagtgacttaacaaatactgaaaagggtatacatagatagagtggctttttaacataaaactatcatgtaggcacggcaaggcatatttgcagggggtgaaccattttttagcttttgcatttagtaatgcagctatgggtagcaagatactatgtccttgtagatagtgctccaactctttttggaatgaggctagtgaagtccgtgaacacctaatttgtgatgggttcctaaaaggatatagaacatggaatttgcatggagaactcacatcttctgtgaatcatgagaattgtgacagtgacggtgatggagatggtgttgaggttatggatgagtctgatgaagatgatgacatctctggtttgcttagggacttagctggtggcttagatgatagaggtgattttgaggacaatagtcctgctctagatccttgtgaggagctagttgccattcaaaagttggtcgaagaaaatattaaggaactataccctacttgcaagaaatatacccaactccgatttcttattagattactacacatcaaactccttggaggatggcctgataaatcttttaacttgctgctagacctactcaatgatgcactccctgatggttcagcactagcgaaaaccttttatgaagctaagaaattggtgaaatccataggaattgggtatattagtattcatgtgtgtgaaaatgattgcattctctattggaaggagaacataaatttgaattcatgtccaaagtgtaaggcttcacggtggaaatcaacaagaaagactctagacgggaaacatgtatataatgttcccaagaaggttcttcgctactttccaataaagaagtgtctccaaaggttatttatgtcctctaaaacagcaagcctgatgaggtggcatgatgaagaccggaaaaaagatgggctcctaacgcatcctgcagattcccctctgtgggaggacatcgataaaaagcatccaatctttgctgcagatagccgtaatattcgtcttgcatttgccaccgatggcttcaatccgtttagaacaatgaataatagctacagcatttggcctggtatttgtataccctacaatttcccaccttcaatgtgcatgaagcaatcaaatttcatcttgtcttttctgactcctgggaaagattctccttgtggtgattttgatctcttttgtcagccacatgtcaatgacttgttagatatgtttgaaaatggtgttagaacttatgatgcttctagggatgagtacttccagttacgagcagcggtattggggactattactgatttcccaggtctaggatatgtgtctggctctgtcacatctggtgaagcagcatgtcctgattgccacttgtctactgattcaattagacttggtaatggtaccaagacttgctatctgggtcataggagattcttgcatgaaaatcatccatttaggtttgatgccaataaatttggcggtaaaactgagttcagacctgcacctaaaccactttctggagaggaaattttggagtgcactaaagaccttagtactaattttggcaaggatccatctgggaagaaactagcaagaaagaaacgcaaggaaggtgaaccattagtcattttcaaaagaagatcaatttggttcaagcttccatattggaaagatttgatgttgcgacataattttgactttatgcacataggcaaaaatgtcagtgaaagtttagtgaacacattcttgggcactgttgggaagtcaaaggataatttgaattctcgcttagatcttcaagctctaggtcttagaactgatcttcacccaattgaagtagaggaccaattttatttaccaccagcaccctactcaatgagtcctgatgagatgaaattattttgtcatgtactaaaaggggtgaagtttcctgatggttatgcatccaatacacgacataatgtacatgtcaatgagaggaaggtattcgggcttaagagtcatgagagccacattattctacaacatttgctgccacttgctgtgagaaaaatactaccagaaatagtcagtgcgggagtgattcgtatatccaactttttcaagaaactttctacccctgtcattcgaataagtgatatggatagtctacaggctgacatagctgaaaccttgagcctgcttgagactatatttcttccatctttcttcgacattgtggtacacttgatggtacatcttcctgcccaagcaaaaatagctggtccagtccattttcgcagcatgtggcccgtggagaggtacttatatcttaggccatgtgtcttactgaatatgtatacaaacctactagttatataccattatcaattaatatgcctgttatttatgtctataggtttctcatgagattaaagggttctgtacgtacaaaaagtcatcctgagggatcaattatggagtggtctaattttactgggttccttacactttgtgctcgctacctacatggcgtgggacaaattagccgtcaacctagaatagaagaagatgatcgtacacctcctttcttccgtagcattggtcaaggcttggctggaaaatgcacattttgtttagaccacaagacatgggtgcaagctcatagatatgttttgttcaaccatgaaaacattgcgccttacttggagtaagttaggaaaaccacttgcatcatatataatcaaattcccctgcattctaaagtcacaataacttttgcagcaagcatgatcaatatctttcctctattggccatcgaaataaacgtgacatcaaccggatgcgtcatgaatcctttcatgagtggttaatgttgcatgtaagtgaaagtaaaacttaggacttgctatttgtgatagattttacacattttaatagcagtctttcataatcacaggtgggagaaatgtgtgaggaagcaccagatgagataaaaattttggccaaggggccaatgttgaatgtatgcaagtatagtagctatagtattaatggattctgtttccacacagaaccctatgataagggaagacctattcaaaatagtggggtggctgtagtcgctgaggcaacaataatggattagcattctaaagtcacaatgacttagataatttagagaatgaacacatggataataataatggattagcatggccattatatgatctaagtgcaaatgtgacagtcgacattgtaaatggggtggttccttctgttagaactgatatagatggaacacttgtttttctccaaaagcctaaaaagcctagaaagtaagtgttgtttaagtgatgcctattgcagatatttgttattgattgttttattgatcccttccatatagattgttgatgtttgggtcatttttcaggaaaacaaatggcaagcgcaagaggaagaagtaacaatgaccaactaactgagtatgagcaggatagggatgaaaatgttgcactcaacaacgagatgctggcatcacttggaatccctcctatgaatacatgcaaagaacaacctaggaaaagagcaaaggtaatctcttatataaatggttctactaaaatgattttgctcatttaatactgctgatatctactaccttttagagtactcgtaaaacatgtgttgatgcaacccgggttcataatctacggccaaggccacaaacaaggcatgcaataaatgtgaatgagcaagttgaagaagatttagctgaagaaaaattagctgaagaaggtttatcggaagatgattgggaatatgagtcaactggcggttttttatgtgataatgaaggtcttgtatatcacaacagattttgtcaagttatttatagcagatttttattatgcctgcttctaatttctctagttatttatagcagactttcactgcaattcacaagagaagaggaatggaagaggtatcagtagattggatgaagtctttgcaaggaaacctgaaatgcctaaaatcaaagttatggtcaatgcacatggtcagcccattggtgacaatgctaggaggttttctggtgctgttggggtccgtgtaagacagaaaatatcaattgcttgtgctgattggaggcttgttgatcctcacataaaggatgaagtatggatagacatgaaggtatttctagcatgcaattattttcacttcatagtgcatccattatggagcagctctagttttatttgtaggctgcattgttttctcacttcatgattagaactcatttgctaatttttctctacacactaggaattctttgatattgatgataaagcctttgactggtttttgactgctgctggaaagaaatggaaggattttaaagcaaacttgaagaaacagtttttgaaaggcgaaataacagaacaaaaaataaggacaaaacaaggcaaaagactgaatgatgatgattggaactttctcaaaaaccattggtcatctccagaatctgaagtaagtactacccctagtttctatttgctagttacaaccatctttgctacttgttggttgctgcttgtagtgatctttctcatacaactgtatatctatcataggcacaaactgaaattgccaaagcaaaccgtgcaaagttgtccatacatcatacaacgggtaccaagagctttgcttgtaacgggcatgaactagtatgttaactatacctatttttcaatatgtaacgtgcttcatttcttaagtactaaaagtaaaacacttgtaggctattaaactagggcgccctcctcgaagggacgaactctatatcaaaacacatacaagaaaaaatggaattgcatcgaggaatgcagaaccaattatagtaagtttttctttgaacaaatatcaccatttgaaatataggttttggcatattaataatgatattctgtttgtgtagaataaacttaaggcagttattgaagcccaaccagaactgacacaaagaaccatccaagaaggcgatgcatttgctattgcctgtggaaaaaaggaaccaaaagggtgagttcgggttttgggtctaggaccaactccccaaactattggtacactaggagtcaagggttacacaccaacaagggttcaaatgcaagttctagaatgtagaaggaaagaaagtcaccaagcagctctaaaacaacgcatagcagaattagaagctgaattggcgcgtgaaaggtctaatatggaaaatatctcccagaatgactctaactcacgacaccatgaggtaaactatttgtacattctctgattgaattgtcagtccttgattttgtggccacataattggcacataacagaaatcatctgttactatgttaaacacctatgacctatctgcaccccaagtagtttctgatttcacataagttttttctaagttctttttgtcttgctccaaaatggctctaattccccatttttatgtctatagagcccaagatctggagaaattt

SEQ ID NO: 5129 - DNA, 4789 bp, Sorghum bicolor
  Intron number 2 from transcript Sb02g008420.1 (locus Sb02g 008420) derived from phytozome v7.0 (chr-ID chromosome_2; pos 11212568 to 11217356 reverse strand)
cgaagaaaggaggcggtgcacgaagaaaggaggcggtgcgcgggggaaagaaaagagtcgcgcgcggggaggagtcgtctcgcgggaaactaccgcgacgtggggagtacgagcatgacaaggagtccaagagtctcgcgatatcaaaattaccaagccattgtgcctatgcaaaaatgccaagtttggtgcatcaaatgccaaatttgccaaaatgcataagtcaaatacaaaactattggagagcaatttttaagatttttagcaaattttaagaatgcaaagtccaattgcataactgttggagatgctctaactgctgtcggttaccaccgaccatgaggagtgatttgtggtctctggcggttttcatgaattcctatggtcttgagagaaatgacaagctagaatattcaggattattcctgttgatattcttagaccgccagaagtacaattcctgacggttaatttattataaactgacaggaattattcaagccaacaggtactttccattttctggtagtgagtacccacaatcaaaaataaataaatttaaaatatccacaactactccatctattttgatattgaccccacctcttattttagaacagtactatcttgcttatgaatgccccatatttgttccagccatcataaagtttatcattatttattattgttttagaaactgccgtcatacactactagagaacagactttggatctgggttttggctttggtctcggcaattttagcgcccgagacgaatggtataattattcctagtttgagaaaccaaccgcgactaaaggcacctgcccaacggctctgatggcaggcttttgcagtagggcatctttagttccggaccgtatttaatcccggtttcaattgtcatccaagactaaacctttagtcccgatttgttaaaaaggtacatttagtggaagccaaaccgggattaaaggtccattgttatatatcctgggtcttcttcttcctccagcccgagccattcgaactcacttctagcttgcttcatctttgttcatttttggccatcacaagactactccccctctgattcttcagcagtaaaggttactaacttcatcctctcatgatttattagtagcgcatctgatttcgtggtctagatatatgtaaaatctatggtggttttttattattatttgtgcaacatttgaactcaaagtcatttgatgataagcttaaactagttcatcaaaactagtatacacctttttctgctttaatgcataccacatttcatggtttatgtatctagagagcaatagaggattttaagggtttcttttatataatttcactatcggagagccggcctttgacgtgtgtccgcccgtttgccgtgagcaacacacggcaaaggtcgggtttgccgtgtgtccaatccacgcacacggcaaacgccaggcacacggtatatctggcctttgccgtgtgttgcacacgttgcacacggcaaacaccaggcacacggcgaactcaaacttttgtcgtgagcaacacacggcaaaaacagggcacacggcaaaagctaacccacgctaacgcccacccgtgcatcggtacttttcaaaaattctaataaatgctattttattctgtaaatcctgaacttgtacatatgtcatgttatcacacatagaggccatagaaaaagtttgggaagatttcgaataagttgtcacgtatgatgtatagaaaccaaacaatcttcgaagaagttctagagagttatgagtgaaggagcatgagttggagtagattcgacttttatatttgagtttgatttcaaaacattttctgtaggcactaaaccacataggttgtgtcgtgtccaagttcgggaatttttcggaatcgtttactatttcttaattattttcagcattttaattgaaaattttaaaatttgataattttaaattacctaagatagaaaaaatctctaaataaactttgtagatctcaaaaagttatgaaactttgtatttgacaactttttgttttggaatcatcttgtcatgcaaaaactacgtttgaatttctcaaatttgaaattcaaattttgtaaataaccttggatggggaaactcccaaaataaaagttgtagatcccaaaaagttatgaaactttgtagttgataactttttgatttgaaatcatttaggacctcaaattatcaatttacacataatttgatataatatttgaggaaccgaaatgcaatataaacacaagtcatagtgtgctgtagtggttaagagcgaagaaacgcgagaaaggtcatgggttcgaatcccatgggctgcatggtgacacacggcaaaaccctgccgttaagccgtctcccgccgttcgttacctttttgttgccatgtgtaaagattgattcagggcaaagtttcgtcgtgtgcccacaatttggccgtgggtaaaggtaaggttcaccgtggccctccaaaagcaggctaccaatcaatgccaacgtaccatcaaaggcttgtcgacccaagttgatctcggacttgaaccccatcacaggtcgaatggcatctagttgacaaaatgttgtccaatcatgaagggtttctgtgccaaatacatcatttcatagaacacctttgccaatgcctctatctccattgcacatccactagtagaaagaagctcaatagtggcggttaaacacatttctacaggcgttttcgtaaccattggcgctaggggctagtagaaataaatcttgcactagcggttaactaagaaccgcctgtggaaatctatttggtttgctaagacaactgttagtagaaaatagatttccacgggtggttctcttagccaaccgctagtggaaacattttgcgattcgaacccgagatctcgctctcacgcatagcctcctctaccactctacccatcactcagttgtgtctatattagagtttagttccccacatattatcctaaaccgagcatacattaattgtttgaggctctaaatggattcaaatagaaaagttgtcaactataaagtttcataacttttcacgacctacaacttttatattgatagtttctccatccgaggtcatttacaaaatttgaatttcaaattgaagaaattcaaacgaagttttcgacgataagatgattcaaatgaaaaaattatcaactataaagttttacaactttttcgagatctacaactttcattttggcagttttttcaaatgaggtcatttgaaaagctcaaaaaattaattttaaattatatttataggcggttttcttaataaaccacctatagaaatatgatttttagtggcggttccctaggagatccgcctgtagaaatacatgatttgtacaggcggttttcttaggaaactggaaaccgccagtggaaatggaccatttctactggcaaaaattgattttcacaggcagtttttgagttgggcaagccgatttctttccacaagtgttctttaattgaaaccgcttgtaaaaactatgctccaccgccaacgtagagtgtttttgtgctagtggtcctttagcgatctgtgcttgttgatagtcatctaacatgtctgctatccccccaccagcatctacatgctcaactcgtggtctcaccacttcctctctcatcttgtgggattcaccatggtggtccaacgggtacagtctggcgtaaatccatgcttcaaaagatatttacccatattggccttgttttgctattttctgtttgcacagttgtggcagggcaacaaaactagactcgcactattcgcacccttgccaaatgcatggtcaaacaaagtctcaatcttctacacccattcattgctaaaatcaatctaacttctatatcctgaataaatccactatcggtcatccatcctctaacatatatatcagcgagtaatggaaccatcaattgcatctacaaggtgttcctacttatctaataggtgagaataggtcctaatcccaccagcggatgcataggtgaggttagtttccatgatctacttcaagccaagacagagttttgatagcacctccccgttgttctctagatacatgtcccggcagggagagtgtgtatctagagaacaacacacaggtgatgccgaaactatgcctcaaatcagagtagaccatggaaactaactcacctacttatccgtggactatcaagaaaacatagacaatctataacagatatgattgtacatatgcaaagatttgcatagttccaatcgtatctcttttgaacgggagacgcctaactgtgggttacacgatctacgacaacgatacgataacagaggttatacctagggtgatggtggagtcatgctagtgaggcactggcgagttgatttagtggcgagacgacacagtgaaggcagatccgcaacagcgaagaagacgagcgaggtcgcgcgaggctctcctaaaaaagatacatcacaatgagaactcaaaatttcgacggcacctcacctgcacgaaggttacaaaacctgaaaaaacaatggcacgatggccgacaatcacaaatatactttcaactacttatagtactctcactcctaatactaccgctagagccatacgacaacgtggccatacctcgtggagcgcgcgcacgctgtgggtgtgggccgaggctagggccgaggcggggcgcgggcgttgggctggggagg

SEQ ID NO: 5130 - DNA, 2151 bp, Sorghum bicolor
  Intron number 1 from transcript Sb08g009421.1 (locus Sb08g 009421) derived from phytozome v7.0 (chr-ID chromosome_8; pos 18484917 to 18487067)
acgtccgcaacatcgcgcaggcgctcctctacaaggcacgtactactaccctgaatttccccttcctctgcctccctcgagaggagcgaaatgaaggttttttttctctctctcccgggtcatcccaaccagccattttcttggtgattatcctgccttggactgttagatggctcttggtttggggaatcacctaggtctagatggggagcatcgtaagtccattctttaatggagtatttgatttggggaatcaacccattctagacagggtgaggcatcatgagtccattcctcaaatttagtggaatgacttcattccttgtactagtactaattattagctcatgaaaaatgattgctgatggatcaactcactttattccacaaaccaaaccaaaaactagtttgtgagatgatgatggaccactccattccacaaaccaaacatgccctgaatttgatggaatgacttcgttcctcatactagttaattatcgacttatgaggaatgaggtgctgatgctcaactcattccattctataagccaaacaaaaaaagtaagtgaagatgatggactatttcattcctcaatccaaacacccaatagatttctagcctacaaggttcttgctcaatttcctaccgtttgtcccaccatttcctggattaataacatctgggatttgacaaaggtttcattcagcaactggattgagataggtgttgtttgaattgagtgcttcacatttgtgggtaagttggaagtcaagctagctaaacagactaaaatccaagaatccccggacgattcaggacctaggaagtctgttttcatgtttgttggtctctctgctggagatcattcagaaacaatactggtacattgagcaatcaaactctagacttgagaactataccgttctctgatgcatcggtattgtaacagtgagtttaggtactgatttgtgtaggacaaatgccaagtgagttctgataatctttattctttcagtttcaatttaagaaaaaagttaatattcttatgttcctctgatatgtgaggggacctgccttacgcatggtccatcttagctcagtagcaccaatccctagatggctgactacatcatgattcatggtgttttgttacgcatttacttgtatgtaattggaacctgcttgttttgttgaatgttgtgccagatagacacaccatttaccacatcagtatatctggggtttgaagatggatttatttgttacttggattggcattgataaaatttaattgatcgatgtgcattcatgggcaagttggaaatgtttctcattaatcaactggagttagctccagaagcactggccaatttgactcatagatgattttttttctgttgatttaataaattcatgttcgttagtatcatctgctagagattagaaaatcacaagtcctagacttagatatgtatgattccctaatctatagatactatacatttgcatttgtgtgattgatttgtcttggatacttgtcttggaagtgtaattattattattttccatctttttaaattaagaatgttgcaccccagtgtcggctctgatatggtccatcctagcaccaatccttgatctcattcaggctccagttcaattttttgcaatggtagtcagacaactccctggcacgttaaatgaacctgagccctgtgctagccgctagcattttattctgaggaaggtataccgaagtcaataagggtcattgtagtttttgtgatagcagtttagttgactacacctttgacttaaaccaatagcagaagagatatgcaaccacatttggtagagattgtgattttgaatgacagaagcaccattgcaagtgtctgaatggcagaaacagaaaattcaatataaaatattcttctccactgcctcacctttcagtttggactacttataatgatcatttatttcttcctggtattgtttttaaatatattttttttcattatattgacatgtagtgtatgtttattttaagtccccccttcagttgctggaacatgctgtgaaattctactggctgatcctatcttgttacagataaagcaaaagcagaagggctctgatagaatatt

SEQ ID NO: 5131 - DNA, 1878 bp, Sorghum bicolor
  Intron number 3 from transcript Sb03g035540.1 (locus Sb03g 035540) derived from phytozome v7.0 (chr-ID chromosome_3; pos 63602623 to 63604500 reverse strand)
cttggttagccaagagggaataatcctaggtgaggatgaagctgtactgctgcagaatgctctgcatacactgatatgcatttgtgtatgtattaatttgatcatgggaatgcctggtgtattggatctatgctctgtgctgataaatgctggagtgtgaatgtttattcctgtggtaccttcatgttggaaattcactacccaagtacccataccctataacttcaatcttttcctgtctagttcatacttttgatggtttgatcccagttctgctattccaatcatatatccaagagcaggaataatggagcagtaaataatttctataatagttgattcctagtttaccatggcattagtggtatccagccccggccctgagggggtgcgagcagagcagccgaaccgggcccttgaggccagggggccctaccccaaatacattagtagatataataggtataatatatagtattcagcttaaggagaaaacacgtcatttatacggttgtatgtatatacgagtccatatgatttagttgcctggtctttcgtagttccgcggtgtttgtgactccgtcccttgcgccgcgcggccgtgttcattctgatctgtatttgttcggttgcctatttttctttataggtacaaaactgctcttgtccctagtctttattctcgatttatttagggcttgtttagttacacctaaaaactaaaactttttcaaggtttttgtcacatcgaatcttgcggcacatacatgaataaaaaaataactaattgtacattttatctgtaatttgtgaaactaatcttttaaacctagttagtctatagttagacaacaattgttaaatacaaatgaaagtgctacaatgtcaaaatccaaaacaattttaggccttgtttagttcaccccgaaaaccaaaaagttttcaagattctctgtcacatcgaatctttcgacacgtgcatgaagcattaaatatagatgaaaataaaaactaattgcacagtttatctgtaaatcacgagacgaatcttttgatcctaattagtctataattagacaatatttgccacaatcagacgaaagtgctacagtagcgaaaaccaaaatcttttcgcatctaaacaaggccttagatctaaataaggccttaggtttaggatttaggaactccatatgatgtagcgatcaaattaaatttaagtttgtcgaatgttgatgtaaatgacataatttctgagttagctgttatgcagtctacttgcctaataagccaatgtctgctatgaaaattttttaggttatcacggaagtggattgatatcctaatatttctattgcttatcggatcctattcactatgcctatattattgaagaattatttaagataatgttccaacaaatatcaaatggtttggcaactttatgcgtcgagaataaattattagataaaattaatgttgaggtcatcatcaatgacttggtagcagcatatgttagaaattttttttttaaaaaaaatacaacttattttataagagttttttatatattacacttattagaattattattatattgtaaaagttatattaaagcgcccatcgtttgtagcttcgctccgggtctatgattttacagggccgggcctggtggtatcttttctgtggtgcgttaatggagcctatcctggcttacaacagtatgcaacttagttcaccataaacttgttctggttgctgatggctgtatttgctgtgacctattgtgatgaatatagctgtcatgcccaacatttaaagctgcatattgtctttgacaatgtaactcagctgttttctaaccaggaattggctaca

SEQ ID NO: 5132 - DNA, 2719 bp, Sorghum bicolor
  Intron number 1 from transcript Sb02g027060.1 (locus Sb02g 027060) derived from phytozome v7.0 (chr-ID chromosome_2; pos 62310801 to 62313519 reverse strand)
tgctgatttcggactcgctgcacgggtcactagtaatcttttgctactattatgtattactagctttcagtctgaagctcaagatgaataggatcaatttcttgagagtacattgcgaagcctaacatattatagtgcaaaacatgaactgaaaaatcagtatataagtctagaagatcaactggcagtcccacattggttctgccatctttaaataatgttgtgttacagagactaattgatggctgtactcagctgcactgcgtctaatctttcagctatattttcatgttgtgggtgccatggtcttagaattccacttcatacaaactcatctatgttttaccatgactgctaagcatttttgcaggttgcccatatatgaccttgacttgagtatcagctagtgtgatgtaaatgagttgggagtcaaactaatttgtattcgtctatggtctaagaacctaagtgagccatgtagctctggtattcctgccttggttgtgtaaccaaacaaatgaggctaactcaaggacttaacctttcttcaaggcacgagctccctcatctctggagtcctccttaagttggcaacagttgatatctgtctcgtcatatattttttgtgacccttctgggttctaactgacaattgatatgatcttttgtgtggtgtacattagtctgtaagaagaaatgctgctctcaatgcttgctcagaggaatgagtgcaagctgtgtttttttggagtcatgagttcatagcaagtgtctcattcacatttcatctcctcttgctaggtatgataagatatttgagacctggtgctaggatattcttcatattgacctttcgttttcttcctttgaatttcaaagttaagaacttacattgatgcacaagacaatgatttacgacgcccccaatgtgctaagagcttatctggactttgctactattggtctagaataactcagatttactaaaagatatcacgtctaacattcgtctaatgctttcttagtttgctaggtattgatgtttaggttccttgctatcctgcttaagttcaggcactactttgtactgatgttttgtgtaattgtgctgtgtttttggagtcatgaactggtagcaagcaggtatcattgtgtcttccgtcttgctaagcatgctaagaggcaagagaattaaagcctggtgcgagttgatatttgtcaatgatttttgttttggtgtgctagagctacttctggatgttggcatggaaaattggatttgatgttaacttgcaccagttgacaaggttatccttaagtaatgtccaaggtttgaaaaaatgccattaaatgtatgtttaggcgtgcttaaacgctaggaggagacccagcgtcttgcctaggccataggcgttcaattaaacgcaccatgaactaccagaacccatggatggcaaagaaaggaagagaagagacgagattaggatggcaaaatggttcgttggattattattccttctatgcctacctggtggtgtccacttgctcgatttcgctcaccccttgctggactagccccttctgctcgatttctccatgtgcgcagccaaagcagaggtgccatggggagggagaggacaaggtgcgcacgggcgatgtagaggtgtgctggggcgagtgcagtaggagcagaggggcgcaccatcgagagggggtgcgacggacaggaacatgcgagcgaactggtggagtggtggcgcggggctgcgtgatagagtattgggcgattggctgctggaatcagtggtggtagggtatcatgagtgtttatatgggctagtgggctgagtgggctgtgacgacattgctcatccttttctatttattctttcacatttatactagtaaatctcctaatatgcagcagatgtgtaaacgtttgatcgcgtttaatctatgtttacgtgtcctaggcgttgttgtcttagcgcctgcctagcgcctagcattttcttgaaccttggtaattttaacgtgttatggcctttctggcatgccataagctgtcgtgtttcatgttctgaatgctgttgagtcagttttatgcattagaaaatgttgcgacttttgaatggaactatagaatctacttgctctgttctagttgttctggcttttctagatacatggtttgtactatgttacctatgaatctggacatagcgtatatcttgtgcatagcaaaatctatgtacctagaaaaaccaaaatgagttacattttggaatggagtataattttggggtcgtatggaactggggcagtattttttttaagtagttgctcttatttcgtatggtaccaatggatttttgcaaatctgcaatgggaacttatagccagaacttaccatactgtattggtgtttcatatacccccaaacctacatctatttgtaatgtaaaagaatttctaatgagaaacatttgagcattttcctgttatacagtagcatctctatttttatgcttcatcttgtgattggcataaatgccacatttatggattgttttacatgcacgtttcttgtggtcgtggctgtatatggcttgtatctgctgcactagacatgactgtgtgtacatgttttgtactagctaatatgtgttgtatgcattgagcaggtcagaaattgtttggtgtagcaggaagcccagca

SEQ ID NO: 5133 - DNA, 1421 bp, Sorghum bicolor
  Intron number 1 from transcript Sb02g041120.1 (locus Sb02g 041120) derived from phytozome v7.0 (chr-ID chromosome_2; pos 74987251 to 74988671)
cgccgccgtcttgcgcgacggcggcgacatcaccggttggtggccgttcctctctccacctaactctttgttcatgttaacatgattcggttcagttggttgggttcagttagcttggtggttggtatgggattgtgattttgcgcgggtgcgatctctgcacttggtaaatttttccgtacagtatgtttgagttactcgacgcctacgtgccatttgggtactgttcgattggggactggatgtgattggagggagagattagattcttgatttgtgtagctccttcctacttgagatggtgggcactagctaactactttagccctgatctgttgggggatttcttattgcttttgattgattgatgtggaattttgctttagtatagcgtgatctgggtaggagttgactaggtgggattagaccatttgaggctggggcctatgcgctagcgatccatgttctttttttttttggtttggctgctactggtaatatgagatgtgatccgtacaattggtgcaacactgcaaaattacttcactgagctttgatgctttgtccacgcaagaactgcactggtcatcacagttaccttaaattgcgatttatttctgcaggttcactgatgatctgtgattaaccttgtcttgctgtttgaattttgatcagaatattcatatctttaatacaattttatactttaggatcatagtgtctagatcagttctacttctgagtggccaattcaaaatttgtcaatttattaggttttctgttcttgccatgatctagttgtagtatgtatcttcatcctgctcttttaggtttccctcttatcaggggagaaaagcagaagaggaaatcaagttacttttcaaattctttttattgacaaatcttccttggattttatctctgtcaagtcttataagttatacggactgatatgctattttttttcctgggaatgtgcatttttttgtgagtagaacttactaggcaagtagacctaacatggagggtgctgtgttttaaatactaccagccagaaatgggtatacataggttgctgcattattttgttgttgaataatattcggtcccatgtgttccagcattgtttgtgctgttcttgagcatgggcataggatgtcccacttgagcactttagagtccatgccattaaagcttcaactttgttccatcaaatattctgtattgctagcagatttactatcgtgaactagcaatatactactttatgagtctttactaatgatggaaacaattgtttgacattttagccttattatggcaacgatgagtcgttctttaatagtatacagcacattgaacaattctgatatcttttccctccgaactatttcattttgcaggttttctgtcaaaattgc

SEQ ID NO: 5134 - DNA, 3627 bp, Sorghum bicolor
  Intron number 16 from transcript Sb04g010020.1 (locus Sb04 g010020) derived from phytozome v7.0 (chr-ID chromosome_4; pos 13070752 to 13074378 reverse strand)
tcaggttaggttctattttactaacatatcattccattctgatatggaccgtgttgctcccatgtcatggaaaaaagattttcttatttcttgaatgaacatatttaataattactggtgtgttacaaatcttatatgataatcaactatcataaagaaagttagaacatttcacaatgtgttgtcttatctcaaaattgtataattcagatggaaaatcatatggcgccaggggggctggtgctctcgttctaaaataccatgttgcaatgtttcaaaaatcatcacaaaaatcatgtatttttagctatacttatctttatgtgtgctagatacatgattttcgtgatgatttttgaaacattgcaacatggtacttttagctaacgagggcgctagccccccctgggcaccaaatctgcacttaattcagatttgagttttaaactgttagttgactattctgtggagattcaattgtatatcgatagagatttaattgatttgtttcatttattgcataagaattatttctttgttatattagtagccgtaatgcttccttttatgtcttggtagtgggctgatctaagccaatgtactaatagtacttggagtagatggggctgtactcagccatactcttgtgtaccatatagttggtacaagagttgtatatatactacacctaaggctgttagaatataattataacagcccatattgggcttacagcccattggccttgtactcctagcctgacttgtattagtaccacattgtaacttgtagatgtactgcaagccttccttgggatctctgtcacgcgttctgcggatggcctcttcctgtctcagcgccagtctgctccagcgcgccggcatggctgagtgtcactctacggcaactcctgttgacactcatgccaagctctctgctacggacggcgcaccggtgtcggatgctactcagtaccgcagcctcgccggtgcactacagtacctcacgttgactcgttcggacctcgcctatgctgttcagtaggtttgcctcttcatgcacgacccgcgggagcctcaccttgcgatgctcaagcgtgtcatgcggtatgtcaagggcaccctgtccaccgggcttcacatcggcacaggcaacatcaccaacttgaccgcctactccgatgctgattgggctggttgtctgtgtcttcctcggcgacaacttagtctcttggtcctccaaacgacagactacggtctctcattcgagtgcggaggctgagtatcgtgtgttgcgcacgctgtggctgagacttgttagcttcgtcagttacttcaggggctccatgcacccatctcatcgacgacgatcgtctactgtgataatccagttcatcatcatcgcacgaagcatattgagatagatattcacttcgtctgtgagaagcttgctttgggacaggttcgggtgctccatgttccatcgtctcatcagttcgcggacattatgaccaaagagttacctgtacagttattcactgactttaggtccagtctttgtgttcgtgacactctcgcttatactgagggagggtgttagaatataattataacagcccatattgggcttacggcccattggccttgtactcctagcctgacttgtattagtaccacattgtaacttgtagatgtactgcaagccttcctggctatataatgaaggtcacctcccctgtttagggtgtgcggtgtttctctacaaaggcaatgcaaaaactcagttcagttgccacattcagtttatagagctcaagttcagagcttgtgtgtgctctgtgctcaatcccttctgcctctagccatggtgtgtgtgagtgtgctggtaatcttgctcacctgcgcagggagatcgagggccaacaaggggtatgaggtgtttttctattttgggcctgatcgaaccattctccccatcccttccgctgccctaaactctactactctatttactgcttgcctgggaactatcccaatgtgtgctgcctttagtgttggtcatcacctgggttcctcccctggctgccaccctctttatcctggtctctactagctctagttatcttctatatataagtggattctgtaaccttgttatcaatcaatgaatacatgcagatttttatcttctctcagttccatgtaataaagttgccactcatgtctgtcatgcatgtcaacttggcaagcatgttcgtctacctttttctatttcgtcatcatgtacttctgctccttttgaactattacattgtgatgtgtgaacattccccgtttcgagtgtcactggcaactcttattatttggttatcctagatggctacactcgttacttctggacctttccacttcagcggaaatctgacatccatcagcaccttgtgcatttctgtgcttttgcccacgcacagttcgcactccccgtcaagtgccttcaagctgataacgatacagtttgtgaacaacgccactactagcttccttgcagccaatgacattctgttgcgtctcttgtccctacactttggctcagaatggcaaagctgagcgtagcttgcaccccctccattcttccatgccttcagcctactgggccaaaactctctccacagccacctatcttcttaatcgacacccatgctccgccatacgcaatgagatcccattctctcacctctatggtcagcagcccgacctatcccaccttcgtgtcttagggtgcctcttctacccgaatctcagtgtcacatctgctaataagcttgcttcactgtcctctgtctgcaggctatcgttgccttgatctctcatcgcgccatgttgtgttcgatgccagcatgctattgagcttctccagcgtgttggcatgcctcaagctcttcgccacagccagtgtgcccgtcatcgacccgtccgaataccgcagccttgctggggcgctgcactacctgacactcacctgtctggacctggcctatgtggtctagtaggtgtgcctcttcatgcacggccccaggaggcagaccttgcacgaccctggtctcttcatctacatgtctccatattggcatcggtcctgtccagtttgtcatgacatagtctgatgcagactgggcagggtgcctcgactcctgccactccacattaggctactgcatcttctcaacaaactcggtaacaattctcctaaatatcctccctgcaatccccttcctaaccaacccagcctctggtcaatcctagccatggtttgggctcggtgaacacctagggtgttgcctatatatcggcggcccatgaatgtgtccacaacttattgcatgcatacaagaatagttggatgagtctgtcctattttgaagttacaaatctaaaagttctctttttctaatgatgaaggaatgtgtagaagtagaattttcagttgcatactgaagtactaaacctgactgctaattaagcaccacttagtggtattgaagtagtatgctactgctatgcaccctctatgtgaatatgttggtgagttttggtgttcctttttacaggttgggtgcatcatccaata

SEQ ID NO: 5135 - DNA, 4950 bp, Sorghum bicolor
  Intron number 1 from transcript Sb01g020470.1 (locus Sb01g 020470) derived from phytozome v7.0 (chr-ID chromosome_1; pos 22965915 to 22970864 reverse strand)
taaaagacagcaggtggtctgctgcctcgccgcgggtaatgatatgttgcttccctaccttcatccattttgaatgcatcatttatactacttgattgatctgtgcttgtgttgattacacgactcaatttctttctgtttgttcggttattatagcatttgctcagtcattagattttcctttcattcaactgtagatatagcattatttagtcgttagattttcctttccagtatagcatttgtttgattatggccctttggcatcgtctatattgatcactaaggcctcaaattgctccttgaccatcatataatatacaatatgtcaatgattttgcaacatcaatagtgggtgagcaatcttatgggccattgtttctttgctaagtaaaggcaacaatgattggaaatgtattgcatttgctctcttgccattccagaaatgaggtgtgtgtcatattaacacatctggcctttttgtgcacctctataccatactacctgagatgacagcatgtttatttggtggatgcacccctgaattttagctatatgggatggtctcccttgacagttgcatctacgtgccaatcaaatctcccctatggcataagggtacctataagacaatacaacattgttgtggggatttcactatttcgagtcgtaactgcaaggtgggctaaggctagctaggaccttaaatggttgtctaacattccaaggcaagatggagaatacccacccaagtaagagccaagattgtcatcttgatcatgcgtgggttgcttctttgaatatgagcactacatctgcatactagtattgtagtcatatgcacattctttgatgagattagttgtcttattagtcccctagcaccatcgttagtgacatatctgtactagtcacgttttcccatgattattttgctccttggtttaagactaggtcttaaagtttattgcattcactgggggatcaacccaaggaatagttcaagtggttgtaaatagtggagcatttttgtaatactttcactattttgtctgtggaatgtaacttaaggtgtttggttggctattatatatctacttataagcttgtatctgcacaatgagccgcacatgattgcagtcggtgtcctttaatgggtcgtaatgtcttcctcactaccattaccgaatgtgttccctaagattaggtgtttacgcaccactactataaccatcaaaaccttgacctttcgttcaaggtaggaaagtgtgtatgattgtgcctccacacctatccccaaagtagtaacttctatctctataaaccctaaaccaaattgtttccctactgtaagggcttgctcaaggtgatgtctcgcattttagatgcttcctagctcatctttgccatgggattatatattccatgttggggcatcaaagtcttctcatgacactctatggatagcgccactacccttacctacctgctcgagcaccaccatggataaggttgatacatgagtgatgggtggcaaagatacgggacttcttggcagcaactaacgaaagaacagaattgtttatccaagggtttatgtagaaccaataaataatggatatcttgagttgcaaatgaaggtctctatagaagccttgatgggtggtgcttcaaattatatgctatgttgtgcataaatgtataaaggtgagtcatgactttccacatttagcgagcatattgctcgattgaattacttttatggcctataatggccttgctggtaattaaatagtttgtaaaattcacatctttctagtatccattgtactatttaagattgtgtggctgtttgaatgaattatgccactagaactacttcaatttagtgatccagccatattgggcttgtcatagtcaactatttcacaaagtcatgtgcaggaatcatatattgattgctaggaagaaaaattaagatgtcgtgaagcaacctaagtctctcattgtcattgaagaatgaggtgtgtaaggaactatagaaagtccatgggggctcttcaacattttggtagcacaagacgtgatgtcctactacaagcatcaactatcctcaaactacgaaaaataggacatttgataatttattggaatgaaatatgctaaggagtcatcaacatcactaattgaaacttgtatgaaattttggcgacaaacccctatttgcatattgaccttcaaatacctacttggctacataacttaggaaccattatgttaaacatctctagctttatatcatctatcatgtcatgtgacgtaaaatctagcaaaatttatggaatttataagcagtgtttacaagttgtcggtttattgagattaatcatgattaatctgactaatcggtccccgaccttcgattaggtccaccaacctgatttggtcagccaagattcaagtagtcgaagtagtcgtcgcctaatcttgattaatcgaatgattagggaggagacgactaggtttgtgttactattggcctttccatgtgggctgggattgggattccaatttggtccatttgggttatccttgaaggagcctcaagagagagaaccaagtgtcatgccaatgcctagtctgtgatttgtcatgtgcgtgccattgcgcatctacttgaagctaccacacctggctcccttcatgtcatagccaaagcccttcattctcttcacttcctccgggcctcccatcatgaacaccaacatatttaacaattattgagatttcgtcccacgtaaccacaagggcatggcatagactgcatggttcaggcgttgggctgcatcacccgggaccccttcttctccacttctaacaactaatgaagttttcatgacatagaccgcatggttccagcacccgctgaagtctcctttaattctcttgaagtcatatgttgcctccttaatttttcttcatagaactatattttgttgttaagctagagagagagagagagttggagagagagatattcaaacagggaaggcatcagttgtgtgctgttgttaaggtgaaagtatagcttgggttctaattaggttcgattgggctattataggtcgaaccgtgatggcccaactatggcatccagattcattgttccatacattcttgattaggacccacttctcattgtaccttgttttctgtttgtcacatctcatatccaacatccccattccatctccttagtgactttggtgcatttgcttttgctgaaaagactagacatatgcatacaacaatggtaaatatttcgaatgtgctatagttacaccatgattgtagcacgtattattcgcaaatattataatgctttctgcagttacaattcaatcttgacaaattttctctccattgaaatttaaaagtcaataggatgtgaaatttggaatatgagtttagataattcgttgtgataaatataacttattttcaacatatgaatccaaagatctagtgcatgacgacaacagattatatcaagtttgtgtttgctctttctgaaacaaaaaaatacaagtccatgattcttaattgtttatgctcacttgtttatccaattattaatgcccctgatccaaggttgtaaactatggtaactttgttaacattccagaaatcatgttgcattttatgaaaataaaaaagtactagaaataagatgtggtgttacaccctggcattagttctgttaggttcatgtctgctttctttcttaacatgtttcaagagatgaatctagctgaactgtaacctcattatggtttactagccaaaagtgtgttattactgttagcattttggcctcaaacaagtaatgtagttgttgtactatagactatagtcccctgcatggccaccatagcaaacattgtgatgtgatgatacaatcaatttgttagattttcctagccatcgagaactctcaattcaacactaggaaaattagatataaataactttgttctttaaaatttatttgttaacactgtattgtttgctaacgtcttagcatgttctaatcttccttcagctacatggtttcagggtggtataacaaaatgcttcatcactatgcttcctgttgatggtcaaaattgaccaggagtagtgttcgtgtgcgaacacttcctctacactttttaaagcatcaatattggtgtactattttcggtcaaaaatattggtgtactattattgctaaatacaattggcacgtgcatttagttaacaaatgagaagactagactaaacaacatggttgttttgtgtagggatgtgtcttcactacattgcatttgaaatttggacttttttcatgataagtggttaattagacacactatacacatttcaattgaggttgacctgaaatgggggtacatttcaattaccttttactggctgttttctatattctagatcctattgttggcgaattgtgcatttatttattttatgccatttgaggcacttcaatccttcatgtggtaacaggatggcgatgcctaatgatctggttggtttgttttgttcgttacttcaatccttaatatatgtttctggtatgttgtcactgtatactagatttataccttgtgaacttcagctggtctataaatagttaattgcccttgtatgtttggctacttgaacttttgttgccgttctgcttatggactacccacatatgcgctgcttgtcatatgtgcttgcagttaccagactgcttttcatatatgtggctgcaatgtcattatcttttacgtattcttgttgctgtcatgcgtaagtgtcaattgtgctagcctataacactaacacattatactctttgttcatgcagagtggaattccacttcgtccttgtggccaagcaga

SEQ ID NO: 5136 - DNA, 4746 bp, Sorghum bicolor
  Intron number 1 from transcript Sb03g030300.1 (locus Sb03g 030300) derived from phytozome v7.0 (chr-ID chromosome_3; pos 58542345 to 58547090 reverse strand)
tggctgcggctccgccatcgcgtcctcgtccgtcggtgaggtccctcagccctagcgccacgtctggagttcccgtcgatttcccctaggtggttccggtgtagcgtgtaccccttttttttttttgtgtgtgaattgagttacgtcactaattggttatctagttatcccgatgccttcattccgattgtggaggtctttagcagagaaagatgaattgcagcatgtgaattgagtcacatcacaattggttatctagttgtcagtggcggatccagaaacagatctaagggggggctaaataacatagtgggaaaaaattgcccatagtacatagtacactaatagatataacaaaaattaatattgattcaaagtgctcaaagatacatagaaccataatgagaatagaaaagtaccaaatataaagagtcttccataataactaaaaaaattcatgcctgatgtctttcgccttcacgaattcacaccacttgaaccaccacgacgctcaatgctacataaataaaatgtcatacttcatatattgagatagaattataaaataaaaatatactaaaacaatacgcacctcgtgccctcacgtggcaaatttatcttacggtttttgaagccttgaaagcgcttcaaaattttttcatcttcaacggatgcaaacaaatcccgctcaatatagcatatcatgctattattcatccaatcatcattcattttattcctccgttcggtcttgataatattcatagcagagaaggctctttcaactgttgctgttgccactggcaaaatcaatgcaagttcaatgagacgatacaccaaaggaaaatgtgtatgtctatcactttgaaccatcttctcagcaaggttaccaagatcagtacaagtgccaaaatctttatcatttcttacttcatcaataaataccagaaggtcaccccttagcttttcacaatcataatcactgaagtcatctttatagatcttagcaagctcaactaatttctctatctcaaagttagcaaaagaaccattcggatcaagacaagcaacacatcttaagagttcagttgacctttctggaaaccgattgtttaactcacaaagaatctgatcaattacaacaatgaaaatcccatgatgaaaatgatggtagtgtgtcactaatttggcaccacggaatttggagcggcctctaactggtatcatatcttccatattaggaatgtctatcttcttttggacacaaaagctttttacctcttcaaaaagatcatcccaaccattttccctcatggcattcatatttctcatcacagaaccaatcaatcctattgcacgaacaatgttctgatttttcctttgcaaacattgtgaaagttcttgactcaatcccaatactctaatcataagatgtaatatgaacacaaattcaaatgtctccatttttgttatcaatccagatgcaatagttttcttttccccatcagttccatcttcactaacattctctaacacctcaagtacagaaccccacatgagcataagacgtgccaatgttttgtgatgtgttccccaccgtgtatcaccaggcctagcaagactagtttcttggtttttccctctcccaggaaaaatagcaccacaatctaattgttgaacaagatggtcatggtgattttggaggagttgatcttttcttttgcaagaagcactaacagtattgacaattgaggtgacataattgaagaaatcaaatgttgaagtacaacacttggctacagaaaccaccacaagttgcaattgatgagcaaaacggtggatgtaaaaggcaaatgggttttcattcaataccagcctttgtaatccatgaaattgtcctctcatgtttgaagctccatcatatccttgtcctctaatctttggaaatagatagattgtacctcctaagcatagtatccaatgcttcttttagtgaatgtgatgtcgtgtcagaaacatgttcaatgccaaggaacctctcaatgacatttcctttatcattgacaaacctacaaattaaaaggaagaatattagttacttggaacaacaaaataaattcaatgaaatactcaaattaagagatggtatatacctcacaaccacagccatttgttccttaatagatgcatcacgagcctcgtcaacaagcactgcaaagcaacgatctcctatttcatttttaattaactcacttgtctcctctgcacaagccctaaccaaatctttttgaactattgggcaactcatttgattattgcctggagcattttcaccggtcacaagtgcagccttcggatccttctttctgtaccattcaagcatctctagaaagtttcctttgtttcttgatgttttagactcatcatgtccacgaaaggctagagcttgtaaaaggagaaatctagcgatgcctaacattatagttaaatgagctttatatgcttcctcttctgctgcacttgtcacagtccacacatgttcaacactttgtctctgatttatgaaatcgagtgcacgcttccttgcattattatgaaagccatcaattgattgagcatgctccttgaaagaatcctttgcattcttccaatttctaaacccaactctagtgaatgtatcattactatgaaacccagtttgttgtggtttaaagagatagcaataaaagcaataggctgcatccttagctacactgtactctaaccaatcaaattgatcaaaccatgatccaacaaatcctcttggttgacctttaccattgacttttgtttttggaaacttatgaccagccggcctatatggacctttctgtagatacgctctcctagcctcatccctaatgtcatgatgaaactcatcaattgcctttctatttcctggatcatcaactatatctctcaaatcaagttcaacccttggtcttttctgctcaagctgattttcttcatttctaatatttctatttgatgcatctttcttagcgtagtatctttccatcctaagacaatggatttttcatatgaaatcagtgtctaattgataaaaaataaaattgataaaaatagcaccactgcggggtaacttgacaatgaattttatcttaggagttgatcaaatataattgataaaaaactgcaccagtgcaccactatctaattgatgaattaagaaataaaagttatgtatgtagcaaacaatatataattaaggtcacctgcaagctgcagctcaaaaaaaaaatttgcttctccaatctcacctgcagttgcaggagctgagtggctgcgatctgccgatctggccgtccggcagaccggcactgtcggcgactcggcgtctcggcgaggtcgcagggtgacggggggtgaccgggtgaagctggccactcgcgtcgggccgccggtgactcgcgatcgtgactttgcgagagccgagagggagtcgacgagtcgccgcgaagacggcgaggctaacgagtcgaagcaggtcaagagtcacggcaactcatttgcatttgctggctgctgcctgcctgccttccgtcggccagggctgaagaaaagaattattgggctgtattcctgccagggggggctaatgggctgccaagcctttttacatgttttttgtgaaacttattcccagagctaatgggcctcgccccgggctgtagcccaggcagcccgggccgtgaatccgcccctgctagttgtcccgatgcctatgcctttattccgattgtggacctcatttgcagagaaagatgaattgcagctagcttagttactttgtttcttatatttgccatttcccgggaagtatgtgaggtacaattttgctataagtgatcaatttgatttgatggtagagatatatcaactgcactgctaattttcatctgtattgcttatgctctttattgttatttttattaaggagaatgaacctgaagggtctagaagttacatcttaatattaataaaaatggtaaccttgtagtgagagaagttcttatttgtatcagtagattcagatgcttgtagttcttataatttttagttgctgaaccaaattggttcagagattagatgatggacattgtgccatagttttgatgttcttattaacttagtaatggaagagaacttatggacatgtgacatgtctttgaagatactcctgcaaataatgaaatagtcaacagaatgattggggcaactttcaagtcattggtttgataatattatgcatataatacctaacctcctgcattgttatgtatgaaaatgctatgaatcacaaaatggggacattctgttgtactgtgtgacttgtaagccaacaaccatgggaaccattttgccagttgaaacttcaatttatttagtcctaaatgactggaatatatataatcttgaatgtgggatatgaggttttgcccctaaatttatttgtgttatagattagtttattattattatattaattgagtgctaagtatcatcttgtcttgcatacaagagtggacccgctggttgcttgtatcttacaagctggaagcattcttgaatcctgattctgcgaagatcttcatccctaattaaacaaaatgccataagtactgtttctttgagctgttgaatgtgtaatgttgattatattatctttctccatgcagctactga

SEQ ID NO: 5137 - DNA, 86609 bp, Sorghum bicolor
  Intron number 6 from transcript Sb01g024150.1 (locus Sb01g 024150) derived from phytozome v7.0 (chr-ID chromosome_1; pos 32802277 to 32888885)
ctattggctttgttattgcttggccaagtacacttgtaagtttgatttttttccatttaaaatagtacatgtgaaaggtccaaatgcctagagggggggtgaatagcctatttaaattttctacgaacttcaactagacaagttgattagtaaaacaaaaggcgaagctattctagcactagcacaactaagctttgcaagccacctatacaagtctagcaagaagactaaacactaagtcacaacaagaaagcataactaaagcctatctacactcctaagcaagaaggctaagctaagcaaactaaacaactagcaaggtatgcaattaagtgatggagtggggagtgattgttataccaatgttgtagagtgggtatatgaccagtcaatcaatcacaagagaatcctcggcaagagatgacacaagattttttaccgaggttcacttgtgttgacggtccttaagtaccaaatataatcatcaaataaataaagaaaaggatccaaatgcaaccaacacccagacttagtgttttatctaatagaattccacaagttttggtgtttgtctatttctgcagggggttatcaggaactatggaaaaaaaggcccacacgtcgggtttacatacagatattaacgtgccacgcaattttctatcatctagaagactctagaagccacggaaacgaacgggaggccgatcgggctcgggggcagggcgcccgccctccccccttgggagcccgcctgttgacgaaagctagtcagcagtctacctcggggtatacccacggtagtagtttatcggtagacggtgcgcaaactacgaactcgatggtgacgcaagacacggacaagctttttatccaggttcggccgccgagttggcgtaatacctatgtcctgcgtctggttgtattgatttgtgttgagagaataatgatgtatgatttgtcctctaggggacccctgcccctccttatatatcctgaagggacagagttacaagcaaagtatcctatttggtacaaaatcttgtagccttgtggtgcacgccgaccagtcgtgcgccggacgtcttcatcttgtgggccgagccacctctgatggtgcggcccatataggcccatgagggtataggggtttatacccccacagctagtccccgagcaccatgtattatgatgtaacacgccgtcttgagcttcttcgatcagtgaggcttgacgtcttcaataagcaggaaagtcgcccaaacagttgcaacggtattttgaccaactcaaaagatagttgatcagcattgacatcgaagaagcaggttgttcgaagaatgcatggtgctctaaattaaaaaagatttctttcctggtgaagtgtgcccactttacttttgtgaaaagtatagacctcaaaaaagcaagcatattcaccgcaaggtgaagtgtgcccacttagtccccgagcctggtagtaggtgacgtaggcacgtggtgccagggtcaaaagaaaagtcctcaaagaaattctgaaactgaaatgcatcgccagatgcatcataccgatgtagtccccgagcttgctggaaggcgaagtatgagccttgtagcaaggtctaaaaaattgaatttaccagtccgtctacaattgaatagactaatcgaccagtccccgagcatataacactcggtggtcggtatagtctccgaattctcaaattggtgggctggtcgaccagtccccgagcgtatagtgctcggtggtcggtacagtctcaaaactctcaaattggtgagctgttcgaacagtcctcgagcgtatagtgctcggtggtcggcacagtccccgagcacggcgtagggaccggtggacaagtccccgagcgtggttgggaacgtaaacgtgctcggtggtcggcacagtcttcgagcacagcatagagagtagtcgacaagtccccgagcgtggttgggaacgtaaacatgctcggtggtcggagcagtccctgggcacagcgtagggaatagtcgacgagtctccaagcgtagcttgtcgactgggccaaactcctgaaaaataaatataaagaattggtagtacataatgtataaataacctttagataaaaaatcagtactaagataagttttagattttttgttataacattagcacgagtagttaattcatcctagagcttgtaccagctctggtctagcccacaattagcatgaggtgtggaacctaggcacgcgtaggattgtcagccacgtcagagagctattgccgaccacccggaacgcagagggcggatctcgtgcacgtgtagggaggagtcggagacagtaccggctctggaaagctcgtgtaggagaaaaactagtcggctaaaaaagttgttttgaagaataataatattaaaaatattatgccaaaaataaataaaatattagaattgtacttatctttggacgaaagtctggtcgggacagttgcttgacttgttgtcatgatggaggtcgcggctatcgtagcgccgttcttcgcggcgattattattgcgactcgtggtcagagcaagtaggccaaacaacttggacgatagcctgagcaggtcggtgtcgtcgatctgcctccctttgtagcagagaagcgggtgacgcgttgtcggcgtggtcggagacgttgctggagtagttggattcgtagccagcgtggttgaagctgctgccgatgtcgatgaagaagtggttggcgcagatcggatctgcacctcctccgtggtcgtggcggtgaagctgttgaagctgacggtgaacgtgaagtcgcccgccacggccacgaagtcggggatgatgaccatctcgttcgtcgggagagctgtacgcacaccccctacctggcgcgccactgtcgacgaaagctagtcggcagtctacctcggggtatacccacggtagtagtttatcggtagacggtgcgcaaactacgaactcgatggtgacgcaagacacggacaagctttttatccaggttcggccgccgagttggcataatacctacgtcctgcgtctggttgtattgatttgtgttgagagaataatgatgtatgatttgtcctctaggggacccctgcccctccttatatatactgaagggacagagttacaagcaaagtatcctatttggtacaaaatcttgtagccttgtggtgcacgccgaccagtcgtgcgccgcacgtcttcatcttgtgggccgagccacctctgatggtgcggcccatataggcccatgagggtataggggtttatacccccacaccgcccacctctggtggccaatcagggtgaatcatgcagattatgctccatcgcctttgaggatcaaggaaaaccgtgcgattaaggtcggtttgatccgacggcccacgttcatttagaggggctatataagcaggccccctggcccctggaggagagcaatccccattattcattagcatattttccaaagaggattcagagagagaggttccttagggttcaatgtgagagtagaattatttctactagattgagagagatagagtggaggtgtagatcggaggaagcccggtctgccagtgtctactccgaggttgtacctgcgagatcaagtctcctaacccgaggcttgctcctaggattcttcagtatttcgacttctaaattctagtaagttctttgttttattgttctttggtttatgagtttactttgatctcttcgcgtagagtttagagtaatcatctctagagtaaacctggtgttctggctaggatgctcatagatatcccctatctagccagaccgtggtagtagcgaggaacgtgacatttccaagttacctttgtagcccatatcccgttagcaggatcgatatggtttataggtgcgggtcgaacatcctctgtggtgtctagattccgttagccccaccaacagaacagtagatcatccttaccatggttagaacgagagtgcggttgtagtcttctctatacatcgctcacatcgaatcacattgtttgtagcctaaagggtagtagcaatagatttggttagtcagatgcacgctttctcccagtggtaaaaatataaatacgatactctggataaccttccgggtgaagtgctcaccgatatccgtgcgcttgcggatcatttcctgatggcgttaacaaatatcaacaagcatttctggcgccgttgccggggagaaagacggtttgctgagataactttgagtcttgctattatcttgtattatacttttatacttttatacttttattcttttatctttttattttttccatctttatggataactcaaattccacacctattattgaattctttgcaccttcggagaccagccatagaccatgggagtcaacaagtcctttctttgcccctaattatgatctgtgtccagagtcaattgcgataggtcaaaaccaacccttttctatagccgaggtcctatcttttaatcaagaagataatgaacttttagctagacttagggaatcttctaatctttctataaattctggtttagacctagccctacaagaccatgtttttcctcgatattttcgcattggtcttaatcatataacgtttggtagagtttttctttctttatctagtaaagcaaggtatatcttcattcgtggacatccttcttgcactagtcttcataaaaaaatcctagagatagagaaggaatcatctcccaaacgaggaaaggaagtttcaatagccgatttccaaacatttcaatcccatgattcggctatccaacccaaactagtagtgctccaaaatcatctaagggaagaagaaattctacctttagaaattcattttgggatgagcttaaacttcctgcttcataagagacctttgagtgcatatagtctgaaccttcctaagagggatctcttagaaagcatctcaaatccaatccctctaatggacatctagaaagactcaaggatggcgtcttaagtgatgcaatagaaggagagcaaagccatttagaagacaatctcatcttctccccttctacgcccacttttgatgactcattcgaacctatctttaaacccatccttgagcctaataatttctactatgctctttctcttgaacctcccgatgatcatacgaacctctctagacatcccatgcataagagtcaccaagaccataaggaggatcgagaagagcaacatcaatggctagagggcattaaaaatccatgtgctatcaccattgaatggatggacaaggaagaagccttaatggatgagattcaaatggtgagttcttgactccctttgaagatgagattcatccaactacaaaagaggacataggtgagatttccaaccccgttttcctttctatttataaaaactttaaaagggcggttgtcgatgcatatgtctataataaatattgtagatctcgttgagttgatcttgatataggtcagcgttggaggggaaaccacttcgccgacataaattgatggtttcccaaggacaagcttagtatcctaaaataagcactgatcggatcgtaacatgagcttttaattatttgcaacattaccttgtgtattgagtatataaggataattgtaaaaatattccttcgggtattcttgtcactaacctttccaggattggagcaagaagatcggatgaatgacaagcacaaggtatgtccaaccaatcatcacacaacattgaattaaattcatccaaacttgaattttgcaaaattcaagcttgggtgagtactttacataaaaacattctttgccatgttgctatgttggttgtccctacctttgagacatgcttaatttgttaaatactaatcacactacttcatctccacttgagtagatctctataaatgctctcatgctacctttatttgctttagtatatgtcttggtttggagtagtttcatttatctcttaaataagcatggtgcttagtttaggaatgatgatcatacttccaagggattttaaattaagcatggtgcttaggttaaaatgccctcctaaatcaaattagacatggtgtctaggttgatttttgagccgatagtaggctatagtagatattggatattttgttggactaacccctgtaggaaactttcaatatcgacctaggaagtcctgagataaactcacactagagataaagagagagacacatgaagtttaacaatttacacaaggaagacatagctcataagagatgatccatagagggtgccacaaacacgaaacacaatcgctgagaaaggaaagattccacaaggagatactgtaccatcactcttcaagtaaggtaacatcttaaggtacttaactatcacttttataagcttctccttggttctggcgttcagaagaataaagagacaaacataaattaaccaacccaattaattcaacatgtttagacctttaatctttgttcttagtactaccttcatgatcccacactcctaatcatataagctaaaatgttgcacactcaatctttggaagatatatataaaaaaacaaacaaaaaacatgaatatagatagattatctttccattaggttgagcgatctgatccgacaaatgttttaaatgctacactcatgatcttattatccatcaactttgtctggctcactatgcttaaggttagagaagaacaaatacacttttggttttgttggtgttttccaccaacagggcccatgcacttgatctctgccttgtctctatgagcaggtacacttcaagcaaaacatggaggagttttacaactcccagactccaccaagtgaaggacctagatctacgagcacaaacacactgagcaggatattgccaatgccgcacttcgaactgctgggcaaacgaagaacatagttgacactgtatcaagaggtgcagacgtcaaggtccacacttggatcaaatgacgcacctaaagaatgaacacggtgagaagtcttgttcagaagacataaaacattgaaccctcgccgaaaggtaaaatcagtagtaatccatatttatcctttctgcatttttccttaaattatttactttccttaaaaagcttgtttgttaatcatcctaccatgaaaagaaattaaaaatgttaaaaacagtaagcctcatgtgagtatgctcgaggcataaaacccataagtacattcactgtggtggcgtaaaaataaaatattccagtcttataaaaatgaaaatataaaattaaatttatgatcctaccaaagagagtaacatttattgaggaggctcaatatgataaaggctagatatttatgctaacaattaaccagttccacaaagctttgttgtctatttgagctccacagaattcaaggatcaaagaagactagcaaacggaggacatgacatcctaatcactgtcagggtgctaccgacattcaaatacacctccaccacctgctagctacattagaagaaattatgtcaaaatccagcttgggggagagcacccccatttatcgagctaagtgtttctactcgcgtttatactttactcaaataataaaaaagatgcataatcataaaaaccgaaataaagattttgtgcttttatatatatctttgcttagtttgctaaataaataaataaataaagtttgctatgaaccctcatgataaactcttacatggatatgataaatagttgctctgtcatgtacctagttttcaagtttgagctctctcttaagtttacgcataactgttataatttaaatttgctctaaacctgaacttgtgggaagagtacctgatcaaaagtctaagtcgttaacggatatgatatgggaaggttgagctgctgtttatctattcctagagatactagaattctgatgaattttatctttgaaaatctttaaaatattgcatgatgagttcctgtatgatgagagcttaaaatcctaccacagccatatatacatgcttattagactatgaaccatacatttacttttcactgcttatgagcattgagtgtggtcaagctgtgtagaaccttaggagcttgtcatacggttaaaatcaagattcacttgcacgttcactcatacatgctacttctacttcggaagtacgcatccacatacattcactcaattccatcttcagattcacctaaaattattttactcctatccgggagagaatagccaaaaactttttcctatccctgttattccctgtgaaataaatgctccagttattttggttactaccagttgctacattattctaggagggtgagtgctctaaaaaaagaagaaaaaagaaaaaaagaagaaaaatatgaggaaataaaaaggggaaagtgcctggaacctcgaagaaaagaaaaagtgagacgagaggtaaaaaatggacaagtgtccgagagtagaattaggggtacaagatacccacctcagagaaaagaaaaagaaaatatagagcatctcattctcctcaaaaaagcttcaaactgcaagaaaggtatatatcccctaaaaagagcaaaactagaattagactttcacaattgttatcaccatcatcaccatacaccattcattcgccacacatgcacatcttgatttgacttattgacttgtttctctagatccatggtttgactatgcaataaatgtcttgtaagtatgtatgctttatctcccacctatgagctccagatatcaaaaccctattagagtagggagagagagaaggcaatatcactatgcctcataccaaaaataccacatactttgagagaaggcatataccattactgccttggaaaggatccagaaataccacaaaagagagatttgagaaagtcatacaaggaatctctgagttttatttgaaaatctacaaaaactccagagctatagctgatcaaagaacaagagacatggcgcttgactagactgttctatcttttaactgctcaagacacaagtgacggttgcaagccccatggtgaaaggtaaaatgagtaagttttaagtcttaacagtttactctaactcagagatgagatcttgcttgaatgcatgtgtacttttaaggcatgaaaccactgcagaaactcttgagtccatccttgctcagggacgagcaagaggtaagcttgggggagttgttgacggtccttaagtaccaaatataatcatcaaataaataaagaaaagcatccaaatgcaaccaacacccagacttagggttttatctgacagaattccacaagttttggtgtttgtctatttctgcagggggttatcaggaaataatgaaaaaatgcccacacgtcgggtttacatagagctattaacatgtcgtgcaattttctatcatctagaagactccagaagccacgagaacgaacgggagaccgatcgagcccgggggcagggcgcccgcccacctctagtggccaatcagggtgaatcacgcggattatgctccacggcctttaaggaacaaggaaaaccatgcgattaaggttggtttgatccaacggcccacgttcatttggagggcctatataagctggccccctggcccctggaggagagcaatccccattattcattagcatattttctagagaggattcagagatagatgttccttagggttcccacctcatagggcttagcatccaatgtgagagtagaattatttctactagattgagagagatagagtggaggtgtagatcggaggaagctcggtctgtcggtgtctactccgaggttgtacctgcgggatcaagtctcctaacccgaggcttgctcctaggattcttcagtatttcgacttttaacttctagtaagttctttgttttattgttctttggtttatgagtttactttgatctcttcgcgtagagtttagagtaatcatctctagcataaacttggtttttaggctaggatactcatagatatcccgtgtctagccggaccgtggtagtagcgaggaacgttacatttccaagttacctttgtagcccatattccattagcaggatcgatagggtttataggtgcgggtcgaacatcctctgtggtgtctagattccattagcctccccaacagaacagtagatcatccataccaaggttagaatgagagtgcggttgtagtcttctctatacatcgctcacatcgaatcacattgtttgtagcctaaagggtagtagcaatagatttggttggtcaggtgcacgctttctcccagtggtaaaaatataaatacgatactctgcataacctcgtgggtgaagtgctcaccgatatcctgcgcttgcggatcatttcctcatggcattaacaaatatcaacaagcatttctggcgccgttgccggggagaaagacggtttgctgagataactttgagtcttgctattatcttgtattatacttttatacttttattcttttatctttttatttttttccatctttatggataactcaaattccacacctattattgaattctttgcaccttcggagaccagccatagaccatgggagtcaacaagtcctttctttgcccctaattatgatctgtgtccagagtcaattgcgataggtcaaaaccaacccttttctatagccgaggtcctatcttttaatcaagaagataatgaacttttagctagacctagggaatcttttaatctttctataaattctggtttagacctagccctacaagaccatgtttttcctcgatattttcacattagtcttaatcatataacctttggtagagtttttctttctttatctagtaaagcaaggtatatcttcattcgtggatatccttcttgcactagtcttcataaaaaaatcctagagatagagaaggaatcatctcccaaacgaggaaaggaagtttcaatagccgatttccaaacatttcaatcccatgattcagctatccaacccaaactagttgtgctccaaaatcatctaagggaagaagaaattctacctttggaaattcattttgggatgagcttaaacttcctgcttcataagagacctttgagtgcatatagtctgaaccttcctaagagggatctcttagaaagcatctcaaatccaatccctctgatggaaatctagaaagactcaaggatggcgtcttaagtgatgcaatagaaggaaagcaaacccatttagaagacaatctcatcttctccccttctacgcccacttttgatgacttatttgaacctatctttaaacccatccttgagcctaataatttctactatgctctttctcttgaacctcccgatgatcatatgaacctctctagacatcccatgcataagagtcaccaagaccataaggaggatcgagaagagcaacatcaatggctagagggcattaaaaatccatgtgctatcaccattgaatggatggacaaggaagaagccttaatggattctgactttggctcaatttcaaatggtgagttcttgactccctttgaagatgagattcatccaactacaaaagaggacataggtgagatctccaaccccgttttcctttctatttataaaaactttaaaagggtggttgtcgatgcatatgtctataataaatattgtagatctagttcagttgatcttgatataggtcagcgttggaggggaaaccacttcgccgacataaattgatggtttcccaaggacaagcttagtatcctaaaataagcactgatcagatcataacatgagcttttaattatttgcaacattaccttgtgtattgagtatataaggataattgtaaaaatattccttcgggtattcttgtcactaacctttccaggattggagcaagaagatcggatgaatgacaagcacaaggtctgtccaaccaatcatcacacaacattgaattaaattcatccaaacttgaattttgcaaaattcaagcttgggggagtacttttcataaaaacattctttgccatgttgctatgttggttgtccctatctttgagacatgcttaatttgttaaatactaatcacactacttcatctccacttgagtagatctctataaatgctctcatgctacctttatttgctttagtatatgtctaggttgggagtagtttcatttatctcttaaataagcatggtgcttagtttaggaatgatgatgatacttccaagggattttaaattaagcatggtgcttaggttaaaatgccctcctaaatcaaattagacatggtgtctaggttgatttttgagccgatagtaggctatagtagatattggatattttgttggactaacccctataggaaacttccaatatcgacctgggaagtcctgagataaactgtcacacccatattttaagaacaaaataggatgcataaaagactcatatgtgccccaggaatagtcacacacataagtagacaaatctcaaatgtaccattgcagtgtttattacatagcggaacataataactcacatagtcttacacaaaaatactatcaaaaggtaaacaacgctctcgacggaagctccacacagggacactgttgactggttgactccaaacctagtactcataacggtagtcctcattccaatcatcatcattagcataacctgaggtgttggaaaattgcaagagtgagcacatatcgtactcaacaagtataaccaggggttcatgaggctcaaaaagctgacactggtttgactgcatttagcttttaatagttgatagcatgtttaatcattggatagcaaatgtcaaggtagcataacaaatcccataaccacatgatcaatgtatacaagaattaagaataacacatataaacaacataataaaccatcgtttattatcattattcacgttcatgagtgtccatctattccgtcagtttttcaggccgcccgtatccgtgggcacggctagtataccagatttaacactctgcagaggttgtacatctttacccatgagtcgtgatttaccctttcgcccgaggtgatcagcctcttaacccactaccaaggaaggtcggtagggttcactatgaagtctttcaaaggttcgtctaacatgttagggctgcaaggtttcctttgcgcgtagatatagataccccccttccgaatggcacaatgacgcgcagcctatacacatagggacagggctcgcactatacccaaaacgattcagcccctccgccctttcgggtaacctctaacaagctagaaaagcttactcatacttgactaaagccagagccatatagccctcatggttgtacgagttgtcccagcttttgccaagggataagtccttatggagggtcaagatcaatccagcaaaagccagagttctttccaccctttatattcaagttgctagaaagcttattttattgtttattgtatattcaaatattcatgttacaagatcatggattaataatcaagcactagcaagaactaccaaatgcatatccaaaataggtaacaaggaatccaggataacaatcatctatgattttgctaatgtcatcaaggtgatagcatgcatatgataaatgttatattaattgtgtataggtaacaaggataataccaagttatacttgccttgatcaaagctctcctgagcctgctggtcttcaaatacttgatcttgagcaccaacgtacggctcaccgtttaatcccaatcatcaatcaacaacacgcaatccaatgtagacaatcatacacgaagcaaacaagatataattagaacaatacaccaaacagtagtaaaacaaatataaaagtttatcaaaatattctacgcagctccacggtcacataaacgtaaagttcacgaaaatcggaattaaaatggagaagttatgcattttccaagatttcctatagagaaataattaattaaatgctactgcagaattaaaaagtttcaaaacagtaaactaatacttctaacacgtagagctcactgaaacgaatctaacgcaacttggatggacaaaaacggagttaaaatgagcattttatggcctaaacaaactcaatggcatttttgtgaattctggaaaacgtaaactgatccaaccagtgagaatacgttttcaaaacagcaatacgcgtttaagaaaggcgccagggggactgcaggtttgattaagaagaaaccgagggtctctttaagaaaacgcgcagcgaaggggtacgttttaatttcagccatccgatctacatctgacggctctcggagggcttggggagaaaccggccggccggcggcgagccctccacggcagacgccatggccggcgcctgagcttcgccggagctcccagatctcgcgaaatcctacgccaaaaacaaaaccgagggcatcggggggtggaggagcatgaggcgagcttacctacggggttttctcgggccgaggacaaccagggcgctcttgtcgcggtgagggaagacgctcggctcggcgagatctcaaaggcgtagatggaggcggctagggcttcctagaatacgacagaaagcaaacagatgcctcggggagttcctagggcctttatagggcttggcacacgggataggaaggtgagcacgggattttcgggatcggctcggcactggggaagaatgaatcctggtcggatacgcggggaagaaaggggagggcttgttgtcatgtggggcccggtcgtcggtgggggagaggaagctgacacgctggcccagggtgtcagcgccaaggagctagggaggcgcgcgcgctgggctggtctgctgggccggtccccgctctgggccgcacgcggggagggaaggaagggggaaccaagggagagttgggctgcgggggaaaaaaatggaaacggggccgagagcaggtgagctccttccccctttttttatttctcttttttttcctaaagcattttccaaatggaatttgaatcaaataaattcaaacaaaaagggcaacaacacagaatcaaatatgctccatcatgaaatgcaaaattcaagtttctaaacttatgataaattttattttccaccaaaaattacatattcactaaattaaatgctcacaataatacttaaataaatcaaattaaatcctattatttgaaaatcaaattttgggtgttacataaactcacactagagataaagagagagacacatgaagtttaacaatttacacaaggaagacatagctcatagagatgatccatagagggtgccacaaacacgaaacacaatcgctaaaaaaggaaagcttccacaaggtgatacagtaccatcactcttcaagtaaggtaacatcttaaggtacttaactatcacttttataagcttctccttggttctggcgttcagaagaataaagagacaaacataaattaaccaacccaattaattcaacatgtttagacctttaatctttgttcttagtactaccttcctgatcccacactcctaatcatataagctaaaatattgcacactcaatctttggaagatatatataaaaaaacaaacaaaaaacatgaatatagatagattatctttccattaggttgagcgatctgatccgacaaatgttttaaatgctacactcatgatcttattatccatcaactttgtctagctcactatgcttaaggttagagaagaacaaatacacttttggttctgttggtgttttccaccaacagggcccatgcacttgatctctgccttatctctatgagcaggtacacttcaagcaaaacatggaggagttttacaactcgcagactccaccaagtgaaggacctggatctacgagcacaaacacactgagcaggatattgccaatgccgcacttcgaactgctgggcaaacgaagaatatacgtgacactgtatcaagaggtgtagacgtcaaggtccacacttggatcaaatgacgcacctaaagaataaacacggtgagaagtcttgttcagaagacttaaaacattgaaccctcgccgaaaggtaaaatcggtagttatccatatttatcctttctgcatttttccttaaattatttactttccttaattagcttgtttgttaatcatcctaccatgaaaagaaattaaaaatgttaaaaacagtaagccccatgtgagtatgctcgagccataaaacccataagtacattcactgtggtggcgtaaaaataaaatattccagtcctataaaaatgaaaatataaaattaaatttatgatcctaccaaagagagtaacatttattgaggaggctcaatatgataaaggctagatatttatgctaacaattaaccagttccacaaagctttgttgtctatttgagctccacagaattcaaggatcaaagaagactagcagacggaggacatcctaatcactgtcagggtgctagcgacattcaaatacacctccaccacctgctagctacattagaagaaattacgtcaaaatccagctcgtgggagagcacccccatttatccagctaagtgtttctactcgcgtttatactttactcaaataataaaaaagatgcataatcataaaaacccaaataaagattttgtgcttttatatatatctttgcttagtttgctaaataaataaataaataaagtttgctatgaaccctcatgataaactcttacatggatatgataaatagttgctctgtcatgtacctagttttcaagtttgagctctctcttaagtttaggcataactgttataatttaaatttggtctaaacctgaacttgtgggaagagtacgtgatcaaaagtctaagtcgttaacggatatgatatgggaaggttgagctgctgtttatctattcctagagatactagaattctggagaattttatctttgaaaatctttaaaatattgcatgataagttcttgtatgatgagagcttaaaatcctaccacagccatatatacatgcttattagactatgaaccatacatttacttttcactgcttatgagcattgagtgtggtcaagctgtgtagaaccttaggagcttgtcatacggttaaaatcaagattcacttgcatgttcattcatacatgctacttctacttcggaagtacgcatccacatacattcactcaattccatcttcagattcacctaaaattattctactcctatccgggagagaatagccaaaaactttttcctatccctgttattccctgtgaaataaatgctccagttattttggttactaccagttgctacattattctaggagggtgagtgctctaaaaaaagaagaaaaaagaaaaaaagaagaaaaatatgaggaaataaaaaggggaaagtgcctggaacctcgaagaaaagaaaaagtgagacgagaggtaaaaaatggacaagtgtccgatagtagaattaggggtacaagatacccacctcagagaaaagaaaaagaaaatatagagcatctcattctcctcaaaaaagcttcaaactgcaagaaaggtatatatcccgtaaaaagagcaaaagtagaattagactttcaccattgttatcaccatcatcaccatacaccattcattcgccacacatgcacatcttgatttgacttattgacttgtttctctagatccatggtttgactatgcaataaatgtcttgtaagtatgtatgctttatctcccacctatgagctccagatatcaaaaccttattagagtagggagagagagaaggcaatatcactatgcctcataccaaaaataccacatactttgagagaaggcatataccattactgccttggaaaggatccagaaataccacaaaagagagatttgagaaagtcatacaaggaatctctgagttttatttgaaaatctacaaaaactccagagctatagctgatcaaagaacaagagacatggcgcttgactagactgttctatcttttaactgctcaagacacaagtgacggttgcaagcctcatggtgaaaggtaaaatgagtaagttttaagtcttaacagtttactctaactcagagatgagatcttgcttgaatgcatgtgtacttttaaggcatgaaaccactgcagaaactcatgagtccatccttgctcagggacgagcaagaggtaagcttgggggagttgttgacggtccttaagtaccaaatataatcatcaaaaaaataaagaaaaggatccaaatgcaaccaacacctagacttagggttttatctgacagaattccacaagttttggtgtttgtctatttctgcagggggttatcaggaaatatggaaaaaatgcccacaagtcgggtttacatagagctattaacgtgccgtgcaattttctatcatctagaagactccagaagccacgggaacgaacgggaggctgatcgggcccgggggcagggcgcccgcccacatctagtggccaatcagggtgaatcacgcggattatcctccacggcctttaaggatcaaggaaaaccgtgcgattaaggtcggtttgatccaacggcccacgttcatttggaggggctatagaagctggccccctggcccctggaggagagcaatccccattgttcattagcatattttctaaagaggattcagagagagatgttccttagggttcccacctcatagggcttagcatccaatgtgagagtagaattatttctactagattgagagagatagagtggaggtgtagatcggaggaagcccggtttgtcggtgtctactccgaggttgtacttgcgggatcaagtctcctaacccgaggcttgctcctaggattcttcagtatttcgacttttaagttctagtaagttctttgttttattgttctttggtttatgagtttactttgatctcttcgcgtagagtttagagtaatcatctctagcataaacgtggtgtttaggctaggatactcatagatattccgtgtctagccggaccgttgtagtagcgagaaacgttacatttccaagttacctttgttgcccatattccgttagcaggatcgatagggtttataggtgcaggtcgaacatcctctgtggtgtctagattccgttagcctccccaacagaacagtagatcatccttaccaaggttagaataagagtgcggttgtagtcttctctatacatcgctcacatcgaatcacattgtttgtagcctaaagggtagtagcaatagatttggttagtaagatgcacgctttctctcagtggtaaaaatataaatacgatactctggataacctcctgggtgaagtgctcaccgatatcctgcacttgcggatcatttcctgatggcattaacaaatatcaacaacttgcttcccggcaagctagtcctcattgtggcgatacacccacttgatggatcacgagctaattagcaatccaaagccaaaccctcagcgggtgtagcacatccactcacaaaatggggatcctctaagccacgagcaattcactagagtagctaattgcgatctcccgtggggaaggctcaagaacccctcacaaatcacttggtgaggctctgttgacggtccttaaagctcacatttaaccgtcaactaatcatggaaaaggacctatatgcaaccaacttccagacttaggattttatctgacagaattccacgagttttgatgtttgtctatttctgtaggggggttatcaggaaatacggaagaaaggtccacacgtcgagtttacatagagatattaacgtgtcgcgcaattttctatcatctagaagactccagaagccacaggaaggaacgggaagccgagagggcttagggacagggtgcccgccctactcccttgggcacccacccaccttcagtgtccaattcggacctgtttcgtggatcacgctccaccgacctaaaggatcaaggaaaaccatgcgattaatgttggtttgatccgacggcctagattcatctgaatatactaaataagcaagaccccctggcccctacagatcataccacttctacagaatcaaagttagggttttaattcttcagccaagtagagaggatccctctagttcatctagttctagttctagttcatctagttctagttcatctagttctagttcctctagttctagttctagtttgttctagttgtaatctagaaaatagggagagagaagaggagtgcggaggaggagccggatttgtcggatcttcctgaacattatacttttgctgcaactggttcgttcttcatcgttctccaagttcttcaattcataattcctgagttctttaattacttttatttacattcaagttatttattggattcccgcttgcatcaagtgctctagtctttataacgctagagtagtaattaatagattagacgtggtgtttagtcttgcaattacctagaattgcacccaatcctgcggattgtagtggtagccctagggtagtgacatccctaacggtcgacgtattccacctcgttcggatcggtgtttgtaggaccgtagtcagagcttcctagcccccttctcatctctttctgtggttagtgttctgatgtcccgaaatagataatcttgaagtaattcttgattcttagatcaactagagaactctcaggaaacttcctctcttcccaccaaaaataattatatagttatccttgggcgatcttaaatcttaattagtatactcatgttccctgtggaaaatcgataatctggaatactctcgggtaaaagctacatcggtatccgtgcgcttgcggatttttctgtttgcgtttaaaatacccaacaagctttctggcgccgttgccggggaacggtagctatgctagtttcgaaccaagtcatccgtgtatcctttttcttttccttttttaccacactcaccttaccattttcaccacaccacatggatttcagtccaagcattaactagcatggaatttatttcatagccacttcatttgctccatgctcatatgcaacatcttcccaatccattggtttttccaacatcaccacattcgagatctccaaccccctcatcctttctatttataaaaactttaaaagggcggttgtcgatgcatatgtctataataaatattgcaaatctcgttgagttgatcttgatataggtcagtgttggaggggaaaccacttcgcagacataaattgatggtttcccaaggacgagcttagtgtcctaaaataagcactgattagatcgtaacatgagcttttaattatttgcaacattaccttgtgtattgagcatataaggataattgtaaaaatattccttcgggtattcttgtcactaacctttctaggattggagcaagaagatcggatgaatgacaagcacaaggtatgtccaagcaatcatcacacaacattgaattaaattcatccaaacttgaattttgcaaaattcaagcttgggggagtactttacataaaaacattctttgccatgttgctatgttggttgtccctacctttgagacatgctcaatttgttaaatactagtcacactacttcatctccacttgagtagatctctataaaagccatcacgctatctttgtttatcctagtaggtgttagtttggaagtattgtacatacttctattggtttttaaattaagcatggtgcttaggttaaatagccttccttaatctaattagacatggagtctagtttggttattgaactaaaaactgcttgtgtagacatcggtatattttgttggactaacccatgcaggaaaactttcaatatcgacctgggaagtcctgagataaactcacattggagacaaagagagagacacatgaagtttaacattttacacaaggaaggcatagctcacaagagatgatccatggagggtgccacaaacacgatgtacaactgctaagataggaaagcttcccaaggtgatactgtaccatcactcttcaagtaaggtaacatcttaaggtacttgactatcacttttataagcttctccttggttctggcgttcacatgaataaaagagacaaacatgtatgatttacaactctagattaaccaacccaatcgattcaacatgtttagtccttccacctttgtgatcccacactcctaatcgtatgagctaaaatgttgcacactcaatctttggaaaatatataaaaaacataagtatagatagattatatttccattaggttgagcgatctaatctgacaaatgttttaaatgctacactcatgatcttattatccatcaactttttcttgctcactatgcttaaggttagagaagaacaaatacacttttggttctgttggtgtttaccactaacagggcccatgcacttgatctctgccttgtctctatgagcaggtacacttcaagcaaaatatgaaggagttttacaactcctagactccaccaagtgaagaacctagatctatgagcacaaacacactggagatactggacacttaagcaatcactgccctgatatgtttgaggacgtaactactggagtaaccccattgtggaagtaattactgaccttctaccggtcaagagaggcgatctaggatgccccatcatcccgatctccatcggcatggtggacttcctagaagcactctgcgtctttggctccagcgtcaacattatgcccagggtactgtatgaaaaattctttacacatcctttactagaaacaaccatgtgtttgcagcttgcagatcagacactaagtttcccaaagggaatattgaagaacatctgcgtccgagttggtaccttgtacgccccagcagactttgtggtgatagagactaatactgatgagagggcacccatcatcctagggaagccattcctgaacacctcaggagctgtcatctacgctagtgctgccaagattagtttctacatcaagggaggaaggagacgttttccttcaagaacaagactacacaagtcttagagcaatcccgccatgaaccaaggaagaggaccaacaggaggaacaggaacaagcaaatgtagaccgagtcagctaagatggtcactgcagttcaaggaggtgaagatcgtcgacttaagtcaccgttcctaactaaaaaggacgacccagtcacctatcagctcctattcggaaccatgcccctaaaaccgacatacattcacctctagatggcagatcagacattctgaaaggttgaaggttattgacatgggagaagacgacataatcgcaaccagaagaggcaagtcatcaaggacggatgagcagactacgaaggagaagtagtaaggtctgaagacatatagcttgaacagaactatcttgaggagaccatagtaccgagccaggtgtggagagagaagatagttatacatgaagagcaggcgcagccggaaccaccgactacgccatccagcgaatcccaggacgactgagaaaatggagagttccgttcggaggacttaaaaacaccgaacgccttgccaagaggtaaacttggtagttattcttttcctttcaattatttaaaatagtttgcttagttaatcatgtttgtactatcgaaaaaaagaaaataaaaatgttaaaaaacagtaagccccatgtgagtatatgagtggcataaaccccataagtacattcactgtggtggcataaaaataaaataaatattttttctgctctataaaatgaaaatataaaaatagagagtaacatttattagaggaagctcaacatgataacggctaagagattttatgctaacacttaaccagttctacaaagctttgttgtctatttgagctccacagaattcaaggatcaaagaagactagcagacggaggacatcataatcgctgtcatgttgctgccgacatttaaatacacctctgccacctgctagctacatcagaagaaattacgtcaaaatcaagcttgggggagagcacccaatttatccagctaagtgttctactcatgtttatactttactcaaataataaaaagatgcataatcataaaaacctaaataaagattttgtgcttatatatatatctttgcttagtttgctaaataaataaataaataaataaaatttgctttgaaccctcgtgataagctctcacatggaaatgatgaatagttgctctaccatgactagttctcaaaattaaaatctctctcaagtttaggcatgactgttattaattaagatttgctctaaacctaaacttgtgggaagagtacttgaactaaagtctaagttgttaacggacaggatatgggaaggttgagctgctgtttatctgttcctagagatgctagaattctggagaattttatctttgaaaatctttaaaatatcacatgatgagttcctgtatgatgagagtttaaattcctaccacagccatatatacatgcttgctagactttgagccacacatttactttttactacttatgagcattgagtgtggtcaagctgtgtagaaccttaggagcttgtcatgtggttaaatcaagattcacttgcacgttcactcatacatgctgattctacttcggaagtacgcatccacatttatccacccatttccatctccagaaccacccaaaaatattctactcctaattcgggagagaatagccaaaaacatttctgttttcccctatgaaataaatgctcaagttatcttggttactaccacttgctacattatttcaagagatgagtgctctaaaaaaagaaaaaaaagatacaaggaaataaaaggggcaagtgcccggaacctcataagaaaagaaaaagtgagacgagaggtaaaaatggacaagtgtctgatagtagaattaggggtacaagatacccacctgagaggaaagaaaaagaaatacagagcatctcattctccccaaaagtttcaaaagagcaaggaaggtatgtgttgacggtccttaatgctcacatttaaccgttaactaatcgtggaaaaggatccaaatgcaaccaacacctagacttagggttttatctgacagaattccacgagttttggtgtttgtctatttttgcagggggttatcaggaaatatggaggaaaggcccacacgtcgggattacatagagatattaacgtgccgcgcaattttctatcatctagaagactccagaagccacgggaacgaacaggaggccgagcgggcccggaagcagggcgcccgccctacccccctgggcgcccgccctcctctgctggccaataagcacgagtctcggggattatgccccaccgactctaaggatcgaggaaaatcacacgatgaaggtcggtttgatcggatggtggagaataacgtggaaattccttgggagctactcttcctagatttcttgggggctactcttcctagatttcttgggggctactcttcctggactatataagcagacccccaccagcccctagaggcatacctcttctacagaatcaaagctagggtttcaattcttcatccaagtagagaggatccctctagttcttctagttctacctctagttcatctagatctagttctagttcatctagttctagttctagttcctctagttctagttctagttagttctagttgtaatctagaaaatagggagagagaagaggagagcggaggaggaggagccggatctgtcggatcttcctcaacattgtacttttgcagcaactggttcgttcttcatcgttctccaggttcttcaatttataatcctgagttctttaattacttttatttacattcaagttatttattggattcctgattgcatcaagtgctctaatctttgcaacattagagtagtaattaatagattagacatggtgtttagtcttgcaattacctagaattgcacccaatcctgcggattgttgtggtagccttagggtagtgacagccctaacggtcgacgtattccacctcgttcggatcggtgtttgtaggaccgtagtcagaccttcctagcccccttctcatctctttctgtggttagtgctctgatgtcccgaaatagataatcttgaagtaattcttgattcttagatcaactagagaactctcaggaaacttcctctcttcccaccaaaaataattatatagttatccttgggcgatcttggaacttaattagtacactcacgttccctgtggaaaatcgatactttagaatactcccgggtgaaagctacattggtatccgtgcgcttgcggatttttctgtttgcgtttaaaatacccaacaagctttctggcgccgttgccggggaacggtagctgtgctagtttcgaaccaagtcgtccgtgtatcctttttcttttccctttttaccacactcaccttaccattttcaccataccacatggatttcactcctatctacaaattctttgctccaaagggcgagttattagagccaccaccatcatcacatccaattcttacagatggctatgaccttggccctgatctaatagccatggttcaggagcaacccttctctgggcaagtagatgaagatccatacacccaccttagagaattcgagcagttgtgctcttgtcgatctatttccggcatgacacaagaagctcttaaatggaaattatttccgttctcccttttaggaagagcaaaaaagtggtatgctcattctctaggaggcgttaatggaaattgggatgaacttcgggacaacttttgtctcgctttcttcccactctttcgaatcgctgaccttagaatcgaaattcttacattcaaacaaagagagaaggaaactttaggagcagcttgggctaggttcacaagccttaccaattccggtccaaacctttccctgcctgaccatgtactgtattaccacttttatcgtggtctaagcaaggaggctgctcttcacctcgacattgcttcaggaggctcattcacacacaaactcacagatgaggggagagatatcctagaaagaatccttgaaaataccccttacacaggcatttatgatgagtttcctgaagaagaaaaagaagtccagcctcatcctaaaccaaaagatgaggaacttgcaaccgagttagaaattccacttgacccacctattaatttggttgtagagaaacctccttataaaggaatgcaaaaccaactaagggatgatgaaccaccacctttagagcatccctttgaattcgaggaagatctttttgaagattatggaaacacctcgaattttcctatccaaacacgacctctagcaaggaccactcaatccattctaagagtagaatctgttgacatagaacacatcaaaagcctttcggctattctgagttacgaatggctaacagaagcaaagctgtctcctgaggtagctcggatcatcactccttcaaccattcttctatgccaaattagaaggtccactaggaaggtccactacaatccatatgttgggataaatgttatttccaaggagttagctgacactctttatcccaacgagtccataaccccatcccaaaaacttttacaaagttcatctggattaattctagaaagccatggggtattaagggcagttcctgttagaatcaaggactctgaaatatgtctaaatttccacatttttgacataccagagattcctctcttgattggcagaccaatcatgaaacttctacaagaacaaccacaacgaggtcatttagacttcaaggttgggaattccactattgttgttcctcttgctagatcaattaacacgatagtggaacccaaacttaaaccagatcctattgaggaggtcttaatggtgactcaagaggagatgacccaaccattctttaatcatgaacactttgttcaagaagaagaagagttggtagaacccgttgtcggtgttttcccccggggggtcacaccaacgagtaaatttgtatgcgtgctccctttcccggatggtgatgcaagcagacacagagatttatcctggttcgggcaagagaaggccctacgtccagcgcgggggagagagtttgtattatctcgcacctaagtgcttgtataggggcgaatacaagcgtggtatgaagtgtggagctctactacgtatgagcgtggtcttgtgtcgtgatccctcttgttctattcctgagtccctccttttatagttccaaggagggacctagggtacatgtataggtgtaagaataggagtcgatagcagcatggagcgctgacctactcgaggcttccgtaccagcatgacctcgagccatcctgtcttaatagcctggtgatgatcacgcgtgcccctgcattctgctctgcgcgccgtcttggattggttcgacggatgcacgcttgtacgatccggcggagtggttgggatgtagtcagtcgacgcccaacccgtcccctggaaggatttctgtctggtcgagggtcagatgccgtacattgtgctgatatccggagcgctgactttagacgtctcgagggggtcccgattagacgtcccatccttatttcccgcgccctgtcatgccctgggtcgttcggcgggaaggctgcaaaaagattgatgggacggaagcctgttccctatcacgcctcccgtgacctgtgtgttaggtggggaagcatcaggtgcatttaatgctccgccccgcgtgcgcgcgtcaggtggcggacggcgaccttgcgcttgacgcccctcggttcgcgtgagcctgttccgtattcgacggtaaccggcgctcgacgcctgatcgattcgctcgacgctatttccgtcttcgaggttgcggccatcgatggtcgtgcgtgtgtgcggacggagcgtcgaatcgaggcgctagttttacgtacggatggtttcgttattcgtgttggtgagggtaccccttgttgataccctcgacagtagcccccgagtctccattcgagcgctggcgctcgagtggagacttttgtcttttcagtcgaggttccgcgggggcgcgcgagcgactccgcgggggtagcccccgagccctcgagggattatttaactcccttggtggttattttgcctaatttgcagagacactgtcgacaccagtggtggaaggttctgatcggctttgccttgcgtggaggtttcgacgtactctcgatagagcgagcgtcttccactccagatcgagttcctagcgggtagtccaagtgagaacccgtgcccctttcgagggggtcagctatagcccggaggcgttctcataaagctgggtcgacgtggtcggggataccggtctcattcgatagagtccagcggctcgatgcctcccgtcggggggattcctctcgactgtctcgaccctgccttggacatcgccagcgagttttcgaggcatgcctcgattttcgaccactcgcgggggacccctgactcttggtgctcgagatcggctgtcgaaccctttcgacgggccagccctcgacctctcgagactattgtgggcgcgtatcttggcttacaaagcaaggaagctgccttgccggttcgtctttccgcccgttgggcgcaccttttgaggtaagtgacgttgcgacactgtatcggcggggaatccggagcgtccggcctgtgaagagagaaaggaccgttagacggcgcatttatggggggagttacctcatttatcggatccgtccgttggttggctgctatctataagtacgccgtggcgctgctccattctttctctcctcttccgttctctcgcctccgtcttcttgctgcctttgctctcttgcttccttcacacgcgcgtgcaccccctcgagcggtagcgaatccaccgtattccaaccaagatgcctgtgaggcttgttgccgccgacgactggcgtccatcgttgaagacggaccgccgcctgctagagctcgagaatgaagggctcttgcgccgccgcacctcgcagtcttcgccggagtggatcgcgccgccggcgagtcacatggagccccagccacccgagggctacgtggtgtcattcgccaaattccaccgccatggcctgggcgctcccccgagccgctttatgcgggctctctgcttccactacggggtggagctccagcatttttccccgaacgccatcaccgtcgcggcggtcttcgccgcggtgtgcgagggttatctggggatgatgccccattgggatctatggcttcacctctacaggagcgaacttttcaacgcccccaccgggaccaccggcgtgaggaaacccgtgcgggccggatgcctcaacctggtgttgaagacgaagaagacggagaggccgcgcgagtacatcctggtggggctgtcgtcgaaccatgctgggtgggactcccagtggttctatctaagaaacgacgacggtctcttccccgtctacacaggccgtctgatctcggagcgcccagacaactggacgtacggcgtcgtccaggagcaccagtcacggctcgaccccctcctcgacgttatgaagaggctgcgcttggagggcctgtccgccgctctcgtcctctcggccgtccatcgtcggagggtccttcccctgatgtctcggccattgaggatggacgaaatggggccgggcgtctcgtcccgggatcttgaggcttgccggatgtccaacgtggctctggcggacgatgaggtcgccgcccgggtcagggcggccatcgccggcgatttcaagccgtcgcacgttaacggcttccctatgaggcctgatgaatgctcggtcgatttggtatgtcttcttcctcgtggtagccttgactctgggttccttttccaccccttttttctgattctatttttactatggcaggggcggatcgacattcgatcctcgaggcccccggtgaaagaggacgaagtcgatcgcgaagcgcggcgccgttccgccgagaaatcgaagtccgtcaaggactctaagaagaaaggggagaagaagaaaaaccttgaccggcaagctttagaggcgcgtcggtccaaatccaggcagaggggagagcctgaagaagagtcccccagcgagaaagatgatgacgacgatgaggatagtgaggactccgaggggatggcgtctcgccttgaccggatcctcgggggtccatctcaaggtgaggccgacgctcctcgggtggaagcttcgtcggagggcccaggcggatccctccgtcctcgcgccgatacccctcccgcgcccaaggttggtcaagttgccccgcgccctcccccggcgcccagggagagtggtcatgctaggccccaggcgacggggccactgacccgcggtcgtgccgcggcctccgagaaaggagaggccggccgcaggagtgccagtcccggcgcccgccacgcgggaactgatgcgcctaggcccgcgcctgccctcgaggggcctagaaccctgacgcggggaggctcgaggcccgccggtcggggcggcgggaggcgagctattcttcctgtagggtaagccctttcgatgctgtggcctttgtcttcctgctcctctgcgtttgctcatatgccgatcttttctcaggctaaagcggaccctcgagcgggcccagccgtccatggcaaagaggctcaaaacgggaaccgcctccaaggaaccaagtttatagcttgtttatgggccctgtgatgttctcgcgtcggttattacagcgtctaacctttatcccttgttttgtaggctcctccgactcccaacctccagccggtgtcgagaggagtctgcctcatcccgtgcctgcctcgtcgccgccgacttgtggcgaggcctcccagacgcaagcgtcagagggagcccccgagccccctcgattgggggtcgagggggaacctatcaccatcagcgacacgtctgatggtgacagagcgtctgggggtgcccgccctatggaggaggaaacgtcgagccctcgtgtcgtggggtcaactccctggcccgccggcctccgtaccctcgaggagcagaaaaaaaagagggaggaggatgaacagcgggagcgcgaggcggcgcggcagccgcaggagcatgaggcacagcagcagcagcagcagcagcaacaaccgcagcagcaacagcagcagcaacaacagcagcaacagcaacagcagcagcagcaacagcaaacaccgcagcagcaacaaccgcagcagcaacagcagtagcagcaggtgggccaagaggatggactgctcgagcctccgccccaaggtccggcccagccagtaccatcggtgccgcaagagcccggcgagcaggaggagaatctgccggcgtacggccccccacctccggcatggctcctcccgggggcgcctgccgcgatccgggcggagccggggcgagcggatggagtggtggcgcttgcgtgcctgaagcgcaccccccccgaccccgagtccgagatcaagaggacaatttacggcatggatgggatcaccccagggttcctccgggaacgtcgggcgtgggaggaccgctttccttccgaagaggacgaaatcgggacatcagggaccaaggacgggacctggaagacggtggacgacgacgggcggttcccatgcctcgtcgacctgttcctacgccatgggggctctctcgagaccgtcgaggggctcatccgcggcgttaaggcgcgggccgaccgggagatggagcactggtgccccgatcgcatccgtatccgggcctcccacgacccgtctgagcccgatatcttcctcgacgatcggaaggaggcggagaagtgggaacacgtcgaggagctccgcctttggatgaagcatgcggtggggctcctctcagacgttgttaacaacgggctcggcccggcttatttcgtaagtgtttctcgaacttcaattcccatggtgctttctggtttctgtgttctaatccgtacaccccttgattcgcaggatatgaaagagacctcccgcatcaagtccagcttcatacacgccacgaggggtggttgggagcagctccccctcctcaaggaccagctcctcgagtcgcaggaaaagctcctgaaagcttataaagatctcatagcgcttgaggaggagaaaaaggtaagggagactgctttggccgaggctcgagaggcctcgaagaagtcagaggaggagacagtgctgctgcgggagcgcgcccttacggtcgaggaggccgcgtctaaggccagggaggaggtcctgtcctacaagaacgtcatcgcggatttggacaaggagaagggcctccttaaatccgacctggactgtctccgagagtctttccgaaagatgaaggtggagcatgtgaacggcgaagtcgccaggggcgccgcagaggaggccaggaagaaggccctcgaagatctcgaggcggagcgggctcaatcccgcagtctctctaacgacgtcgagcgtttgaagggagaattgctggagaagagtggtgtcgagggtatcggtaaggggtacactcagcgatgcgcattatgagattgcccgtacgaaggtcgagacccttaattcgacgctctaatcttacgtatgcgccgacatcgacggtcgcagcctcaaagacggaaataacgtcgagcgaatcggttagggctcgagcgacgactgccgtcgaaaacggaagcgggctcgagcgaaccgagaggcgtcaggcgcaaggacactgtccgccgcccgacgcgcgcacgcgggccggagcattaaatgcacctgacgcttccccacctaacacacaggtcacggaaggcgtgatagggaacaagcttctgtcccatcgttctttttgcagccttcccaccgaacgacccagggcgtgtcaggacgcaggaaacaaggatggaacgtctaatcgggaccccctcgagacacccaaggtcagcgctccagataccagcatattacacggcgtccgaccctcgaccgaacagggtcccttcctagggacaagctgggagtcgactgacaacaccacagctaccccgccgggtccgccaccataccgtacgagcatgcgacctcagaaccagcacaaggcggctggcagggcaaaacgcaggagcacgcgtaatcatcaccgggctatcaagatgggacggctcgaggccatgccgtacggaagcctcgagtaggtcagcgttccatgcggctatcgatccctactctaacatctacgcatgtaccctgtgtctctccttggagctataaaaggagagactcaggaatagaggagggggacatcacaacacaagacacacacacacactcacaaagtagagctacacacttcataccacgcttgtattcgcccctgtacaagcacttaggtgcaagataatacaaactctgtcccccccgctggacgtagggccttctcttgcccgaaccaggataaatctctgtgtcttcttgcatcaccatccggaaaggggagcacgcatacaaatttactcgttggtgtgaccccccgggggaaaaacaccgacagttggcgcgccacgtaggggtcctgcgtgtttttcatcgatttcccactactttccggatggctactcttgcctcgccgcttccgcgctccacggtgatttggtttgggagtctcgagttcatgtctacgggctccggctacgacatgatcttgctctcagtcaaaggaccaggaggagtccgcgttacgccagcacggttgaaggccccgagacgccctcaccaccacgcctccccgcctaagaagaggcgcgagcaacaccaccgcggcccttctgcttcagcacgaccaacaactcgtgcgaggcaggatgtgggccacaagtcggcagcaccatgtgacggagcaacaagtgcgacgactcagcaccgcgcgacgacgggaggggacgcgtctcgcgccctctcccccaccgcagctaggctacttccacacgggttgttctctccaagggcggcactgccgttcggaatggacaacgccgcggcgtcgctcgccagggcgatatgcccaaacgcccagacgtacgtggaaagacccatggtcctcccacatagctctgaagcacggcggccggcgtccgagctgccggacctttcccgagtacgaggcctccgtcgtctaggccccggacgatactcgatcacctccctcaggcaacgattgctggaggaaggacgtgggtgtttctacgccgctgaaccggactccgactccgagacagacagctatgaccctatgagggaatgttatcacatcgacggggcggtagaaacttctgacgagacacgggatgctactgcgggtggtcgagcccccgcggcgcgagaagaccccaggacgcctgggaacgacggacaagtcgaccccccacctcaggaagacagaaccgcgcagctcgcgcagctgcgggagctcaaaatgaagctcgacgaagaccgcgagcgcctcgtcctgctcgaacaaatcctcgaacaagacctgccctacccgccgggcggaagtgtccgcagacgcgctcgagaggtacatcgacaaatcgtcggtgacgcagaggcggagcaacctgtcagccgtttccctcgagcaggccagaacgtagtggcagcgacgatgctgctacataacatgccagagccgtcgaattcccaggcccgacgcattcgagatgaagtacagacagtgctccaggtggcagcggttcaacaagccgaaagttcggcgtctcgacggcgaggagctgccacagagaagcgcgacgaacagcctctaaacgaagaggaggtttcagtccatcaacaacctccccctcgaggtagaaagaccgctctcatcctccctgccgacaatcaacgtcgacacgacgcgcggcacgacgtcaaagaaaatagacgccgccggcacggagatgcggaagaacgtggttatagcgcgcatcgcggtgggagatacgacagcgacgaggaccgggtggcccccgagccaccgggcccacgggtgccgctgctcctctatgtcgcgtcgacaacccaggtcgtcagcgcggcggtggtggtcgaaagacaagaggagggtcacgcgctgccggtccaaaggccagtttatttcgtcagcgaggtgctttcgcagaccaaggcgcgttacccccaaatccagaagctgatctacgccgtaatccttgcccgtcgcaaattgcagcattacttccttggtcatcctatcacggtggtctcttctttccccttgggcgagataatccagagcaaggaggccacgggaaggatagctaagtggtcggtcgagctcatgagcgagactctcacttacgcgcctcgaaaggccatcaaatcgcaagccctggtagacttcgtcgcggaatggacagactcccagcttcccccgactcaggtccaggcggagctgtggacaatgtatttcgacgggtcactcatgaaaactggggccggggccggcctgctgttcatctcacccttgggcgtccacatgaggtatgtaatcaggattcattttgccgcatctaacaacgtcgcagaatatgaggccctcgtcaacggtcttaagatcgctatcgagttaggagtccgacgcctcgacgtccgaggtgactcccaactcgtcatcgaccaggtaatgaaaacctcgagttgccatgacccaaaaatggaagcatactgcaaggaggtgcgtcgactcgaagacaggttccacggcctcgagcttgcccatgtcgctcgacgctacaacgaggcagccgacgaactcgccaagatcgcatctaccagaggcacagtgccgcctgatgcattctcaaaggatcttcacgagccatccgtcgacctaggcacgggggctggcgtcgacaccaccatcgcccaaccaaccaatgctgtcgatgcgctcttgatggaggaagaggtgatggaaatagaacgacgaccggttcgaccattcgattggcgcacaccgttcctcgactgccttatccgcggtgagttgccagaagacaagacagaagctcgtcgtatcgctcgacgggccaaatcatatgtgatctatggcgaagacaacgagctatatcgacggagtccgacgggggtcttacaacgttgcatcaccgtagaggaaggccgaaaactcctcgatgacctgcactcgggggcttgtggccaccacgccgccccacggacccttgtaggaaacgcttttcggcaaggcttttactggccaacggccgtggcggatgccatcgagctcgtacgcttgtgtcatgggtgccaattctacgccaaacagacgcatctgcccgcccacgctcttcagatgatccccatcacctggccgtttgcggtatgggggctcgatttagtaggacctctacaaaaggcgaaaggagggtatacccatttgctggtggccatcgataagttctccaaatggatcgaggctcgacccatcaccaacatccgctccgagcaggccgtccttttcttctccgacataatccatcggtttgggatccccaatgtcatcatcaccgacaacggcacccagttcaccggcagaaagttcttggatttctgcgatcagcatcacatccgtgtgaactggtccgcagtagcccaccctcgaactaacggccaggtcgagcgtgccaacggcatgattttgcaaggactcaagccgaggatctacaatcgattgaagaaattcggcaagaaatgggtcgaggagctttcctcagtcctatggagccttaggacaacgccaagcagggccacaaaatacaccccgttcttcatggtctacggctctgaagctatcctccccacagacctcgagtatgggtcaccacgactcaaggcttacaacgagcaatcgaacaaagagactcaggaaaacgcggtcgaccaactcgaggaggctcgagacatggccctcctcaactctgctagatatcagcagagactccgacgctaccacgacaagcacgtgcgcaagagggacctcaacgtaggcgaccttgtcttacgacgccggcaaagcaaccaaggacgccacaagctgaccccaccttgggaaggcccgtatgtggtggccgaggtccttaagccaggaacgtacaaattggcggacgaaaagggggcagtcttcaccaacgcatggaacatcgaacagctacgtcgattctacccctagaagtcctagacttacgatcctactttttgtacgaagaccttgtaaataaacgcatgaataaataaagtctttccctcgagcagctcgggggccaaaaatagttacgagttatagtctcgacgtcaaaaggggatgccgaccatgacccatcatagtccgcaccccctcgggggctaccagagggacgacccctccccaagcgtcgaaaaagccaagaaatttttcttttcttgcttggtaaaccttgcacggttcgagtagctaaggcacctcgagcccctcaaaggccgagggataatgagccggaaaactcccacgcccctgggctacggaaaccgaggtcgcttctgacgaaaggtcgagcaagggatacaaacgtaggaataaagagaaacaaaggaacctcgagcggaaagacaaataagcagttaacaattacgaaaagatactatatcacgtaacagcaaaattaataaagtatcgtacaaggggcctcaggcgccctgagcaggctcgcaggcctcagtcaacggcacgaccctcaccgccctcgcctccgcccgagctagcctcagaagggagcacctcaggctcgaagagcttggccaacctttccccaggagcctccgcgtcgtcgatcaaggcatggagcctctcctcgttctccgcgtcggtcttggaaatgtcggtgacgaagccatgggacaccacctccatgtcgtaggagaagcccgagcagacaaccgccatcgcccgcttcaccccgatgtggagggcatcccgcacccgatctcgcagcgttgcgcctatgtagcacaactggtcgatcagggcgtcgcctcgagtgtcctccctcgactcatccataggctcgacctcccaagaggtcgagagatcgcttatcgccgtccgcactcgacggttcaaagcaacctcagcctcgagctgagccttggcgttgcgagcctcggcttgggcggccaggagttcgtccttgagccctataaatgccaatacaaagaagctttaggaaaaactcaagcacacctcgaaaaggaaattcgacaaaggaaacatacctttgatgctctcctctagggccgtgttctcgccgaccaatctggtgttggcacgctcgatctctctgttggagcgcgccagctcagtattggcgacgcggagatcttcgatcaccctgccagcatgagcgacggctccactcttctccagcaattctcccttcagacgctcgacgtcgtcagagagactgcgggatcgagctcgctccatctcgaggtcttcgagggctttcttctttgcgtcctcggcggcacccctggcgacctcattgtccacgaacgccactttcatcttttggaaggtatcgcggagggagtccaggtcggtttggagaaggcccttctccttgtccaggtccgcgatgacgctcttgtaggacagggcctcctcccgggctctggacgcggcctcctcgaccgtgagagcccgctcccgtagctgcatcgcctcctcctccgccttcttcgagacctctcgggcctcggccaaagcagcctccctcaccttcttctcctcctcgagcgctatgagatatttgtaagctttaagcagcttttcctgcgactcgaggagttgatccttgaggaggggaagctgctcccatccgcccctcgtggcatgtatgaagctggacttgatgcgagaggtctctttcatatcctgcgaatcaggggttagagggattagaacacagaaaccagaaagcaccacaaagattggagctcgagaaacactgacaaaataagctggcccaagcccattgttgatgacgtccgataggagccccaccacgtgtttcatccaaaggcagagctcctcgacatgctcccacttctcgacctccttcttgtcgtcgaggaagatattgggctcggacgggtcgctggaagctcggatacgaatccgatcgggacaccagttctccatctcccgatcagcccgcaccttgacgccgcggagaaagttctcgacggtctcgagggaacccccgtggcgcaagaacaggtcggcgaggcaagggaaccgcccgtcgtcgtccaccgtcttccacgtaccgtccttgctcccagacgacccgatctcatcctcctcagagggaaagcggtcctcccatgctcgacgctcccggaggaaccctggggcgatcccgtccatgccgtagattgtcctcttgatctcggactcggggtcggtgggggtgcgcatcatgcaggcgagcgccaccactccgtccgctcgccccgactctgcccggatcgcggcaggcgcccccgggaggagccacgctggggtgggaggtccgtacaccggcaaatttccctcttgatagcgatagcgatcttgagaccgttgacgagggcctcatattctgcgacattgttagatgcggcaaaatgaatcctgattacgtacctcatgtggacgcccaagggtgagatgaacagcaagccggctccggctccagttttcatgagtgacccatcgaaatacatcgtccatagttccgcctggacctgggtcggggggagctgggtgtccgtccattctgcgatgaagtctaccagggcctgcgatttgatggccttgcgaggcgcataagtgagagtctcactcatgagctcgaccgaccattttgctattcttcccgtggcttctttgctctggattatttcgcctaaaggaaaagacgagaccaccgtgatggggtggcgaaggaagtaatgctgcagcttgcgacgggcaaggattacggcataaatcagcttctggatttggggataacgtgcttttgtctccgaaagcacctcgctgacgaaatatactggcctctgaaccggtagcgcatgtccctcctcctgcctctcgaccaccaccgccgcgctgacgacctgggtcgtcgacgcgacgtagaggagcagcggctctacaggttgaggtggaaccaggactagtgccgaggtcagcgtcttcttcagcctttcgagtgcttcctcggcctcgggggtccaagaaaagtgctcgaccttctttaggagtcgatataatggtaatgccttttctcctagtctcgagatgaaacggctcagagccgccaggcaccccgtgactctctgtacacccttgatgtctcggatcggccccattttcgtgatggccgagactttctcggggttggcctcgatgccgcgctgcgaaacgatgtatcctaggagcatgcctcgaggcacaccgaaaacgcacttcttgggattgagcttgatccggctggtgcgtaggcagctaaaggcaatctcgaggtcctggatcaggtctccttgtcgctttgacttgacgacaatgtcgtcgacgtaggcctcgaccgttgaccctatatgttcgccaaatacgtggagcatgcaacgttgatacgtggctcccgcgtttcgaagcccaaatggcatggtcacgtagcaatacatcccaaaaggcgtgaagaaagaggtcgcgagctggtcggactccttcatttttatttggtggtaaccagaatatgcatcaaggaaagaaagggtttcacatcccgcggtagaatcgacaatctgatcaatgcgtggcaatggaaagggaacttttggacatgctttattcagactagtataatcgacacacatcctcattttcccattctttttcttaactaatacagggtttgctaaccagttaggatgatgaacctccttgatgaatccggccgtcaaaagcttgtggacttccttgccaatgatcttgcgcttctcctcatcgaatcggtgcaaccgctgcttcactggcttggaaccggctcgaatctccaaggagtgctcggcgacttccctcggtatgcctggcatgtccgagggactccatgcaaacatatcagcatttgcacggagaaagtcgacgagcacggcttcctatttggggtcgaggtcggcgctgatcgtcagcactttgccgtcggagttgttggggtcgagcgggatcttcttggttccttccgccgcctcgaagctgcccgcatgacgcttaggctctggagcctcagcggccatggcctcgagctttgcaacgagctcggtggagctctcgaccgcctccccgtactcgacgcactcgacgtcgcactcgtacgcgtgctcgaaggaggaactgacagtgatgacgcctttgggaccaggcatcttcagcttcaagtaggtgtagttgggtatagccatgaacttggcgtagcccgggcgcccgatgatggcgtggtacatgcctcggaacccaaccacctcaaaggtgagggtctccttcctgaagttggccgctgtgccgaagcagaccggtaggtcaattcgacctactggcagtgcctttttccctggcacgacgccatggaaaccgccggcgcttggctggaagcgtcctctatcgatgccgaggaggtcgagggtctcgaggtagatgatgttgaggctgctgccaccatccatcagcactttcgagagtcgggtgttgacgatgatggggtcgacgacgagcgggtagacgcctggggcgactaccttgtcggggtggtcctctcggtcgaaagtgataggagtgcttgaccagctaaggtactggggcaccgccattcttgccgcaaagacttcgcgacgctcccttttgcgctgcctcatggttaattgagtcgagggcccgccatagatcatgtagtagtcgtggacggcggggaagccgtcgtcatctttgttgtcctccttgctgccagccttctctttcttggagtcatcacgcgtatcttttttgaaccccagaccgtcgaaatgctttctcagcatacgacagtccttgagcttatggttggcgcctcccttatggtaagggcacggctcctccaacatcttgtcaaagatgcctccatccggagggcctcgaggcttctttcgatccatggcggcgacaaggttgtcgtcggaatcttcccggtggaactgccgcactttctgcttctttttatttttcttgaggcctcgactgggggtcccatcttcgtcgacgggctgcttgccttttcttccttctgagctgaagaaggcgccaactgcctcctcccctgccgcgtagttggctactacgtccatcagctcgtcgacggtctgaggtcgattgcgacctaattcccgcaccaagtctcgactggtggtgcccgagacaaacgccaagatgacatcgtggtcagggatgtgcggcagctcagtgcgctgcttcgagaagcgtcgagcatactcccgaagagtttctcctgacttctgcttgcacttgctgaggtcccacgagttccctggccgtatgtaggtccctttgaagttaccctcgaagactctgaccagatcaacccagttgtggatctgattggcagggagttcctcgagccatcgacgggcggtgtcggagaggaaaaggggtagctatctgatgatggctcgatcatcacctcgagcgccacctagctgacaagccagcctgaagtcggccagccacaactctggtttggtctctccattgtacttcgcgatgctggtcgggggtcgaaatggattgggcaggggcgtgctgcggatcgccctgctgaacacccatgggcctggtggctcgggggccacccggtcctcgtcgctgtcgtatctcccaccgcgatgcgcgctataaccgcgctcttccgcgtctccgtgccggcggcgtcgattttctttgatgtcgtgccgcgcgtcgtgtcgacgttgattgtcgacgggggggatgagagcggtctttctacctcgagggggaggttgttgatggactgacacctcctcttcgtttagaggctgttcgtcgcgcttctctgtggcagctcctcgtcgtcgagacgccgaactttcggcttgttgaaccgccgccacctggagcaatgtctgtacctcatctcgaatgcgtcgggcctgggaattcgacagctctggcatgttacgtagcagcatcgtcgctgccactacattctggcctgctcgagggaaatggctgacaggttgctctggctctgcgtcgccgacgatctgtcgatgtacctctcgagcgcgtctgcggacacttccgcccggcgggtagggcaggtcttgctcgaggatttgctcgagcaggacgaggcgctcgcggtcttcgtcgagcttcatcttgagctcccgcagctgcgcgagctgcgcggttctgtcttcctgaggaggggggtcgacctgtccgtcgttcccaggcgtcctggggtcttctcgcgccgcgggggctcgaccacccgcagcagcatcccgtgtctcgtcagtagtttctaccgccccgtcgatgtgatagcattccctcgtagggtcatagctatctgtctcggagtcggagtccggttcggcggcgtagaaacacccacgtccttcctccagcaatcgttgcctgagggaggtgatcgagtatcgtccggggcctagacgacggaggccttgtactcgggaaaggtccggcagctcggacgccggccgccgcgcttcagagctacgtgggaggaccattggtctttctacgtacgtctgggcgtttgggcatatcgccctggcgagcgacgccgcggcgttgtccaatccgaacggcagtgccgctcttggagagaacaacccgtgtggaagtagcctagcagcggtgggggagagcgcgcgagacgcgtcacctcccgtcgtcgcgcggtgctgagtcgtcgcgcttgttgctctgtcacacggtgctgccgacttgtggcctacgtcctgcctcgcatgagttgttggtcgtgctgaagcagagggaccgcggtggcgctgtccgcgcctcttcttaggcggggaggcgtggtggtgagggcgtctcggggccttcaaccgtgctggcgtaacgcgggctcctcctggtcctttgactgagagcaagatcatgtcgtagccggagcccgtagacatgaactcgagactcccaaaccaaatcaccgtggagcgcggaaacggcgaggcaagagtagccatccggaaaggagtgggaaatcgatgaaaaacacgcaggacccctacctggcgcgccaactgtcggtgttttcccccggggggtcacaccaacgagtaaatttgtatgcgtgctccctttcccggatggtgatgcaagcagacacagtgatttatcctggttcgggcaagagaaggccctacgtccagcgtgggggagagagtttgtatgatctcgcacctaagtgcttgtataggggtgaatacaagcgtggtatgaagtgtggagctctactacgtatgagcgtggtcttgtgtcgtgatccctcttgttctattcctgagtccctccttttatagttccaaggagggacctagggtacatgtataggtgtaagaataggagtcgatagcagcatggggcgctgacctactcgaggcttccgtaccggcatgacctcgagccgtcctgtcttaatagcctggtgatgatcacgcgtgcccctgcattctactctgcgcgccgtcttggattggttcgacggatgcacgcttgtacgatccagcggagtggttgggatgtagtcagtcgacgcccaacccgtcccctggaaggatttctgtctggtcgagggtcagatgccgtacattgtgctgatatccggagcgctgactttagacgtctcgagggggtcccgattagacgtcccatccttatttcccgcgccctatcatgccctgggtcgttcggcgggaaggctgcaaaaagattgattggacggaagcctgttccctatcacgcctctcgtgacctgtgtgttaggtggggaagcatcaggcgcatttaatgctccggcccgcatgcgcgcgtcaggtggcagacggcgaccttgcgcttgacgccccccggttcgcgtgagcctgttccgtattcgacggtaaccggcgctcgacgcctgatcgattcgctcgacgctatttccgtcttcgaggttgcggccatcgatggtcgtgcgtgtgtgcggacggagcgtcgaatcgaggcgctagttttacgtacggatggttttgttattcgtgttggtgagggtaccccttgttgataccctcgacacccgttgagctagacaaaaatgaacaactctcacctccttcgatagaattaaaacctcttccttctggccttagatatgtctttttgcacaacaacccaaaaactccagtaattatcagtgacaagatttccgattatgaaacacaacaacttgtcactgttcttgaaaggcatagatcagcttttggctactctctcgaggatctcacgggcattagtcccattctctgcactcatcgtatccctattgatcccaattctacaccttcaagggaaccacaacggagacttaacaatgctatgcgagaggttgttaagaaagaggtcctcaaactctatcgtgctgggattatttatcctgtgccacatagtgagtgggttagccctgtccaagtagtgccaaagaaaggaggaatgacggtcgttaggaatgagaagaatgaactcatccctcaacgaattgtcactgggtggcgtatgtgtattgactatcgaaaactcaataaggctacaaagaaagatcattttccgttacccttcattgatgaaatgttggaacggcttgcaaaccactctttcttttgcttccttgatggttattctggatatcaccaaatcccaatccacccagatgaccaagaaaagactacctttacatgcccgtatggaacttatgcataccgacgaatgtcgttcggattgtgcaatgctccagcttctttccaacggtgcatgatgtctattttctcggacatgattgagaagatcatggaggttttcatggatgattttaccgtctatggcaaaacctttgatcattgtttggagaatttagatagagtcttacaacgatgtgaagaaaagcacttaatcctgaactgggagaaatgccattttatggttcaggaaggaatagtgctaggacataaagtgtccgaacgtggtatagaggtggacaaagcaaagattaaagttattgaaaaacttccacctcccacgaatgtgaaaggaatccgtagctttttgggacatgcagggttctatagatgctttatcaagaacttctctcaaattgctagacccctaactaatctcctagctaaggatgcacctttcatctttagtgatgagtgccatgaatcttttcaaactcttaagaaagcactcatctcagccccgattatccaaccacctgattggaatcttccttttgagatcatgtgtgatgctagcgattttgcggttggtgccgttttaggacaaaccaaggatagaaagcattatgccatatcctacgctagcaaaaccttgtctggaccacagctcaattacactacaactgaaaaagagcttttggctgttgtctttgctatagacaagtttagatcttacttagtgggggcaaagataatcatctattcagatcatgctgctctcaagtacctcctcactaagaaagatgctaagcctcgtctaattcgatggattcttctactccaagactttgacatagaaatccgagataggaagggagttgagaattctgtagccgaccacttgtctaggcttcaatataaggaaacacatgatgagcttcccataaatgactacctaagggatgacaccctacttaagataacacatgcatatccatggtatgcagacatcgtaaactttatagtaaaaggctatgtcccacctggtgcaaacaaaaggaagttgcttcacgatagtcgtttccacctgtgggatgacccatatcttttccgagtctgcgccgatggactcttgagaaggtgtgttcctatggctgaggctactcaaattatggaaagatgccatgcctcgccatatggaggacactatggagcattccggacacatgctaaaatttggcaaagtggttttttctggccaacgatgtatgaagatacaaaggactttgtcaggagatgccaccgatgtcaaaaacatgggaatatcaactcacgaaatgaaatgcctctcacaaataatcttcaagtagaacttttcgatgtatggggcattgattccatgggaccattccctatgtctgtgaattgtgagtatatcttagtagctgtggattacgtgtccaaatgggtagaagccctaccttgtcgatcagctgattcaaaacatgccaagagaatgttccatgaagtaatctttcctcgctttggtatacctcggatagttataagcgatggaggttcccacttcatcgacaaaatcttccggaaatacctagccgatcatggagttcgacacaacatcgcaacaccataccatcctcagactagcggtcaagccgaaacatctaacaaacaaatcaaaaatattttacaaaagaccgtagatgagatgggtaaggggtggaaggacaaacttcctgatgcactttgggcatatagaactgcattcaaaacacccataggcatgtcaccttatcaacttgtatatggaaaaacttgtcacttgcctgtggaagtagagtttaaggctcattgggcactcaagaaatggaacatggatctccatctcgctagcgagaatcgtctgatgcaactatctgagctagaagaatggagagagaaagcctaccacaattcaaggatctataaagagagaacaaaacgatagcatgataagagaatcaagcacaaagagtttaagcctggagataaggttctactattcaattcaagagttaagctacgaagtaagtgggatggaccatataaggttattgacacttcaactcatggagccattaccatccaagatgacataggtaacacttttaaggtaaatggtcaacgcttgaaaatctatcttgagccacaaaacaaccttgtaaaggaacttgatgtgattgagttcatagaattctcatattaagctctagacaattacctaacccttaacttgctccacaagttttgttgtctatttgggttgtgcaggattttgaggcttaagaagagtgagaccaaccatgcaggccacaagagtgaacgactatgtcaacatccagcttgggggaggcacccccacgtgtatctagataagtattacttttctttcttggttttatttactagtattcagaaataaaaaaaatgcataaccatgaaactaaacaaagtttttcttttgagtaatatacaatagttttgtgtaattctaagttttaaataaaaataaaaaaagtttgattcaagtctaggtaattgacaaacatgatatgagaaggtctgagctactatttaacttgttctaagttttgctagagttctggagattttatcttttgaaaatctaaaaattcataaaaaaaataaatatatgagatcataatacccagagtcttataagaaataaatattaaaactgtgggtactttctttgttcaagccattgttaattcttgtagttttggttgagagaattatcatgctccaaagatcaagatctttttgtttaaaaatataaaagattcactcttccgaagtattattgcgttagaggcatgggactatgcaaaaatttgattcgaaaaaaaaagagtgagacgagaggtaaaaatggacaagtgtccgaagtagaattaggggtacaaagatacccacctgagtggaaaaaaatggacatgtgtccgacagtagaattaggggtacttgctgcccacttaaaaaaaagagactgaaaaaaaaggaaaaaaaagaagaaaaaaaatgatagcccatggtccctctaataagcaatatgccagtaagagatgacaaacttctcaaaaaggtcaaaggtcttgatctaggagtatgacattcctctcccttactccgagcgttgacatagcaaaatgcaaagtaagtatgctaaaacttttaaagctctacttatatatatctttcgagaagaaggcaaatgcctcggttttattttgcagacttataaaaaaaaactccagagcaaaggtaagacagaagaacttgagtcatagtgcttgacttgattgttctgtttttcaatcacttaagaccttagtgataacttaaaaaccctgtagtaagaggcataaaagtaacccctgttttcttgctaattttagctttgctcagggacgagcaaaggttaagcttgggggagcttgttgacggtccttaatgctcacatttaaccgttaactaatcatggaaaaggatccaaatgcaaccaacacctagacttagggttttatctgacagaattccacgagttttggtgtttgtctatttttgcaggggattatcaggaaatatggaggaaaggcccacacgtcgggattacatagagatattaacatgccgcgcaattttctatcatctagaagactccagaagccacgggaacgaacgggaggccgagcgagcccggaagcagggcgcccgccctacccccctgggcgcccgccctcctctgctggccaatcagcacgagtctcggggattatgccccaccgactctaaggatcgaggaaaatcacacgatgaaggtcggtttgatcggatggtggagaataacgtggaaattcctttggagctactcttcctagatttcttgggggctactcttcctggactatataagcagacccccaccagcccctggaggcatacctcttctacagaatcaaagctagggtttcaattcttcatccaagtagagaggatccctctagttcttctagttctacctctagttcatctagatctagttctagttcatctagttctagttctagttcctctagttctagttctagttagttctagttgtaatctagaaaatagggagagagaagaggagagcggaggaggaggagccggatctgtcggatcttcctcaacattgtacttttgcagcaactggttcgttcttcatcgttctccaggttcttcaatttataatcctgagttctttaattacttttatttacattcaagttatttattggattcccgcttgcatcaagtgctctaatctttgcaacattagagtagtaattaatagattagacgtggtgtttagtcttgcaattacctggaattgcacccaatcctgcggattgttgtgctagccttagggtagtgacagccctaacggtcgacgtattccacctcgttcggatcggtgtttgtaggaccgtagtcagagcttcctagcccccttctcatctctttctgtggttagtgttttgatgtcccgaaatagataatcttgaagtaattcttgattcttagatcaactagagaactctcaggaaacttcctctcttcccaccaaaaataattatatagttatccttgggcgatcttggatcttaattagtacactcacgttccctgtggaaaatcgatactctggaatactcccgggtgaaagctacatcggtatccgtgtgcttgcggatttttctgtttgcgtttaaaatacccaacagtatgtatcccctcaaaagagcaaaagtagaattagacgttcaccattattatcaccatcatcaccatacaccattcattcgccacacatgcacatcttgatttgacttattgacttgttcttctagatccatggtttgattatgcaataaatgtcttgtaagtatgtattagctgtctcccacctaagagctccagatatcaaaaccttattagggtagggtgagagagaaggcaatgccactatgcctcataccaaaaataccatatactttgagagaaggcatacaccattactgccttggtaaggatccagaaataccacaaaagtgagactagagagagtcatacaaggaatctctgagttttatttgaaaaatctgcaaaaactccagagctatagttaatcgaagaacaagagacatggcgcttgactagaccgttctatcttttaactgctcaagacacaagtgacggttgcaaaccccatgatggaaggtaaaatgagtaagtttaaatcttaacagtttaccctaaccaagagatgagatcttgtttgaacgcatgtgtacctttaaggcatgaaaccactgcagaaactcttgagttcatctttgctcatggacgagccaaggttaagcttgggggagcttgttgacggtccttaatgctcacatttaaccatcaactaatcatggaaaaggacctatatgcaaccaacatccagacttagggttttatctgacagaattccacgagttttggtgtttgtctatttctgcagggggttatctggaaatacggaagaaaggcccacacgtcgggtttacataaagatattaacgtgccgcgcaattttctatcatctagaagactccagaagccacaggaacgaacgggaagccgagagggctcagggacagggcacccgccctactcccttgggcgctcgcccaccttcagtgtccaattcggacccgttttgcggatcacgctccaccgacctaaaggatcaaggaaaaccgtgcgattaatgtcggtttgatccgacggccaagattcatctgaaaagactatataagcaacgccccttggcccctgcagatcatacctcttctacagaatcaaagttagggtttcaattcttcatccaagtagagaggatacctctagttcatctagttctagttcatctagttctagttcctctagttctagttctagttcgttctagttgtaatctagaaaatagggagagagaagaggagagcggaggaggagccggatctgtcggatcttcctcaactttatacttttgctgcaactggttcgttcttcatcgttctccaagttcttcaattcataattcctgagttctttaattacttttatttacattcaagttatttattggattcccgcttgaatcaagtgctctagtctttataacgctagagtagtaattaatagattagacgtggtgtttagtcttgcaattacctagaattgcacccaatcctgcggattgttgtggtagccctaggacagtgacagccctaacggtcgacgtattccaccttgtttggatcggtgtttgtaggaccgtagtcaaagcttcctagcccccttctcatctctttcagtggttagtgttctgatgccctgaaatagataatcttgaagtaattcttgattcttagatcaactagagaactctcaggaaacttcctctcttcccaccaaacataattatatagttatccttgggcgatcttgaatcttaattagtacactcacgttccttgtggaaaatcgatactctggaatactcccgggtgaaagctacatcggtatccgtgcgcttacggatttttgatcttgaatcttaattagtacactcacgttccctatggaaaatcgatactctagaatactcgtgggtgaaagctacatcggtatccgtgcgcttgcggatttttctgtttgcgtttaaaatacccaacaggctcgaaacaatctccaatcacgagctcaacaccaccgctgctccaagccatctagggcatcgggaaagacccaagagtaacaagaaatctgtagcaaactcaagaatcaagtgccactagatgcaactctcaaagcaatgcacttgaatctcactcaatctcactaagattagcaatcaagcaaggagatgagtggagggagtgttctctagctcaatgtatgcatcaagtaatcaaatgtgcaagagagagcccccaaagctggccacctcctatttataagccccccaaagagatagaattgttggctctgtcactgggcaaaaatcgggggcaccggacactcagcagggagccaccagatgctcgaccccctgttgacactagctaacaccacttagatactaggttgtcatccctagcatgatgtcagagtgtacaacggtatttataaatgtaaaggctttctagaaaataatctattctatccgcaagcgtacagataaaacacctcattgtagcatttcaccaggataagtattccaggtatcgttatttataattttgctcaagggatgaaattaaagtaaagggggcaaaatctatcaaggcatagactagagataaacttgcaagaacatgattactaatgagaaactcgtcacacagtcacttactttagcagggggtaaaccataaagataatgataataaagtataagttcatgggtagataacacagcgattagaaaatagactactcctcatatatgtaggtgatgtcggattagctagagaatggattctaagttatctactaactactaagtcataatctactctagttatctacaagatcatatataccttaaaaactcttcattcatgtataaggaacattgataaagtaaatcagagcatcgcatgacttactccacaataccggttctgcctgtcctatcaacggagggtggactatataagaatcaacgaagctgtcactatcgcgaactaccacacgacccggccaataggatacatttgcagataaataacattgtcggtgtttttcccccgggggggtcacaccaacgagtaaatttgtatgcgtgctcccctttccggatggtgatgcaagaagacacagagatttatcctggttcaggcaagagaaggccctacgtccagcggggggagagagtttgtattatcttgcacctaagtgcttgtacaggggcgaatacaagcgtggtatgaagtgtgtagctctactacgtgtgcgtgtgcttgtgttgtgatgtccctctcttctattcatgagtctctccttttatagctccaaggagagacacagggtacatgcgtagatgttagagtagggatcgatagccacatggagcgctgacctactcgaggcttccgtacggcatggcctcgagccgtcccatcttgatagcctggtgatgattacgcgtgctcctgcgtgctgccctgccagccgccttgtgctggttctgaggtcgcatgctcgtatggtatggtggcggatccggcggggcagctgtggtgttgtcagtcgacgcccaacttgtccctgggaagggaccttgttcggtcgggggtcgggcgccgcgtaatatgctgatatctggagcgctgaccttgggtgtctcgagggggtcccgattagacgttccatccttgtttcctgcgtcctgacacgccctggatcgttcggtgggaaggctgcaaaaagaacgatgggacagaagcttgttccctatcacgccttccgtgacccgtgtgttaggtgggaaacgtcagatgcattcaatgctcccgcccgcgtgcgcgcgtcaggcggcggacagtgtcctggcgctcgacgcctctcggttcgctcgagcccgcttccgttttcgacggtagtcgtcgctcgagccctgaccaattcgctcgacgctatttccgtcttcgaggctgcgaccgtcgatggcggcgcatacgtaagattaaagcgtcgaattgagggtcccaaccttcgtacgggcaatctcataatgcgcatcgctgagggtaccccttaccgataccctcgacagtagcccccgagcctccatttgagcgctagcgctcgaatggaggttttgatttacggtcgaattttcgtgggggcgcgcgagcgaccccgcgggggtagcccccgagccctcggaggagtttttgactccttcgagggttatgttatctaattcgcagaaacgctttcgacaccagtggtggaaggttctgactggctcgtttttgcccgggggtttcgacgtactctcgatagagcgagcgtcttccaccccaaattgagctcctagcgggtagtccaagtgagaacctgtgcccctttcgaaggggtcagctgtagcccggaggcgtcctcataaagcagggtcgacgtggtcggggataccggtctcgttcgatagagaccggcggctcgatgcttcccgtcggggggattcctctcgactgtctcgaccctaccttgaacatcgccagcgagtcctcgaggcaggcctcgatcttcgaccgctcgctagggatccctgactctggcgctcgagatcggctgtcgaaccctttcggcgggccagccatcgacctctcgagacttttgtgcttacgtcccttggcttacgaggggaggaagcggccgtggcggttcgcctttctgcccgttgggcgcgcctttttaggcggatgacgttacgacaccgtatcggcgaggaattcggagagtccggcctgtgaggagagagagaggactgtcaggcggcgcatttatggggggagttaccttacttctcggatctgtccgttggcgaacagctgcctataaatacgtcgtcgcggcaccgccgttcctctcccttccgccttctcgctctcgttccttcgctgcctttgccttcttgccatctgacgcgcatacgccccctcgagctgtagcgaacccgccgtccctttagccgagatgcctgtaagactcgtcgccgccgacgactggcgcccgtcgtcgatgacggagcgccggctgttggagcttgagaaggagggactgctgcgccgccgcacctcgctgtcgtcgccagagtggatcgcgccgccggtgagccacagggcgcctcagccgcccgagggctacgtggtgtcgttcgccaagtttcaccgccacggtctgggcgcgcctccaagccgcttcatgcgagccctctgcttccattacggggtggagctccagcacttctctccgaacgccatcaccgtagcggcggtcttcgccgccgtgtgtgagggcttcctggggatgatgccgcactgggagctgtggctccacctctacaggggcgagttgtttcacgcctccaccggaaccacgggcgtaaggaagcccgtgcgggcgggttgccttaatctggtgcagaagacggggaagacggaccggccgcgggagtacatcccggtagggttgtcgaccaaccacgccggctgggactcccaatggttctacctgcggaacgacgacaacctcctgccttcttactcgggccgtctgatcttggagcgtccagcggactggacgtacggcgtcgtccaagctcatcagtctcggctcgaccctctcctcgacgccctgaagaagcttcgccaggaaggtttgaccgccgccctcgtcctctcggccgtccatcatcggagagttctccctctgatgtcacggccgttgaggatggacgagatgggccctggcgtctcgtctcgggacctcgaggcatgtcggatgtccagcgagcctccggcggacgacgaagtcgcggcccgagtcagggccgcaattgccggtgattttaagccggagcatgtcaacggcttccccatgagacctgacgcaggctcgatcgatctggtacgcgcgcatcctcgattctgggtttcccttctcccctctcttttttctaagtctaccttagttttggcagggtcggattgatgtctggtcctcgaggcctccggtaaaggaggacgaggtcgatcgcgacaaacggcgccaatccgccgaaaagctgaagtctgccaaggactccgcaaagaagggggagaagaagaagaatctcgaccgccaagcattagaggcgcgtcgagccaaatccaggcagaggggggagcctgaggaagaatcccccaacgatgacgatgacgacgacgagggtagcgacgactccgaggggatggcgtcgcgcctcgatcggattctcgaaggcccgcctcgaggtggcgtcgacgccccccagacggaggcgccagaggagggtccgagcggatctcgtcgtccccgggccgacgctccttccgcgctcagggctggccaagacgcaccgcgccctcccccggcgactagggagagcggtccggctaggtcccaggcgtcggggccgctaactcgcggtcgcgccgcggcctctgagaaaggagacgtcggccgtaggagcgcgagtcccggcgcccgccaggcggggaccgtcgtacctgagccagttcctgccctcgaggggcctagagccccgacgcggggtggctcgaggcccgctggtcggggtggcggaaggcgagccgttctccccgtggggtaagcccttttgatgttgcggtctttgtctccccattctttcacctttcctcacatgccgactttttctcaggctgaaacggaccctcgagcaggcccaaccatcaatggccaagaggctcagaacgggtgccgcctccacggaaccaggttcgtagttgattcctgggtgtcgcgatattcttacgttggttatcataacgtctgacctttaccctctgttttgtaggctcgtccagcacccaacctccagccggcgtcgagaaagctttatctcgtcccgcgcctactccgccgccgccggctcatgatgcggccccccagacgcgagtgtcagagggagcccccgagccctctcgattgggggtcgagggggaacccatcaccatcagcgatacatctgatggcaacgaagcgtctgggggcgctcgacctatggaggaagaagcatcgacccccaacgtcgcgggacggactccctggcctgcaggccttcgagctctcgaggcgcaaaggacgatgttggaggaggaggagcgggagcgcgaggcgacgcagccgtcactggaccagcagcagcagcgaccccagccggaggggcagctgcagcaccagcaggaggagcagcggcggcagctggggcagcaacagcagctggggggccaagaggacgagccactcgagcccccgcctcaaattttggccgaaatggcgccactggcgtcgcaagagcctggcgatcaagagggagatttgccggtgtacgggcctcccaccccagcgtggctcctcccgggggcgcctgccgcgatccgggcagagtcggggcgagcggacggagtggtggcgctcgcctgcatgatgcgcacccccaccgaccccgagtccgagatcaagaggacgctctacggcatggacgggatcgcccctgggttcctccgggagcgtcgagcatgggaggaccgctttccctctgaggaggatgagatcgggtcgtctgggagcaaggacggtacgtggaagacggtggacgacgacgggcggttcccttgcctcgccgacctgttcttgcgccacgggggttccctcgagaccgtcgagaactttctccgcggcgtcaaggtgcgggctgatcgggagatggagaactggtgtcccgatcggattcgtatccgagcttccagcgacccgtccgagcccaatatcttcctcgatgacaagaaggaagtcgagaagtgggagcatgtcgaggagctccgcctttggatgaaacacgtggtggggctcctatcggacgtcatcaacaacgggcttgggccagcttattttgtaagtgtctctcgagctccaatctttgtggtgctttcgggtttctgtgttctaatccccctgacccctgattcgcaggatatgaaagagacctctcgcatcaagtctagcttcatacatgccacgaggggcggatgggagcagcttcccctcctcaaggatcaactcctcgagtcgcaggaaaagctgcttaaagcttacaaagatctcatagcactcgaggaggagaagaaggtgagggaggctgctttggccgaggcccgagaggtctcgaagaaggcggaggaggaggcgatgcggctacgggagcgggctcttacggtcgaggaggccgtgtccagagcccgggaggaggccctgtcccacaagagcgtcatcgtggacctggacaaggagaagggccttctccaagccgacttggactccctccgcgataccttccaaaagatgaaagtggcgttcgtggacaatgaggtcgccaggggtgccgccgaggacgcaaagaagaaggccctcgaagacctcgagatggagcgagctcgatcccgcaatctctctgacgacgtcgagcgtctgaagggagaattgctggagaagagtggagccgtcgctcaggctggcagggtgatcgaagatctccacgtcgccaatactgagctggcgcgctccaacagagagatcgagcgtgccaacaccagattggtcggcgagaacacagccctagaggagagaatcaaaggtatgtttcctctgtcgactttccttttcgaggtgtgcttgagtttttcctaaagcttctttgtattggtatttatagggctcaaggacgaactcctggccgcccaagccgaggctcgcaacgccaaggctcagctcgaggctgaggttgctttgaaccgtcgagtgcggatggcaataagcgatctctcgacctcttgggaggtcgagcctatggatgagtcgagggaggacactcgaggcgacgccctgatcgaccagttgtgctacataggcgcaacactgcgagatcgggtgcgggatgctctccacatcggggtgaagcgggcgatggcggttgtctgctcgggcttctcctacgacatggaggtggtgtcccatggcttcgtcactgacatctccaagaccgacgcggagaacgaggagaggctccatgccttgatcgacgacgcggaggctcctggggaaaggttggccaagctcttcgagcctgaggtgctccctcctgaggctagctcgggcggaggtgagggcggtgaggatcgtgccgttgactgaggcctgcgagcctgctcagggcgcctgaggccccttgtacgatactttattaattttgctgttacatgatatagtatcttttcgtaattgttaactgcttatttgtctttccgctcgaggttcctttgtttctctttattcctacgtttgtatcccttgctcgatccttcgtcagaaacaactcgatttccgtagcccaggggcgtgggagttttccggctcattatccctcggcctttgaggggctcgaggtgccttagctactcgaaccgtgcgaggtttaccaagcaagaaaagaaaatttcttggctttttcgacgcttggggaggggtcgtccctctggtagcccccgagggggtgcggactatgatgggtcatggtcggcatccccttttgacgtcgagactataactcgtaactatttttggtacagaaagaagccgctcgagggaaagactttatttattcatgcgttcatttacaaagtcttcgtacaaaatgtaggatcgtaagtctaggacttctaggggtagaatcgacgtagctgttcgatgttccatgcgttggtgaagactgcccccttttcgtccgccaatttgtacgttcctggcttaaggacctcgaccaccacatacgggccttcccaaggtggggtcagcttgtggcgtccttggttgctttgccggcgtcgtaggacaaggtcgcctacgttgaggtccctcttgcgcacgtgcttgtcgtggtagcgtcggagtctctgctgatatctagcagagttgaggagggccatgtctcgagcctcctcgagttggtcgaccgcgttttcctgagtctctttgttcgattgctcgttgtaagccttgagtcgtggtgacccatattcgaggtctgtggggaggatggcttcagagccgtagaccatgaagaacggggtgcattttgtggccctgcttggcgttgtcctaaggctccataggactgaggaaagctcctcgacccacttcttgccgaacttcttcaatcgattgtagattcttggcttgagtccttgcagaatcatgccgttggcacgctcgacctggccgttagttcgagggtgggctactgcggaccagttcacacggatgtgatgctgattgcagaaacccaagaactttctgccagtgaactgggtgccgttgtcggtgatgatgacattggggatcccaaaccgatggatgatgtcggagaagaaaaggacggcctgctcggagcgaatgttggtgatgggtcgagcctcgatccatttggagaacttgtcgatagccaccagcaaatgggtataccctcctttcgccttttgtagaggtcctactaagtcgagcccccataccgcaaacggccaggtgatggggatcatctgaagagcgtgggcgggcaggtgcgtttgtttggcgtagaattggcacccatgacacgagcgtacgagctcgatggcatccgccacggccgtcggccagtaaaagccttgccgaaaagcgtttcctacaagggtccgtggggcggcgtggtggccacaagcccccgagtgcaggtcgtcgaggagttttcggccttcctctacggtgatgcaacgttgtaagacccccgtcgggctccgtcgatatagctcgttgtcttcgccatagatcacatatgatttggcccatcgagcaatacgacgagcttctgtcctgtcttctggcaactcaccgcggataaggcagtcgaggaacggtgtgcgccaatcgaatggtcgacccggtcgtcgttctatttccatcacctcttcctccatcaagagcgcatcgacagcattggttggtcgggcgatggtggtgtcgacgccagcccccgtgcctaggtcgacggatggctcgtgaagatcctttgagaatgcatcaggcggcactgtgcctctggtagatgcaatcttggcgagttcgtcggctgcctcgttgtagcgtcgagtgacatggacaagctcgaggccgtggaatttgtcttcgagtcgacgcacctccttgcagtatgcttccatttttgggtcatggcaactcgaggttttcattacctggtcgatgacgagttgggagtcgcctcggacgtcgaggcgtcggactcctaactcgatagcgatcttgagaccgttgacgagggcctcatattctgcgacattgttagatgcggcgaaatgaatcctgattatgtacctcatgtggacgcccaagggtgagatgaacagtaggccggccccggccccagttttcatgagtgacccgtcgaaatacattgtccacagctccgcctggacctgagttgggggaagctgggagtccgtccattccgcgacgatgtctaccagggcttgcgatttgatggcctttcgaggcgcgtaagtgagagtctcgctcatgagctcgaccgaccactttgctatccttcccgtggcctccttgctctggattatctcgcccaaggggaaagaagagaccaccgtgataggatgaccaaggaagtaatgctgtaatttgcggcgggcaaggattacggcgtagatcagcttctggatttgggggtaacgcgtcttggtctccgaaagcacctcgctgacgaaatagactggcctttggactggcagcgcgtgaccctcctcttgtctttcgaccaccaccgccgcgctgatgacctgggtcgtcgacgcgacgtagaggagcagtggctccgcaggttgaggtggaaccaggactagtgccgaggtcagcgtctttttcagtttttcgagcgcttcctcggcctcgggggtccaagaaaaacgctcgaccttcttcaggagacgatataatggtaatgccttttctcctagtctcgagatgaaacggctcagagccgccaggcaccccgtgactctctgcacacccttgatgtctcggattggccccattttcgtgatggccgagactttctcggggttggcctcgataccgcgctgtgaaacaatatatcctaggagcatgcctcgaggcacgccgaaaacacacttctcgggattaagcttgatccggctggtgcgtaagcagctgaaggtaacctcgaggtcctggatcaggtctcctcgtcgctttgacttgacgacaatgtcgtcgacgtaggcctcgaccgttgagcctatatgttcgccaaatacgtggagcatgcaacgttgatacgtggctcccgcgtttcgaagcccaaatggcatggtcacgtagcaatacatcccgaaaggcgtgatgaaagaggtcgcgagctggtcggactctttcatttttatttggtggtaaccagaataagcatcaaggaaagaaagggtttcacatcccgcggtagaatcgacaatctgatcaatgcgtggcaatggaaagggaacttttggacatgctttattcaaaccagtataatcgacacacatcctcattttcccattctttttcttaactaatacagggttcgctaaccagtcaggatgatgaacctccttgatgaatccggccgtcaaaagcttgtggacttcctcgccaatgatcttgcgcttttcctcgtcgaatcggcgcaaccgctgcttcactggcttggaaccggctcgaatctccaaggagtgctcggcgacttccctcggtatgcccagcatatccgagggactccatgcaaacatatcagcatttgcacggagaaagtcgacgagcacggcttcctatttggggtcgaggtcggtgctgatcgtcagcaccttgccgtcggagttgttggggtcgagcgggatcttcttagttccttccgccgcctcgaagctgcctgcatgacgtttaggctctggagcctcagcggccatggcctcgagctttgcaacgagctcggtggagttctcgaccgcctccccgtactcgacgcactcgacgtcgcactcgtacgcgtgctcgaaggaggaactgacagtgatgacgcctttgggacctggcatcttcagcttcaagtatgtgtagttgggtatagccatgaacttggcgtagcccgggcgcccgatgatggcgtggtacgtgcctcggaacccaaccacctcaaaggtgagggtctccttcctgaagttggccgccgtgccggagcagaccggtaggtcgattcgacctactggcagtgcctttttccctggtacgacgccatggaaaccgccggcgctcggctggaggcgtcctctatcgatgccgaggaggtcgagggtctcgaggtagatgatgttgaggctgctgccaccatccatcagcactttcgagagtcgggtgttgatgatgatggggtcgacgacgagcgggtagacgcctggggcgactaccttgtcagggtggtcttctcggtcgaaagtgatgggagtgctcgaccagctaaggtactggggcaccgccattcttgctgtaaagacttcgcgacgctcccttttgcgctgcctcgcggtcaactgagtcgaaggcccgccatagatcatgtagcagtcgtggacggcggggaagccatcgtcatctttgttgtcctccttgccgccagccttctccttcttggagtcatcacgcgcatcttttttgaacccctgaccgccgaaatgctttctcagcatacgacagtccttgagtttgtggttggcgcctcccttatggtaagggcacggctcctccaacatcttgtcgaagatgcctccctccggagggcctcgcggcttctttcgatccatggcagcgacgaggtcgtcacctgaatcttcctggtggaactgccgcactttctgcttctttttatttttcttgaggcctcggctggaagttccaccttcattgacgggctgcttgccttttcttccttctgagctgaagaaggcgccgactgcctcctcccctgccgcgtagttagctactacgtccatcagctcgtcgacggtctgaggtcgattgcggcctaattcccgcaccaagtctcgactggtggtacccgagacaaacgccaagatgacgtcgtggtcggggatgtgtggcaactccgtgcgctgcttcgagaagcgtcgagcgtactcccgaagagcctctcctgacttctgcttgcatttgctgaggtcccacgagttccctggccgcatgtaggtccctttgaaattaccctcgaagactctgaccagatcaacccagttgtaaatctgattggcagggagttcctcgagccatcgacgggcggtgtcagagaggaaaaggggtagctatctgatgatggctcgatcatcccctcgagcgccacctagctgacaagccagcctgaaatcggccagccatagctctggcttggtttctccattgtacttcgcgatgctggttgggggtcgaaatggactaggcaggggcgtgctgcgaatcgccctgctgaacacccgcgggcctggtggctcgggggccacccggtcctcgtcgctgtcgtacctcccaccgcgatgcgcgctataaccacgttcttccgcgtctccgtgccggcggcgtctattttctttgatgtcgtgtcgcgcgtcgtgtcgacgttgattgtcggcagggaggatgagagtagtctttctacctcgagggggaggttgttgctggacagacacctcctcttcgattagaggctgttcgtcgcgcttctctgtggcagctcctcgtcgtcgagatgccgaactttcggcttgttgaactgctgccacctggagcaacgtctgaacttcatctcgaatgcgtcgggcctgggaatttgatggttctggcatgttacgaagcagcatcgtcgctgccactacattctgccctgctcgagggaaacggccgacaggttgctccggctctgcgtcaccgacgatctgtcgatgtacctctcgagcgcgtctgcggacacttccacccggcgggtagggcaggtcttgttcgaggatttgctcgagcaggacgaggcgctcgcgatcttcgtcgagcttcatcttgagctcccgcagctgcgcgagctgcgcagttctatcttcctgaggaagagggtcgagccgtccgtcgttcccaggcgtcctggggtcttcttgcgccgcgggggctcgaccacctgcagcagcatcccgtgtctcgtcggtggtttctgccgccccgtcgaggtgatagcattccctcgtagggtcatagctgtctgtctcggaatcggagtccggttcggcagcgtggaaacacccacgtccttcctccagccatcgttgcctgagggaggtgatcgagtatcgtccggggcctagacggcggaggcctcgtactcgggaaaggtccggcagttcggacgccggccgccgcgcttcagagctacgtgggatgaccattggtctttccacgtacgtctgagcgtttgggcatatcgtcttggcgagcgacgccgcggcgttgtccaacccgaacggcagtgccgcccttggggagaacaacccgtgtggaagtagcctagctgcggtgggggagggcgcgcgagacgcgtttccccccgccgtcgcgcggtgctgagtcgtcgtgcttgttgctcggtcacacggtgttgctgacttgtggcccgcatcctgccttgcgcgagttgttggtcgtgccgaagcagaggggccgcggtggtgctgcccgcgcctcttcttaggcggggaggcgtggtggtgagggcgtctcggagccttcaatcgtgctggcgtaacgcggactcctcctggtcctttgactgagagcaagatcatgtcgtagccggagcccgtaaacatgaactcgagactcccaaaccaaatcaccgtggagcgcggaaacggcgaggcaagagtagccatccggaaagtggtgggaaatcggtgaaaaacacgcaggacccctacctggcgcgccaactgtcggtgtttttcccccgggggggtcacaccaacgagtaaatttgtatgcgtgctcccctttccggatggtgatgcaagaagacacagagatttatcctggttcaggcaagagaaggccctacgtccagcggggggagagagtttgtattatcttgcacctaagtgcttgtacaggggcgaatacaagcgtggtatgaagtgtgtagctctactacgtgtgcgtgtgcttgtgttgtgatgtccctctcttctattcatgagtctctccttttatagctccaaggagagacacagggtacatgcgtagatgttagagtagggatcgatagccacatggagcgctgacctactcgaggcttccgtacggcatggcctcgagccgtcccatcttgatagcctggtgatgattacgcgtgctcctgcgtgctgccctgccagccgccttgtgctggttctgaggtcgcatgctcgtatggtatggtggcggatccggcggggcagctgtggtgttgtcagtcgacgcccaacttgtccctgggaagggaccttgttcggtcgggggtcgggcgccgcgtaatatgctgatatctggagcgctgaccttgggtgtctcgagggggtcccgattagacgttccatccttgtttcctgcgtcctgacacgccctgggtcgttcggtgggaaggctgcaaaaagaacgatgggacagaagcttgttccctatcacgccttccgtgacccgtgtgttaggtgggaaacgtcagatgcattcaatgctcccgcccgcgtgcgcgcgtcaggcggcggacagtgtcctggcgctcgacgcctctcggttcgctcgagcccgcttccgttttcgacggtagtcgtcgctcgagccctgaccgattcgctcgacgctatttccgtcttcgaggctgcgaccgtcgatggcggcgcatacgtaagattaaagcgtcgaattgagggtcccaaccttcgtacgggcaatctcataatgcgcatcgctgagggtaccccttaccgataccctcgacaaacatctaagcaccacgctcacatgtgatctatcacctaactccctcgcgtcaagagctaagcgctttgcaaacttatacataaactcattatcaattagaactatatcaaatatagaactagagcaaactaagaacataataattagagacataatgcaattagaacaaagaattagagaaagatatgaataataccaatctttattaccgaagatccgaatccagagcgtagtgctctacttctctaattgctatctaatcaaacctctaaacttgaaggattagggagtagctaattctaattctctgtgggagagaagctctaaaccctaactttgatggctacctctgaataatgatttcttctcttctcctccaggggccagggggtctggttttatagtcccctcaagtgaacgtgagccattggatcaaaccgacatagattgtatggtttagattgatcctttaggtcagtggagcgtagtctcgaagcagagtcctgatccaactccaaccctgggcggtcgcccaaggggggtgggcgggcgccctgcccccgagcctgattcccttctcgttcgttcaagtggcttctagattcttctagattgaggaaaattgcacgacacgcaattatcttgttgtaaacatgacatgtgggccttctctccatattatctgataaccccctgcagaaatagataaacaccaaagctcgtggaattctgtcagataaaaccctaattctagatgtttgtttcatattgatcctttttcatgtttatttgattattaattttagtacttaatgaccgtcaacaaactcccccaagcttaccctttgctcgtccctgagcaaatagctaaacttagacgaatcagaagttgcttcgatgttttctttcctgacaggcacacatgcttttacataaaaattcttccagattagagtgaagtgttatggagtttagtacctgcatttaaatcttaagtaatcgaaagacaaaatagttaagtcaagcactattcctcctgtctatacttcacctttgttccagagtttttcataagttttcaaaataaaactcagagttcccagcaatgattctctcaagtctctctatatgtggtatttgtggatccttatcaaaatgtcacttacctatagctaatggaatgtttaagtggagctcatagaagtgaaaaacagctcatacatatgttgtctaatcgagccatggatccaaaggaactcaacatataattaaatcaagatgtgcatgtgtgatggagtaaatgatagtgatggtaaaaaatgtataagtgataataaagcttagttctcattgctcctcatattgctatctctcctcttctttgatctttgctttgggagaacatgggctatctttttctctctttttttttcaggtgggtagtagatacccctaattctactgtcggacacttgtccattttttcctctcaagtgggcatctttgtacccctaattctacttcgggcacttgtccatttttacctctcgtctcactctttttctttctttatcgaggttccgggcacttgcccctttttatttcctcgtatatttttgcataacccatgcctcttctgcattgaatcttttagagagagagaataacaatattcaggacagtgagtgataatatttttagcaattttaatgaatggtgatggatagtgtagtagatgtgtgcaagtgaatatcttaatttaaccacatgaaaagctcctaagggtctacacagctcgatcaaactcaatgtaaatatagtaaaagatgttatagcaagtatggctgtggtaggtagttttgtatgctaggaactcatcatgtgatttgtaagttttcaaaataaatctctagaacttagtgtagtaggaacaagataaatagtagctcaactttatatcatgactttctcttacctagactttagttttatgcttcccaaagaaagtaatttcagttttaataattcctggaagaactctaatatagaagctaggtacttgtaagtaagcaaacagagcaactgttcatcatttccatcttgtatctttttggtatttttatttttctagagattaaacttagcagattaataaagcacacgtatctacacacactatttttattctgttttataaagtgcagtaaattaaagcaagaaaatatttatttggttttctaagtttttttccttttaagataaaatactaaaatagaaaagaataaataagaagggcaaataaaaacttacttgataaatttgggaggaactccctcaagctggatgttgacgtcggtcttacccgatgttccagaaccgcatcatagttgtgatgttgtcattcattgttgttgtatcttgtctcagctcttgtactgcagcaacatggtcctggttccatttttgttgttcttctaggagtcttccatgttctgcttgcgtgttctggatgtcgaggagagtgttgtcagtacgagtgaagaaagcaccggcctcttgatagtagtcattcgtgaaagcgtaggaggcgtcgaagtatcgtcctgcatcaaattggggtggaggtctggatcctgaagctccatatggatcagtggagtacctgcccgtatgaaaaggcgggtttgtccactggtgatcttggctctccggccatgtctcttctgttggctcttgtggttgcgcatgacgaacccatgggtctcgaaggactcgggggttgtaatcgcaataatgcaggtgcgctgcttattctggtctagggtcagctccataccagtgcgttctcggtgagtagtcatcctttccgatgtcactcgctgtggagttctctggtttaccggtgttactgcaatctcaatcaaaaagttttgaacaacgtagaggccaaggttcgggttaggtaaccgaatcttgcctttatcatcatatagcatatatattacattcccctctttcttaattatccgagcctgtctaaatgtgtcgtagccacgataaattcttaactcatctatgaagtccaacgatgagttttctagtaagtgaagattagtggctagacgagtgataagtgaagtatatcctactggtccctgaagactaggtatactaagccaatgtgaaactaatagtgtaacaggtgaagtgggtactttactaatagcagcatataaaagttgtaaatatcctactcttactttcctaatatcgtcacgatagaaaagattgtacccaagccatttgtggaacatcctaagagtggggtgttccatgtcactggttcgggcttgactataaaaattatctctagatatttccctccaaaactggtgtctctcaaagttgggtaaatcggagtcaatgttcaggatgcatcttgaagagaaaccaagatggtcgcttagctctctccaagacaacataatttcctgtttgaacatccaaaaaacaattccccctcataatattgtaaagtgcaaagaaattcgagggtgagaagacgagaacccagctcagttatattccaaaaatttgtccaacccatcatctgaaaaaataagtcaaattcagtgtccatacctgtttcttgtagtaggattggatcgagagtaggggtatgaatgaaatctttattcttcaattgctgatagacttccttctctcttcgggtcttcagtcctaggtctcctatcttgagaaggaccttaacttgctgacctgatgaagatgatggagcttgtgtgggtgtcgggtcgacgctcatctctgatggctgtgaggagtgtcgggatgaactccttgtaccaatgttcttaagagccttccctgcattcttcaccttcttaaacatcctgcaaacaaaagttggcaaaaacaccactagtggaaaatgtgagagaaaatgttagtggtcagctgtccggaatgtcagtagtccaggggttaatcgttcaaaacaaatttctattttggtagagctccctaaacaacttttacttccgcttggacagcgggatcactacttgctaggtgataaacactctcccaaccttctcttccactcttctctttctctctactctcttctcttcactacaagagctccttctcgggaaactgaaacttgtgtggttttctggagtgtttgtgtgaagaagatggaggtagaatgtggctatttataggaggaagagggacagggtgggcgcccttggtaggtgggcgggcgcccacttatgatgcccatcctggctgccctctctccactatctcctttgcttaatctttaagcaaaataatgcatcatgggtagtggatggccggtggaaaagtgctggttagtggagacatgttggtggatgaaataatgtgatgggatgtatgtgaggtgaagtgtatgacatgtgggacccaaagagtgtgggtcatgcttctagaaggttaatataattaattataatgcaggaaaatctatgaaaattgaaacttaattaaaatgataatggaaaatatttttgtgcctccacaataattaataaatataggttgttacacaccacgaatattatttatatggggctttttgattattataattatgctatgaatgtatgactaatgcaagaatttaaatatgagaaaattaataatgcggataaataccgatttacctcccggtgagggtttgggatttttaggtcccccaagctggacctccaaatcttttaatcttctgagttaccttcctccagagatggtgtctccagtggttcttcatgaacttccttcactgtagagtctctctctggtctgggtttgaatgtgaagtgttcttcttgaccgtttatgttgaactcgatttctcctttttcgacatcaatgtgggcattggcagtgctcagaaatggccttccaaggatgatggacacttttgagtcaggactcatgtccagtactacgaaatctactggcaccaggaaatctctgatcttgactggaatgttctcggcgatgcccaacgggtgtcgaaccgattgatccgctagttgtaggcacattgatgttggttctaaggttgcatgctcaagctttttgtagactgatgctggcatcacactgacacttgctccgagatcacaaagtgcattgttgaagtgttggtttccgatcgagcagtcaatagtgggacatccgggatcttccttcttctttggtgatttgttgaggatggccgcactacattcttccgtcagcttgataacctcagtggtgggcagtggtctcttcttgttaagaatatctctgatgtactttgcatatgtaggcacctgtatggcatcgagtagaggtatgttgacatataatttctgaatgacctctacaaacttaccaaactgctcatccgactgcagtcctctgtttcttctaggaaatggcaaatagttagtgtcgtaaaaatctttcctcatttctccagttcttggtggttgtagcagatcttctgcttcaccagggctttcttcttctatcactgctggttgtactggtgctgatgttctttgtttctcttttgggtatgggggatctctggttgctttgcctcctctagtagttatattctttacctgctcaaggttagtagcaacaggcagtgcagcagctatctttattaatttaagctctacccttttattaagagtgttttgctcatcaaaggcagttagtagaaaatccattttattgtgtatatcttttagagatgattcatttgtatctagcctttgtttaacttcatcattaattttggtttgttgagcaattatctcttttaatgaaagttgcttgaaagtattacctgaattcatacctttgctattgggttgacttgaagttggttgatatttgtatgctgtctcaatggccctttgatcttctttgaacttggccctctggtcaatccagtggagcaaattttccatcttagttgataatgcatttacttcatctggtatttcttcagtttgatgacattgttgagttttatcttggaaccagctttggttttctgctatcttatccaaaagtatctctgcttttccagttgtaagctccaagaatgatcctttagcagatgcatctaggcactcacgagccttctgggttaatccatggtagaaggtctgcataagtaaccatgtggccattccatggtgaggacagtctgaaatgtatccttgaaaacgctcccatgcttctgaaatggcttctgtcttctgctgttggaaactgacaatatttcctcttaaggcagttgttttgcctatagggaaaaactttgatagaaaggcatttgacaagtttgtccagttgttgatgttatcttgatgagtgtagaaccacttccttgcttttccttctagtgagaatggaaaaaggcgaaacagtatgacgtacttgtcaactccgttgatgtggattgtgcttccaatctctaagaaattctgcaagtgtgcactagcatcttcatgtgcctttccactgaattgtgtagcttgcaccagattgatgaggcttgacttgagctcaaacttaggtattccttcttctactgcaaatcttggaccagttggaatgttctcaaggcttggagcagagaattcttgtagggtcttctgtgccatagcttcagcaattggtagctagcttcttctttctttcttgattgctttggttctgatgatgaagagttgaatgtacccaaagtcaatcctgatataccttgtataaaatataaacatagaaaaacaacagggtgaacctgccaaagcagaggtgccttgttatgatttctcacttagtagctgtttttatgcaattatttctctatagtctagtctaatattttatatgaataaccttgactgattttctggctttcctaagtattacctttttgttcccctttatgacttattcctgagactcgtataaatccccggcaacggcgccagaaatgcttgttgacactagttaacaccacttagatactaggttgtcatccctagcatgatgccagagtgtacaaaggtatttataaatgtaaaggctctctagaaaataatctattctatccgcaagcgcacagataaaacacctcattgtagcattccaccaggataagtattccaggtatcgttatttataattttgctcaagggatgaaattaaagtaaagggggcaaaatctatcaaggcatagactagagataaacttgcaagaacatgaatactaatgagaaactcgtcacacagtcacttactttagcagggggtaaaccataaagataatgataataaagtataagttcatgggtagataacacagcgattagaaaatagactactcctcatatatgtaggtgatgtcggattagctagagaatggattctaagttatctactaactactaagtcataatctactctagttatctacaagatcatatatagcataaaagactcttcattcatgtataaggaacattgataaagtaaatcagagcatcgcatgacttactccacaataccggttctgcctgtcctatcaacggagggtggactatataagaatcaacgaagctgtcactattgcgaactaccacacgacccggccaataggatacatttgcagataataacatctaagcaccacgctcacatgtgatctatcacctaactccctcgcgtcaagagctaagcgctttgcaaacttatacataaactcattatcaattagaactatatcaaatatagaactagagcaaactaagaacataataattagagacataatgcaattagaacaaagaattagagaaagatatgaataataacaatctttattaccgaagatccgaatccagagcgtagtgctctacttctctaattgcaatctaatcaaacctctaaacttgaaggattagggagtagctaattctaattctctgtgggagagaagctctaaaccctaactttgatggctacctctgaataatgatttcttctcttctcctcttggggccagggggtctggttttatagtcccctcaagtgaacgtgagccattggatcaaaccgacatagattgtaagttttagattgatcctttaggtcggtggagcgtagtcccgaagcaaagtcctgatccaactccaaccctgggcgggcgcccaaggggggtgggcgggcgccctgcccccgagcccgattcccttctcgttcgttcccgtggcttctacattcttctagattgaggaaaattgcgcggcacgtaattatctcgttgtaaacatgacatgtgggccttctctccatattatctgataaccccctgtagaaatagataaacaccaaagctcatggaattctgtcagataaaacccaaattctagatgtttgtttcatattgatcctttttcatgtttatttgattattaattttagtacttaaggaccatcaacaccccctacgtccggtgctcaggagttagccacgtgtccacctttgaatcttgcacgtccaactcttgcagtcaccagtggaccaccggacgtgaccaagtgagcaccggatgcgtaaatggacgaactaggctcggaactaccacaactactgttccctggcaatagcaccagaaagcttgttgggtattttaaacgcacacaaaaaaatccccaagtgcacggatactgatgtagctttcacccgagagcattccaaggtatcgattttccatagggaacgtgaagtgtactagttgagttttagaacgcctaaggataaatatatatatgtaggaatcaggatttactctaaggttacttatcttgggacatcagaacactaaccatagaaagagatgagataggggctaggaagctctgactacggtcctacaacaccaatccaaacgtggtggaatacgccgttgtgactgtcacgatcctggggcaaccacaataatacgctggattgggtgcaattctaggtaattgccagactaagcaccacacttaacctattaattactactctagagtttcaaagaaccagagcatttgatgcaagcaggaatccaataaataacttaaaagtaaatatgaaagttaaataacaacttaggaattatataatttaagtacctggagattaaccaaagacgaactggtggttgcaaaaatacaatgttgagcaagatccaacagatctggctcctccttggctctctcctcttctctctccctctaatctagatacaactagacaactagaactagaactagaactagatgaactagagggacctctacttttctacttgatgaaaccctagtttttgctctagagatagctaatgaagaagatgaaggagatgcctctaggggggtcagggtctttatttatatccccctaggaagtgttgacacttgctaacaccacttgaatactaggttgtcatccccagcatggcactagagtgtactatggtatttatacgcacacagataatccgcaagcgcacggataccgttgaagcttttacccggttaaaggttttatcgtatccacagggaaacaggagaactgatctacgctctaacttaaccaagataagtaaataggtgtaaataggaaagatggtggaatcgaataagaacaatattaaaggtaaaataacagtgagtgataatatgggaatagagaatagagcaattctagtatatgggcgatggtagcagaatagagaggataactatggtttctctacttcaaaggggtatgtctatgtctgggacgaaccacgtgataagagtacaccacaaaggatgcttatccttaggccgataaaccctacccgtcctgctaaagagaggtggactacagtggaccaacgtaactgtcacctacgcggcctaccacacgatcaagctagacaggggatatccacaagtaatctagatctaagcacctcgcttacacctatactacaactctcacctatagcgtcctatagattagaatactcaaaagagttgtgaaccagaacatacatgattagtaattgcataatgaattagaatagattaccagagtcatcccatgagcaagcttcattagagcttgatcatgacgaagtacaaccgaaggaagaaccgacaggccggcctctcctctaatcctccttcgctctccatcttgctactatctagatcttctctagtttagagaagagaggagagctctcatctctaaaccctagcttttgctctgtctatgaataatgaataatgatcaaggggtgcctcctctagggaccagggggtctggttatatagtcccctcaagtgaacttaggccgtcggatcaaaccgacattgattgaacggttatccttgatcctttaggtcggtggagcttggtccgcaaagttggacgtgtttgactacaactcctgggcgggcgcccaaggggggtgggcgggcgccctacccccgggcccgttcgccttcccgttcgttcccgtggcttctggagtcttctagatgacgtaaaattgcgcggcacgttaatatctctatgtaatcccgacgtgtgggcctttcttccatatttcctgataaccccctgcagaaatagacaaacaccaaaactcgtggaattctgtcagataaaaccctaagtatagatgttggttgtatttggatccttttctttgtttatttgataattaaatttgatacttaaggatcgtcaacaaactcccccaagcttacctcttgctcgtccctgagcaaggatagactcagcgatggatcagaagttgttgcaatatctttaaaaatttgacggtacacatgcttttaaataagatctcatctctgagttagagtaaactgtcaagaactaaaacttacctactttacctttcaccatgggacttgtaaccgtcacttctgtcttgagtagttaaaagatagaacagtctagccaagtgccatgtctcttattcttgatcagctatagctctagaggttttgcagattttcaaataaaactcagagattccttgtatgactctctaaatctctcttttgtggtatttctggatccttactaaggcaatgatggtatatgccttctctcaagatatatggtatttgtggcataaggcatagtgacattgccttctctctcaccctactctaataaggctttaatatctggagctcataggtgggagacagctaatacatacttataagacatttattgcatagtcaaaccatggatccagagaaacaagtcaataagtcaaatcaagatgtgcatgtgtggcgaatgaatggtgtatggtgatgatggtgataacaatggtggaagtctaattctacttttgctcttttgaggggatacataccttccttgctttttgaaactttatgaggagaataagacgctcttctttttctttcctctcaggtgggtatcttgtacccctaattctactgtcggacacttgtccatttttacctctcgtctcactttttctttctttcgaggttccgggcacttgcccctttttatttcctcgtttatttttttagagcactcatctcttgagataatatagcaagtggtagtaacaagataacttgagcatttatttcacaaggaaaaacagaaatatttttggttattctctcccgaattaggagtagaatatttttgggtggttctggagatggaaatgagtggatatatgtggatggtacttccggagtagaagtagcatatatgagtgaatgtgcaagtgaaatcttgatttaaccacatgacaagctcctaagggtctacacagcttgaccacactcaatgctcataagcagtaaatagtaaatgtgtggctcagagtctagcaagcatgtatatatggctgtggtaggaatttaaactctcatcatacaggaactcatcatgcaatattttaaagatttttcaaagataaaattctccagaattctagcatctctaggaacagataaacagcagctcaaccttcccgtatcatattcgttaacaacttagatttcagatcaagtttttattccacaaatttagatctagagcaagctttaaattataatagttatgcctaaacttgagagagaacttcaaatttgcaaattaggcagagcaactattcatcatattcatgctagagttttattattaagattcatattagcatagccactttatttattaaacacactaagcaaaagatatatatataagcacaaaatctttatttggtttttcatagtttatgtattttaatattctaatataatataagtataaagataggtagaaatacttagcgagataaatgggggtgctctcccccaagctgaattttgacgtaatttctcttgatgtagctagcaggtggcagaggtgtatttgaaagtcagcagcattctgacagcgattagaatgtcctccatctgctagtcttcttgattcttaaattctgtggagctcaaatagacaacaaagcttgtggaactaattaagtgttagcataaatatctagccttcatcatgttgagcttcctcaataaatattactccctgtttttatatttttattttataaagcagaaaagaaatatttattttatttttacgccaccacagtgaaggtacttatgggttttatgccactcgtatacacacatggggcttagtattttttaatatttttattttttttcaagatagcatgattaactaataatctatttaaggaaagtaaataactaaagggaaaagggaatgcagaaaggataaatatggataactaccgatcttacctttcggcgagggttcaatgttttaagtcttcttaacaagacttctcaccgtgttcattcttcaggtgcgtcatttgattcaggtgcggaccttgacgtatgcacctcttgatactgtgtcacccatgttcttcgtttgcccagcagttcgaagtgcggcgttggcagtaacttgctcagtgtgtttgtgctcgtagatccaggtccttcacttggtagagtctgagagttataaaactcctccgtgttttgctcaaagtgtacctgctcatagagacaaggcagagatcaagtgcatgggtcctgttggtggaaaacaccaacagaacctaaagtgtatttgttcttctctaaccctaagcatagtgagcaagacaaagttgatggatgaaaagttcatgagtgtagcacttataacatttgtcagatcagatcgctcaaccttatggaaagataatctatctatgtatatgtctttttctttatatctctcaatgattgaatgtgtaacttgttagctcatatgattaggagtgtgggatcatggaggtagtactaagaacaaggattaaaggactaaacatgttgaatcagttgggttggttaatctagagttgtaaatcatacatgtttgtctcttttatttatatgaacgccagaaccaaggagaagcttataaaagtgatagtcaagtaccttaatatgttaccttgcttgaagagtgatggtacagtatcaccttgtggaagctttcctttcttagcggttgtgcatcatatttgtggcaccctccatggatcatctctctatgatgaatgagctatgtccttcttgtgcaaattgtcaaacttcatgtgtcactctcttcgtctctgatgtgagtttatctcaggacttcccaaatcgatattgaaagttttttttctgcaggggttagtccgacaaaaatataccaatgtctacacaagcagtttttagttcaataaccgaactagactccatgtctaatcagattaaggaaggctgtttaacctaagcaccatgcttaatttaaaagccaatagaagtatgtgcagtacttccaaactaacacttactagtaaatagacaaaggtaacatgacagcatttatagagatctactcaagtggagatgaagtagtgtgattactatttaacaaattgagcatgttttaaaggtagggacaaccaacatagcaacatggcaaagaatgtttttatgtaaagtactccctcaagcttgaattttgcagaattcaagtttggatgaatttaattcaatgttgtatgatgattgattggtcataccttgtgcttgtcattcatcctgtaaaggttagtgacaagaatacccgaaggaatatttttacaattatccttatatgctcaatacacaaggtaatgttgtaaataattaaaagctcatattacgatctgatcagtgcttattttaagacactaagcttgtccttgggaaaccatcaatttatgtcggcgaagtggtttcccttccaacgctaacctaaatcaagatcaactcaacgagatctgcaatatttattatagacttatgcatcgacaaccgcccttttaaagtttttataaatagaaaggaagagggggttggagatctcaaatgtggtgatgttggagagaccaatagattgggaagatgttgcatatgagcatggagtaaacaaagtggctatgaaataaattccatgctcgttaatgttatcttcgtctccaatctgaatgttcagagttcctcttggattggtctcacttatgtcctcttctatagtttgatgaatcccatcttcaaagggagtcaagaactcatcatttgaaattgaaccaaagtcagaattcattaaggcttcttccttatccatccattctacacattctagccatttagaacttgtgatcaggaaaggggaggtgttagaattttcaatatggcttagctctccttcacttgatatgtcatcctcgacttcttcataacaggaaccaggacattctctaagagaaccattattgcgaggatttgaattatccctgcttgaaggtctcttatggaaccagaagtctaaaccgtcagcatctggaagatttaaggttggaattccttcctcccttggagaattttggggtattgatggtttaggatcgatagctaaagtttggaattgaagtggttgtgatctggctatcgaaacttctccttcttgtctagaaactggttctgtctctttctcagggatataaaagctaggagactttccacttaataaatcaatcaaaaaccaagcttcactagcaggtaggtgatagaaggatcctctagaggctgtattcaaggtttgcttattttccccactaaggctctcaaaaaagtgaattagaagaacttcttctggaatagagagctttgggccagtgagagtaaggttaataaagcggtcccatgatttcctaagcgattcttcttccagttgtctaaaagaaataatctcacgccgaagttccgccactttgggatacccagctgggatacattgattcacgaatcgccgttgttattacggtatgacttagctatggtttagcaccgtagtaataactgaaaattggaagaaaataaaatggttctgattgcttaccacttgcttgaaagtagcatagttgcttacgtagaatggttggctgatgaactatataatgatgactgctaataaaaagtgaacataaggatgcatatttagtaatgctttatgctaatgcaatgaacccacaagccagataggcttgcatatccttagagtcttttatttcctcctgagggataagttttgcggagtactattgagtactcagggtttgttctaccctgttgtaggtaacagattattgtagagctaactcttaggtgtggattcctcctagtggctcgccgaggatttcctttatgatgcagacttagagtttatttctttataaccttacaccgaaaatgttttagaaaagaaaagactcacaatctattatcattcatgtatatcaatgtttatactgttaatgcttagctggttagtaaataaatttttatttctgctgaaactctgataacgtagtcatgttcctccaatgtaatactttgatgttgtattaaaagtgatgtaagaaatgactaacaatgttagctttgttctttcatttatgatcttactgaaaaatgtgttctatcgagttctccctttggtggacaaaattgaatggtctagtgctttctcttaagtacttagcatctaatggaagacaagtactcctaggagggcattagattaggtggttctaccacattttctattcttagtcagttggctactctgtaagaattgatgtattttcggtgatggtaatggagatgggatttcctcgtttcaaaaaaagctgaccgcctagtctcaacaccatcctaagcgaactccatcttcaagtctagtaagggggacaaaaagtaaggatgagtacgttgaaatatattccgtaagtatagaaaggtatgacatgaggcttcaaacaaagaaaggcttcattagttgatataagcacctaagtgacagcttcctgttgccttaaacattaagctcctattgaactaggtgaaaaccaccttatctttcgagaaccaaaacacaccaacactatgattccatccaagctatatctgaaccatccatcctcacccacaaatatcgactacagtaagaattttagcatatactgttcgcattgttatgtagaatctcagttaa

SEQ ID NO: 5138 - DNA, 1961 bp, Sorghum bicolor
  Intron number 10 from transcript Sb03g027990.1 (locus Sb03 g027990) derived from phytozome v7.0 (chr-ID chromosome_3; pos 55729022 to 55730982)
gaagaaacagtcaaagaggggcaaaaaagtggctggtattacttctgctcagtctactttatatttatactttgttactccctccgattccatgtataggtcgtcttaggattctttctagttgggtgcttttttaacttggctcatcaatatcaatattatataaaagttacaaagatcgacaactgatggctgatgttactagattcatcatgggaaatactttcatagtatataactttctttgtttaaaattatatatttatacagaaatttcaagccaaagtgctaaatgacttgcatctggaaccagaaggggtagttttaatgcatgtgcaccatgaatcattcagttatcatttggctattagactgtggattgttcttagctaggctgataccttcatggctgtattagaattgtttgggggtctttaaataagcagaatcatgcttttgttgtgcttgatcaatcatttacatgttccatttcttccatgtaccattagattaaatcttatacaaggacagaatttttagagcatgttttggaacctatacctaacaaccttgccagcaggaatagcaacaatggttggatatttgctttctttcctacttttgagctaggatttccttgctttcaatggagacaccactcctttactagagatgttgtcttttgcccttagtttttttatggggaaagttgcgtacatacagctgaaagtcatcatcacctggtcaactagccaacttggccttttttttttttttttttttactttcttggtgacatacctgtgtatttgattgttcttgttggaatataagtgaattgcccacctctccccatcaatttaagcttttggggtgaactggtcggtgcatgcaacttaatatggtgtcaaagccagagttgagtttgaatcctggttagcgcaattaaataaaataatgagtaaagtccatcagcggtccctaaacttgttcagatgtgtcatcccggtccttaaactcgcaaaatgaccgttgaggtacctaaacttgttcggttgtgtcatcctggtccctaaacttaaaaatctcccatataggtcctcaaacttgttcagttgtgtcatcccggtccctaaacttgtttttaagtcttatctgggtcaaaacaggacgaatctaaaaactctatattgaaaaataattcataactttttcatatgtactcaaatgaagataaactttatatcaaaattgtaggcagcaacatgatctacaactttgcagttgaaaagtttttaaattaaaatcgtttaggttcccaaaatattttttataagtttatagattttaaaatttaaaatttaaaattaaattttataacactaaacgacttcaaataaaaaacttttcaactacaaagttgtagattgtgctgaggactataactttggtataaaatttgtcttcatttgagttcatatgaaaaagttatgaattattttttgatatagagttgttagttcgctttgttttgacccagatgagattcaaaaccaagtttagggaccgaaatgacacaactgaacaactttgaggatctaaacggatgatttctaagtttagggaccgggatgatacaattgaacaagtttagggaccgagatgacacagatgaacaagtttgaggacctaaacaatcgatttgtgagtttagggaccgggatgacacgacagcacaagtttagggaccggtagtggactttactctaaaataattgctgctcgctcctattccacgtctgagacatgagggagcctcagtttaagcttttgggttgaattggtcggtgcatgcaacttaatagttctcttatcttatctacttagctttgttaaattattagattatgtataatgacatatttttttgtctggagtgatgaagtgtattttctttacag

SEQ ID NO: 5139 - DNA, 939 bp, Sorghum bicolor
  Intron number 4 from transcript Sb01g018310.1 (locus Sb01g 018310) derived from phytozome v7.0 (chr-ID chromosome_1; pos 18988814 to 18989752)
ggaggtgtgtttgtcacattgattacctttcttcaaaacatcttaggtccttgagaaatgcatatgacctgaagtaacttttctttgcagaagatttgtgaggaaggaagaaacacaagtgaatctcaccatgatacaaattcatcaactttcaggaagcttgaggctagtaacagtgaggagtttggcacaagagaactgttgtgtgctattgcagctgcctatgataaaatcaatacgacacatggtaaatttgaatttcattgccttgtctacacattatgtttatcttgtagtatacatggtagttcgcggcatgcttattctgactgtcggtagtttatatccacttgctatatacactaagcgtaagaattgttgattgcatattccacgtctgctgaatccaagaccaacatatgtctttttctgtcaatcattctgtgtttctaaacttaacaaaatatgcataactgtcctacactacatgattattacacctctagtaataccctaacatagagcaattagcatcaacttttgccatgcacaaacagggcaaactgatggagaacattgaacctgttatgtggtagctaggatcgagaagggtgagatggggaagcagcgactgcttgcgtgctacagtacctgcagagctacattacctgcaggtactgttcataccggatgttatgtcggcggctagggctgcgagggcgagaggaggccggccgggggccttgcccacggccgagcaagaggaaagtgttttccttcttaattcttacttgacctctaagcaagcgacctttatctctaattaaccctaacactaatgggctatggcaccagcccaggcccaataggtcccttacgtactctaacactacaccccacctagtgttacggcgctgggctttgctgcggaggttgtag

SEQ ID NO: 5140 - DNA, 2137 bp, Sorghum bicolor
  Intron number 5 from transcript Sb10g022530.1 (locus Sb10g 022530) derived from phytozome v7.0 (chr-ID chromosome_10; pos 50522717 to 50524853)
tacaagtcggcatcatattgcgagccacggtatggactcaaaatttctgttttcaaatatatttctggtttagattttcttttttcaagttaaaatttgttgattttgacttaatttatgcctatataagatatatttccttatgactttaacgaaatgatagatgttggtgatgtatttttctaaagcttacttagtaaagtttttaaacatcagacttgctacaaaactgaaacgcgcgccgataataagcttcatgaactagttgttctatttaacgtggttatcgcaatttagattctattagctaggccagccaaagttaacctactctcaaacctacaaattacattcttttttgaactgagagtgattttaaacttaacatttcacgattctgcttatataaggcatgtttggttgggtgtgtatacgggttggcctggcctctggtaggttgtttagatgtttgtgtgtcgacttaagctaggttcaacttaggcaaaattcctccgtcagcatggttccgtacaaacgagattgaaatccgtttcttgccgtcctggccaacacgatgtagtttgcttttgatgtatgtgttgtctctaaatcgggtcaaatgttcatgcaatcaattaacagtcgatacaactaggccagagcaatataatgaaccaaacattgagtcctacatcatcttattagcttggccagtgtgtgagcttgcatccaaaatatgagcaggttgattactttggttagagaagagaaccaaacatggatgttacataaaaaacctttaatttaagatttatgtggtgctgacgacgtcttgctttaacaatattacatacacacaacaatcacccaacacaagagataatcctacgtggaagaactagccatactatatgtacgtacaatagtacggtcaatattctattttgatgtttgacctcatgggtctaccattgacgacggcgccctgtagaggaaaggaaggaaaattgatgtgtgcttgacctggcttggaaaaatctttgaaatgtgacccttgaattgaactctagaaaaggtctttgaaaggtctaaggaaaaaacttgatcaaatctgtaaaatgatagtttagtggaagaaaagacaaaagacctttaaagaatcttgaccaatttttgtaaccgttgactgcatctatataggtcaaattggctgctaataactaaccatgctctccctttgaattggttccacaacacatgactccgcacatgactccctcaaacgtagttgaatgcgcgcatgctaaataacctgggcaaagtaacttttgttaatctatatgtatattctcctctcaagtctcaacaaaggaaatctatcagtagcgttcttctgaagtaacatacttttcaaagacgaaccaggaagaaacatatatataactaataataaaattgcatacctttcttaattctcaggcatttctgattacgtggatggaaaaaaaaagacatctccttttaaaagatttagcttctatttggcacacttcagcttaactagtgctttatgagcagattttaggtgaagctgagctatttttgaaaaaacagtttagtgggtcctgttcgcttgagcttatctatggtgtttttctctcataataaatcagtaaacaatactttcagctatgatttttaagacaatcaaacatgcttttaccaacaacttcatgcataggtgatagagaaataatagggagaaaactatgaaaaacagctcacaacacatgaagctgttggtgaagacgtgacctctggaacctggatggttcgtgatcgatgtatggatgatgtcatctttcaaattaagataccgtaccgtctacatctaggtgtactttcttaatcagttgtttctgacgccgtcatgctgacaaaataaagattcataactaatgactagtgtgatgaaggagagctttgaaaagtagtacaattgtagtagctaggtatgagtaacatggtcaaagtacttgttggtggtgaagcctgcctagctaacgatggaaacttaactacttgtcaaatgaacgatgcagggtggcaacgacgagctcgacgagacatccctcaa

SEQ ID NO: 5141 - DNA, 5913 bp, Sorghum bicolor
  Intron number 1 from transcript Sb08g005680.1 (locus Sb08g 005680) derived from phytozome v7.0 (chr-ID chromosome_8; pos 7971215 to 7977127)
caggtatatatgtacactttcatttcaacacatgcattccaagctattcgatgacagtttttcttttatttctagtatatcttctaatgattattaagcttactatatatccacccgatggaacgactagattatttttgctgtcaaaaagcatgtaatgttttcaagcatttcacatataactcaatttgatgcatggtctcaatgattttggagtactgtagcaaatgacatatttatatatactaccacaaaactgaatacccttgagggtcaaaaaccctcaaggaaacccctaaaaccgccaaggaaatcaatattggcggctagcactcaaggaatggccgccaagggtagagagacaaggaaatactatttccttaagtgccggccgccacaaatcaattccttgagggttaaactgtcaagaaaataaatcagtggttagatttttaacatcgtcaagaaaatataacgacacccaaggatataggtttccttgagtgccaatgacactcaagaaaatgtaaaaacacccaaggatataggtttccttgagtgccgatggcacccacgaaaatgtaaaaacacccaaggataaatgttttcttgagtgccgatgacccaaggatatgcatgaaaaaaaagagaaacaatctcatatttgttgtaggtgagaatcgaactcataacctgatgttccatgtgaaactaacttaccactacaccacaaagtcttttgtgactaagtgaatgtttctttctttttgttttcactttagtggatcttgtaatgaatatttgagaaccgaaatgatttcaaatgaaaaaagtttgaattataaagttttatatctcatcgagtacttaaagtttaaagttctaattatttaaaacatattttatggacctcaaataatttcaaatggaaatttcatcaactaagaagttgtatatctcttcgggctctataactttgatataaactttgcctccatacgatattatgttacattttagctttaaaataagtaggcatctcaacctaagtgctagtatatgcattctctaatgcatagcaacacaaaattataacttttattggattaatttacttacaaaaattatatatcattttccaaacatgtcaatggagcgtttatgtctataaaatgcaatgtctaactaacaagactgcaatgagttcactatatcggtggttaagagaaatatgactataaactgttttttccttggcagctacaataatttacttgagggtttacacccaaagaaactagaacttccttggcggtttctagttacacccaaggaaatgtgaattacttttggtggtttataataacacttaaggaaacatagaattaccttggcggtttcaactagcactcaaggaaatatagatttaacttggcggtttggttcagcactcaagaatatgcattttcttggaggttttatacaaccctcaaggtaattgtatatccttgggggtttaatttcgcccctcaaggaaattgctggccctcaaggatactcagttttctggtattgtgttttcactatatatatactagttggggaaactaacatcctttttccatgcatgtatggccctttattgtgttttcatcattaattttcacagatgcacactataagtaggtagttttataagattaatattgaagaattcaatactagtagcatataatatgcactttgtatatgttataaattttccaatgttattttttattaaattaacagtattttgggaagaaacttgatgatgttgactttaaaatgggccgcagccatattctatgaataaatatagctccctttagctaacaaatggagacacaattttaatctgggcttgttattttatgtagttcctaataaacttataatttcttaatttgaataaggaaatcgtggacgtaataacaaacaactgctcacactaagatattttttgctccctttattccaaattataagatattttgacttttctaaatcaattgattttactatgtatatctagacataagtgaatatctagatagcatagaaaagtctatggtatctcaaaatatcaaaacatgttgtcggtgtctagactcgcggtctaggcactaacaagtataaatctgcgtgactgaccaagcttggatggtgatgcaagtgagacacagagggtttatactggttcgggctaagaatgccctacgtccagtgtagtggtggattctgtataaccttgcacccaaaggtgcttgcagtagggggtacaagctggttgcgagagagggctaagtcccaggtttcggcttggtgtggatagagtgcgggctgctgctctgtgataaagtgttgtgtgcgtgttttggtcctgtgtcccttccagttgtgaaccctggctccccttttatagtcccaagggaaggccaggtatttacatgagtagatttcttttattgaggggtgaaaacacagccccgaccctgttgaggctggtccatctcgtccttgtgggatggttgacggcatagctgttcctgtagagggttaccgaaccctgtaggggtcgcgggggtaggatcaccagtactgctgcacatcctgtcaacagtggaaaatgaccacaaacagtggtgctgatttacctcacccattccctttctactgtgcggtagtgtgctacagtgaacaggggtaggggtgtatagtgacagaggtaaggctgcagtgactggggtggttgaaacagttgtcgccttgccctgccgcgttatgggggccgtcgcatccgtcatgtcgggggaagtcttgttgcccaggcggagtggggtccggcgcccgagcctggacggggtcgggcgagtcggaacttgcgtccgaggccctgaggggtcgggcgagtcggaacttgcgtccgaggccctgaggggtcggacgagtcggaacttgagtccgaggccctgaggggtcgggcgagttggaacttgagtccgaggccctaaggggtcgggcgagtcggaacttgcgtccgaggccctgaggggtcgggcgagtcggaacttgcgtccgaggccctgatgattgtgattagtatgtttctttgcgttttttgttgctctgatttgggtatcccttattatggtacccaacacatgttataagttattagaatagagtgtataaaataatgttttagtcttgattaagagaaagttggtatatttaaccaatcaatatatagtatattagtatgtgatttttgcacttgtgtcaagaagaaaaaaaaataaaatgtgcaaaattacctctagaaatagtttcataatatctttaatgtatgaggattcatagtagactacaacctagctatgtgtgaattctgaaatttccactggggaccaaagatgcaattctcttggcgtgttgctgatgattatattgctggcacttgttgaactttcaaagttgttgataggaatgaacttccaaagttgtgagcaattgtgtccttgcaaaaaaaaattcaaatagttcgtgttactactgactccaccaaaagtggaatagttatacatgttaatttacgccctcttttttgattcctgcattcagttggtaaactaccacttgaacttccttaaaaaaataaaattcatacagagaaagctctgcattgaacacgtatacaaaatgaaaacttccaacattttagggttacaaaatgaaattccatattctgctcaataaattcgatgttccaacttcatataagcaaaaccgatccttggtaaaccatgatattttctctactcaatacaccaagtcacactcagaataaatatttcaacttcatgagaatgacattgctggttttcatgaaaaaaaatcatccgtggaaaaatcttgttccagctagctccatgagaaaaatattcaagattacaatatatggaaattgttcagcttaataataaaaagctacaaccacagaagattgttctggtcaatagaaaaatattcctctccataaaaaagttctagttgataaaaatgcaatggtaaaatataaatacctagatatgttttaggggataacataatttaagacatgaataagctgatttgcacagctcagtgtgcatctaaataatagtataaaagggtgcaagactgcaagacagctgtgaggacatatatagagatccatacctatttttgtagattatgatgatgcagtgagggataattatattcacactttttgaacacatacctaacatcccctcatgccttaatactaatttagtaatccagatatctacttcacttgatgtggcatatttatttcgtcctgctcgttgtatgtttctagtatgatgacacatgaaattccctaaccagtccaccaccaaaaagttaattaaaaaataatgaatcattgtgtgacgtgttgttagtcgttgacaggatttcatcaccgtactcgcataaaaatgtaggtacttgaattagctgatgtcacatgaaactaaatacgaccctcctatagtctagggtgcacacacagttacatcgatgtcacacacagtaagtaacactgatgactcagacgactatcaattacaggacggtaggtatggtaaagacaatattcccagttattcatacctgtactgtgtggtatagagaactacagtgacttgttgacttgatgatagttaatgaattgaagctcagtagcatgcactgcagctttcacttatacagtcaacacaccttctgggtgatcgctttgtgaacaatgacaaataatgtttgatttttcgtcaaattgaagcgcaacgggtatagtacgttacatcgatcaacaagaccttaatttgccagttttaagtgtgtggtagtggcatacaacttctagatgcaatgggagatgaatgtgataatttcaggcactatccaaatagtccatgatcacaacctttatttcctaaactaatgagagtgatgcactggctcctagtgatttttctgtcttctcctccggcagtaataatttttgcgtagaagaaaaactgaccagtgatgcatggccttagaggtattgcatactaattatatcagagaaaagttatgaaaattagaatgagacgtgcttttgcatccatataatgccgaccatcatgtattccaacatatgtattgtggcacccgacaaaatgttttgctatatagtcgtgcaagctttgtcaaacctcacttttcaatgtgctcgttcttttctcatatccattgagcaaagtggtagcatcattcaacaaaatgtcaacacatccacagtatttgttattaatttcccattagactgtttcatataagcttgaaatatttctagccccatgtttctagcaatgtttccttgtggtagtttgaaagtccgagtgcataatgccatgtttctagccccatgcatgtttctagcaaaagaagaagtataaagtcgttgctttaggtagtgtacctcctgtctcctgcttctagtgaaatccacacaaccactacatctaaacaatgatgaagcagcttctccatatcttatcctaatcatacaataggtcacaaacttccaattacttgcaaaatgttgcatacttcccgaatcttatatatattcattagttattagtattacataattttcaagtagtacatttattaagtcagaacgccaaagtacgtagtaaacttaattttccacactcaattattttaagcacccatgccaccaagatctattaattaatggaacctactaactgtgtaccaggtcacggaattttcttgtggaggatttgtggtggg

SEQ ID NO: 5142 - DNA, 8104 bp, Sorghum bicolor
  Intron number 3 from transcript Sb10g002460.1 (locus Sb10g 002460) derived from phytozome v7.0 (chr-ID chromosome_10; pos 2127423 to 2135526 reverse strand)
gaggatctgattatcttggcaagggtgttcttaaggttagttaaccagccaatttctccatttcagtctgagcaagggtataatactagctgtatttgtcatgcactcgcatgcaccgtagtcattcatgcatcccgtggtcatgttatataatagaaaccaacatgtgaatcctcccccttttatttgcgataaatttgatttgagaacctatttaatttggcttaaaatttgaatccacagctaacatgtgtctgattgcaaccattctgttttgatgtgttgttttcttttttcacattggactaataagccgtattgtcttttgctaggctgtgagcaatgtaaatagcattattggaccagcaattgttggaaaggtatgtatctcaactctaaagttacatgatttcattgatgtggtatatctcaattctaaagctacttttctatggtgtgatacccaaaacacatgatagctatcttattatggcgaattatgtttcaggaccccactgagcaggttgagatcgacaacttcatggtccaacagcttgatggtacctccaacgaatggggctggtgcaaacagaaggtatcatggagttcatacttatgttcctaaacttgacttccatcttacactgcttgtattgatttcctttgatgtcgtgtttcaatctataaagcttggagcaaatgccattcttgcggtttcacttgctgtgtgcaaagctggagctatggtgaagaagattcctctttaccaggtatttcaaacattactgctatgatttattattgtgttgtacgcacaatttagagggtgtcctgaaagttttacttatttgcagcacatcgcgaatcttgccggaaacaaaactctggtgctccctgtacctgcctttaatgtgattaatggaggatcacatgctggaaacaagcttgccatgcaggtaacattccttgagaaatctgattttctgactacatgcttcgactatactctctgatcatttaactgttgtacaggagttcatgattctcccaactggtgcctcctcgttcaaggaggccatgaagatgggagttgaggtgtaccacaacctgaaggtgagcaactaatgcatctattgatgtatcttaagtgtggtccctaggaatgtgaagtcagaatgctaaatgctactgtatgcagagcataatcaagaagaagtatggtcaagatgccacaaatgttggggatgaaggtggttttgcacctaacattcaggtaatgtccatatgcttttatctgctgctgtcataggcaagcacaacaattcttacttgtatatattttttgaagctatctagcatatttaagatgttcaggacataattcaaaatttggcaagttagtggtgctagcctaattattgctctatgttctcactataggaacactatgatttgttttctatgtttactgtagggtaattacaaaattaatcgtcaacatccatttatctcacaatctaatttctatgacaaccaatatatgcaggaaaacaaagaaggccttgaactactgaaggcagctatagaaaaggctggctacactggaaaggtatgtcgtctcttttgtactttcctcactaacagacaaacctttgtgtgtgtagttgattcaacttatctgtgtggcaggtggtcattggaatggatgttgctgcttctgaattctttagtgagaaggacaagacttatgatcttaatttcaaggaggaggtaagaattgcaacttcttattatgcttttatatttatatttacctataggtttagctattccttatgtgttaattctctaaggctatgataatatatgagcttttatttatattaacgtgtactcacttttttggccagaacaacgatggttcaaacaaaatttcaggtgacagcctgaaagatctgtacaagtcctttgtgtctgagtaccctattgtgtctatcgaagatccattcgatcaggatgactggaccacttatgccaaactcactgatgagattggacagcaagtgcagattgtaggagatgatcttcttgttactaaccccactgtgagtaacattttaagtaattgatttcctcctagttctatgcacaacatgcagttctaaacagtacctgcttgacctgtgctgtacagagggttgccaaggccatcaatgagaagacctgcaatgctcttctcttgaaggtagaatcattgctatttcatatcgctaatcttttcgcctgggtaaggattacctttattgtaagtggctgttgactaactccattgctacacgggtgacaggtgaaccaaatcggctctgtgactgagagtatcgaagctgttagaatgtccaagcgtgccggatggggtgtgatggcaagccacaggaggtagccatttaagttttttgtttgcttttgaaaacttaactaactttcgtttttgatctgtttcactcaattgttctatcttttcattttttcagtggcgagactgaggacaccttcattgctgacctctcagttggcctggctacggtacaccgtcaattggcgaacatacacttaaaatattgtccgaattgaacatgttcggtactgacctggtctccatgacttcgtttcagggccaaatcaagacaggagctccctgccggtctgagcgcctggccaaatacaaccaggtaagcgggcgcacctgcgcgcgcaaggcttcttcgtttcgcaaccaggttatgcttacggctcttgagtctgaaccaaacgttcgtggttgcagctcctcaggatcgaggaagagctcggtgatgccgcagtctacgccggagcaaagttcagggcaccagtggagccctactaaaccacgagagcccagagtctggagaaagaagacgaggatgtttcttgtggagctactagttcgctgctgctttttgatagaatgtctgtactatcacaataaaagtatggtcttgtttgccggagagctacactagtgattttgtcgtgggaacaaaaaaaaagaaaaaaagaactgtttttctagatatgagtgatggagtggtggtccgcactcgttgtaatatcgttgcccaaactgattttgatgggtactccacagaaagcaagcgactttcttgtttcttttgctctatgaaacattttcgtattcggcatggaaattctttactatggctttgcttttatcggcagatggagccatagctgcatcttgcacaacagaaaatcattatgatcttgccatatgctagagactttctatcttttgctctgttattaagccatttttgaatttaagcatgaaaacctgttttaattttattctttgtttgactagctttttctttgccaaaatacccaaagcttatgccattttcaacccaatcatagatgttagagcatctttaatagactagtttaaattatattctaaactacaagatttagctattgtgtaaaatataaaaaaattcacttaaagcatagagttctacacgctatatatgacaagcaaaagtttaggaatagtaaatttgctattttagcaaactaaacagtacacttattggactttaatttttgttttgaaaatataaaagtaggctagataacatatttgttggagttgctcttatgcttgtcatacatgtactcttttttctatcagcgtttatttggcaagttaatgaaatctttactatcctgcttccaaattgaatgatgtattcatttcaaagaaatggataagagctgagaagtcttatattatgaatctttaattctaaaattcaaattcttttatattgaatatatagctatagtaataaattttgatctacatttctaccctctacgcgcctacgctgaacgtacctttaggtatccatacaatacctaaagagtccttattataaagttgagtcttgtagcggcaacttcggtttgtagtatgcttcgagcgccacactgcttcggcttgtactggcatatagagccatgatgttttggcttgtagcggtggatagagccacaatcacatcttgcgcaactggtcttccatatgtgagcgacttgtttcttttgctatggtactaagctatttttgaatttagcatggaaaccccttgccacgactttgacatgtagcaacaaatggagccacacgacttcgccttgtagtggtagatggagccacacgacttcagctttgtagtggcagacagagccacattactttggcggcttgtagcgacaaatagagccacaccacttcgtcttgtagcgacaatagagccacactgctttgggttgtaacggcatatggagcaacaacctcattccgcgcttcgaaaaatcttgatggtcttccatttgcgagcgactttcttgtttcttttgctttgttattgaactattttcgacttcagcatggaaacccctcgccatggctttgacttgtagtggtggatggagccacacgactttggcttgtatcggcagatggagcgacaaccgcatattgcgcactagaaaatcttgttggttcctggtcttgatatatgtgagtgactcttgtattttttctatgttattaagacattttcgaattcaacatgaaaacctctctcaacaactggcggcttgtagcggcgaatgaagccacaactacattttgcgcaattagtcttccatatgtgagcgacttgtttcttttgctctgtggaaacctcttgccatgactttggcatgtagcagcaaatggagccacacgactttgccttatagcggcagatggagccacatggcttcggtttgtagcagcagatagagccacactgctttggcagctatgctgcaaatagagccacactgctttgtcttgtaacgacaatagagccatgctgcttcggcttgtagtagcatataaagccacatcctcatcttgcgcaacgaaaaatcttgatggtcttctatttgcaagcgactttcttgtttcttttgctttgttattgagccatttttgaattcagcatagaaaacccttgtcatgactttgacttgtagtggaagatggagccacacgacttcggcttgtatcggtagatggagccacaatcgcatcttgcacacctaaaaatcttgttggttgctggtcttgttattgcgagtgactcttgtttccttttgctgtgttattaagctattttcgaatttagcatgaaaatccatcgcaacaacttcagcttgtagcggcagatggagccacaaccgcaacaattcatggcttgcagcagcaaatgtagccacaaccgtcgcactaattcatggcttgtagtggtagatagagccacaacagaagacaaaaaaggcattaattcatggcttgtagcggcagttggagccacaatcgaagacaaaaaaggggaaaaagatgttgtttttctatatttcgatgagtggtagcccgcacttgtcggaacagaaaaatcttgctgatttttgccatatgcaagcgacttttttgtttctctatatgcgagtaactttcttgtttcttttgctttgttaagctatttttaaattcaacatggaaaccactcacctgcacagcttcagcttgcagtgacagatgaagtcacagccacaataatgcatgactcgtagcggtagatggagccacagccgcatcaaatctcttgccacggtttcggcttgtagcctcagatagaaccacaacctgtgaggatgtgctgcttgtctactgcttgatgatagattacagatattatagaaggtcaagaaatcaaacagaggcagctgctgcagccgccgcagatcgaagaagccaacaagcttttcaacggaggagaatttctaatgacgatggtgtggtactttccagtaattattattaagcaagttcctaaatttgaacgaaaggaaaccagcagaggagagagagcgcacacagacagtaccaccagggaacaagaaatcgaatctgctgccgcagcccccgtgcaaaccgagggcggagcttcccctcctccaagccaggccaccgacgggcgggctccacgggatcaaacatctgtcacctccaggtggccccagtccatccctccgcggcgtccctcttctcttcttctacaaatagtcccggccggccgcggaggcgaggcgcaaaaccgcaaacgccaccagcccaccacagatagcgagcgagcgagcgggcgagcgcttctaggcctttttcgagatggcggtcacgatcacgtgggtgaaggcgaggcagatcttcgacagccgcggcaaccccaccgtcgaggtgcgtcgcgttcgtttcgtttttcctcagtcttccatggggcgcgctgtgaattcggagatctgtgccgattcgccgcgtcgctgtgccgatgtgctccggtttttgttttcctgtgatatgatgaatctggattaactgctgcgctgcgcgcaggtggacatcggcctcagcgacggcagctacgcgaggggtgccgtgccgagcggcgcatccactggtacgtctgtctgcctctgctctgctccatctaccagcgtgctctgttcgtgagggtctgcttggttcgcttgatctgggcgtgtcgagcggattcgagcggtgtctgagatcgtcgatgctgtgtggctctgtgacatataactgtgcgtttgttggttgttgggtgataataacagtcttcgtcatgttgaactggctaggactgagatgtgcgcgcggttgttttgttgctagatctgattgatgcgtatattcttgttctaagttttcagtctgttctccaccgccatgaccagcgcttgtttagaaccttgctattttttttactgcgcgaatcgaaatactcaatgggaagggtttataaaaaatcatcttatagtttcaaagcagaatcatcaccgtcatcacatggttagctgatctgaaaattgcttaccatctggatctgttaatgaagcaggacacaaacttgacttttgaacttctgttattatattgtctcactattaattagaatgtttttcagatataatgtgatttattggtttatctgtttattttcagttacacttgtctcaacctttgcttcaatcatcgattataagcatgattttgttttcaattaacacagaaataataatgcagtaaagtactaaagccaatagacctcccctgaagtattcttatctaatgaatcaagaaacatatttatatgtgatactgtgtcatttaatcattttggtatgttagcaacatagaaaaagacatactattgatattagatatggtattatgggacatcaacatctgctgtttcgtttggaatggactttttgtgaaatttcagtttgtggtccaaacacttttagatattagatgtggtatactatgggatgtcagtatctgctattttgtttggagtggactttttgtgaaatttcagtttgtggtcgagacacaattactttttgaataggttgccttctgtagttaccacaaattccatgtgttagacatttaatgcacagaatttgacatttttatctttgaacaattgactctctcaggaatatatgaggccttggagttgagggatggaggatctgattatcttggcaagggtgttcttaaggttagttaaccagccaatttctccatttcagtctgagcaagggtataatactagctgtatttgtcatgcactcgcatgcaccgtagccattcatgcatccagtggtcatggttaacttatataatagaaaccaacatgtgaatcctcccccttttatttgcgataaatttgatttcagaacctatttaaaggctatgctcaaagcttcagttgactaatgttactacgtagcttttggcttaaaatttgaatccacagctaacctgtgtcagtgattgcaaccattctgttttgatgtgttgtcttcttttttcacattggaataagtcgtattgtcttttgctaggctgtgagca

SEQ ID NO: 5143 - DNA, 3053 bp, Sorghum bicolor
  Intron number 6 from transcript Sb01g015195.1 (locus Sb01g 015195) derived from phytozome v7.0 (chr-ID chromosome_1; pos 14695080 to 14698132)
gatcgtatctcaagggacccggaacaagtgttgaggtgggttttgtgccttttacttgtgttctcggtaggctaaataaagcaatactgtatgaatttgttatattcatcattttgatttagtcaaatttagtagagttagtctactgagttatttaatatgatgaagagccacatgctttccaacttatctacaaccttttttatatgcaatcacaaaacatgatctcagaatttgagcaaggattgacacaccaagagctgtttgttatatggttcatctgccccagagactgatttagggatgcttttcatcttcatcggatgcttcccagattctgctgcatcaaatttttttatctgataaatgataaatcttagtggcttggactctgcaatgtgcatgggtagtattctggctgcctggtgttgatgagcaagtccacacttttactcatacctaaagcatgctctatttgattttctgtaactgcagtccttggatcttcttagctctgtattttcaccttgccaaactgcgctttttatgaactgcatcagtcttctttgttgtggaatatatgttcttttgtgaaacccttatgatgtttattatgtcaatagtacactccagctgtgttccttcggtgactttgaatgcttaaattttttcataactagattcttaactcagttctgctagatttcagaaacttggctctgtattccttatggttcttacctctgcttcgactcaactcagcaacgttaaatagggctacctatcaaggggttatgaaacaactataggatttgtggttgctggtgttggcttaattctcaacgttgtttatacatgtgttgtttcgccttcatgtctaccgtgttatcctcttctccatcaatcacacctacatcgtctttaccacttgatgccaatgttttcaggtcggctggtcgaacctggtcgacctgggactgaccagacgattaattgtgattaatcgtcgaccaggtcgattaatcgaccctggtcgtccatctagtcgtccatgtatatcaggacatacacctatatatatatacctctctatatatattatattatacacaataaaggaagcatcaagactgcattagtgtttattaactggtgacttatgtatgggaattgttttcctctcttttctgaagcctggaataccataattagcaagcagcaacactaatgcagtcttgatcttgagacaccttaacagcagcactgctgcaatagcaaataactaacatttagcagaccatagcagccacacagccagcgtattacataaccaaagtctatgtcctggttaaacaggcccaaaaacagagtaaccaaactggtcgtccatatcctggtcggacgactaatcacgattagtcgtcgactaatcagacgaccagctttctggtcgagctggttgagtcggacctcttaattgaacacttgggaccggccaggacgactaatcacgaaaacattgcttgatgctcttgattcttgaacacttcaatgctacattttttatgctctattgaaatgaaatactacattttaatgctacacctgtggttactgaaatactcattttactccagcagtttctgtagcattgtcaacattttgcataaactagttctagttctttcgttctcttccatatttacagtacaaaaatagttatctagatttcctgttctctactcaagaaagtttcactcaggagcagtaacaagagcaaaaaggtcaagcctcagtctgacctactgggcaacattctgctctctcctacttgccaagcctttaaattccctagtctttcaactattgctcaattttctaatatgggcactgtttttcctcaaatacccattgctgagatacagaaactggccattgattcctgctgcattcctccttcggaggtgccagccgaaatgctgcttgctcccaggtctgaggatggtagatctgtcactgatcacaatgaaaaggcagccttattattggatgatttcagaaagagaatgggagtttcttccagccctataatgttgtatcagcttaatcaactggtgcaggctagagataaccttgattccctctcaaggcctttctccactctagacatcgatgaagtcgtcaaacacatgcccgccctgatggctttaatggtatcttcctgaaaaaatgctgggatattattaaggaagatatctacacattatgttttgatttcttcaacggaactttaaaccttgaagcaatcaacagttcatacatcactttgatccccaaagtgcacaatcctacaagtgttaatgatttcagacctacttctcttttgaacagtgtcatcaaaatcattacgaagcttcttgctaatcaactgcaggccaaaattattcctctgatccacaccaatcaattggctttataaaaagtaggacaatacaggactgtttagcatgggcttatgagtacatctattagtgccagcactccgaaagagaacttatcatcctgaaactagatttcgcagaagcctttgatacaattgaacacagagaatcttgctgatgatgagaagtttggggttttctcaaaaaagagttcttccaaatgatgcatcttgctaagctccaatactaaagccccttctttgtggagatattcatcatagctgcttggcaaatttggaaacaaagaaataattccatctttgacagaggtcgtccgtcttttgattcctggaaaagttccttcttaagaggctaatcttcaggcacacggattttgtgagcaaaagcgcccagaatagatgccttagtatagtctttttgtcttgggcttgctttttttggtgtttctttttgcctctcttctgaggcttctttgtacagtgtttgtttttgtttaatataatctctacagtgggggcctcccctgctgtattttctgctaaaaaaaccataatatctgttgtttgctatgcaggtacagtggggaggcaa

SEQ ID NO: 5144 - DNA, 6125 bp, Sorghum bicolor
  Intron number 4 from transcript Sb07g021810.1 (locus Sb07g 021810) derived from phytozome v7.0 (chr-ID chromosome_7; pos 56051602 to 56057726)
tccttccttttctccggaaaggcgcccccaggaaggtgcgtacatggctgaacgagtctctctgttccgtatttgcctttctatattgtttgtatgcaaggtgaattatattttggcctcttatggtgttattgcgtccaaattggccctgaaacaaacgctctaatcgactccttactggtctgttgctttgatttggtcacggaatcctgcattttggtttcgggtaaactggggtgtttaacacttgaactgttgatatcatcaggtttgctcgcccaattctacattcaagcgttgggactggacgtttttcttgacttgtagtcacaatatattcgcgcttgatactttcttgctaagatatgaaatgaaatatcttaggtgacacctcgtttgattttatatgaatcaagcagcgcctcctgctttcgtccatacttgtactagcaattgctttgctagtatccccatttcaccatttgcaggatcgtattttcttgttctttgtttattaggttttagtgttttacacgtcctagaaatcctagaatatatagtagtagtggtaaaatatatgaaacacttcatggaacgcaactattcagtaatatacctccatttcactttggatctatgcgatcctttttaaattcagagaatgttgcttcttctgttctgttctttcatggtagatcaaaaactgactgttcttgatgaaactagatcctggcaaacattttgtaccatacagtgtgaatgtgttgccgtgtaatgggtgtgcatttgcagctacatactagttgatttcatttaagcattttacttgtgtactgaactgttttgacaaggataaaccaaaaaatgttgcgggtgcattatatgcattagatttcttaatgtttcaggaatcaaaagttttggatctcaatgatgttgaatttttagcaatcgtagcattactttacagtactgaataatttggattatccatgaagcatgatgttttcttttcgtgacagatcgaccaatatttactgaaactgttcttgttcctggcatcgatgtagagatggttgccttgtgacatagacaattaccaacatggttcatccaggaatttgacaattgcattattaggtgtttgtctatctatatagaaaggcatgaacaatggggatgatggcctgatggaaggaaaatttggatccagtatgttaaagttcagaggattctggacaaagggcatcgagtgccatctttaagttccacaatagaggaagaaaatccatgaattcggataatgaagatatagtggacttggagagttaactaaatggtccgacagtattaaatcagcagagtaaggactaaacctccataggagcaccaccgcatgacaataggaactgggagtagaatccaatccacccttttagcacagctgtactataaggcagccaactgcatttccttgtaagctcgtttgattaagattgaggggaccactatcgatgaaaggataagggaaaacacaaagatagtgttagaattcaagtgtttcccacaggaggagagcagagaattttattggaaataagatacatggaattattggttaacttttgtatattcagagtacacccagtcacacacatataatgaggaaattaatctggtttctacacaggtatgagtgttggtctatagactatggacaacctgaataaactgggttgcattgaacatggcagatttttcttggttttcctaaggatatatacaactttgaaatgttctctgggcaataatgatatgaaagtttgctgagtgtctgattatccaaatgcgatagaattggcaggaggccgtcagatagcattagtggtaataatggaagagtgatagaaagaagtttggtcagtgaatgatgaaaagatgtcaagagtaataaacttgaaaggcttctggagaaaaaatgtcttactgctctggtgccctatgtatcagatctaatcttgattggtagaaaccatgctgtgatgttctactcatttactgtaaaaatttaatataaaagtctttccgatttaggttgagtgcctgatttgctcaaagagtattctgcctgatgaaaggatgcaatgttcagttaatcactgtgatgtaactttgcacaaggcttgttcagaagaaactgatggatgctgccctcggcacgtgagttgtctgaaaccaagctttaggtctaatatttcctttcatttcattcatagcctttcagttttctcttttttttattttactgagtgtagtcaggatatataactgagttgtgctttcttctggtcaaacagcaacatgatttgttgaccttatgctgactttaaaagtagtagtgttggtaggtgctgtgatggaagacacttgctacagttatctttcctttttaaaattcagtggtcttgtccaaaaaagagattgtaaggcaaactacatttctggggattcctattttttttctcgaacaggcaggaccttttgtgcattcaattgtttttttctttgttcttatataagtgctagataatttttcatgtaactaacaatggtgtatcttctctttttaactgcatagatttgtttttgctgcaaaaggaggacatctagacaccgcatacaacgcacaatgcctgtttgtactgaatgtttactaaagaacaggatggttgattctgaagatctttcaaggaaaatgatttgttggagtatttggccatcaacaagtgaggttgatgccatgctgcatacacattattttctgctttgttttcagttacccatatatatgtgttgttagcatcttcaatccctgtgaaatgaaaatataatattgaatggtccataaggaaattatcgagacctttagtcattatcagttcagctattgcgttaaaagaaattatcagttcagttactcctatttgatgcatgggaactacatcttagctctgtgcaataccaataagatttgtcaaccagaaacctattaaccctatctggcagctgaaccataatttcaaaagagaagatacgtgttactagagtagcagaacatgggataggcaattttgcactttgcttaatattttattattagagggttcataaacataaaatcacttgtatactattaaaatattcgatgatgaaagttattggctgttgacatgatatgtctttaacccgtccatgtagttatgtaggtacttgtactagcaaaaccatcaaatagatcggaactttcaaacctgactgatagttcataccaccaccacccatcttctaaccaagtcatttcccttttttttatctttcaaaaaaaaatcctattttcatcaataggaaggagagttaaaaggcagagcttctgccattgcattaaaaaaaacaccagtttaatcctatgcttaggcctttggtccataatctccatggacatgagacagcttcacactgtctgcaactgccctgcggcccccatccatgagttctcttccttcattgcactaatctgctggcaaatctggaaagccagaaacgcaaggatctccagcaatgaagcacattcagttgatcgtgtcctccgtgattgcaatctgcagctgaactctggcagttcagactaccaagggaaaaaagagcaacagttacccagtggtgttccattcttgaaatggctaggcgttcaacaggctagacatattaatcctatgctttgtaaaacctcttgcagcaactttttagttgcaattcatgtaatatgctgacatattatgcgagccgtttgggataaaataaaatttaaatcaggtggggaacgcctcccctaaaccctcatgatatgtctttaacctgtccatgtagttatgtaggtacttgtactagcaaaaccatcaaatagatcggaactttcaaacctgactgatagttcataccaccaccacccatcttctaaccaagtcatttcccttttttttatctttcaaaaaaaatcctattttcatcaataggaaggagagttgaaaggcagagcttctgccattgcattaaaaaaacaccagtttaatcctatgcttaggcctttggtccataatctccatggacatgagacagcttcacactgtctccaactgccctgcggcccccatccatgagttcccttccttcattgcactaatctgctggcaaatctggaaagccagaaacgcaaggatctccagcaatgaagcacattcagttgatcgtgtcctccgtgattgcaatctgcagctgaactctggcagttcagactaccaagggaaaaaagagcaacagttacccagtggtgttccattcttgaaatggctaggcgttcaacaggctagacatattaatcctatgctttgtaaaacctcttgcagcaactttttagttgcaattcatgtaatatgctgacatattatgcgagccgtttgggctaaaataaaatactagcactttcaaagtactcaatatattggaaccttctttgtgtattatcagggttgaacgcatgtttgttagacctttgttttgcagtaagctttgacactattattttgttggtagttttgctgatgttatgctgatatatgcttcttacaggatgctggccctacagatgacataaaggtgatcaatatctagtatcatttgttacattgttattgaacatattagaacctttccagtttttccaagttataataataacttctttgcaagttggtcgctcagatgagattggattgatgcacagtcaatcagtcattgtgttagattcttctgtttttattttcttcactgtcaatataattcttataagaaaacttcaaaaatgaatttactatggagattgcagttgtctcttggacttttgatattggatatttactgtttagcaatctggcggtaaatcataaggaaaacaagacaacatttggagtctcttttcatgttttgcaggtcatgatttattttaaattgtttgacttactgaaattgatcatatgtacaggaagccttccagcgcttacctctcccatacattgaccaagagttcagtattgaccctattaataaacaggatctggaaactgaaagcgaaccacctccatatgtacatattaaggacagtatcctttgttagctctaaatttaatatttgcgactatatatgtatctcatgtttgttaattatataagttgtaaccttaacacaacagcaattgccatttccctaatgaacgaagatgcaattgacgtttccttaatgaactaagatgtttatattgtcaagaagaaaagtgacggtgatgcaattgaaggtggatgcatcagctgtgaccacgactcaacctgtgaaagtagttgttcctgcaggtacttcttgtgctcacactcgtcccatttcttgtgctcaagattgtctgttattttccattttttttatctgtagtgtcaagtttttatagtctaaatctgtttcgtaaataaaacacatatcattagggcttgaatggatttctacactccaactgctgcacttcttgtgcctgctgagtatttgtaatttgtagtctacagactgttgtgttatcttgtacgtgttcattggatataaatgcacatataatattttctatgacatgctgaatttttatacagaaatttaagacttgtgcagatcttcaatgtccagctgctctttggattgtccttgctcagttaagtgctccaacaaaccatttcgcagagagaaaaagatagagatcattaaggtaaggccttggtgagccaagccctttgagaacaattgtcttccttctctatcaatgagaatgagcacagtctcgtgcttgttcgttcaaaaaaaaaagtaacacgagtgtccctttatttaactactgttcttgcttaacacgagactcatttctccaacaataaagatcttttttctgttttccttattttgcccaattttttttttgtttggcacatctaattatttggactaccattggtctaactctgtagacacaaca

SEQ ID NO: 5145 - DNA, 1658 bp, Sorghum bicolor
  Intron number 2 from transcript Sb01g026390.1 (locus Sb01g 026390) derived from phytozome v7.0 (chr-ID chromosome_1; pos 44324036 to 44325693)
aggatcccgcacgcaagttcgtcgtcgtcgagcaggtcagtatacagtacagtacctgccaagcctccctgatatcctcctccctcctatccttgtcgtctacgctgcttgtgttgcatcgcctccgttcctctgttttctcgtcccaaattgtcctcgtccttgtggtctgtctacaatgcctgcctgctttaatttgcagtcaaagtttagtcgtgtatatatatattttttaaaaaaaagcttgtcagatttcaggccaaaaaccatacttgtacgccattagttaattcttttggtttgaagttttcgccgtcggtgatataagagcagaggaacagtgtacgtacgtacattattgcacacaattttgacgtggcgacgtcgatactgacaagtagaaaaggacacaaaaggtgtacgccatttgctttccaccctgagacaatcaaacatagatagaccttcaacatggagcatctctttttactgcctgctacagtaagcttcttctagtctgtctgtgtgacctcaggacaagacttaggcccaaataaaaaccattagatgatcaaatctaaccatgagatgagacgatatatatgcgcattattatttactatttcacatcgattagttgttgataaggacaaaaacaaaaagggagcccttgctcagcaatcgtttggttggtcgcggcctactatctaccgcgtcacatgtgaactagttaactttgctgtcatgtccaaaattaggcggagcactcaacttgttatgatggcttcctctgtttctctcgcccaattcatcacaactgcacatggatccctctcagaacagaagaaagattcggctcaaggttatggacatttcgaattcgattgaaattcagtgagtactaccttaggtcaacaaatattttaatactataaattttaggtcacatagaaaatataaatggattttatgcagaaagtattcccgccggtttaccattgaaagtacttgaaaataaaaacaactttcaaagagagtgcattattgcgtaccaatcggatgatgtccaaacagtcaagttgaaataaagagcacacaaccatatctatgggttcctatcatgtacaagtgctacaacaaggaccaacaacatgttgcatgtggtctctgctcctatatatggatgcccatacctgtttcaatttcttgctgtgtcaaattccgggaaaaagtaacagttttaaccaaaccaaagttactgcaaaaattaagtgtaggacaaatcttggtgcccacacgcgattaactgttttagaatcaaaatatgccaacatggatttaggattcttttttaaatttaaggactacaaaagtttaataacctgattataaattggatgtatggtttagagaattatcatttgaagcttgcttgtaggctttgatcgtttttcggtagttgattctgagacacagactagtcaaaacattgcattctaagtcactgacttctattaccaaaaaagtagctcaaaattatgtcgcccaaagtttcacgcgtagaaaagaaccttttctctatgtgttgttttccaggtaattatctagcccttttgctttcaggctttcttccaaaggtggtgggcagagaaaagccc

SEQ ID NO: 5146 - DNA, 1726 bp, Sorghum bicolor
  Intron number 1 from transcript Sb10g023440.1 (locus Sb10g 023440) derived from phytozome v7.0 (chr-ID chromosome_10; pos 52050481 to 52052206)
tcgtcctcgcgcccaccagagagcttgcagcacaggtaaaggttcctggtgccgcctcgctcttctactacgttttttcgccgccgtttgtttcgaatgctgccgcgcgcggttgccatgctcccgcgcggctcgtagatcttgttcgttcgtgtatccatacttgttcgaagatgttgtaatcagcgtgctgctgctgtccttatagtcctggttatcgcggggcgtgcatgcctgcttccgtagtcctggcctcctgggtaacagctacccaggccatgtatggtcttgcttgaacagtttgactttccatattcatatgaattggtgagattcttactgatacactagatttcgatggaaggatgctatattctataatccatcctagcattctagaaatttttgtgcacaattgtacttggatacattggattttgatggaacgatacactttaattgctgcatgctttgcttcggttgtataatattggagcaacttatcatctgccatgttctataatccatcctagcatgctagaaatttttctacacaattgtacacggaaggcattagtcataaactgtagtttcctgtcacagacaacaggttgatcgcagttttctgacaagttccatttttaattttctgactttggtttgaggattgctggcattgcggcagtgtgtggattaaaatgcctattagtcacgacttgctgagttgctgtcaatttaggattaggtcacgcagtttgagtatgtttctggtcctccattttgagtacaacatgtttagctcttccttcaatcatgtcttgtatgtaattaattttgcttcatctggaccatcgttgtgtcaacttcgctagctttgaccaatattaacgttacaagtttaaataaatgcacaactaaaacatggagaatctgatgaaaccaatttgatgctatagacaagtttaaataaatgcacaaccagtatttgatgaaaccaatttgattctgtagattttgttagtgcatttttatatgtactctgtcaaatttgaataatttgaactaagataaggctaaaataattcgtaacgaaggtagtaactttcaatatgtcatcgttgccagaatgctagttctgatggtcattttttaatgtaaatctgtagttctgtgttaatatttgtgcttgaggatgtactagaggtctttcactttggcatgtgttttctttttttgcccgtttgggtgccctcaattggagtgcttttctagcatatttgagcagccatgctcaagagtgctcctactgtgttgtgaacttggttgtccaatggctaccaggaacatgttgttgcttcaaaggacggaagcagaactggcgaatagtagaataaaatggaattggactttccattttcaagacctgggtcgtacattggtctatagggcatcgctagaattgattagaattgttattttagttctaaacagcgccagatagaccatccaaagaatatgattatgattcaacccaattccagagattcaaacaggctcttatatattttcttatgaatttctcttttttaatcaatggcattaagtgatgattgatgaagcaactcataaatgattcctatatatagtgttacttctgattggatttagtgttttttggttttatatttcagattaacgaggaggccaggaagttttctttccaaac

SEQ ID NO: 5147 - DNA, 526 bp, Sorghum bicolor
  Intron number 2 from transcript Sb09g028010.1 (locus Sb09g 028010) derived from phytozome v7.0 (chr-ID chromosome_9; pos 57021627 to 57022152 reverse strand)
tctcaaagaaaccaagaggctatcggtaaataacttccatcagttcttatttctgtacatctacaaaaatgaccgtgattaatacttgttgaaattgtgactccccttatatggcttgtatagaatctaaggtggggaattagggatgttggcgatggaagcctttggtactttagttagtggaacatcccttaaacaaaaccaaaggcacaaatccttctagtcagcacacaagtgttaggtgctaccctcccttcggacatccttttcttttagaacactatgccgattgaatatagttttcaggtgtttgataaattaagtgagataagcatgaagaaaggtagacaatattattgaaaagatatcatacctgttttctaggttcaaactaacatcaaacatgtttattgtctttggtatctattcatcctatttttggttggaaaatgctgtctgaattgtatcagcaacacttttgtattctggtatattgacacttgctttatttttgtggattgcagag

SEQ ID NO: 5148 - DNA, 5838 bp, Sorghum bicolor
  Intron number 1 from transcript Sb07g007030.1 (locus Sb07g 007030) derived from phytozome v7.0 (chr-ID chromosome_7; pos 10911058 to 10916895 reverse strand)
caggtaatagcttatcaagtttctctagtactcgacgagatcgaaaactttatagttaaatttttttatatttaagattgtttacaagtcaaaatattgattacaagatttgtacatatccggaaaaaaatggatatcatatctataatctgtcgtggtaggaggtgatacctgtgaggccaaattaaggttgtggagtttgagtcgacgatgctgcaattgtgtgaaacgaactcaaaattaaatcttgtgagatagatagtatggtcagtcttctagtcctagactttcaagggcggtgaatattaaattttaggaacggttttaaaactgcttaaagaccacttctttgacgatggatgacataggtttttaagaaccggccctgatgatcgtttttgaccgtgaacaaaaaattagtagatatctgaataagatttcaaactcgacatatccgttttgccttcatatccaataaatctgtattcgtatttggattggatataaaaatgtggtcaacatgtttcataaaaaaatgtggtcaatattgatatccagactaggatcacgcgattcgatcacaaaaatccatccatagtagggtcccgggcagtgtcgatgataccgacctgccttggcctgagcctacaacgtctcattctcttctcaaattgttgccaccgagcgggacaacgtgagctgccgggagaagggctcgatgcatttggctggttcatgctccttcctcggttcggatagtatatacttccactatacgcgtaaagaaagtcgtatatctccaaagtctaactttaactttttatttttataaaaaaataattatcaaaaagtggtatatgtatatttttatgaaagtacttttcaagataaatcaattcatatggtttttatatttccaaactcaataatctaaaaattatttatgatttatattatcaatgtttgacctaaaaaaagttttctaaacgattttctttatgagtatggagggagtattccaattcgctggatgttgcgatttttttgtcttcatttccttgttgagatttgtattatctctagatttaacgtcgtcctgacgtccttagatcctcttagatcagggcatgttctccttggttttatctgtattattatctcttgattttcccttgctgcttctcctccttaggttttcacgttcttgctaccttttcctttaggactagtaagtagggcccgtatgtcagaggtaaaaaaaaaattagatggacaaggaaactcgtatcttggtgggtgacacgagggcggccatgccaaagtgctggtcgaggaggacagggccgtggggcacggagcacaggaagcctgtcggggcgagaagggcccaaatgcatgggagggcggtggtgtgcggggagacgacgatgaggcgagagagttagagcgagctagtaggagttggtttggcagtgttgggccggcgaatgattagggcacccacctgttggcaaatagctggtcaacaaagaattttattccttccttgtctctgaaagcttcaattcgcagaatccgtgtcagtcaaattttttataaaaaacaatagtatctataacataaaatgaatatcttataaaaaatatattttatgataaatctaatgatattagtttgatactataaatcttagcttttttaaactcgatcgaagttttaaaagtttgacttaagacaactctaaaaattgaagcttttatggacaaagggagtagttattaaggagtgagatcaaatatacttcctttgtccatgaaataatcaatttttagggttgtcctaagtcaaactttttaaactttgaccagatttctagaaaaaatggtaagatttatggtatcaaattagtatcattagatttatcatagaacatatttttataagatgtgtattttatttcatagatattgttactattttctataaagttagttaaacttaaaaaaatttaaccggcacgggttctaggaattgattctttcgtggacagagggagtacatactagtgacttctaaatagttaatctagcacaatctcccacgaagctgtccacaaagaattttattggttatcaaggagcgagatcaaatatatactagtgattcctaaatagttagtctaacacgatctcccataaacaactctctcacaactcacataactctctactatagtgttctttgtttattatttctgagtctcatctagctagttatttacaatttaccattaaggatacccttggatggcgaaatttatgttgagagaagaaatactactacataattgataatcaacaccggtttgtattaggaatcgttggtaaaatgattttcaccgtcagttcgtcttatgaaccgtttgcaaaaatgggagtgattattaccaccggcacaaatcagtggtgacaacataacattatcaccagtttgtgttaccaaccagcactgatggagacctatttttcaccactggtttgtgttacaaaccggcagtaaagaaaactttctccaaaggtttcacttatactgcatcacaataaaattcataattttttcaaacaaagtcagatgaaaataaactttatatcaaaattttgatctcaataaggtctacaactttatagttgatgactttttctttccaaatcatttatgatcctagaattctatttgaatctctcatattttaaaagtcattttttttgaattgtacaaacaatctctcatattttaaaagtcaaaagcaaaattgtagatcacgacttctcattagaaattttgaatatgtaattgtaaaattttgaaatttaaattttacaaatgacctcgaatggaaaattgacccaaaccgtctacaactttttagtcgttgacttttaatttttatttgaaattatttgaggttccaaaaagtatggctaaagttccctactatgaaattcaaattgttcaaacgactttgaatggcgaagcaaccaatatccaagttgtcgatctcgattagaacaacaacttgtagttgatgaattttcatctgaagccgtttacggtgctaaatatttataccaaaatcctgagaagtaaatactagaggaatgaatatgccatatatacacatatgatctaggggtggagtcttcgagtagctactagcgaggactagatcccgatgcaaaaaaatcacatgacttgtgactaataaggtatgatcatgcgactagctagccttcccagtgttaaaataaattttagctgattttagaattttgggaaactaacatgaaccagcggtaatgaccattcttatcaccgactttcaccgctgagggccgccaaaacggaaaacccatggtagtgagggtatggaaccggcagtggtgaagattttatggtagttaaaatttcactttttagtattatattagaactaaaaattgtgtctatgcgttacaacggaatcctatgaatcagattctttattgtatttcatatcattgctagacgtgggctattctaacttgtatgagcataagtcatgagtttaaggcacataggagatatatattagaattggaccctgtatttattaaatgcaaattgttgtaactcgtaagtcaacaaaaaagtgtgatagaagaaactcaacacaatagaggtagttcggaggggaccggatgaaaaaaagatgaaattttgatacgttcatgcgttgagaaaaagataattaaatattcacagagaactaatgcacatataattttttagcatgtaggcatagctctcgctacatgttctcagtggtttcgtcttaaatagaaaagaaaaaaaaacatgacgtaaaaccgttgtgctttcaatttgttaattcggttcgatttctcgcctacgtcaacggtggaacctaatcttttatggttttgatactaaaagccccattctccatattggaatatttattaggtcttgtttgatattactctactctacgaacctacattgttagcttgagctccataaatagttttattagtagagctagaactgttttggtaaactgttttgccaaacaacttcacttaaaatatattctcacagaacctcatgtaaaactcaccatgacaaagtgaagccaatatttttgactttaacccactttagacctctttgagagcacaatttaaggatcttcctatgtggagtcattttgttttacctcattcggtataaaagatgataagagattcataggagtagagagttttacgaggataatatgaatgaatgtattggaaaccggaccataaaatcccgctcgcgcaatggcgaggcggagcctgctcgcgcgcggcgtggcagaggcgacccgctcacacgcccggccgcgaggaggaccccgctcacgcagtggcgaggtggagcctgctcgtgcatggcgcgacggaggcgacccgctcgcgcgcggcgtggccgaggcggctcggtgggcgaggaggagccctgcttacgcgcgacggcgaggagctcttctcacacatgggggaggcggccagctcgcgcgcggcggaggcggcctgcttgcggcatggcggaggcggcctgctcgcgcgcgacagcgaggagctcttctcgcgcgcggcgaaggcggcctgctcgctgcgtggcagatgcgagctcggtgaggagcccttctcgcggcgcggcggaggtggtatgctcgcggctcgcgtgcagcgcggcagaggcggctcagcctcgcccgcacggtggacgacctcacccgcacgtagcaggacctcgcccgtggtggcctcgcctgcccattcgcgtccgtccttgccgatgaaacgcgtttattgagagtttcgatctcgtttcatggtgttggaaatggaaatgctagtcagctcgtgtcgtgggaatgaaacaaactccttctctctcctccatgtttcataaaaaaggccagatttgctgatgtggcaccctaataaatatgcataacacctcataaaacctccactgacactggcctaaggccagtctcaatgcatagtttcatgacacagttactaagactataaactaggtaaccgagtcacgggagtttcatggggatgaaatttctatctcatctgatgaaactccttcatttaatgaccctgctaagttagcaattttgcttagggcactcacaaagcagactctatcatagagtctaaagttatttattatctcgaacaatgtggacttagagtctaaataagacttggagtcttattttttctacctctttcttcaataaatatgctgccacatcagcaaaataccataaataatatgtaattaagtgtcttggactctgtgatagagtcttgcattgtgagtgcccttatgtggcaccctaacaaatatgcataacaccccacgaaacctccactggctgtttggttctagaccattatttaccatgcctcagctgcggtgagctctagaggagctgcaagtatggcagtaaaatcgagcgtcacacgccatggcaggaaatgagtgagctggtatgttgtgcgtgtgtgacatgcgtaaggcagaattattagttctgaagtaataattgccagcttagattaacgttaaaagaaaatagttttcatgtttaattttctttgtgtgaaagattgttctagttatactaattgtatgtgtacaagtgatttaactatttctggcctatattccattttattgttcatatactaaactgtcctctattgcagt

SEQ ID NO: 5149 - DNA, 2230 bp, Sorghum bicolor
  Intron number 1 from transcript Sb05g025780.1 (locus Sb05g 025780) derived from phytozome v7.0 (chr-ID chromosome_5; pos 59201834 to 59204063)
cgttgccgttgcgcaaatactgcgggattcttccggttcgaacggccggacagaaatcatgggccgaatggcttcccgcgcgatattcctacgcgttgcgcagcgaggaaggcccacgcgtggtccacatgcatgcatgcatgcacgagcgagcatgggctgcccgctaggaacgggattttcaggagcgttacgtaggtacaaacgtatgttttcttcttttctttcctttcttttttctttcctttctttttttcttttcttttattttttattttcatgctatactttttatgtatgtttaccttttgttttataattttttattattcttttcatttttatgtttcttttatttacgttttcttttctttgcttttatgttcttattcattttttattttctttcttcaatttctgtttctttttagtttcatgtgatttttttaaaaaactattttttctaattattttaggtttattttttattttctatattctatgagatgctatgattatacagaactgatgtgatgttgacgtggtatatgatgtcatgcccttcgatgttttttttatgttcatgtagtatatatgtgatgttttatgatttttttatgatgctcacgtgttatatatatatatatatgatattctataatgttttttatatcttcacatgctagaatactattctacaccgaactattgtactgaacaaaatgcattatgttttgacttgcgataaattttttttctgctcacaataatattttttctgctcagttttgacttgcgatgtaaaataatattctacattatgttttgtgatgttttttcttatattcgcgtggtatatatgtaatgttttatgatatatgttgctatgttcgcataatatatatgtgatgttctcgtagtatacatgtgatgttctatgacatatcatgtgatgttctatgacatatgtttctagtgatgttctacggtgtatttagtgatgttcatgtagtaccatatggtgttcgatgatgtatttaatgatgttcacgtaatatacatgtgatattctataaatgtattaagtgatgttctattgtgtatttagtgattagaatgttttttgaaaagtatacatgtgatggttttttaaatttctccgttacgtatttatttttttctcttatgctttgctcttgtttttattattattattattattattattattattattattattattattattattattattattattattattattattattattattattattattattattattattattattattattattattattattattattattattattattattattattattattattattatttatgttatgtttttatttatttttatgtacattataaatcaattttatgaacctacactagaaattgttcttctaaaacaagattttttttcttacgaagacgaaatattgttatgaaacctagaacattgtatttactcaataaaataaaatattctatctttataagataaatgttcgttaataaaattttatcaaaatatattgatgtggggtcttgttttgaaggatttgttacaagaaatttgatggtgcaattggattttaatttggatctttgattccgcagttattactttttttagttggttaaaagttatttacataggtcatctaaaagctgatgtgagctgaggtgaccgtgggccagcatgcaacatcagccgcgcggcttccgcgaaaaattttagcgcgctggacgggaaactgccggaccaatgtttcggtccgaccatcggaccctagcagccccccaaatactgtgcaattgtgcatcggttgttttgaacaactaatttttttctccaacacacaggagagctacgtatctttaagaagaaaagagggtaagagcatttacaacacaaacccacactcttaagctcttagacttgtacaactaaaattgctgagaagtgttggcacctttttggtgcctggctggaaaaccttttgtcgttgcccctcaaaatgaatgctttatttttttattgggtggaacttaatgaacaatactttcttgcatttcgtgaacatcgaacaacatatagtagattgctgttacaaacctaatcaagtttgttgattccaacattcatagtcatcctggagctgaaggcagaatacgtgttcgac

SEQ ID NO: 5150 - DNA, 10313 bp, Sorghum bicolor
  Intron number 2 from transcript Sb07g020470.1 (locus Sb07g 020470) derived from phytozome v7.0 (chr-ID chromosome_7; pos 53145819 to 53156131 reverse strand)
tttttaaggagaaggctaagaaagaagtcaaacaggtgatgaataaaatgctctccgatcctcctcctgagttgatgcagcgactggcgtctgcaatgtctagccaattaagtggttgaaaggatccttggtagcctagaggggggggtgaataggctatctaaaaacctgaaactcaaaaactcaagttgcagaagttaaatgcctgtcggtaccaccgacagtttgggccgctactactggtgtaagacagccggtactaccgacgcaaactgctggtactaccaacctcctaagagagctacgaaatcagagaataatgagttttgatttcagatctgggagttaccccactctcctagatgtagttgaggatgatgttgaagttcccttgactcggttcttctccaaaacgtagatcggcccttgttcacctatgaaaatgggtagagaggaagaacacgaagaacacaagaacaaggatagtcgaagctacctccacagcaagacaagatatttatcccgaagttcggcaatccccactaaggagttcctacgtcctcgttgttgaggtgaccacgaaggtccgaccacttaggtctcctccctcaagcaaccacgaaggttagctagagatttccactaagaatcaaggggtaatacaaacacttcggggtgccctcacaagtgaaacaacacgggcaaccacgaagaacgcctagccggctagggttccaagaacccaagagtaacaaatgcaaaccaaccagcaagaggaagaaaccaagtgctcaagtcacgaatcgaagctcccaactctctaatctcacttctctagctcgaatctctcaaggattgaagcctaggagcaaagaaggagagagagtgggtgagtcaaagcttggagactattttctctgatgtggattcgaaggaatggaagagccaacggttagaaatgagggaaaagctatttatacataggtcctgaacaactgccggtactaccggggccagacgccggtactaccggccctcagatctaacggtaagaagtctctatgatttgcgagaaataagcctaccggtaccaccgggcttttgtcggtactaccgaccattgccggtaccaccggtggaaggccggtaccaccggcagttcaaatctccgcaaccaaagtgagcgcagatttagcctgccggtactaccggcgtttcacatcggtagtactggtgctggccggtaccaccggcccgagcctggtactaccggtagttcattttctcgcaaaactcaggagaagggctggcactgccggtaccaccggccctgagggttggtactaccgggtcaccctggcagagaagaaatttcctgagtgcctgtgagtgcaagtgtgtctctcaagcgcattaagtaaattgacttgagcacctctatcctcatcttaccaacttaatttgcatccctcttgatagtacggcgtttcctaaaagtcaacaaaagataaaaactttgtagccacttgagtcgaaacgccgtattgaaaacttggggtgctataattcaccgaatgttttcgttcaactccatcaatggaccaacacatttggtaaattgggctttttccatctcacatctcatatgttatcctcattcttattttacctgcttgtcatctcaacaaatctcattagtcctctaattgtgtggtcattaacaccaaaacccactagggcttgattgcacttacaatctccccctttttggtgattgatgacaacacaactagagcttacaaaaatattcaaagtataactgagattttgaagtcatgggtgtagagactccccctaaatatgtgaatggagaattgaattctcaaaatggcataagaggccaaaattcacgtttcacatataaagttaagtgatggggctccccctacatccatgcttctgtggggtgctgcacatagtgtcacaagaatatatgtgatgcgtatgacaagtatgcacacaatcattcaaggcaaggaaaaaaaattggacccccttctcattctccccctttggcaacaaacaccaaaaagtgagaaaggaagaaagagggatacaacacacttaacatgttatggtcagcaacagataaacaagaacaagtaatgaccataaaatgcaagttctcttttgaaaaagcattttgaaccacattatgaacctttttgcaaaccttttgcctagatactagttgatcaatcaaaggtgtgctaaatttcaaaccacgttacgagaatcaagtatatttagctcactacgcaaagcacaaaaccttgactcgtcgagaggcttagtgaagatatcggctagttgcttttcggtgctcacatggcgaatttcgatatctcctttggcttcgtggtctctcaagaagtgatgtcggacatctatgtgcttagttcttgaatggcttacgggattgtttgcaagctttatggcactttcattgtcacacaataatgggattttggtaaaacgacatccgaaatcacgaagggtttgcctcatccaaagtagttgagcacaacatgcaccggctgcaacatactcggcctcggcggtggaaagggctacacaattttgctttttagaactccaagacactagggaccgtccaaggaattaacatgtccccgaagtgctttttcgatccactttgcaaccggcgtaatcggagtccgaatacccaagtagatcaaacttggagcccttaggataccacaagccaaggttaggagtgtgtactaaatatctcaagattctcttaacagccactaagtggcactcttttgggttagcttgaaatctagcacacatgcacacactaagcataatatcaggcctagatgcacacaaatagagtagagagccgatcatggagtgatataccttttggtcgatggctttcccttcctcattaagatcaagatgtccattggttggtatgggagtttttatgggctttgcattcaccatgtcaaacttctttaacatatcatgggtgtacttagtttggctaatgaaagttccatcctttaattgcttgatttggaaaccaagaaagaacttcaattcacccatcatagacatctcaaatctcttggtcatgatcctactaaattcctcacaaaattcttggttagtactaccaaatattatgtcatcgacatatatttggcacacaaatatatctttattgactttgcgagtgaaaagggtaggatcagctttgcctatttcaaagccttgtttgagcaagaattccttaaggcattcataccatgctcttggtgcttgcttaagcccatagagcgccttttggagtttgtagacgtggttggggaacttgggatcttcaaaacccggtggttgctcaacatagacaagctcttggatagagccattgagaaatgcacttttgacatccatttgatatagcttgaagtcatgatgggcagcaaaggctaaaagcattcggattgcctcaagccttgccactggtgcatatgtttcttcaaagtccaagccctctagttgagtgtagccttgagcaacgaatcttgctttgttcctagtcaccactccattttcatcctgcttgttgcggaagacccacttggtgccaatcacattcgtcttgggtctttccaccaatgtccaaacttgatttctttcaaagttattcaactcttcttgcatggccatcacccagtcctcatcttcaagagccttttcaaccttgactggttccacaggagaaacaaaagagtaatattgacaaaaatttgctaaatgagaacgtgtcaataccccctttcgaagactcccaaggatgttgtcgacggggtgatatcgttgaatgatttgcttgagtcttggatgctcgatggcctcttgatcactttctagatcttcagcttcttcttcttcttcttcaaatatgggttgtaggttttgtcctcgaatttgagttggacttgctgctgttgttgaagggggtgcgacattaccactcttaggtgtggcacaactactctgttgtgctgcagcaggggtttgctccccctcaatatcaggtacatcagtggaaacttgttcaccagcagcttgggaaaccactacatcagtgacttcatcttcttgtggcctaatatcaccaatagccaattgtttgattgcatcacaaggtggatcctcctttcctacaacacttgaatcaacttgctctacttgagagccattagattcatcaaatgtcacatctaccgctatttcaactctcccagaggttttgttgaaaacacgataggcatgctcatttgatccataaccaagaagaaaaccttcatcaactttaggtgcaaacttagatgttttgggtttcttgttaagtatgaaacacttacacccaaacactctaaagtaagacacctttggtttgttaccggttagaagctcatatgaagttttcttcaatttcttgtgtaggtagaggcgattgatggcatggcaagcggtgttgacagcgtcacaccaaaacaaatctgaagtcttgtactcatctagcattgtccttgccatatcaatgagtgttcggttcttcctctctactacaccattttgttgaggggtgtatgggcttgagaactcatgcttgatgccctcttcatcaaggaactcctcaacttgagtgttcttgaattcggtcccattatcacttctcatcttcttgatggggagaccaaactccttttgagctcttctaacaaatgtcttcactttgtccctaacttgacacttatcaaacaagaaaaatacccaagtgaaacgggaatagtcatcaacaataacaagaccatatttgttacccccgatacttaggtaggcgaccggtccaaagagatccatgtggatgagctccaatggttgtgtggtggtcatgatgctctttggtgggtgaggtacgccaacttgctttccggcttgacaagctctacatatcctatctttctcaaagtgaacatttgttagtccaagaatgtgttcatccttttgaagtttggccaagttcctcatcccaacatgggctagtcggcgatgccaaagccaacccatgctagattttgccactaaacaggtctcaagattagctttacttttgttgaaatcaactaggtaaagcttattctttaaacgacctgtaaagacaatagaggaatcctcccttctaaagacttccacacccttatccgtaaagagacaattgtaacccatctcacacaattgagaaacggataacaaattgtagctcaacgaatcaacatgcaaaacatttgtaattgaatgctcaagggttatggcaactttaccgagaccaagcacatcccccttagaattgtctccaaagacaatattctcatttgagtccacctttggggtatatgattggaacatactcctttctccggtcatatgatttgtacatccactatcaagcacccaacttgatccaccggaggagtatgcctgcaaaacatgtttagttgctagatttaggtccccaaatagacttggggccttgcatgttagtcacaagtatcttaggaacccaaatggaagtattcttgtagacattggtctccttgccaacatacttagcaacaacttcaccacggttgttacttttcaacacaaagcatgatgacaagctttgtcgaggtgcatggacctttggttgataagcatacttgtttggagttccccatattaattcctttggcttctgggaaatcttcttttccttgtatgtcactttcttttcgggcttacttttattaggaacaaaattggtagccttcccatttttgcggggtgtgacattaccgcccttcatcatggtattgccactatgtggcactaccactcggggacgttgtactgtcacaatctgtgcaggccgctctacaccaattttgcccatcctttcaaacttgacacactcatagccattgattatctttcttccatttgtcttggctcctattgtatgtccaagcccatgcttgattgagggatgcctcccttgcttgaattgaggcccttttggatcattttcccttttatcactcacttgagccttaccacccaagcaattcttactaatgatctcattgagcctttcaatatcctttctcatagtctctaagtttacaaggttagtagaataagcattcaaatcaagattataacattttccacaaccttgactagtggagggagtagaggcatcctttgccttagagggatgtgagttgctatcccaaagaatgctatattgttcctcaagttgcttgtactttccatctaagtcacaatacttttgcttgagggcaatatttgctttctttgtgatagcatgggcttcttgctctttggccaaagccttgcgcaaggattccacctcacttctctctaatgcaagagcttccttgctagcaatgtaaaggttctcttgtttgataagagtctcttcactagattctaactcagcttgaacactctctaaatcctccattagcttagtgatgaacagtttggtcttgctatctaaatttttagttatgttatcaatttcttcatcattagacacatcatcactagagtaatcacttatatcactactagatgtgtcactagggggagaaggattggatttggattttaccttctcaccctttgccataagacaaatgtgaggggagtagtagtcatcatcaaacatgttgttgaagagccttggtgtggaggatggcttgtgaatagccacggttgcaatcttttcatcctcctcacttgagctatcttttgttgagtcccattcatgtccaatgtgagcttctcccatgtgtcttttgctctttttgcagtcggtcttgctctctttcttgtctctcttgtaattgttgtcttcgatttcatgaggacaatgagcaatgagatgttcagtgcttccacaattgtagcatagcctcttcttcttgtttgggaacttcctcttcactaccttgtagccttgctttttgagtaccttttgatatcttctcaaaaagagagcaatatcttgcactttctcatattgttcactatcacttttatcttcacttgatgatgatgttgtctctacttctttgacttgatttggtgctttggtcttgctagttgatgcttgcttgttggacttggacttgcttgtagagggtcgtttggttgacttgttggctttgagagctacatcatcattgatcttgatgccttctagctttgcttgcagctcaccaagcttctttctttcatttgcttcttctctttgcatatcaaatgtcaaaatccttccaagtacatcatttggcatgaagtactcaaacttcttcttgtctctaattagagtgactacggtctcatttcttggtgaataagcttccaacataatcttgacaactttatgatcatctaactcatcacaaccatagcctctaatcttgcccaccaaggacatcaacctatcaaacatctcttgtggcccctctccatccaaaataacaaatcggttgagcttggccatcatcaaatcaattcttgccttccttactttgtcaactccttcatgtgcaaggtgcaaagtatcccatatttgcttggcaatgtcaacaccaatcactctattgtactcatcaccatccaaagcactaagcaacacacttgtggcttgaccattgaggtgaatgattctcatctcttctaatgttgggttcttgggatcaaccggtgactcaaacccgttgcaaacgacctcccaaataccagggtggagacctataagataagctctcatcaagtgcttccacttggcaaagttagtcccatcaaaatgaggtaacttccctacgggcacattaataaaagacttgcgatcatggttagtcatagacatagaagaatagttaaaggatacggcggcatatttgtcgttgtcgttcttcttgccctttcctttcttgtccttctttctatgcacttgataggactcatcatcatcaccatcttcggagctgctagaaagctcactagaagatgtattgggagctttggcttcttctttcttcttcctagcttcccttctctttcttctttcttctcttttgagccttctagcttcttttcttgccttcttctcatctaatcgttgtcgctctttcttcttttctcttgcttctcttttgagctttcttgcttctttcctctttctcttctcttcttcattgagagccctttcaccatcggtaggctcgagatgaggaagtgtggtattacttgctgtcgacacactgaattggctgctatcagtgccagtgtcatgcaagcccatttcctccagacggacttccgtagactttgcaccgcccgatcctcctccgggctccatacctcacgcggtgaagcgcacacgaggtaaccggctctgataccacttgaaaggatccttggtagcctagagggggtgaataggctatctaaaaacctgaaactcaaaaactcaagttgcagaagttaaatgcctgtcggtaccaccgacagtttgggccggtactactggtgtaagacagcaggtactaccgacgcaaactgctggtactaccgacctcctaagagagctacgaaatcagagaataatgagttttgatttcagatctgggagttaccccactctcctagatgtagttgaggatgatgttgaagttcccttgactcggttcttctccaaaacgtagatcggcccttgttcacctatgaaaatgggtagagaggaagaacacgaagaacacaagaacaaggatagtcgaagctacctccacagcaagacaagatatttatcccgaggttcggcaatccccactaaggagttcctacgtcctcgttgttgaggtgaccacgaaggtccgaccacttaggtctcctccctcaagcaaccacgaaggttagctagagatttccactaagaatcaaggggtaatacaaacacttcggggtgccctcacaagtgagacaacacgggcaaccacgaagaacgcctagccggctagggttccaagaacccaagagtaacaaatgcaaaccaaccagcaagacgaagaaaccaagtgctcaagtcacgaatcgaagctcccaactctctaatctcacttctctagctcgaatctctcaaggattgaagcctaggagcaaagaaggagagagagtgggtgagtcaaagcttggagactattttctctgatgtggattcgaaggaatggaagagccaacggttagaaatgagggaaaagctatttatagataggtcctgaacaactgccggtactaccggggccagacgccggtactaccggccctcagatttaacggtaagaagtctctatgatttgcgagaaataagcctaccggtaccaccgggcttttgtcggtactaccgaccattgccggtaccaccggtggaaggccggtaccaccggcagttcaaatctccgcaaccaaagtgagcgcagatttagcctgccggtactaccggcgtttcacatcggtagtactggtgctggccggtaccaccggcccgagcctggtactaccggtagttcattttctcgcaaaactcaggagaagggctggcactgccggtaccaccggccctgagggttggtactaccgggtcaccctggcagagaagaaatttcctgagtgcctgtgagtgcaagtgtgtctctcaagcgcattaagtaaattgacttgagcacctctatcctcatcttaccaacttaatttgcatccctcttgatagtacggcgtttcctaaaagtcaacaaaagataaaaactttgtagccacttgagtcgaaacgccgtattgaaaacttggggtgctataattcaccgaatgttttcgttcaactccatcaatggaccaacacatttggtaaattgggctttttccatctcacatctcatatgttatcctcattcttattttacctgcttgtcatctcaacaaatctcattagtcctctaattgtgtggtcattaacaccaaaacccactagggcttgattgcacttacagtggtcagcctcaccagatgcagctagtggtctccccgacaacatcacaacaggctccagttgtcccaagtagtgtcgcgtctactgg

SEQ ID NO: 5151 - DNA, 2103 bp, Sorghum bicolor
  Intron number 1 from transcript Sb01g034260.1 (locus Sb01g 034260) derived from phytozome v7.0 (chr-ID chromosome_1; pos 57712498 to 57714600 reverse strand)
aactgtcaactgaccatagcacgagtattgaggaggtaattattctgttaaacaaatgctattcttgttttcacttcttaatgcatgtgctattatatacatatttgactttgagttcttcatctaccaatcctgcagatttagcaattcttttgatcaattttctttatttccttaaggaaatggtgatatgatataataacttctagttgtgctgtgtgccttagttaatacagcgatgctaaaatatgtagtctcctgattcgagttgattgtggcatcagaatttgataggattgattgtattagagtctacacctcttcatatacccaaatactttacttgatactgtaaaatcatgatattgtggttttgtaaggtattggtaaagtggtaagtagttcagttaacaggaaattagcaaccagaaaagttatttagaaaataaacattatgctctagctcttatatgtgcttctgtgattttttagacacttcctttcagttggtcaaaaatattcaaactcacccgccaccttgaactttttgaagtactggtttggcccatcatcatcacgtgttaaaaatgaattgaccatagacttcatgctcaatacttgtgctagtgaatacatgcaaatcactgtgccttttgtcctgaactgcagccagatggtcttttttttttctcgaacatgcagaagagttgtgtatcattgtattaatagaagaagagagttgcacatgcacacacccaccccactgtcatgataaagctataattgccgctttgaagagaaagaaggataacccaacccaacaaacttaaaagcccgagctaggagcagtaaggaaagtgagccccttagctcatgccgtgcaccaaagctgagatttctccccagcaagacaaagggctgtacctgtaagtaagctcggagaaatgccatttaacacagtcgtttctgtgtttccacagcaaacagccagatagagtctcagtctgacttctttgagttatctaagatgaccagttgagcttactcactaatttagctatgcaggaactaccaaataagttctttaaaacaaaaaaatgttgactctaatatttctgtttgtccaatataccaaattccatatctaaaataaattttgaaatataaggattgctatattgattattgaacataagtataccttgctagctacaattgttcagtacatcctttataagagatctacagaccacaacctagtttatttgcatgtaagctcatagatgacgtgctaacttccatttactgtcttctctttatgaattcataccaattgatttagcagttatctgaaaggtaatcttttgcaacctttcaacatttatttttgtgctggacattgcagcagagaaatgagccatcagtactagtttcttcttaaactgcctgggtccacattattatcattttagcatcttgacaacttattgctcattttttatgtcggccttatattgcctgatctttagattataagtgctgtttttatgtactttggtccagtgttttacacgtgcagacattaatttcgaagggtgtctaagtggctctgtttattacgtcctgatgtaaatgaagtcaggctcaggcatagctttcatcatctagaaatgccttcaaatgaatcagtctggtttctgtagctagtttatggtttttgaggcgtcctgtggtgctgaggatatacctggatgcctaggcagcgcctaggtgatatggcataacttaaaccttgtgacacccgggccctggggtacacctcaacacctaggtggcgcctcaaaaaccatagaagaggatataagacttagttttttttttcaatatcttcattcctgctcagaacaaatcctccagttggttcatccagtcacatttgacatttaaagcatttaacttactctttcaaatttcattgttaaatctggttaccgttctaccttgaactattacaatggtgactacaggctacaatttgtttaaccagtttattttgtgatgacgcacttcaggaagtcttgaggattaaagtagaacatcctg

SEQ ID NO: 5152 - DNA, 6023 bp, Sorghum bicolor
  Intron number 9 from transcript Sb09g007340.1 (locus Sb09g 007340) derived from phytozome v7.0 (chr-ID chromosome_9; pos 12734996 to 12741018)
catataatctgcagaggttttattccttttccatttgtctcttgttatttatctgtctgaatttttgggatttgggagggagtataaaagatgggttgatggatgagaagggagccttggatcagggagaaggttttaccttcttaatgctggagattatgattttccttaatgggctaatcctagaagggtagctatataacctgccatacatgggcctcatgggcctaatacacacacatactccaacacccccctctccccccgcagtgcgcaacggagttacagactggacacgaaaagaagcacacacacgagccccacacagacgcaactagccactagtgatgttgaggctggagcggaactcggtgaaggtcgaggacggtaggcccttggtgaagatgtcggcaaactgggaggtggtcgggacgtggaggacccgaacatcgccgatggcgactcgatcacggacagtgtgtagatcgatctccacatgtttggtccgctggtgcttcacagggttggtggagaggtacaccgcactgacgttgtcaaagtagaccagggtgttccgagagagagtgtgttgtggagctcggcaaggagctgttggagccaggaggcctcaaccacgccgttagcgacagcgcggtactccgcctcggcactggagcgggagaccatcggctggcgcttggacgaccaggacaccaggttgccgcccataaagacagcgtagccggaggtggagcgcggagtgtccggacactaggcccagtcggcgtcagtgtagacgacgagctcggtggagcagaccgtagtcgatagtgccgcagaggtagcggaggcgacgcttgagagcagtgaggtggggttctcggggatcatgcatgtggagacatctgctgaattgcataggtgatgtctggcctggtgcaggtgaggtactgaagtgctccggccagactccgacatgcagtgggtctgtcactgggttgccctcggcctctgacagctttcctgtgtgtcaaccgtagtggagcagggcttgcagttagtcatcccagctcactccaggatatcaagagtgtattgccgctggtgaagaagttgcccggtgggacgaggcttaacattgacctcgaggaagtggtggagcacaccaagatccttcgtagcaaactcctactgaagagaggtgatgatgcggcgaagtagtgacagactggaggctgtgaggacaatatcatcaacatagagcagcaggtaggtagtctcaactctgtggtgatagataaacatggacgtatctgacttggcttccacaaatcccagtgtcaacaggaaagcagcaaaccgagagtaccacgcccgagggccctgcttgaggccgtagagacttgttgagccggcagaccatgtcgggatgagaagagtcaacaaacccggccagttggctgcagtagactgtctcaatgagagcaccgtgcataaaagcattcttgacgtccagctgatgcacaggccatgagcaagtgagagccaatgagagtaccgtgcggacggtggctggcttcaccactgggctgaatgtctcatcatagttgactctagggcactgagtgaaaccttggagaacccagcgagccttgtacctatgaagggtaccatcagcccgccgattgtgtgtctagatcgacttgtcggtgacgacgttggagccaggcggacggggcaccagatcccatgtctagttggcaaggagtgcagcgtactccttttccatcgtgcggtgctagtgagggtccgacaaggcgtcgcgaacggaagagggtacaggagagacctgtgggtcgccgggcatcgccgcgagagcccggggccgcagggtaccagccgcgtgtcgtgtcaccatagggtgaacgtgacgttggtgtcggtgcagaagtggtgggtggtacaccagcggcatgacacgggcagccgtaggctgcggtggtgtaggtgtcgtcagcgcagaagaggccatgggtggtgtaggcgtcgccggcggagaagagaccaccgggggtgactgaagcagcggagccggccgcgcacggcgctggtagacgtgcaccggctgggtgaaacgcgcaggaggcgttgaagccgacgtcctcggacccgcgttgggcgtaggggcaggtgcagcaccggaggctgacgcctccggacccgtgcatggcgcagggccaggggcgtcattggcgggcggcgagctgtggcacgggtccgtcaaagggcacggtgaagcagtacctgcaggatacaacgacaaaggtggctggaccaccatgttagtgggaaacagagagaagagtcaaggtctggggtggaagtggttgtgatggtggtggagaaggggaagacagactcatcaattaccacatggcgagagacgaggacccgacgagagatgaggtcacaacaacagtaacccttgtgatccggggaatacccaaggaagacagagtcgaacggggagccaggttgtggggagcggtggcagtggtgttagggtaacacgcacacccgaagacacgaaggtcctcatactgaggaggtgtagcgaagagagcatggtgtggcgtaggagctgggcaggcagcggaaggaagatggttaaggagataggtggaggtgcgcagactctcagcccacaagcaagcaggaagcaacgcctggagcagaagggtgcgcatggtgtcgttcgtggtgcaaatcatgcgctcagccttgccgctctagaaggaggtatatggacaagacatgtgcaactggacatcgtgagaggaagaaggcacgggaggtggtgttatcgaactcacggccattgtcacactggacgaccttgatggtgaggccgaactgagtagacacctagatgaaaaagtggagaagtgcggggaatgcatcagacttcgcacgcaagggaaacgcccacgaataataagagaaatcatcaaccaccacaagatagtatttatagccagaaatgttgatgacaggagatgtccatagatcgcagtgtacaagatcaaaaacatgggcagcatgtgaagaagtatgaaaaggaagacgaacatgacggcccagctggcacgcatgacacaagtgctcatcgtgagcccgagtacaacgaatgtcggaactacgactaagctgcatcagagcatcacgatcaggatggccgatgcgatggtgccaagtggtgaaggagtggcggcgcaagcagctgacaaaatagacgatgaagaaggcgtagcagacgctggaaactgaagggtgtaaagggcccccgtgcagtcacatcggagaagaggacgtcgagaagccaaatccttcatagtaagaccagaagagtcattcaacagaacaggaattgtcagctgtaaattgacgaatagaaaggaggttgtgaactatagaaggtgcaacaagaatatcaggaagacgaaaagaaccatgagcgctagcggcacccatggatgtgataggaagacatgaaccatttgcgaccatgatggacgaagggtgagaggaaggagggtgaacgaatgagagtataccagggtcgggagtagtgtggtaagtggcacccgagtcaacgatccagtctaaaccgacatgcggtgttggggccatggtgttgaagtagtgagccagaaccgccgagtcccaaccgactggcccgggctaggcgccaggaggtgtagcccacggagacgcagagtgaaacccgggaggagccccagcgagcatgcccgccggcgggtgaggctcccccccgggagcttggaaaggccacatagagatgcgccccgcccccggtttgtggaaggagggttagggtcccccccgtggaggcttgggcgccgagttgttcccacggccaggacccgcaccaggtccccttttagggggagggggtccgccagggcgccccccagccccgttggattggggggggggggggggaggaccaagaagagacgacgacggcggagcggacgggcgcaacggaggagtagcagcaagggcagtcgaggaagatgaggaccccgacgcggagagagatcccagcgtggaggtggaccctagctggatgccctgagtgagctcctccatgacaaggtcgtcacagacctgtaggaaggtggggaagggccgctaccgggtgatccacgtccggaggtgagcgtagcggtcactgagctcgtggaggacgttgaggctaggatgcggtcctccacgggccagccaaggtcgtcgagggagtctgccatgcccttcatccggcggcagaagtcgctaatggagaggttgccctggacgaaggtacggaagctcgcatcgagatgcagagcccgggcttcggcattgcccagaaactggccctcgagcgcaagccaggcccggcgagcatcagcagagttgtggacgaggtcatggaggctgagggagatcgtcccgaggatccaagagagcatgatactgtcgaggcgcagccaagagggggtttggacggcgaccgaggcgtcgatgaggacgtggtcgtcgagggtgtagcggtggagggtgaggaggatcaggtctcgccaacgggcgtaggagggcgactcaggctcgaggacgaccgggacgaggagccggaagttctggacacccctggccctggtagtggagctgctccacgaggggatcggatcggtcagatcgtgccagatgacctcagtgtgggacacgccgtgacctgtcagccggaggaagtggccccgaggtcatgtgaggcagggaggacgaggagctgctccgcctcggcgatctggcgggccagtgcatcggccgcatcgcgctcgcgctcccaagcgagggtggccgcacgcacacgggccaagccttcgtggcagcagcccgggcagcgacgacggcggcggcgagggcggagtcgggacccgctgcgtggaggtgggaagtgggcggcagaggactcgtgtccgcgcctggggctgcagcagccgcagcgcccgcgccggccacgcctgcgtcggccgctgtgcccacacctgcggcacccgtgcggccgtgcctgtcgctaggaggagaagtggcggcggcgctgggcgcgcccggggtggcggtgggaggagggggatgggcaacttgcgcccacgtgtagttgggaagagggggaagcagtggtagtaggtgggagagggaggaggagggccagccatggctggtggctggggaggaggggagggagaagaaacactagctggataccatgctggagattatgattttccttaatgggctaacctgagaagggtagctatataacctgccatacgtgggcttcatgggcctaatacacacacatactccaacactaaatccttacttgcctctttagacgtctgtctcgttttatcaagaggatcttagtagccaaataactaagaaattggatctaacttaaaattgacaatagcatccctagcttccttatctcataataagctagatttgttagaaccaattctagatttgtttgtattatttcgctgatttaaatagattctttgaataataacctttgttcaacatttttttcaagttctagcatccacaccagccagtgttgttatatgggccggatggggatttagtcaaggcccatggcttcactatatgggctgccatgccaaggccttagtgataaaccatgccatgccattgaccttgagatgaaagcccagatatccacgccaaggtcgcttgtgtgacctaaagtgctaaatgttaaaaatttatgagagcaaatagtctacataataatagaaaatcccattctacgctctgtagtacattgaccatagagaacttgagatctggcttagtagttgtacctaatttcagttatattttatgatctcacagaactgcacagtacgatatccatcccataaatatcc

SEQ ID NO: 5153 - DNA, 827 bp, Sorghum bicolor
  Intron number 8 from transcript Sb04g029600.1 (locus Sb04g 029600) derived from phytozome v7.0 (chr-ID chromosome_4; pos 59689916 to 59690742)
gccagtgaacgtaggttcctttggtttcttagctatttctgttacctttatgttctatatatatttggatcttcttgttggtgctgtcattacaagatacatctttctacacatgctgtcagcaaataaaatttacagaatacagacttcattgctatttcatatgccccatagttgtgcttgtattatcagcttgttctactttcttgggcatgtttttgacctattggttattgctgttggtgaatctaccaataccgagatataaacctatagttggtttgtagaacaaatccaaaatgcctttacatttctgttgccgcagttgatgacatagtaggctcctatcttctggatatacagtattaataaaagaaaagtgacatgcactgctggcgcccttcaatatacctggccattctggacatgggatccgtagcttccctcttcattgtcaccttttctaacataatgtggaggctaaatgggtccaacatctgtatgaatttcacaaataagttctttttgttccaaagtaaagttcaaataaatgttgtggatgttgtggaaatttatcaagacatatttcatgaaaatttaatgagactgatttgatgttgtggatgttggtgcattttttctagaaaacttggtcaaagttaaagaagctttggcttagaacaaagataaagtgaccttataatttggaatggagggagtaggtcaagtttagtgcaattctttattatttttgttgctgtatctgtgtttacttgtagtttgtcgatgcagcatacttcgttgagtcctgacagaaaggtagttgt

SEQ ID NO: 5154 - DNA, 2666 bp, Sorghum bicolor
  Intron number 1 from transcript Sb01g013720.1 (locus Sb01g 013720) derived from phytozome v7.0 (chr-ID chromosome_1; pos 12785210 to 12787875)
gacatcgcctccatcaggcagacgcagcacctcatgtgagctcgcccactccccctccttccatccccgattccgtcgagccctgaatggttcagatgttctgattcatcagtactactgctgtggctttcagttgctgtgtgcctagcgtgctaattgagatatttttgggtattcccctcgacagatttttagacggttctgggcctaggttcagtgcgatataattggctatttgccattgcagttgttgcctccttgcttacaattgccactgagtctatgaagaagtcaccaatcaaccacctatagtaaattagtaatttgttgctcgattgcttccatgcctgatgatgattcatcatctaaagagtgtcctgacatgtgctgcccttattactcttcgccttttgtttctctgaaaaatatttcctaggtgcttactaaaatttcacatggatccatgtatagagttcacagttaaacaaatggtcattgtggcgcttaaacctggttttccatttctgcatttgatcaaaggaattgaaacttctctgccattgaacggacacctgttgctattttgggttcatgcatattcttagtcatgtaaaaggcatatttgacaatttaaacttttatagtatctgtagttagtgaagcttgcattagtttagcttgccctgtttctactaatattacaagatgttctaaacagtattatagttcatacatggcaccttccagtggttaaatcatatgaaaatggaattgtattatttagaaaattttgtttaattgaaattggtgtgaacaaatgcactcaattagaagttcagttaaatatttcaaaatttgcattacagttacagacataataagaacagattttaatatttacatgtgacatatgtatttgccaaatatgatagcatgatgaattccatgatcatgtttcaaagaaaaaggaacctgcctagggttatgatcctaaacttttatggtattacatttagttaaggttgcattagtttagttttccttcttattgtattaattacaagatgttctaaactgtattattgtttagacatgtatgttaaagcccttcacttgtatgactatctttactagaactagaagtaagatgatcctatcaaatcccaaactagtatttgctttaactgacaaaagcttacagaggaaaagctatgtgtgctattaacgactaatgatgacttaagaaggtatgccttgtcttgtgctggcatatcagaatccaacttaattatggatggaacttgacttccaaactagatgtgcattctgtgaaaggttttgttgatatcaggttgtcagaatctgtttagaaattctgggaatcctatctaataattaagagagcaatttgatctacaagttcatgttatcacttgatatactttttaggattttatcttaagaaaacttgaatttttccaatgattcactgagcagagtaccgtttgttagtagtcaatacctgcaaatttagcttcttgttgcaaacagcccaagattccaacattatagagtttggttgtttctaaaccttactatttattaattacgatcctcaaatgtacataactaaatggatgtagctgttgtataacttttccttttggaatagaggaatgtacctcttaggcacctacgatctctaagaaattgagaagcacttgattctttaggagaacggtattttctagcactttatgtactcactaatcttccattgcaaatgaaatttgactgccctttttttattgcaagtttaagagttaggcgacttaaatatcttattattcttgctgttaatggtagttccatagttggttataaacaatgtctttatgacatatatgcaacaccagctggtacagtgggccagaagtacttggtgaaggatttatgctcctaatgttgcttcattgtcttcacgtaagcagaatcgtttatggagtcactagcatccattaacttcagatcgtggtacacaaaatattcatgattatgtcataggaagaatacaaatatctacaaaattgactattctgtaatggatactacagatattcagacattcagtgaagaacggcaaaatgctgcccaccttttgacagacatgttaagtgttgcagtttgtttccatgagatatgctctgattttagactaacttgcctaccccaattgatgagataggaggtcgatgcacaccagattatctgccatcctatgaatagtttagaattttgaaattattcagttctatactaggtcatactgagtatatgctgccatgcgaaaggtctgcatgtacgggagcttccccgccttatgtaagtattcttctattgcagtttcccatagaagcgatatatttgttcacattttgtgtgaaaatgtttcttatgcgagcaaattagctaatgaagcatgaaggatatcatgcaattttttgtaagaagtatgaggaacgctagttgctctagtgattcatatcaattgtttggcgatggaagttgcagtaactattgtcttcctttccatttctagttatgatcatctgaattgtgattgtgatttcccttactatgcagactggggcgattgcaagatagca

SEQ ID NO: 5155 - DNA, 1301 bp, Sorghum bicolor
  Intron number 1 from transcript Sb01g033570.1 (locus Sb01g 033570) derived from phytozome v7.0 (chr-ID chromosome_1; pos 56894756 to 56896056)
tcttcgccgtcaagttcatcgagagagggcagaaggtaatcaatcaatcgcaaatcatcgcccgccctttaccttcctcaatccccctcttcaaagatcatttttcccccctcccctcctcctcctccaaaggagtctccttggtgaacatacgcgactagcctgcttcgtctcttccgcgtcgtcgtctgatcgcgaacgcgagcacccctccaaaatgttgggggattcagtttcgtcctgaaatctcagcggccttcagatccatcagacggaggtttgcactccacgttcgagactacagatgcatcggcccgagtgattttgttatgcttgtcagagcttttttttttccttcttcttcagggtactgattagtatcccgttttgtctgatttgatacgctgtttatcacaaaaaagttttcccaagaacaaaataactggcggatagtatacagggagactcacttcccggtagttttggtccctttttcccccggctaaaattgcaacttgacggcttgtgtaattggtcgattccccagtcttgcttgaccggagacctccttgatctttgagtagtacacgtgatggtttaattaataaagcaagtcttgcgtacggcatttagcccccaaggaagctaccagaaccagactgatctacaattagtaacttcttgttattatataacgtattctaagagttccaaactagcatttgctttcagtgactactgtttttcgatacagttcggtatcaccctggaacatgctaaacttgtttgagctcattccctttactttaatggtttggatggcctctccaagattaatatatacactatcttttggtggatgtttctagcatatgcgtgatctgttcatgcatgcctgtgaacacggggagttcattaattgacgctacagtttagtatgctacgctgtccattgctcgtttcttctttttgtgaggctctgtccatcgcctgaatataatataggaggaggagtattcggggatttctttctctatactttatgccagctgctgtggtcacacgttgtcaagtttatctatacttccattacaagttacttttttttttgcttggaggatcctccatataatcatcatattacacattggccccctttggaacacggatttttttactgttcctgcatttttcatgtgaaaaattaaatgaactgattcctgcgttccaaaggggccttgaacataatctagctcagctgattaatcaatctcacatcttttttcttgtctcgtagattg

SEQ ID NO: 5156 - DNA, 1380 bp, Sorghum bicolor
  Intron number 2 from transcript Sb01g031840.1 (locus Sb01g 031840) derived from phytozome v7.0 (chr-ID chromosome_1; pos 54550779 to 54552158 reverse strand)
agcatccaggtacaccctgttacagatccgtgcctttgctcttacgttttttatgtcttttggtggaatttcttgatggattggtagggcatgttgtgcttagactgctggattagtgactgtggctgtaacttagattggagttttatctccacggttagggtcagttgtcaatttttacgtgggggacgccatgaatgaagtaagttttacatactgctatgtgcctattagtttgcaccgctcgaattggaggctgaaaataaagataagctgtatctttatatatggcaaagaacataaccagtcataacgtcatccttccccttaatggggcttctctgatcagtcaagcaggcaacacagtttgtctgtctagttgtagttacagcccaatcttagggcatgtttggataacatggggctaatttttagctcaaattagccacagtgaattcaaagatgagggctaataggtgggctaattttttcttttagcaaagtcttgaactggtcgttatccaactagctagccaaccatagctaatttgagctaatttttagccccaactactagccttgtgtatccaaacaaacccttatgtttgctcattgggtaccattgcagcggttggcttagcttatagtgcttactcccttgttgacaaatatgcttatttattatttattatgttgattgatggaaaatcagttgtctgtggcgaaatttggcttcagaaatggcactattgtactaatcccaactattacccatgaaaaacaacttagtccatttgttttgtctgtgcaaattattctacatcaggcagtagattccaatccattgcttggagttgaaattcgaactgaacctggactatgctctattttcttctcaggcaaaacaccaatcacgcccactgttctgaactgtttgatcactttgatgcttggaatctatttggggcttttcagagtgttattgagatacctaaactctcaaattgtggatgagtctaaattttgtttaagtgtgccactaggtctaaaatctcatcaattcctatgtacttgcctacatgaggtgtctggcatatttaactggtttagccacatttgggcctagatatgcattttagtagttaggggacattagatgacaccgtggaacgctgcttagcaccagtggttccatgcaagttgtatcggtttctttgttagagttcacgtttaatagaggagttttaaatttctagatgtactcaaactgaagtaaaattctgcaaatttttagtctcggctgcatattttcacaagctggcgtctcaagtgttttactgatactgatttgttttggccaacctgaacacagtgcaaagt

SEQ ID NO: 5157 - DNA, 5602 bp, Sorghum bicolor
  Intron number 6 from transcript Sb09g010430.1 (locus Sb09g 010430) derived from phytozome v7.0 (chr-ID chromosome_9; pos 21472570 to 21478171 reverse strand)
cgactgcagaacaggtaaaggagatctttggctggtcatgtcactagcttgttctttccaataactggtaacaaggtattaggcagcccaaagtgatattatttaaactgttaactattttttagagttttagggctcatgccctagtatttcaactaaagtgaaaagacaaatcccttacagcgtactggatgatatctcatcctgaaacagaatctaaaaagggaaactatctcaccatccaaagtttctgaaaactaaagaacattgcatcaactccgtactattttaaaaatctttcctccaaaggtctgaagaaggtaaccacttctctccagcaatttcgtctttgactgcaaacatgttctaaccttcccaatctgcccagaactgggaaatcgtctgtgggtgcccttgaaacttcagttgtgtagccacaagacccttcttgctgaagacttcatctcctccaaaatgagtttcaatagctgtttcgtttctggtgggcacagaattatccaattctggagaagccgagctatcctgaacagcagcatctccatgcttttccagcctgttttctgaaaacaaatctcatttctcagttttcaaatacttcacgaactgcagaagtaacaatattaggagtaccgtgctttttatcactaagccatgttagaagtgcagcagctatagcctataggatgagcagaggtggatagagtagctggagtttagaagacagcttctttgaagcaaactagcttgtgattcatattgagtatgcctacatatatatagcagtacctaggtttacaaattgacctgccattcctaacagttatataacaactgtacaaagacaaattaacgacaactgcaggctgtcaggacagctgcactactcagactgcctactccatccgtcccccaggaccgggcgcgaaaaccaacgtggtggagaaatgacaaaaattcccttatacttaatgacaaagagctctccatgtctagaattctctctagtgtgctagattaaaaaaaataagtgaggtggcaacctggcaggtggcctttggtgtgggtctgaccctaggttactagccctgatacctacatgtgcatttttctgatacaaattttgaactcttagattgtgtttttttgggactgaaggagtaagcaaaacaactgactacatatattgctgctgtgcacaagtaaaaacaaaattgactacttgtacctgctgttggaggcagcagctagacttcctgtctaagaataatattcttagaatatggtgtaaatcgacctatatgtcagtagccagctaaaagaccatatactactagtacttagctatataagccttaaacacaaggattacttctaacaagctgaaatttccctatctctaccaggttgtctcctactttcacttaacaatatcagagatcatactccaacactgctttgcgatagcacaatcaaaaatgacatgctgcacatattcaaccttagaacaaaataaacaaccactaccctcaacttcctcttctttttgctagtttgtctctagtcagaactttattattaaagatctactagagaaataattgcactctaggtaaagctggatatcgagctagctcgactccagcttggcttgactcgtcaaggcaacgagctagagtgctggcttggctcggctcatttgccagctccacctggctcgtttaactcacgagctgaagctatctcatccaagaacaaggaggggaaactcgaaaggaacacttgattcgagcgcagcaaacgagtagacgatgcagaataagtaatcacccaaaaaaacaatgatctttgcaaaaatcaaaccccatcaacaaaaatgcaaactcaattattcaatcaccggcacttggtcccgaagaatgcacaaccaacgctttgcatcgcatgctcacagacctccagttcaccacctgagcttgcccaaatttggcctcttcttgacttgcttgctcgtcattttccatggagcagtctacatggatgtgtatccattgtgttggggacagtgagttatgggagcttcaagactacgacgaaagcagctgtggagcagcaggtggccggtgttgtcatgtggggctgctcatatactaggcgcaggcgcaccagggacatccgctgagcagcagaacgtgcccagcgtgtggtgcttgcgcaggcggagccaccgagtcgtggctgagtaggagagttagaatttatttctatttttagttcctacaaattagggaggaatagcctccagttagtttgggccacaggctatatatatccatgtaatcagactcttggagatcaagcaagattatttccatctaatctctctctttcctccaaccaaagcccagccagccgtgagggaggctttgtctcaggcagatctggagcgactggattgaacagaaaggcaggagactacgaactccgtagttgagggccagctaccctagggcccgacgcccttgacaacgtgatatcacattcccggagatccttgcctgctccacctgcagccgccgcaccgccgacccccctgtccgccgcctcttcctgcgccagcaatatgggcgacaatggtgacctcaaaggccaccctcgatgccctcgccaaagctgtgcaaattctgcaggcctccgttgaagcgaattcgaaggcaatccaagccatcacctctgatcgctcgtcctcttcgggcagcaagctggggtttggcgcacaccacaatgatcggccactgaaattctagaagatggactttcctcgctacgatggcaagtctgatccactgattttcatgaatcgctgcgagtcctacttccatcagcagcgaatcatggaggagaaggtctagatggcctcctataatctagaggagggcgcccagctgtggtacatgcaggtgcagcaagatgagggtatgctgacctagcggcgcttcatggagctgctcaatctgcgctatgggccgcctttgcgctcggctccgctgttcgagctggctgattgccgtcgcaccgggaccgtcgctaagtatcaggttcggttccaggccctcctacctcgcgccgactgttttgatgaggcgcagcgcgaccaacttttcatcgaaggactattgccgccactcaacctggatgttcaggtccagaacctgcaatccctcgctgtggccatgagtctggcgcggcagatggagctgcgggagcagtacagggcaactgcagcgggggctgcggtgtcccaggcttggccggcccctaaggctctacttccagcaccagcaccatgacttgccttgccttgcctgcaccgccaagcgccaaggcgtcagcaccggccacggttaccttggaagggcaccagatcaagcggctatcaacggctgaacaagaggagcgccgccgccttggcctttgctaattgtgatgaaaaatacacccgccgccataacaagttctgcaagggtctgtttctgctggacgccgctgtggaggatgacgacgtcctcgacgctgcagccgtggacacggagaacccgtgctactccctgcatgttgcatgctgtagcgggtgtccgggtcagcgacactttgcagtaccacgtgtcggttggaggtgttccgttgattgcgctgctggacacgggcttgacgcacagtttcatctctgagggtgcagcgcagaagaccggtcttcctctccaacgatgccctcgtctcacggcaacggtggctaacgacgagcgtgtctttgtgtcttggtgtcagtcgccaagccacggtcaccatccagggcgcacgattcgttgccgatcttttcggattctctaaaattccctcttcatcaatatccccttcctctatagtgaatacccccgaaattatccataccattgcagtgcttgaacctgtcctctcttggctccacaccaacatggtaaaaacctaggtctctcttagcattaccatagtggtgttcttaccctttctcgagaagagcaccggttgtggagtctagcaggagctaagggtctgtcctcttttgacagcccctctccttggtggttagcttagtgctagtttttcttggttgccacttcttttttttttcaggcacaaatgtaattgctgagttttgtggggttgtgtgtggcatgtgttgtagggctgtagaccctttcttcttaatataatgatgcgcagctcccctgcgttttcgaggaaaaaaagtatagtgcagcagttggaggtttcaattcaggacaatgcccgatgacagattctgggaggttgtggacgaagctggtgctagttaagcaagtacctgaactgtggttgtggtagatgattgaagaagtgtgggtgcggtggtggtggtgaaggatactgcagatattgtttccaacctccaccttgccctgtctagtcatcatgtgagtcagcgctcagcgccacggtttctcagtggcgtcctgtgctccctcatgggaccctctggccaggaacttgctgtcggtgagcctgtcatcacggccgcctttccgatcccttgtgtccctgtcggctccccttcatctgtgagcctctatagtcctcaactgattttttttttctttcaaggagtgtttttgctattatattttgtagatttagggcaaagggtgggcctgtggcaattcttgttctttgtctaattagccttgcaaaaagagagagagagggagggagccttcacccattacagcggcttgtagatttagggcgtgtttggtgtggactgcaatttatatatttgaagctactgttgggaaagtagctgttgaaagagtcaacagaatttcttgtagatcgtttataacttcagtcgcaatataggccaagatagctgcacatcattatattattaagaagtggtcctttggaaatcaacattatctgtgttttggttatattaagaattggtgtgggtttggttagggattctcctctccattactctttcctcttaatgaaatgatacacagctctcctgtgtgttcgagaacaaaatattaagtgatcctcgtcccaatctttgaaacatatttgtgttgcttcagaaaccaacaatatctcttttgcaacttgttttagacaaagcagctaactgaaataccaaatgataatatgtctgaaaaagttttcaccaaacagataatcataatgctaaccaaatagatcctcaagtatattgtgaccgtaatatttacagcttaacttcggttaattagccccagtatatacagaaaagtatgttgtggcacttgcacagtatatgaatggaaaaatgttattgtggtatcacctgtatccttgagaaagcttactagattcttcctttttttttttgaaaaaggactatcatgagttcccaatatataagttatccatgattttatcctgagtctttaggatttgaatttgagaattctctaggttttttcttattgttgggactataatgcaggtacttgctgctggtgat

SEQ ID NO: 5158 - DNA, 8213 bp, Sorghum bicolor
  Intron number 7 from transcript Sb08g001400.3 (locus Sb08g 001400) derived from phytozome v7.0 (chr-ID chromosome_8; pos 1362755 to 1370967)
ttattgggccagctattggtggatacctcgcacaggtatccatgagagatgtttgctatttaaaggtttttatattgtttctacataaatcttatcatggtactattttcttcggcagccagttgaaaaatatccaaagttatttccagccaattcaatatttgggaggtatctattttttttattgtgcatgtccacaattattatactatagttaagttagttgttttagaaactccctaattttttgtgtgttatccaggttcccatattttttaccatgtttgtgtgtatcattcttctgtttggttatcctcataagctgtatttggctcccggtatgtgtaactatgctggcttgttgttattaatattttatattaagttaattataggtgtgcatatatacaccatgcacgctacactcatatgctcacaagtgtgattctacaaatctaaacatatgaaaaacattagttcgttgttaaacatttgcaccaagatttgaaaactagtagttggagtcataagctcacacatccaccaccctaagctgcagttctctattcggtaccatatttagccatctgttgcagaccttcattttgtagagattttgttacaaacttgaaacctcaacaattgtaataggtattaccattacatgaccacctctatcatcaggatattaaaaatactataccactaacacatcatctgacatatggagaccagagtggaggggtctcatggatggtgatgatgatgatgcaacactgcaaaatcacacaaaatcctatagaaattatatatttgttgacgcgaaattcagtcaaacactaaagcattggtacatactgtcgagggtatcagtaaggggtaccctcagcgatgcgcattacgagattgcccgtacgcaggtcgagaccctcaattcgacgctctaatctcacgtatccgccgccatcgacggccgcaacctcgaagacggaaatagcgtcgagcgaatcgatcaggcgtcgagcgctggttaccgtcgaatacggaacaggctcatgcgaaccggggggcgtcgagcgcgaggacgccatccgccgcctgacgcgcgcacgcgggccggagcattaaatgcgcccgatgcttccccacctaacgcacaggtcacgggaggcgtgatagggaacaggcttccgtcccatcaatctttttgcagccttcctaccgaacgacccggggcgtgtcgggacacaggaaacaaggatggaacgtctaatcgggaccccctcgagacacccaaggtcagcgctccagatatcagcatattacgcagcgtccgaccctcgaccgaacagggtcccttcccagggacaagttgggcgtcgactgacaacaccacagctaccccgccggatccgccgccatgccgtacaagcacgcgacctcagaaccagtgcaaggcggcgcgcagggcagaacgcaggagcacgcgtaatcatcaccgggctatcaagatgggacggctcgaggccatgccgtacggaagcctcgagtaggtcggcgctccatgcggctatcgacccctactctaacatctacgcatgtaccctgtgtctctccttggagctataaaaggagagactcaggaatagaagggagaacacactacgacacaaggccacactcatacgtagtagagcttcacacttcataccacgcttgtattcgcccctgtacaagcacttaggtgcaagataatacaaactctctccccccgctggacgtagggccttctcttgcccgaaccaggataaatctctgtgtcttcttgcatcaccatccgggaaagggagcacgcatacaaatttactcgttggtgtgaccccccggggggaaaacaccgacagttggcgcgccagataggggtcctgcgtgttttccatcgatttcccactcctttccggatggctactctcgcctcgccatttccgcgctccacggtgatttggtttgggagtctcgagttcatgtctacgggctccggctacgacatgatcttgctctcagtcaaaggaccaggaggagcccgcgttacgccagcacggttgaaggccccgagacgccctcaccaccacgcctccccgcctaagaagaggcgcggacagcaccaccgcggcccctctgcttcagcacgaccaacagctcgtgcgaggcaggacgtgggccacaaggcggcagcaccatgtgacggagcaacaagcgcgacgactcagcaccgcgcgacgacgggaggggacgcgtctcgcgcgctctcccctaccgcagctaggctacttccacacgggttgttctctccaagggcggcactgccgttcgggttggacaacgccgcggcgtcgctcgccagggcgatatgcccaaacgcccagacgtacgtagaaagaccaatggtcctcccacgtagctctgaagcgcggcggccggcgtccgagctgccggacctttcccgagtacgagacctccgtcgtctaggccccggacgatactcgatcacctccctcaggcaacgatttctagaggaaggacgtaggtgttcccacgccgccgaaccggactccgactccgaaacagatagctatgaccctacgagggaatgctatcacatcgacggggcggtagaaactactgacgagacacgggatgctgccgcgggtggtcgagcccccgcagcgcgagaagaccccaggacgcctgggaacgacggacagctcgacccccctcctcaggaagacagaaccgcgcagctcgcgcagctgcgggagctcaaaatgaagctcgacgaagaccgcgagcgcctcgtcctgctcgagcaaatcctcgagcaagacctgccttacccgccgggcggaagtgtccgcagacgcgctcgagaggtacatcgacagatcgtcggcgacgcagagccagagcaacctgtcagccgtttccctcgagcaggccagaatgtagtggcagcgacgatgctgctacgtaacatgccagagccgtcgaattcccaggcccgacgcattcgagatgaagtacagacattgctccaggtggcagcggttcaacaagccgaaagttcggcgtctcgacgacgaggagctgccacagagaagcacgacgaacagcctctaaatgaagaggaggtgtcagtccatcaacaacctccccctcgaggtagaaagaccgctctcatcctccctgccgacaatcaacgtcgacacgacgcgcggcacgacatcaaagaaaatagacgccgccggcacggagacgcggaagagcgtggttatagcgcgcatcgcggtgggagatacgacagcgacgaggaccgggtgacccccgagccaccgggcccacgggtgttcagcagggcgattcgcagcacgcccctgcccaatccatttcgacccccaaccagcatcgcgaagtacaatggagagaccaagccagagctatggctggccgatttcaggctggcctgtcagctaggtggcgctcgaggtgatgatcgagccatcatcagacagctaccccttttcctctctgacaccgcccgtcgatggctcgaggaactccctgccaatcagatccacaactgggttgatctggtcagagtcttcgagggaaacttcaaagggacctacatacggccagggaactcgtgggacctcagcaaatgcaagcagaagtcaggagaaactcttcgggagtatgctcgacgcttctcgaagcagcgcactgagctgccacacatccctgaccacgacgtcatcttggcgtttgtctcgggcaccaccagtcgagacttggtgcgggaattaggtcgcaatcgacctcagaccgtcgacgagctgatggacgtagtagctaactacgcggcaggggaagaggcagtcggcgccttcttcagctcagaaggaagaaaaggcaagcagcccgtcgatgaagatgggatctccagtcgaggcctcaagaaaaataaaaagaagcagaaagtgcggcaattccaccgggaagactccgatgacaacctcgtcgccgccatggatcgaaagaagcctcgaggccctccggatggaggcatcttcgacaagatgttggaggagccgtgcccttaccataagggaggtgccaaccacaagctcaaggactgtcgtatgctgagaaggcatttcgacggtccagggttcaaaaaacatacgcgtgatgactccaagaaagagaaggctggcagcaaggaggacaacaaagatgacgacggcttccccgccgtccacgactgctacatgatctatggcgggccctccactcaactaaccatgaggcagcgcaaaagggagcgtcgcgaagtctttgcggcaagaatggcggtgccccagtaccttagctggtcaagcactcctatcactttcgaccgagaggaccaccccgacaaggtagtcgccccaggcgtctacccgctcgtcgtcgaccccatcatcgtcaacacccgactctcgaaagtgctgatggatggtggcagcagcctcaacatcatctacctcgagaccctcgacctcctcggcgtcgatagaggacgcctccagccgagcgccggcggtttccatggcgtcgtgccagggaaaaaggcactgccggtaggtcgaattgacctaccggtctgcttcggcacggcggcaaacatcaggaaggagaccctcacctttgaggtggttgggttccgaggcacgtaccacgccatcatcgggcgcccgggctacgccaagttcatggctatacccaactacacctacttgaagctgaagatgcccggtcccaaaggcgtcatcactgtcagttcctccttcgagcatgcgtacgagtgcgacgtcgagtgcgtcgagtacggggaggcggtcgagaactccaccgagctcgtcgcgaagctcgaggccctggccgctgaggctccagagcctaagcgccacgcgggcagtttcgaggcggcggaaggaaccaagaagatcccgctcgaccccaacaactccgacggcaaaatgctgacgatcagcaccgagctcgaccccataatggaagcagagggcccgcatgaagcggctcgggggcgcgcccagaccgtggcggtggaacttggcgaacgacaccacgtagccctcaggcggctgaggccccctgtgactcgccggcggcgcgatccactccggcgacgatagcgaggtgcggcggcgcagcagtccctctttctcaagctctaacagccggcgctccgtcatcgacgacgggcgccagtcgtcggcggcgacgagtcttacaggcatctcggctggagggacgatggattcactacagctcgagcgggcgtgtgcgcgtgagacggcgagaaagcaaaggcaacaagagaataagagcgagaaggcgaaagggagaggaatggcggcgacgcgacgacgtatttataggcagcagtccgccaacggacagatccgagaaataaggtaactccccccataaatgcgccgtctgacagtcctctctctcctcacaggccggactctccgaattccccgccgatacagtgtcgcaacgtcatccgcctaaaaaggcgcgcccaacgggcagaaaggcgaaccgccacggccccttccttccctcgtaagccaagggacgtaaccaccaaagtctcgagaggtcgatggctggcccgccgaaagggttcgacagccgatctcgagcgccagagtcagggatccccagtgagcggtcgaagatcgaggcccgcctcgaggactcgctggcgatgttcaaggtagggtcgagactgtcgagaggaatccccccgacgggaggcatcgagccgccggtctctatcgaatgagactggtatccctgaccacgtcgaccctgctttatgagaacgcctccgggctacagctgaccccctcgaaaggggcacaggttctcacttggactacccgctaggaactcaatttggggtggaagacgctcgctctatcgagagtacgtcgaaacccccgggcaaaaacgagccagtcagaactttccaccactggtgtcgaaagcgttcctgcgaattagacaacataaccctcgaaggagtcaaaaactcctccgagggctcgggggctacccccgcggggtcgctcgcgcgcccccacggaaatttgaccgcaaaacaaagcctccactcgagcgctagcgctcaaatggaggctcgggggctactgtcgagggtatcagtaaggggtaccctcagcgatgcgcattacgagattgcccgtacgcaggtcgagaccctcaattcgacgctctaatctcacgtatccgccgccatcgacggccgcaacctcgaagacggaaatagcgtcgagcgaatcgatcaggcgtcgagcgctggttaccgtcgaatacggaacaggctcatgcgaaccggggggcgtccagcgcgaggacgccatccgccgcctgacgcgcgcacgcgggccggagcattaaatgcgcccgatgcttccccacctaacgcacaggtcacgggaggcgtgatagggaacaggcttccgtcccatcaatctttttgcagccttcctaccgaacgacccggggcgtgtcgggacacaggaaacaaggatggaacgtctaatcgggaccccctcgagacacccaaggtcagcgctccagatatcagcatattacgcggcgtccgaccctcgaccgaacagggtcccttcccagggacaagttgggcgtcgactgacaacaccacagctaccccgccggatccgccgccatgccgtacaagcacgcgacctcagaaccagtgcaaggcggcgcgcagggcagaacgcaggagcacgcgtaatcatcaccgggctatcaagatgggacggctcgaggccatgccgtacggaagcctcgagtaggtcggcgctccatgcggctatcgacccctactctaacatctacgcatgtaccctgtgtctctccttggagctataaaaggagagactcaggaatagaagggagaacacactacgacacaaggccacactcatacgtagtagagcttcacacttcataccacgcttgtattcgcccctgtacaagcacttaggtgcaagataatacaaactctctccccccgctggacgtagggccttctcttgcccgaaccaggataaatctctgtgtcttcttgcatcaccatccgggaaagggagcacgcatacaaatttactcgttggtgtgaccccccggggggaaaacaccgacacatacataacaaaaaaatgaacttcattgctttgtctgccaaaaccagatctcatgatatgctcctaagaaggggtaactcatgttgatggaggacagctaggtttattgggaaactaagaggtaaattcatgtttacatgaccaaaaaaggctagtctaattgacaagaaaactagcaaagaccgtgaaaactctcgcatagaagggactcgtcaaagcatcaatgtcactatctagtgtgccttaagtcaactagcaaccctagcacgccacttatagtcatcgagtttagttgatgaacataatgggtcctaggaagccatctatggtcataaattggtttgatcaagtgtgttttaatttgtcttatatttattggacagggaggtattgtctcaagagaggcccgaaagtcatgcctaaaaatgtattataaatctacttgggatagatctacagttcacctcttatgctgcaaaaacagggtggcctagaatacaaaactagattgataacctagtttgctaaaaccagatggtccagtatcaaaagttgggtggtcctgtcttgccggcatgtgagatgatccaacattcactctaacttcctcgtgggaactctgaattaggcagtccatatgttcgtatccatcaccttgataagggttacatcatcgcaagcctttttctatatcacgtaggaacacataccttttttgtagttatctattatttagtaaaactactaaatttatctatatggattgttgcacattttgtgttctttgtcggatcttgatactatattgaccttttgagttaaaagagtgtgtttcataaaaccgcaggagacattgcataagcataaacttcacaaaactga

SEQ ID NO: 5159 - DNA, 899 bp, Sorghum bicolor
  Intron number 2 from transcript Sb01g017640.1 (locus Sb01g 017640) derived from phytozome v7.0 (chr-ID chromosome_1; pos 18192683 to 18193581 reverse strand)
tttgttgaattaaggtaaagtattgcagttcttgattagttgacatgaaactagttttgtttttgtgcatactgaatgctattctaatttgagtagatggctgattagtcatgactgtcaacatgcttttggtcgttttggtagagcaatgggtgtgtaaagatgggttcgtggcatgtgtacttcagatttgatactattagttttttttctttttcctgctgctctaaaacccctgatcatgttggatgatgtttgtgaaatgttgtgtttggttcctcctttatatgtgttactagtttgctccgtcatacactcatactgagtccatccaatttttgttgtgataaactaggaaggaagatgctatagacgttccaaaacacaatattggttcatgttatattgctgaaaggcattgctattggtaactgactgtgatcagttttttttttctaattcatagttggaaatttctatcttggattggattggaatagtttgattgtgtctctatgttcagaataattgattatcttatgcttaaaccaagatattctaaatactgttcctttgtggttgggctctttactcaacttccttatgaattatgatggtttgtttgcactgaagtttttgagaactttgcttgtacttgaaatgccagctgtacaacattctatacatatattctagttgcttgttttatgaaaaaaaattgcttactgccttactcttatagataaggctccccagtttattctttggaacaaaacattcatggaagaatgccttattcttgtgactgatctttcccttccacaggataagtcattgaaagaatgccttattcttgtgactgatctttcccttccacaggataagtcattgaaccgggc

SEQ ID NO: 5160 - DNA, 2894 bp, Sorghum bicolor
  Intron number 1 from transcript Sb01g022490.1 (locus Sb01g 022490) derived from phytozome v7.0 (chr-ID chromosome_1; pos 28765065 to 28767958 reverse strand)
tcgacgacaaggacgccattggggacatcgcaacggtgagttatttgcaaaccttaattcctgcaagactggaatgggaccattgttacccgtaaccaagaaatggaattcgtttttcccattttattgtcattatcagtatcaataactgaatttctacagaaaaaaaagactattctttttctttcccagttgtataatgctccacggcccaacagcgttaatttatatgctcgtaaagtttgtcatggaaccgttccatttttgtgacgcacacgcatattttgaatatatcgtagtagacactgataattaaaatttattttaaatatcttttattaaatagaaagaggtaacattgtgaaagtaatttgcttaatgaatctagtactacaaatattatattgtcagatgtttttaacacacagggagctttgtttcatatttatattagtgaaattttacggtcctcgaaaataatgagaatcctctgttttgttagatcggatggtttaaaaataggaagaaccaaatgagaggaacttaagttgtggtacggaaccaagaaagcatcgacccagaactggtttataaataaatttagagggtataacagtatttgtacgtctttgaaactacttctcatctcaaagctgaattacggaaaggtaaattacctgaatacaaagtagtcctccatcatcaatataaaagctacagctgaatttcttattagcaacagattggaaatcaaaatagcctagcaacctacaacagctgcttaacgtgaatgccctgcagcagcagttcttcagcaatcaccagaccagcagcagtatcgatcttcttcagtgtaggaagacgagcccctgcaggcggtcccctcaatcctccaagcgccatgacaagtcccaacgggctcctgccgccagtcctccctcatcccctccgccgctgtgccgatttggagcagcaccgagagcccccaaagccgtgttaggtggaggagctcctgcaggcggccattggaagatggtgacctccggagaggtgggcgacggcgaaattgaccactccaccctcgtccactccgccgcagcctgcagccaccaattcggagcagcctggagtccctagcgccatgatgagtgacccaattaggtgggcaagctcctctaggaggctgtgtgaagatgacgaccccaaggagtcaggcagcggtgattttggggagaggtgacggcaaattccgggaggcgtgccacaacaatttctaggagtggcgagtggcgggcgacggcgaatatcggggcgaccagcggcgcgcaatggagaatatcggaacggcgggcagtgggcggcgacgacgcacacaggagcgaacttcccggcggatcgagctgtatggctgggtatgttagggagaatgggaaaaaatactaaaccacccttaagaatatttaattatatttttttcagattaatggatatcagtttttttagggaggaaccggcggttcctccaagcactgtaacataggggtggatctaaagtagtaacatgggggtacagctgtccctccaaaatttcttgaaaaacatctagtatatatattctttaataacatatacatgtataatacattgttatatataattgctagtccactcagcctatacaacagcctcaacactctacattcacaactattttatcatcgtttagtaatctaattatgttatgtccatgttgatgaactatattatttttatccgtacccccatgattaaaatcctaaatctgccactgctgtaacaaacctcatattataagaagaagaaaaaaaatctaggtgtctcataaaaccccttcaaaaggcatgaccccatgattgatacagtggaaatcaccgaaaagaaaccaatcctggccataagctgcggaatcttttggctcctgccatacaccataactttgccttatcgctattattctgcaagatgatattatgattgggctaagatccctacaaccatttatatgcttccaaatccaccatgccaccaggacaaccaagagctcaaacccttgcgatcgtgttgcaatctaaataaaaatttagatactgacagtcaaaattgaaaactttatttatgattggagcaagtgtactagcataaaaaaggctaggagcattcggacatgtttgccgtgatctcttataaattatcacatatggacattcctggaagtgttgaagctgagttgagcttgcatattaacatatattatatacaagtggtgtttcagtagttttataaagttctgaggttttcaaaatctcctgtaaattgtcacatattaagattgctggaagtgttgaagccgagttgagcttgaattctttctcagcagaccacttccaattcatctataaattgagatgacagtagagcgctctgaaagatttaaattgtgaaagctaaataccatatttttgttcctacaaaatttcagtgtatccaaattatcagttccagagaatatctgtgatgcatcgaatttggttcttttattccagctatgtagaaaataataatagaatatacatccatgtcatttttcatttatgcatatgcacaaatttgtaatcaatagaagtagacgatgaaatggttggctgcagccattacacctctcagcacacattaatatctgaattgcaagacatgtatgaaatgctataggtgaacatatagcagtatttgtggaagaatacattttaactgtttgtttactgttttacaaagttttgtaggtgaacaaaaatcatcggtatttttcttctttttctgcagattaacagtgtgttcagctttcgagcaaacgaaga

SEQ ID NO: 5161 - DNA, 3112 bp, Sorghum bicolor
  Intron number 2 from transcript Sb01g009290.1 (locus Sb01g 009290) derived from phytozome v7.0 (chr-ID chromosome_1; pos 8021537 to 8024648)
ccgagcttctatctacaccacaggtaaaattttccttactcttgatactatattatctccactccatggttaacttttttccagaaaattggcatagataagtagtaaagctatatgcgtatgttaaggttagtgatgctattcttgtaccaaatatctagttagttctgacttgacatttgttatgttagaatatttctcaagacatcttttttgtggtttacatcattctttatggatttatttatttagttaatgtggtacacgcacgagaacttctaggggttgctgtatgggaaaaagaaaagaatcccatatgtcaatatcaacagtgttgatataggtgcttaccattcgaagtaattatggctgaatgagcagagacaaacgtacaataggtagcataatcttattattgcctgagctcctagacatcaaagcttagccatataatttgtgtttactttcaagagatcttgatttagttttatgtatgtggtagcacatttctagtttcatactcaactactagacacaagagttgttggttcacaccagcatatcatacaattaaacatgatattagtggtctgatgaaggaagctgaaataacctttatctagcttctccttctcttgaagctagcaactgcaaataatgtcatctcttccatagcgccaggcatattttgatcataaacacaaattttggtcaaatctagaaatttcatggcagattaccaacttgtcccacattaagtgtccataaatggtaatgggagacagaaaacaacacggtaaaatatgaacatcgttacttctgcatttgtgtaatggcggagtaaggaattaaactaaggtgtggtgaagtgctgaagtaggtaacataggttgagtatgattgaagatttgaaatgttttgtacacatgcaacaattaatgattttgtattcgccaaagtacaaaattatttgcactgttgagtccatctttacttaattctttgccctgttcttcataattaataccaaatttaaacaacaaattacataaacaagtaaacaataattgaaaaaaagcttatgctgctgcaaattgggccttactcccttacctgattctgatcagcatgcggccggtttttgtgcgcctgttcctctgcatcagtgtgtgccttggtgtcgctgtctttatgtgactgcctcgcggctcactgagtctccgcctccgcatcggcgcctaagccctaggcatctgcactctgcaaaatctgcagtgcagcagaacttgaattgacgaattgtctatagacagccagatgggaacgaaatacgtatgggcggttgtccggacgataaagaggcagagcacacagcgatggctcataccataagcaaggcccaaagccatgacctattgaaaccatttgttccttcctcctcctgtctattgggcagtctgttttcaatgcttgcttcgatgtccatggccgatcaggcggacggggtgcttgtcttgcaattcagggggagatccgctaggaagtcgaggtatggggtccaccatacctagccatatcggatcctttgcccctgcatgtgtgtgcctacatgttgcagcaatatatgagattgcttcctctatcttttgcagtaagtattagataagatttcttcagactatatgtaatatgcctttttgcgcatacttttgaagagctaccgagctaagtcatgtcaaatttgttgtcttttatttgtctagaaatataatcataccagcatgtttcagacctccctaactagattttgaagctctaggtaatttttgtaggcatactttagatttatgtggctagatttctctaacctcttgtttgcatgcaccgtaaattccttattgatgtagtaaaaacttggcccctgtgggagaccgtcaccatggtgttgcgctaagatgaagtttattgtctgtgggactgagaaaaacacccctaagtctggcagcccaatacgtgcaacttaggacccaggacatggcttgctgtaagctgcatcggacacgatttgcactggaaactgccgacaaggggggtaactcatttggtgaaaagttgaatctcaaaatttgacgattgaagcactacgtattgtaatagctagcagttagggccagtttttcaatatgaactctcagaagatgccaaacagagtattttgtgcaattatggcaggctttttcagtgacatcacaaattaggcaaactaagtgtagaaaattctgcctatctgattattatattaaagggaatttagtagtagaggcccatggcctatgtccatccatgtgtgctgtgcagtaatggtccaagaacttcctttttttatgaggcatggtaaacaaaattctaattaagcacttgcaagatcctgcataaagaggactagaagtatacagtctttatcttcaattgactgttgcccttgcctgttctccatgtgcaacgttctctggttgagaacgaagctaatattataatgtgtctgcttgtgatggtttaacttgaagtaaactgattgcatgttcccaatgctcccctgcactctagtgtcgacaacctgaaatcaaataaagttagtttggcatgagtcgtgttgctaggtatttaaatttcaaactccaattcaatcaatggaggatccagtgaggaaaagttaaaaagtaaaagcggaaccccatctaggatcaaaactgcttgctttagtgactaatattctgcacatttctagttctttctataagttagatttgcactgtggtggaacacctccccctaagttgactttcttgaacttttggagtccatttatgtcatgggtgcaccaaatggagggatgcacaatagaatatcagttgctgtggttgatgcaatcatcataacatttgccatttctgctggtatcaaaaaatttattccacgagtaatgatacctgcctgagccagtaatctaagtccagttcttattcttgcagattgtggaagctagagcaatgcttatgcaacgtttgcaataccagtcaaagcttgaaactgagcagctaggtcatcataa

SEQ ID NO: 5162 - DNA, 1441 bp, Sorghum bicolor
  Intron number 1 from transcript Sb09g021150.1 (locus Sb09g 021150) derived from phytozome v7.0 (chr-ID chromosome_9; pos 50572033 to 50573473 reverse strand)
ccctcggcgcgctttgcaaggcctgcaagcctgaggtgcgtctgcttcttcactcatgcgcagctacaagtttgtacaagctgtccacaacgttacactacagcacgcctccactgttttctacaggcctgcaactcccacacattttgtttcagaaccttcagttacattgaactgaagagataggtgtttgacactttgacattctcttttaggagcttcatttgatttggcaaatatagatattgatttggagttcgttgtaggaattttgagcatgccatgaggtgttcaacaatgtgcattatgaccttaatctgcgctaacaatcgtaaggcatgttttctttgtaaaaaactaaaaatgaattgattcctgtaatatacatatacaacttctataaaaattcctgcgttccaagggagacataagtgactgaactttcaagctcacaagttaagagagctgaaccctgatggaaataaaaaaaatgctacctttaccgagttcgttagtccaaactcaaaagctttgcttctttatgcagtgcatgcggtgaaatttgtacttacagagtcatgcggttggttggtcctgtggcttttttttcttggatcaagttgtttgggttcttgggccactggctgcctggacgcaagagttatgcgagtaggtggctgtggctagatcagatccgaacgttcatgaaaagagatggcatcatagctacccttttattgatggatcatggcaggcctaaagctaaaaaggggtctcaacttcctaaaaagcaagatgctcagagttttatcctgatcacacaaacaattgagaaagaaatgcctttattaggaactactaataacaagtactgtacagtctctgcacaaaatttcctgagcttgtttacttaggaactaataacaagtacagtcaaactgtaactttttcccctcttcccctttatgccttatcgtttgtttgtactccctccgtcgtcattctaagaatcttggagagtcaaagtttttcaagtttgaccaaatttatatagcaaaataataagattttttgtagcaaccaagtatcattagattctttgttagttatattttcatagtgtacccattttatgacataaatctttatatttctctctatattttttgtcaaacttggaaatgctttggaatgacttataatttggaacggagggagtagtacacaagaaaaactactgtggcatatttgagtgtacttgagccactgtgtgttgcagtggaagcatgcgcagctgctcgtcttttagcccgtgaaacgggtgtgtgtgcgctcatgcatcacggtgtctgatctctggtgcgatatgatatgatacaaaattgtttggtgatggacggttacaggtggaagtggaggcgcttgtgatccaggggcccaa

SEQ ID NO: 5163 - DNA, 1530 bp, Sorghum bicolor
  Intron number 2 from transcript Sb03g026860.1 (locus Sb03g 026860) derived from phytozome v7.0 (chr-ID chromosome_3; pos 53790664 to 53792193 reverse strand)
gcagattgcatattcagaggtggagctcaaaacaggttggtgctatacacttctatggttttcttcttgaacttagactgcattgtatatatgaacccttattccttttttttctgactagagcaattagatgcagccttgtggctagtggctacaggtccatgccttaatttgtagtagaattgtagatcacccacaagcacatgggcacaaatatggtcacgttgtggagttaggctagctgtgtggtttggctcctctcatttaatttgattttactagtggaaatgtacatgtgacacacacgtgtccatatcgtgatttctcatgcattgcaatgacaaaatttttgtatcagcggtgacacatttatgtgataaaaaaatcatcttaaccatttatgacttgttcctttattaggcatatatcctggtatctcaacaattagcatatatcatattgaatcataaaaaacatatatggaccatagtgagatacagaagcatttgatttagatagtctctgatgtacaatgagaatacttttcaagcaaaatctacaaatccttaactattttaacagggctccactggtactgaagtaatctcaagtaggttttctatgctgtagcctttatttcagataacgattaatttgtttttgttgctaaacaatattaaacagtccgtgtagcctaaactgatgtaaaacattgcctccatctttccatatccactccaagtcaacataaacatgagttaaaaaattcaaaaaaaataaaaaataaacatgagttaaaagcaggtttcaaatgatttccttactcagtttcacccaccttctgaccatggtgaatcaaacagctgaaatcaggtgtaacttggcacacaccaaagacaataggagtagaaaacaattagaaacaccacacacttctgctgtgccatttcatcagcctcccgcatgcctgcggttgctcctgtacagggtttgcctgttgcttttgttcgaatttagctgtccataccaatgatctctagtcacgatgacggcggtggtggtttagctgaaggagacatgctctgttgagttgaaagggagatgtgcctgtcaggttggaccgttggagatgatagagggtagtcatggtgctatggacaggaggggtctgcagattccggacaccacggctgctgctaaccagcaccaggcacagccagccacttgccgcttcacgcaaccaaacagaaccctcctgcaagcatccaaaatggctgctgagggcctggatggctagagcgagctaagctctccgggaagccaaccaatcgtggcctagagtaacttagattatgtacatgagctgatagttgttcttttcaaaattacacctgtttgtgtgttcgatacacaagttgcttcagaagcagaatcgtgtgcttgtgtttattgattctgcaaattttatgcttgtgcacctatctttggtatgtcttaataggtatgtctcacacttttgttttaataggt

SEQ ID NO: 5164 - DNA, 3650 bp, Sorghum bicolor
  Intron number 1 from transcript Sb02g013390.1 (locus Sb02g 013390) derived from phytozome v7.0 (chr-ID chromosome_2; pos 25302591 to 25306240)
cttgtgccccaggtacaatacacccacttactcctgccgtatgctaatgtttttttgagatactaggtgagggcccgtgctttgctacgggcaaacaaaaattgcatgccatattgataatattataactttaggaatcaaccatgcaagtgccagttagacaccatactaaggccatgtttggctcttgctaaattttagctagctaaagttccaaacacattgactaaaaggagctaaaatagtttagttccattagtcacccaagagtagctaaaataattttagctagctaaaatttagcaaggggaaccaaacggggcctaagaaagcagatggcatgcaagtataaatgcaatgaagtatgaccacaatcgaaccagctagcgggacgaaacaacatagcggaacttcactatttaattgcaaaatcacaaaaagtattgtattagcagggaactcaaacagtcaaacggttcagtgatgcttgatcgttgttaatcaactagtatattgcccgtgctaacgctaccggtcatattaagtccaaagttaactctatcaaatttgaagtactcagctaattgtgctttgtcaaagctgtttttttttggcgcaagttgtcaaggatgtttctatagcactgaactgagcaagttaccatagcaatttataggaacaataaatttattcacaaattagactcttttaaaaaatcaaagaggaaagaaattgatctcttgaatcaactcaaacttcaaaacttggagctacctgaaaaaagttcagtccatataattgagtcatcatggaaaagatttctgtactggcttgctttcagtacaagtgagtaattgaatattatgcacatggcagtcactattataggcatactacagcattcgaaatacaaactgcgattgttttctagcacgatctagatgaactgggatacagacaaaatagtttgtatcttgatgaactgttaaaaaaagtcagggctcagtctgtatcaatgttttaccagacttaagcacaacacaaaatacaaaagaaaaaagttagtgtttctctatgtcagaatatacatcactgtttgaacacaatgataaatacatggctggtttgataattggataagtcaacttgatggcataattctcacctttgtatcacttgagctaccaaataaaattagcatttctatctgattattttgaaacctggtaaacacattgttggtccagagctacccaatgattcaaacaataagcatgagtcaattggtggttcgaaccctgtaaagacaaaaagagttcagtgttgagaaaacacaagaaccttttttttgataacttaaaacacaagaaccttgaagcttcacccgtggcacagtagattaccaaagatgtcagagatgacgccaatggcaaccttggacccagtagagccggtgaagtaggccttcagcctgccgaagtgctattggttcacattctattagaaataaaaaaggcgtcttttgtagatgcatgttggatgacgccacagattttgcttgctaccggtcgttgtggcagggagcggcctctgtgtccaacacggttgcggtaaggtgagcggcgtgcgtcagccactgtgtttggggcatgtttgtagcgaggtcgcagcaggtgatggccgtgggttctgctgcaccacgtacctggccgcaggcgagggaaggggttgggtttttccctcacctccaactccagcactgtcgttgggggagttgaagggcaggaccgggttgcagagcgtgagttggagcagggtgaggaacgggatgcggagcgcaatgagtaatcggagcacaatgagtagttcggcagaaggaggctgctgcctatgggttagtcggagctgctcggatggtggcggcgatgcggagctggtggtttgccagtagtggaggaagatggtctgcttgggtggtgcacaaggagcagagtacagcggatgaggccgagcatgaggagttcctaattggggaggctgagcaccttccaatcgatgatagggagcctgaggcgctgagcattaggcaaagagggaggcgcaacatgtagaggggacacgcggcctgagagagggctgcagcatgtggatggattgacggggagacgagcgggcctagatgagagcgattgtggacgaaacgggtgatcgaaagcattacgtatgttataagtaggagaaactctatgtgctagatttttgtgttgcttataaggatttgagtgtcaccttggagaaacgagcatccaatagttcgtaacgcaaattatttgcaatcgacacagatgtaacatttttggagaatcacatattagaaagattgtctagccaatttggtgcattctttgctattatcgttctaaaatgtttctgttccaaacatctaggattctaacagaatattttttccttattaagctccttgttaagttgttattggttgcttcggtgcctgtctttatttatgcttggttatcctttcgtgtagggatgcaagcgggtgctcgtgaacctgcatataggattaattatgtgggttatgtagcccgtttgcatctctacttttgtgccaaaacgattacaaaatcttgtaaaagaccattctaattttgagctttgcgagttgttttaagatctaatgtgttggtgcaccttaataatcgaggaattcaagctacaggaatttgtgggtcccatgtataggctgttttttttgtatataattaacagagtcttgcttatattgtcatgtggatttgagttagacagttgtttccaactacataagtttttagatggaaatcttggtttatgaacttaccgagcttgcataatggcttgtttggatcatttagggctagttactagttggggctaaaactagccaaagttccttgtcaaaaaaaaaaaaaaactagcccaagttggtggggctggccagctagtaggctaacaactagttggagtcttggctaaaagcccacctatttccctctatttggatgggctagagctaaaattagctggctaacaattagccttcatccaaataagccctaaatgacaagtcaactgtgcccattgttagcaacttgaggactatacaatttctgtggtttgcttactgccattcatgtttgttatcatgtcattgtttcttggtcatggatggacttatgctgtttgattaggtacaagttccaatggagtgcatccttcacctctgttaacatgaacccctcaaatagaatgataaatttccaattatctttctgttgcagactgcatatatttgatagtctgtttttgttcataaatgcggtcaatgaagcaatcaaagcctatgacaatggaaattacatttgattgaatagatcatctgttcttattgtgtctcatcagtccttatttgcttgtactgtataagtggttgcttcataattttttgttcacttgacttaattctcataataaacaataataaagaatatatttactcaaatatgtttttttagtttaccctccattccatcttaccatttctccaaaaattagaccatcattttttttcttgtgctgtactgtaggca

SEQ ID NO: 5165 - DNA, 8593 bp, Sorghum bicolor
  Intron number 6 from transcript Sb01g037483.1 (locus Sb01g 037483) derived from phytozome v7.0 (chr-ID chromosome_1; pos 61038808 to 61047400 reverse strand)
aattggagggcagacaaaccttcgacactgtactggtatgttactaaaatttgcattggtattttttttcgtttatttagagatgaattccttctgtaacatcatactgtacctcaacataagcttacaaagtgataatagagtaatatagttcagttaagtagctgcgtggaaatagaaagacttcaagccaaccatggtagttaaaatctcaattttaatgctagaagtgtaaaaccctacaggaacagtgtaataggggtcgaatgacaatcctacttgtttgtttatttatggttatggtctcaacttcgatgatttgaactaaaatttgttagcgcccatccattcaaacttatcctcatggtttaccttccaaatgtcataattcacacttaaaacgccaaatttagcgatccagaaacaaaacatcaataccaatgctatatttttttttccataaaagatctcttccatgtccaaaatatgggtaagtgcctatattagtagcaaaaaaaaaaaacctgtcgaggcaaaatatgtgtttgtctaccatctatgacttttgagattgactaccttaaagaaaattggtttaattgaacagtttgtgttcttttgttggttccacgaagcctgacctagtgtgtgtcaggtgtcactatgcaaaaaaataaataatttcaaacagtaagttctatagtagtatagtttcaaactgttagaagagtcaatgacctattgggccttagcccattagggttaattagtcacttgcttaggggccaagtaagtcttgcttgtaagtcaagtaaacctctctatataaagagaggagatgtatcaatctaatcaagcaagagattagaaggaaaaatctcttctctcttgccggccgtgggcagagccctgcggccggcgttcctagcgcccaaaccctagcctcctctctcgctctcacggccgcctccctgtgaacagtacccgttgctactgtagcgcaggtactgttcatgtcttcagctgccgctccctcaatcccaatcaatctccctcaaccctagcagccacataacacaaacagtagcatctgcattctgcagtagtatagttgcattttcatagccctccatgggacactcttgattgaaacttgggcactcctcttcaggggttgaaagtgaaacatgatggtagtttgcctatcagcatgagataaaaatgtttgctttcatggtaatcataacttttcttttgccctttttgcttggttctgactatatttgataagcttccatatattatcttttgctttaattaaccagtttcacttaaagctgaattctgataaatatgactttatgcaaatgcatgtttttctttttgcagcattccaattgtactgctatatcctatgtagaatattagtccctccaattccaaattttttagatcgttcgtaggtttgtcctaagtcaacatatttggctttgaccaccaatagccaaaaatctaaatagatttacagcattaggtcgatacctgtgtttttgagagtgcctcaccaaacattcagggtctcttgaaaacagtggctgatgaatgtagtctttggtgcatagcgggtgcctctaatcttcaggagcttctcattaggttgccctccccagacctatataaggctgtggttggtaggctgctacccccttggccgtgttttcatctagttcctggagagtttatttgttgtttctatctggtgtgagtgtgctgtgtttccgggcggggctgtttaccctcccccctgtactttttctctcttaatgaaatggcacgtagctctcctgcaccgtttgaggaaaaaaaggttgatgctactagattctgttagaatatattgtaacagcccatattgggcgtacggcccattggccttgtacactgtaaccctagcctattaggctatataatgaaggtcaccccccctgattagggtgtgcggtgtttctctacatggtatcctctctaattacgatcctaaacttccgctttgcttctcctcctccgcccgtgcgatctctctgagaccgcgcgccaccgcaccatcggccgcgccctacgcgccgccgccttccttccaggccgcgcgcactcccaggccacgcgcgccgccgcctccctggccatctcgcgacgctgccttccgcgcggatcagcgtccaggccgtcaccgcgcggatcaatcgcgatccgcgcccaggccgtcacgcgcggttcgcggctcgatcgcgaccgccttcgcgccgccgttttccaggacgcgcgcccaggtccgccctcgcgccgttcgtcctcttcgtcacgtgcggctcgcggtcctgcggcctcccgcgactcttctgtggactacgtcgcgaatcttctctacgccagctgcgcccatgacgtcgtcctcgtcgagttcctcctccataaccggcgcccagtcgtctggtgctctgggggactctgtttccgcccccctcttcgccgcctacgcctccgtcaacgtcaagcagcacgtccccatcgcgctcagcctcgagcgcccgaactactccaagtggaaggccttcttcaccgccctctgcggcaagtacggtctgctcggccacatcaacggcacagcgccgcgcgcccggctgacaccctgtggtctcagcctgacgcctgcatccgcggctggatgtacggctccgtcgacgacgccgtcctcgacctcgctatggaacccgaacaggatgcgcgcgctctgtgggtctccatcgaggccttgttccaggcgaacaaggagtcccgcgccgtcgtcctcgagcaggagttccacaacctgctccagggcgacctctccatcgacgcctacgcccagcagatgaagcgcaccgccgatgccctccgggaggtcggccacactatctctcctgctcagctggtgcttaaccttctgcgtggccttaacccccgcttcgccaacactgctgacatcatctccaacacgtcgccacttcccgacttcaaagccgccaccaacatgcttcgtgtcaaggaaatccgccttggcactgagggcaaggcggcctcggcctcagctctggttgcctccaccacctctgcctgcacatcgccgtcctgccagtccacccctcctgcgttcaccaatcgtgggggcggtggcaagggcaagggtggcaagggcaagggcagccgtggtggcaacggcggcagcagcagtggcggcggtggacgccaccagcagcaaggtggcaacggcggcggtggacgcaaccaccagcaaggcggcaatttcggcgggcgtcagcaggccggcccctgggtgtgctacagcccttgggctgctccgtggcctccccagcagcagcagtggggcgcgccacctgcgcagcagtggggtgcaccatctgcgcctcctccacaggcacacaccgccttcgcgcctccgcagttctcccatgccggcggtcccccagcgtacgggcccccgggcagctgggactcggccggactgattgccgccctcaaccagatggcgatctagggcgggactgcaccttgggtcatggacagcggagcgacatctcacatgtcctccaatgacggtattttactctcccgtctcctgttgccaccatcgtacattacggtcgttaacggtcaatccgtccctattcatagtcgtggcacctctgttattcaaatagctgatcgtccttttcatcttgataatgttcttgtcgcacctcaactcactcgtaatctgttatctgttcgacagcttactcgcgacaataactgttccattgagtttgacgcctctgatttatctgttaaggatctgcagaccaagacggtcctccttcggtgcaatagctatggggatctctacaccattccacaccacatgccacctcgctgccatgtcgccgtcgtctccccggagttatggcactcccgccttggtcatcctgcacctgccatcgtcacaactctcaataagctatcagctatccagtgtaataaagcagctcgccacacttgtcatgcctgtcaacttggcaagcacgctaggctgccattcgctagttcggtttctagtacatcagctccctttgaacttgttcactgtgatgtctggacctctccagttttgagtatttctggctttaaattttatcttgtcatggttgatgattatacacattattgctggatgtttcctcttcgccataaatcagaagttcatgaacatattgtccagtttgttgcttacgctcacacacagttcagttttcctgtgcgctgttttcaggcagataatggcaccgagtttctcaacaatgccaccgctaccttcctagctagccgcggcatcatgcttcgcacctcgtgcccctacacatccgcccagaacggcaaagccgagcggatgcttcgcaccctgaacaatgctgttcgaacgcttctgtttcatgccgctatgccttcgtcctattgggttgaagccctttccaccgctgtgtttctgatcaaccggcggccgtcatcctccatacataatggtattccctatcatctcctttaccgcaaaatgccagactactccatccttcgcgtttttggttgcctgtgctatccgaaccttagtgccacgactccccataaattgtctccttgctcagcagcgtgtgtcttcctcggttaccctccttcacaaaagggctaccggtgtcttgatctttctactcgcaagatcatcatctctcgccacgttgtttttgatgagactcactttccgtttgcggcttccaagccccaaccggattctcttgattttttgatacaggatatccttcccgcgcctgccccgtccacctcagacgtccggcattcgcggacttcggttgcgcctgcctcatctgccgcagacgatgccggcgaccccgttgggctggaccctgccatcttgtggcatggtgctgcctacagactgtatcaggcgccccggcaggacacgcctgccccctcggcttctccgacagcaggcgcccccgacgctgcagctgatcggcagcggttcggcatccactacactcgtcgcccgcgcccgccaccggtccctcagccgcaggcggaggcgccgccagccctacagcagccggtggtgcccccagccccagcaccgctggccgtggcgctccaggctccagagcctcctgtgcgggagactcgttcccgaacaggctccctaccgccgcctatgcagcggtacggcttcaccgcttcgtccagcctggcttctccgctgccaggcaacactcgtgccgcgctcgccgatgccaattggcgtgcggcgatgaccgaagaatacaaggcgcttgtggacaatggcacctggcgtcttgttcctcgaccacctcgtgccaacatcatcaccggcaagtgggtcttcaagcacaaatacaatgctgatggctctctggctcgtcataaagcccgatgggttgttcgtggctcgcagcggtacggcatcgactacgacgagacgttcagcccggttgtcaaaccggccaccatccggaccgtcctcagcatcgccgcctctcgctcctggccgatacatcagctggatgtgaagaacgcttttcttcacggccatctgcacgaaaccgtctactgccagcagccgcccggctttgtcgacccggcggcccccgaccacgtctgtctcctgcaaaagtccttgtacggactcaagcaggcgcccagggcgtggcaccagcggttctccggcttcattcagcggtccggcttcactgcttcgacctccgacacgtccctctttgtttacaaagcgggtgccgacatcgcctacttgctgctctacgtcgacgacatcattctgacagcctcgtcgactccgctccttcgccgcatcaccgagcttcttcactccgagttcgccatgacagatctcggggatctccatcacttccttgggatctctgtcacccgttctgttgacggtctcttcctgtcacagcgccagtatgctgtggatctgctccagcgcgccggcatggctgagtgtcattccaccgcgactcctgttgacactcatgccaagctctctgctacagccggcgcaccggtggcggatgccactcagtaccgcagcctcgccggtgcgctacagtatctcacgctgactcgtccggatctcgcttatgcagttcagcaggtgtgcctcttcatgcacgacccgcgcgagcctcatcttgcgatgctcaagcgtgtcctgcggtatgtcaagggcaccctctccactgggcttcacatcggcacaggcagcatcaccagcttgactgcctactccgatgctgattgggctggatgtcctgactctcggcgctccacatctggttattgtgtcttcctcggcgacaacttggtctcttggtcctccaaacgacaaacgacggtttctcgttcgagtgtggaggctgagtatcgtgctgttgcgcacgctgtggctgagacctgttggcttcgtcagttactccaggagctccacgcacccgtctcttcggcgacgatcgtctactgcgacaatgtcagtgctgtctacatgaccgccaatccagttcatcatcgtcgcacgaagcatattgagatagatattcactttgtccgtgagaaggttgctttgggacaggttcgggtgctccatgttccatcatcccatcagtttgcggacattatgaccaaagggttacctgtacagttgttcactgactttaggtccagtctttgtgttcgtgacactcccgcttagactgagggagggtgttagaatatattgtaacagcccatattgggcgtacggcccattggccttgtacactgtaaccctagcctattaggctatataatgaaggtcacccccccctgattagggtgtgcggtgtttctctacagattcatcatgacaacacacagtacctcaagccatggttctgggtgtctgatataaaaggagcactgactgttcctgccctaagagagtatctatatatttgggagttggttgatgatcgaactctgcaactgggagtaatggaccagcactgttggaatcgtacatattctggaatatatggcagtaaatctgcatatattggtttttttccctggaaggatcctcttcgtaccttagaagaggatcgaaaactggggttgtgctcagcaggtttggagtgatgtccttcaggctgatcctccttgcacctctgaccatcaccaactgtttctcagattggtggcatcaggcaatcaagaacttgcctagggaaatcaggaaaggactaaactcactcattctaatggcatgataaatatggaaacaccaaaatgattttttaatggggcaaggccagatgtcaggacaaccttagaggcagttgctgatgagtgtgtcttctggtgctgagcccatttgaaagatcttcaagaacttttggtcagggcacttaatgtggccacacgattattagtccttgggtcagtagttgcctttttgtgtttttcggtgcagtttcttcctttgttcttgtgtgattggatgtgtttttgtgtagtgtgtgtttgggtgtgcctttttggtgggagagtttcttttccacccttgttctgtttttccctcatctcttgttaacgaactgatacacatttctcctgcgtgtttgagaaatcatgtcaagtaatttcataatacataagtatccctatgagatatagacgcagacgctcacatacacgagcgcacactcacccctattgccatagaaattacttgtcattgtatcaggtgataaggctatgcatgttttattgcaaccttcttttatctcccagtggagataagtaggttcccttgtacaggatcccccccccccccccctcttcttcctttatctctttaatataagggtgctcacctctcttgcatgtccgaggggaaaaaagaatttgctagtcaaaggttagtattgtagaccatgtgtcctaactcctaaatgacttacattcagaattagtgggagtttgctattttgttttgtagtttttcagtgctactagcatatttaccaaaaatgccatcttttaaaatcaatataaaattactaatcgtcggcccaatataactaagcatactcattttagaattgcattgacatttgatttttctattttaattttattagagatgctcaaagtcttgatactgccttgatgaagtgtgatacgggttaacagttcattcaagtcttgttaattgtcagatctcttatgcataaaccatgttattaggctatctatatattttagatgctctaggatatttatgatgaacatttacttgagaattgagtataactttcacttatcaaaggctgctatatgagtgtttccatgagctactcttttgttctagctcatttttactttatccttcttctgatcagggtggagacacaag

SEQ ID NO: 5166 - DNA, 2219 bp, Sorghum bicolor
  Intron number 2 from transcript Sb01g008000.1 (locus Sb01g 008000) derived from phytozome v7.0 (chr-ID chromosome_1; pos 6926381 to 6928599 reverse strand)
acgacaaaattgggtgtggacttgacgcaatagtgagtcagccactagtaacagttgcgcaatttcatttgctagttaacattgattttctattgtaaacatggaacacttgccacatgttagtagcactttaccaaaaaaaaaatcacagaatgaactaatgaatgcagtgattttcttttagatgtcattattctgcggctgcttgttctagttactaattactccctccatccaatttataagtcgtttcaagaatcttggtgagtcaaagcatctcaagtttaaccaacattacagaataaattagaaagacttatgacataagatagatattactatgaaaatataactaatgaagaacctaatgatacttagttggtatcataaatgttattatgttatcatataagtttggtcaaatttgaggtgctttgactttcgaaaattcttgaaatgacttataatttgggatgaagggagtagtttcttttagggtcactttgatttaagttggggccttgtagctagtccggttctttgcctcatttgatttgtgctgcccctgatcaaaccgtggtggcacagtcgaccagccacctcactgttggagatctttgtgtgggtcaggggcagggctggagccagccatcgaatctgctgggatcatattttttttaagataatggaaagaaatatctggcttcatcctccaacaaaaggaatcagaccaacgggatcattgatttagtgatgaatggtgatttccataggattaacaagatttttataggggtcagctaaccctgttgaacccacctatctccgcctcttatgtggggtataagtataaccgactccttgtacaaggtggccaactacaccataccttcagttgaactgagctagagtcattgatcattgttaataataaggtcaggttgtcaggttgagtatgtgaaagatcctcagtagacctggtttagagtcattgttagttcaggttctgttcatcgagatgccatctttagattgaatagattgaacttagttgatcagagtcaggtttgttaagagcaaagtattataatacagccagctgctaactgtaacatgtctagccttcttgcagcccactcgtataatggttagctcatcactattaatacataacccacttgtctgtctcacagactttcttggtttctgtgtctgagtcggctgtaagcttacagcccgcttttactctctctcctcttctctctcctccacctcagcatttagctggcttacaacctactataatacttgctcagtatggagctgattgggtgaacaacttatctttccggacccttcttcaaccctgccttgttggtggcctggggtgagctcagcatagctcctaatctggggatcaggtttagggcccaatccattggccgacctaaattccagcaacaattccatcttataccaggctatttcacgacatttcgcatcatgtatgtatgattgtattattgtatataccaaaaacaaatgaggcaatgccacacgcatcttgtgctgccaacgctatttcatgacattctgctctgaataaatctgcattaataataattaccaatgtgttagtccagcttattattagaaaattgtattctggttaagaaatggtccttaatttcatccattaaactcaatcactaaagtaggaaagctacaaagcatattaaaatgtagagttggttggctatgcacatttgcccgttagaccaataaactttaacagttctgtagactcacctctgcacctgggaagtgttcacatcaactctgtatgtaaggcgatataaattccatgtcttatataagtttagtttaattgatgctatattgaagttgattttcctctcattcactgtgtacatggtcatgattagataattccttccatgaagtggaagcgctttctcagtcaaagtgctttgtgcttatatttgtgctggatacaaaggagctgacaaaataatacgaaatcatacccacatgtgaaattactttagatggggttagggtaatttgcaaatacttgatacatcattgacagcaaatttcatatctaaacttacaattcagaactgtatatgtaattgattctcttaacttggattctccttgaaggttgataggcaccctgagttcaggaagtcaag

SEQ ID NO: 5167 - DNA, 370 bp, Sorghum bicolor
  Intron number 3 from transcript Sb01g047940.1 (locus Sb01g 047940) derived from phytozome v7.0 (chr-ID chromosome_1; pos 71025531 to 71025900)
caggcctcttgctcacaagtgagtatacgtgattaaatgaatcgattctttgactctaaaaattgttcaatccgtcttaaattttccgggaaacggtgaaatacggactaatgtaatggggaatacatacacccatcattccaatttcttaagtatatatagattgttagtagaatccatgatgttcagctagaacatgaagaacattaaataaaacagataagtagtaattaaagatccacaacttgtttggaaagaggcagttgttccattaatgctcttatagtaatatctgactttatgcattacaaggatttgttactaatttgtggtaggaggacgggaagaggcaagttctgagcaccgacga

SEQ ID NO: 5168 - DNA, 2491 bp, Sorghum bicolor
  Intron number 1 from transcript Sb05g018900.1 (locus Sb05g 018900) derived from phytozome v7.0 (chr-ID chromosome_5; pos 45735265 to 45737755)
tcttctggcccttcgccggcgacgacccccaataggtacgcccactctttctcttcagttcctgctgtgcgaaaccgaacatccaaaccctaccttaagctatccgtattcggatctgattataccattgtagtatacgagtattttgctttgcctctaaacttagatgttttcttcgtgtatcttgtctacaaactttcattttccacccttttttgacaaaaaaatgttgggtgtacatgtgtctgtttaccgtgtccgtccctggattgattaaaaatggctctgctctggtttgtttgttttagctgtttgatgccgaagaacagaagtctgaatattgctatgcaaaatcttaaaaacaacagtctgttggatcacagcttttgttttcaagacgcaggcaatctggcagcttcttactgttaccttgtaatctaaaacttgactgagaatcttccctttgtattaccaatatcctaacaccagccgattgccttgtgaagtgcctaatttaattggcatctttgttcttcgttgaagcataatgatttgcttggcataatctccattggaaagtgaacagaatcttccctatgtatgaccaacattctaacaccaacccattgcattgtgaagtgcctaattaattggaatctttggtttttgaagggtaataattttcttggcataacctacattgaaaactgaataacctgtgaacataaaagctcttgtttgtgtttagatctactagctccatgcctgttgcaacgggagaggcaaaatttgcacgggatactattgttgactagctggaacacttgcaaaatagccaatccaagatatgattcaggccttgtttagttcaccccaaaaaccaaatttttttcaagattccctgtcacatcgaatcttgcggcacatgcatggagtattaaatatagacgaaaacaaaaattaattacacagtttacctgtaaatcatgagacgaatcttttgagcctagttagtctatgattggacaatgtttgtcaaataaaaacaaaatgctacactaccaaaaaccaaaaagttttcggaactaaacaaggcctcattagcaatgtactcgaggaattatgtgccatgttaagagaatacatacaccaaggatactggatgaacatagattggttatgtgtattatactgaaaaaatgaaccggtgtgtccatacaactatttggatttcagggcataaatgtgtgaaaaaagatacccatggttctgaaacttgagtagttgtggctagcaaagttattttagctcataaaatataattttgtatttgtataatcctcataaaatctgcaagtaaaaaatgagttgcatgcaaaggcaacattaaaagacaaattcataagtgcctgtcacctggcctggttcttcaaaacagaactacaaaagacagatgtcatttctccagtactaagatggtctggtaaattatggttcttttacctataaggtcatgtatgaataaaacatgccaaatcgttggaagataatctgtggtatgaaccttctcttgaaaactttaagctgcctaattagttagaattgccatgaaatgtattaaatgaatctgaggtatgaaccttctcttgaaaatcagttaggagagtagagcaatcctaactgtttcctatataggagtaatccgatgtatgaacttttgcttgaaaaaataaaagctgtctaatcagtttatttgttatccactgaaataaataacagaagccagaggaattggacagaattaccatcctgatgccactggattcatctagcagcaaccacagtccacaggaatggattttgcacaggctgccggtcagcttcctccttgcacaatgtgccctgttgcggaccaacatgtgacctccactggtgtatctactctctttcacagaccttcgtcacaatacaaacaaattaagaatcttggtgaggagtctgtaaaggcatggggggaagcagagtttgatggtccagagtcctggactatcttcctgctgcagttctatggcgccattgatttggacggaggaatttgaatatactaatggtctctactgcaactcatcaaattggggcctatgcttacatttatcttcctgagtggtagtgattgctttggtgattacatttgtttttttttctctaaaatggccacgtcatgtcactgctgataccatgtttctatccacattctttttgttgttctttttgtaggacctggtagttcacatttcttgaatgagtaattgcaaagaatgaaataattgaatatttatagcttaggtctagggaaaccaccagtctcccctgcctctcgacgccctttttgtgataatctcagtaccctttgtcctgtttctccttcacccacctaagatatctcatgcatgcagcacccttctgggttgaagattcctacttgaggtgt

SEQ ID NO: 5169 - DNA, 3824 bp, Sorghum bicolor
  Intron number 1 from transcript Sb05g006890.1 (locus Sb05g 006890) derived from phytozome v7.0 (chr-ID chromosome_5; pos 11626872 to 11630695)
gcttcgacgaccccgtgcccaagatcaggaagcaggtgggtggatgtggatgctcctctccgtcgtaactggtgatccctgatacgataggtgcaattggatcactagatcaggaatagaatttgctcaatttgcgacatttttatagtctcacaagctgtatgcgtcatccgatgtgcttcccagtagtctcacgaggaatgaaatttgcttaatgtggagtacatcttttagtctcacagatatgcttggacacatgccatgaaaaatctgtttgctactttggccactttagatgtgtttgcattgaacagaaaggcaagcattgttcagattgaactgcctgcttttgatgtgccaatggtagtgtaggaggctaggagctgcgtagtgcacatgctatttagttgtggtgaaatggagcaaggggcagagctacatgaacttactgggatcagctgaccggtataaatctggcaaatcctagtatcctatacaaaatcactgtttactaagtatatttaagtgatgattagtggtactgactccggtgattccattgcctagctcggcccctgaatggagctgctagcaatttgaacttgtcaaaattttggtactttgctatttgtgtacttgtagtatctgtcaggatggataatgtttcatggtaatttccttgtctctttaagtaatgatggtaggggatttttggttcatttttagtttaagctaatgaattgatttcctacctttcctgtgtttggatgttgataaatcatgtttaagaaatcaggtaacaaggatgcatcgtggtttcaggatctatttctttttacgcgatctacttcaataactcatttaagccctaacccattgcatgctgttgggaggtagatgtgtgatggactccaattggtgacttcatactataaacaatctaggatcatttaatatgtaaagttccactggtcaaggaagcaggtgccaaactatcacttgacggtcgtattgaatgaaatgacaaattttgtgatgattgggctgtcatctcttagttgtatcaagatttatattgtttagttgagacagtgtttttaaggcatcgcgtaggccgtgaggcactcgcagggaacaatatgtccccgatgtgcctaactaaaagtgtgagagatccaacgggactgtagtcagaacagaggaaaacgaaaggccatgcagccgcctcctctctcatacgcaccaaaaccagcgccacctgggtcatcttcggcagcagcgatggatctagaagggggccaccatagagaactatctgaggaagcagctcattgaggagtaacgagcagcagcaaaagggggggggagaggagcagagggcaccgcacgagtgagagtagtgtgcgggagggatatgcggcggcgccgtacctgtgtgagagagaagcagagagccgggcgcaggcagtgtgtgtatgcatgggagcgtgcgcccgtgtcttcgtgacctatttacatgagaaggggtatttaagggagggccctcgtgggctgcctagtgggatgggccatccacttctcttttaatttgcccttttctggtttttattttttccttttcctttcctcctctgctgctattttcctatttcttaggattgtaaggtgtcgcctcacctcgccttatcattgtgagggagtaggtcaccacggctcgccttaccaccttaagaaccatggttgagagggactgcaccactaccgttgtattaatgctgcaagaaatttaacttctcaaatttatacctgaggattgatttgattttgatgggttaagcagttagacttgacggacccttctgttgggtaatggcagtgaagaaaaagtgggctttgactccctaatcttcggtaatggattggttgttcaatgatccagtatcaggggctttattggtgggaaggaagaacatagattgtagctgaaagaagttaacaggcaaggagctggaagttatcaaaaaaaagggaaaaaaaccttggccggtggggggaaagaccacccccatggttttggtctaagaagaaattctcagttccccgaccgagaaaatccccgaacccctgccccacccttacacagcgcatcgttaccctggggatggtttgaacacacgacgtatgctttgagtggtggcaggcgaggggatttttttaacccagcctgaaatttgctcccacggggagtcgaactcaggacctgggaggtgctgcaaggatttgctagccatctggactagagccctttggcaggagatggaagctatcactggtggtgatggtggtggcaatggcatgcatagggaagctaggggtggaatggtggtgtcacttggaatagataagtagaggaggttgaatctcttttcttgtttgatccaaaatgggtacatggagtttccaaaaaaaaggtgggggtagtacatggcttctcaatatagaaacctaacttgactcccaaagaattaataaattgaatccttatagattgggtccaccctttcctaatagtctctactttcctagctttaatagcgaacagtctcaactttccttaaaaaaagtaaaaaaaccaactatatcaaaaggtatcttgccgatggggtcaagttgatgaaataagggaaagggtgcgtgcaccacttcccgcagcagtgccttttttggtttgttgggctaagccaacccatggtctggtggcccatgacatccagagggtaggcatttttattcatttgaatgcatgttgaaggcgaaagaacttgacgtccatgtttagagtatgatctgtagttctagtatctgctcccatcgaaatgtgcgtatatagtgttaatgtgctataattgaattgaaattttcaaattgtgaacttatataggactataggagggtggattgtttgtgatgttgaactactctaggcttatttaatacattattatgggaaatttttggtggcaatgatttgctctatttggttgagcaacccctattcaatattttaatttgtattcaagtttgctaacttcgaattccatttcttttagttattagtttgtttgtttcattaaattataatttttcaggccctagagctctgattatttaattactttgtttgaaccaaatcataatgtcatatttggttccatgattttgtgttatattgtacttcatggttttgtgtatattatacttcacagttttgtgttatttcatcctttttgttagcatttctagtaagaaattgttcatgggatgtaccaattgtactgcaaaatcattatagcagtcgtcggccgtttaaagttggagaaaagttgttgacatgcttactttagtgcaaaattgtttttacgaaatgcagtaaaattgtactgggagtttttttggccttaatcacgtattcatgttgataagatggttccttagtgaacattgggtaactaaaattaaaatgaagatgaagatctattcttctgttcgttatcaaatatcaactgccattggtgctctgtagttctaatctgatggtgcttcattttatgttttggttcagccagtgttgaattttaatttgctatattaaattaaatttcgtagtcttgtgaatggtagtggcctagaaaatccagacaatgacaaattgttgcatcttattttgtgttgtaaaattacatcttatttttcctgttttttctgatttcttaaaatctgaccatgtaggtggagtattatttcagtgatataaacctggccac

SEQ ID NO: 5170 - DNA, 4451 bp, Sorghum bicolor
  Intron number 3 from transcript Sb03g008970.1 (locus Sb03g 008970) derived from phytozome v7.0 (chr-ID chromosome_3; pos 9730935 to 9735385)
gctgtgttagaaggccctgcgtcactgcttgcagtgtatgcattgcttctcatcatctttaattttgagacatgtgcaaaatacatcggtaataccagaacaaaaccagatatgcaccatatgtgagtcttagaaaccaaatctcacatatagctacaaataaggggtaatatcaaaagacaatgcatagattatataacgtacataatataaaagagataacatttgatagcgaacaacggatagacaactccaaactccgggtattaacttctctctacaggatccaactgactggttgatcacaagcctaaacttctcctgaggtttggggaaaatagcaagagtgagtccatgtcgaactccacaagtatagcaaccagattgtatagctcccacaatctcatgatcaatgtgacataagtaatgtacaacattaaataataaataatgaacatatataacacacaagaatcatcatcgtcgatgcaaaaatctccaaggccgctcatgaccgtgagcacggctagtataccagttttacactctgcagaggttgtacatctttacccatgagtcatgatttaccctttcgcccgaggtgatcagcctcttaacccacttccaaggaaggtcggcagggatcactatgaagcctttcaaaagttcgtctaacatgttagggccgcaaggtttcctttgcgcgcagatatagagccccccttccgatggcacaatgacacgcagcctatacacatacagacagaggccacactatacccaaaacggttcagcccctccgccctttcaggtaacctttaacaagctagaaaaggtcttcatactgagccaaagccagagccattatagccctcgtggttgcactgttgtcccggttatcacttacagataaatcatcaagtggctaaaaagtcatttttatcatttattacttaacattaatctagtcacaggataatggtcacagaaataaaacccaaatgctatacttgccttagaattagattcttcttcagttccaaatcttcacaaaactgcttcaggttcacctttagatctttagcgcccacaaatggttgtcgtctactcataacaagcaccacacataggcacacatacaagcaataaatagaaacgactaagaacaatacaccacacaaggtaaaataaggtactaaaagagagaactaatgctacaaacacaaggtcacaagaaacgccgatatcggaaatacggttgaattttatattatttaaaagaaaagagatgactacaaggttgacaatattgattatgaaaaaaactaggtgagtagtattggttaagattaatcaaaacaaattaaatttttaaaagttaagttacacctaatcatattatatttataaacatatgtcccgtattgtttaagccatttaaactttaatttgcaaaagaagtaaataagtgcgagcatctagtttgaatttttgtatataaggacatgtttaaactaatcaagttcaatttaaaaatatcattagttgccattaatcaagttaacaattaaccaataaaagatcaatattatcctatgtttcattttaattacaaaactagtttcatgcaaattaatcaacttaatattttaatcataactatataaacatgtgataggataaacaatgccttccttgcatccacaaatctaacaccactaaatcccgagcaaaactgagataaaacgataaactagcggatacgtacggtggcaattctaattcttcatggccaaaccttccttgcatgcagtatatagccattacgtgcaccctacgatgattcttgatggaactggttgcagaatttaataggcactgagttggagaccaaagaatataaattaaattgttagatcaccttggctggaggtagatgattagaagaaaatcggcaaggagtgcgtgcaccgccagggagacgtacgtgctgctcaagacctgttgctatgacacatatacgtagacatgtctttgcttgctcgaagactagaggatgatcgtgccgcacagagggctgcaatagggcatggaaagggaacagaaagtcagagcaatccagctcttgcaattcacctatgatggagacaggaacatgtggatggaattctcaccgatgcacctgccgatggatgtagcgaactagatgacgaccaccaaagttctaacgagcagccggccaaaactccatgcttgcaacgagctttggtgccgagaagacaatgacgagatgtagttgtgtagagcggctccctagggcatggcatctcgatgaagcatcttcaactatgggcgatggtgacgtacgcaagaggttagagatatacaacagtagataaagaaagggaaaatctgatttactacctagggattctcaaactaggagcttcccttgcagtagttttgatgtgctttgcctaaggggttggtacatatatatatggagagaaactccctacctccacgtcaactagcggtatggttctaattgatttgcaaccttcatctttactaataggcctaagtaattattaaagcccattagtaaataaaaacatggtttttggaatttattatgggctttgacgttggaaaactaataagagatttattattttcggaattaattattttcattgataaaataattctagaaaagtttagaattagtagttaagccacgaaaaatactccgaaagctccgaaaattcgggaaaaattctcagagatattatagaacatggggaacccgaataaagtttttggagctcatgataagattatttagagcatctaaaaattagatcatgctcagagaaaattgagaatagaagatggaaaaattcccgaaaagtttgtagagagtgcttgatggacgaggaactaaaagaagtgctttgagtgacaaagaaaatattttaggaaggtcctaataaaaatttgagcttagaaacaaggaatttggttgtagataaaagataaatatgtgccgaataaggaagatcgatctactaaacgtattttaaatatttttcttactatcaacacataaaggagcaacaagcatcatatcaaaacatatgcaccagcatgtatgcataataatattgctaagccttatgataaattttaatttaatgaaaaatattatttttcctatattttcatgagcacaaaaatacaaaattaaataattttatctatatttcaaaaggagtaaattttagggtgttacaacattctacattgaatcatcatttctctgtgattattcctttctttgccaagttagtagctgcaatgctttaatgttatcaccccatgcaaaaactacacagagcatcactgaacttacatgcatctagttcataaagccttgtttagttcccataaaagaacttttcattatatcccatcgaatgattggatacatgcatgaagtattaaatgtagataaaataaaaaaaactaattgctcagattaattggattttgcgagatgaatcttttaagactaattaatctatgattagatactaattgctacagtaacatatttgctaatggcggattatttaggcttaataaatttgtctcgtagtttcccgatggattctataatttgtttttctattagtatccaaacacctcatgtgacacccttacatgacatctgatgtaatacacaaaaactttttggcctcgaactaaacaaggcctaaatttctgcagcgagctaatctcacatgtaccaataaagcatttgagcggtgagaaatgcggtccaagaaaagttgaaaggcacgaatatcgatggaataatgaaaacatagagcgtggtgtaccattttttgtcttcaatgtttgtagttcttaatagattgaataaacattcttggtgatgatgctactaaattcaaagagaatcattatggtatactattcctccatccaaatattcttgtcaattttacctaacattagcatttgttggtttcacaaattgatatccagagtgttcttaacagatagtaagtaaaatgattgaataatttagccaacatcattatgtgcttggcaatagaatgcttccacaaagtttgagctttttcatccatggttctatttatctactacaatgttgtgttattactggtgaatttgttccaaaggtgaaaggtctgaatccaatgaagtgtgtgccgcctcatttttatgtactgttgatgttcatatgtatttgctttctatctgggaaatacttgtgtccgaagccaagatgccgtcagctgcagacacgctacatgattttgtggatgctgattgtgtgatttagaatcataatgctgcttttattctatctgacgaccaatttgttgctggttgcagct

SEQ ID NO: 5171 - DNA, 6305 bp, Sorghum bicolor
  Intron number 1 from transcript Sb03g027520.1 (locus Sb03g 027520) derived from phytozome v7.0 (chr-ID chromosome_3; pos 55171083 to 55177387 reverse strand)
ccacgctcatcaactccgtcaccaacaccatcgaggtatgtacgtacacgtgtacacatagatatctacatgcatatatatactacggtcatgcactcatgtatatatatgatgagaaattattaacgttcatgcatgatcgatccattcactggatcggattattatttcatttttcatttatataatttctaaacaaatttagacttcttttagagcatctccaaccattatgtatttgaagttatgcattttaggcaaattgcaaacctccaaatgaaaatggcaaggctaaaatcgggtgatctccaaacgttatgcaaaatgtcaagtccatcatcttttttttcccggaaattttgtttcgcggcactccttcccgcgcggccaatcgatcccgcgccaaacagcccgccgtcgttatagatttccatctagcactaacacgatgggccggcccgagcacgacactaaaaaagcacggtccagacacggcacggcccggtggtagtgccgtgcctgggccgcaacttcggcccgcagtgctggcacgggcacggcacgattaataggctggcacgacgctggcacgattattttcatcatctgatgttttgaggatagatcatgaccattgaatgtattctaagtcatgtatataagcatcacacaacccttttaaaccctaacttcctagtcggcggtgcaaacacatccttgttgcggtcactctttctcccgcctcactatacgacagcggtagcgctcatcttctccttgaggcagggcacaatgagcttctcgacttctcctgaagccacgggccggcacaggcacgatgggccacagtgcctatcggcacggcacggcacggttaaggagccatagtgccgtgcctgggccgagagtttggcacgatggcccgagacggcacggcacgatagacatagtgccgcatagtgtcgtatagtgccagggtcgggccgcccgtttggccaactatagccgtcgtctcccgttcatcaattcccacgctaaacagccgcgcagtaccgatcgtgagctgcgcagttcgtcgttcccgttcgcagtaccgatcatagtaccgatctcccgttccgttagttcccgttcaccgtaccagttcgtcgtctgttggccatcagttcgtcgtcgtacagatatcgcattgatgaagaaggcgtacctggccggcgttgatgaggaaggcgtcgtagattcgtcctatcgcgcgctgcgtcgtcctattgtgcgctgctttgtccaaacgcgcgcgcgaagctgtcgaaggaggacgcgcgaggcttctcctatcgcgcgaagcggtggcggcgcgaagggaaactgcgcgaaggaagaaaaaaacccgcgaggtggaatcgagaatcccgtgatctctatttgcatagccggactcctttggcatatatgccaagtttccctctccaaatgcatagctatgtaaaatacaaagtccaaatgtataatgattggagaggttttttttttggagttttatgcattttggtaaatgccaagttcatttgcataatggctgcgtcgacgacgtacgtatggctatatatgcgcgcgtgcatgcatgtgtcacggtacgtagggccaggtagctagccagccagccccggctgcatacgtacagctaagtatgaaaacgtaacgtaaatatcccgaaccgaaccgaaccgctttctatatttgatccgatcgaattcatatttttttgtccgactttatcgttttcgctttcgtattttagatgtttcgtatttcaaatataaaagtagaaaacggtttcgatatttttcgaccgttttctacttttctacttttaatatgaaatatttcgaattcaaaatttggtttaaaccgaatttagtcaactgtagggtcacacagtctaattacagactactcaccatgcatctgcgttctttctactagtggctagttgtgttcatgttagctattaattgcttattctagacttgtatttatgtgtgggctattgtattaaatgcctaagactaaggagcatgcactttttaattattatatgcatttgaacttgatcctatatatacttttagtcatgcacttttatatatcagtatttcgtattcagttttcgtatatcgaccgtgttcgacataaatccgatcgaattggttcgttttcgaaattctcgatatttcgtaagttcgtgttcgttttcgtgtccgactttaccgttttcgttttcgttttcgtatttcaaatgtaaaagtagaaaacaatttaggagtttttcgaccgtttccgatcgttttcatccttacgtacagcccttggtttctctatgtctacttggcttgtggtcgacagcgacgacgccgtagcgggaaaggcacttggccgggtagatagccgtttctttttttctttttatttccccttttcttgatgcaagacaagttgcacgcgttcttactcggtcggtagcttgggtacgtacggtagtaactggtaggtgagagtgaccagtgatcctttccggctgagtctggtcaacgacggagcaagtacggatatactatgtcacgtcgatttgcctcgtgggaacgaaggcgacacaaaaggatagtgaatatttatgtgttaatgctagtcgcatgaagtgagcccgcatttagctacctactcctttcatcctaataaattgtaattcattttaacaatcttgcagagccaaagtatcttaagtttaaccaaaatcataaaaaaattataaaattttgtggcatcaaatagatattctatgaaaatataagtaatgaagaacttaatgatacttggttgatattataaatgtcattatcctaccatataaatttgatcaaacttgaaatactttgattctacaaaagtcttggaatgacttataatttgagacggagggagtagaaagcatgcaagctatagtagcaactttgagtgttaataaagccaccaaccacgggttgagccattcaaacatttcggcttctcgcaagcagggccgtacctacaaaaatacttaagcaacaaattgaccttatgttatactaaaaagcatcattctcctagtattctttgaaatgaagtcttcaattatattttcatactttatcatctccaatatatcattttcaagtgctattgttgccaacccattgagtctttcttgtgtcattgcacatcgcaagtaggacttctataacttgagtttagaaaagctcctttccgcatatgcaacggtaacaggaatggttaacaaaactctgtatacaataatgatgttttggaaagaaccataccgtttcaaatatttcagaatatcaagagggtccatagatttgtcaatatgatcttgaatgaactttaactcaacatataattctcttccatcaatatctaaatgttctccacttttaagtttagcttctagattgacacaagaatgctagattatgtgatgcaagaaatttcctaagaaatttccattgctatcttggtataacttgctattactgccacagaatgctaaattatgtgatgcaagaaattttacaaccaagataattctgtacaaaacttttctccaatgttccctttccttttggaattctctttgagcaacgttgtcaattgtttgatcattctacaacctgaggcgcaactcataccaagaagccatattcaaaattaacatgctctacactagtttcatgctctttaactttagtgccaaaatgattccaatcactgaacccatcatgctaattgtccttttgcatgcccctttctcaataatttgcaacaaaagaaaaatactctatctagaggtttgcaatatacaagccattctctgtcacaagtttcaccatttgcaagaactctcgtgtaaaatgttatagaaaatcttctaaaaaatctatctttaggacctttaagaattgacaaatctcttttaggacccttctatagcaatatatcaatcattttagaatcaagtgaatcccaatatcttggatcatatatgtcaggctggaaagaactattgttgtcactgttactttcagttctagcaagtgcttcatcaacatgtccgatatcttcgttgttaatttctgcagtatgagccccacctgtgtttctaccatcttcaacattaccctcgccaacattagcatcacgtgtctgattttgagaagtaaactgagaatctttcagaatatatctatcaagagcacccctttaagtttgagctacagcttctaatctctgattcttcttatgtttttcatgaccatattcaaacttcctatttcttgaagacatgatgcaaatctaaaatctcctatgaaattccctaaataatgcagattttagactaatatgattttcaaggtagaagtgtacaaccgtacacaattgggaatggggataaatttgtgtgcgtaccgtctatcgagctgtcgatggcgtcgtgttggtgtaggctctcggcgccggcggatgacaactgcttcttggtgatgtttgcgtgatcgctgcaagcccgcgatgccgtgctgattctgccgcgtctaggtctagcagctgcaacggcgcgacgatgatctgaattgcggcaaacgcgtcgctgccgacttgcagtcctatgtgagagaagggctgatgggctgccaagtgctatgagctgatgggccatttaatttttacttggtgataaatataaatgtaccaaatttggaggccctaaaaatttggagaacaggtgcacactttgcacctgctgatatatggggctgtcaagctagccacccatcaacagctgcatcaagttaaccaacaaccttttttttacagttttttagggcttgtttggcacagctcaacttcactagtgaagctgtttttttagaaaatagcttcatgagtgactttctagatgaagctggactgttttggaaaaagtgtttggcaaaatagcttcagcaactgcttcatgcatagttgagagagagaaatgagggagaagctgcaataagctacttttttccagcttcatccaacttatgtctttgttagaggagaggaaaaacagcttcacccataaagctgttttggaaataaatgtttggcaaaaaaaacagctcacaacagctcatgaagctgttgtgagctgtaccaaacaggaccttaatttctctagattgaaggcagcttcaaatttgaacaaaaagaccatattcagcggagccattattctgttacaaaccagtccaactggacctactggtccattaaaccctttctgacctccgctgagatctgccctccgctaacactatctccaacaatcctcacccaaaatacaagacttatttgttttttggatagcgctacagtcacaagattcaatacttatttttagtcttcttcaacaagacctaaaagataacattttctgcaaatgggtctcgaggagaggatacctaaatttgggttgttcctctcctaatatctaaaatgggtcttccgtataggtagtttgttggaggttatagatattgtgttgaaaatctattttagttttgggtttcccaataggtctcctattggagacagctaaagtctctctgctgaggtcttgtttagttcatctcaaaatcaaaaacctattaagccatcacatcaaaacttacgacatgtatagagtattaaatataaattaaaaattaattatatagtttacctataatttattagacgaatcttttatgtcaaggtgtagtccataattaaataataatttttaaatataaataaaagtgctacacgcataaaaaaaaatcggggcaaagttgattctgttccacccgatctctcccgccaccgagcacccatagccgccgccgccgccgccgcatcccctcctagcggcggcgcctaccccgctcttattgtctgtctcggccgtcgcgtttccatccgtaccgcgaggagcaacaaccatcatggcgggcgctcgccgcgacgccggaaagcgccactgcggcgtttactcgagcaccttccgtgcgtgatcgacttctcgcaccttgcttattgcctagagctgcaactgcgtgattgttcactgcgacatctaatttatgcatcgttccgtactaaaatggaagtatctctgctgtctctccctcacagtccatcgggaacgcgctccacatcttgcccagcag

SEQ ID NO: 5172 - DNA, 1054 bp, Sorghum bicolor
  Intron number 4 from transcript Sb06g017360.1 (locus Sb06g 017360) derived from phytozome v7.0 (chr-ID chromosome_6; pos 46636786 to 46637839 reverse strand)
gtaaaggtaagctcacagctattctctgctttttatgttgccaaacggtatgtatccctgtcaagcacatggttactcctaataattaccctacggctgtctgttgatggttggacatgaatcagcaggaggtctttgtgttagcctctctgtgctatgcttgcttactcttccattatatctgtactttatcagtccatttctgaggtttttgcctctgatctatttgaattttgaccagcgtttgttcataatagactatagttatgatatctaataagtatgatacgaaagtatgtttcaagacaaatttacacatacatgacttctatgtttctcaattaaacattttgaaaactgttgacggtcattagaatatagttataatatctgttaagtatgatattatgaaagtacatttcaagacatatttacacatgatttttatttttcttaactaaatattttaaaaactattgaacgtcaaaattttaaaaatttgactggattttgggctgatgacacttttgccctgctttattgaaagcaacagaattgtggtgggttaccaccttacagacaggttcagagagggaaaaggcatttgtctacactcttgaaagagatataggacagtcacattttcatgcagctctaccactaaactctaccttagttacactcaattttgctcaaagtgttacttatgaccagagggactattgttttagtagtttgaaacatagcatgtagtcctatgaaggtggtggtggtggtggcggtgtgtgtgtgttttgggtgggtgggtgttgtagtttgatcagaagcttagtttctgcatcctgtatgtctttaacttccatactattactattgccgcaattcctttcaaaattgtatgctgtacgccccacttcatatctcactaggtttggcccttgtacccatttgttgttgccttttcagtttgtattgcatatttgaatttggttgtgtgtgatctatttgcttacccccccttttttttgcttgttgctaaatctgttttagagat

SEQ ID NO: 5173 - DNA, 11325 bp, Arabidopsis lyrata
  Intron number 6 from transcript 490401 (locus 490401) deri ved from phytozome v7.0 (chr-ID scaffold_6; pos 24122387 t o 24133711 reverse strand)
tttttgagggtccttaaaaggtaatatgtaagttttattatatggctaactagatcatgacccgtgttatacagcacgggattaaatattttgtatgaatcaaattatataatttgtttgaagatataatatgataaaatagtataataatatagtttgcaagtgatgccagataatagtatacgatttttattactatttagatataatgttgtattagattgatttggtgtggaagctccattgacccattggtttaatatcacctgtattatatcgtctcatattaatatcgatccaaacacgtcctaccatctaactccgtctcgtgaagttaaacatcattttgttgttttttttttaataatacttttatttaaaagacaataatacttttatttaaaagagaaattcaaatcaatttaaaagtttgctttcaaatagtttccataatatatatattcttaattattataaaattataaatatttttaacgttttataaactttaaaaaattatagtatttacctttcaaaaaattacaaacatttataataattgatttttaattttttaaaatatttcttatattttgaaactttttaaaagtaagaaatatatattattatataataaataacaataacaaataacccgtcaccactaaaaccatccactttgccgcatgtatggttgcaccaccataacctttcgaagttgtgataaaataattaagccatgaaatcgatcaaatgttttttcgtaacgctaattattcaaaagtagattaaaatgactcatctaatatagtttgaatattcgagataatcaataccttaatttcttagaataataatttcaaaaaaaattaaaaaatgctcaacgatgacaaaaagtcgattacatgttacacaccttaggtttgaagggagagcaacgcatcaccaccaccagtgcaccatggctactccgccgctttaaaagctgtacacaaacattattcacattagtaatcatcgatattaatatagattatgtaaacaatgaacaatgcaataatgaaactactttgatagcaatcgagcttttatttatagagaaaaatatggtgttacacaatttaggtttagatgcaaaaaaatctaaacaaataaatgatatcacggtgagaatattcacaaataattattttatttatctcattacgattttggtattatttatttaagtatatcaatttatatttttttaatctatggttgtttttcttatctacctatagtctataatatatatatggttgtttctttaattacgttttggtagattaaatatttaccaagaaaatctaaatcttaattgcatatttaatttatgatgatgaaatattagaaaatattaaatttattataatcttaacaattttttatttattcaataaaaatagtttcacgcattatcacaattacgataattatagtagtgcaaatctaattaatatttgtttccaaaacaaaaaaatgtttattagtttacactcattaataaaaatgcaaagcttgaatttgtcctataaatacaaaatttaatgtattacttttctatattagtaatttttgaatatcttactcatttgcaccggaaatattaaatcggatcttcacctaacttttcattttatatattccatattgctatgtaaatcttgtttggtaagatacttctgcaaaaaaaaaatggacattaaaacttaaatgctaacaataattgtaatatcataatcaaatcttcgattaatacatatggtaatatgtaatcttttaagtagtagataacacagattgtgaagaataattctcacacaagttacggtaattagtttaaagagtcctgattcatgtaggatctgattttcttttgccaacataatgaaatttgaattttaaatcctagaaaaaatcatttaaatacggtaacattttttcaatgatataacattttaaattttgaataacattttcattttcaaataatggattagtatataatattttcaataacattttcgaactatatgagtattataattcaaaatagcattttttataaagtcaattgatataaatatttcaatgatatatcattttcattaacattttcaataacatttttgtgtcacattttcgaattatatattagtatacaacatttttactaattgtgttacattttcgaatttattagtatataacaatttcgaattatattaattgtgtaatatagttattatcgaaaaatttatgaattatataaacaaaatcttttaatatctttaaacccgttgacccgttaatatatattagtgacatggaataaaattttatgattaaaattctctaatggcatatattgtaatttcttacaaaatcaagttatgatccttaggatgtacttcccaaatattagtataggattcagtatgacttgagtttggttaatccagttgtgtaatgttagtaaaaacagaggaaaacagggggaaaatatcagatattttggtggcagctggcaaattttggtctgtatgttgtaaacaaatgagattcgaaatgtatttttttttgacatcattcaaatcataaatacattagttgactataattatatggtaacatagatgtacaatgacaacatgacaagcactaaatgacaacatgacaagcacatgataacaaattagacttttatttgtttattgttccaggatttagagtttaaattttagtaaacatcacaaaaacaaagatgcaaattaatgattagttatgttgtcactatcatacaaccataaaataaaatataacgattaattttataagagcatcgatcgttgagattaacgagagaagacttttgagctttgagagagaaagaaacgtgaaaggagcatagctttgagatttcagatccaactttttttcttcttcttctacacttctttttctaaacccaaaatgaagcaagatcgatgtctagcgagttgatttccttaatgtgttacactgttacttatctaagaatctagccatgtttcaggcgtgttctgcctttcattttctacaaaatctcaccttgaaaatgaagaacacaatactatcagtcttgtatgttcataaggtatattaggttaaaagaaaaaaaaaagggtatatatattaggttatatggtgcattaatgaagacagatattgcttttgtattatgactgcttttaatttagatttatgatcaaaaacatcttcagtaaatctaggtaggttgggttatattatggttccattagaagcttttccattaatcagtgcaaaacggctgttgacttttcagatattggtttcgttttagaggctcttgattgttgagatctttggtcttgtgtaattgaaagcctaattgtaagaagagagaagagaaatgagaaatgatattgctagtggactattctaacatattggataaaaataaataattcagctggagcaataaagaagagacaaagagctactaacaacactagtactaggcactttgagttagttggatcaagaatacttatacacaagaaccttcagagaaaagagtgatgtttatagttttggggtagtccttatggaactggtttcaggtgaaaagacattgtattttgaccagccacagagcgaagaaaatttggtcattcgcctaaaatatgctctgatagagaatccgttaaatgaagttattaataaaagggtggtgaatgcagcaaatcacatggagattcagaaagcagccttgttggcggttaggtgcacatcactgaaggcagaggagaggccaaaaatgaaagaagtagctgctgaacttgaaggtctgagagctccagtgaaaaaaaggtttgttcgatcagtatccggattttaaatcaaagggagtaaatgacatttccttgatgaaagctggagcagcaatctatctatatcttgtgttttggttctcttcttgtttttctttttcttgctatcttttggttgtctttgtgatatgcttgactagtatgttgccatgaccactaattaacttgcaatagaatctcgtcaattgtctagagctctcaccaatgaaaattttaagaaaagaggaatatgtgagacgttcattgataagaaaagtttattaacttggcgagacaaaggcttttatactaaggtacatctttcaaaacacaattcattccatttggagagaaagaaatgacagacgacacggcgaggtaccatttccaaatgagaaagctagtaagaatgattgataaaaacattcggaactcgtttagcacaattagaagtggaggagatttaaagtatacatacatgaaggacaactctagtttttaattgtgtttttttttgaaaatagtatgcattaatttgtaaacaacaagttgtttttttctttaaaaataacttaacattaagttcagaaaaaaaagaaagtttaatagattatatattagcatcgcaagtcagatcaattttaagtttggatccatttcaattttcaagtttttaatttttggtaggaaaacttaatttcgttgattttggtcaatgtttgaatttctttcttgtttaaggcaatgtttgaaatttttgataaatatccaacatgagttccttaatgtacgaattagtaatcttaaaatcattaatagagaaatttaaccgaaaagaatatacatattgtattgaccatttatattttgcatgagtatatggcttcgtcatcatcatggaacaacatgtaatcttaataaattattattaagaaatcatacaaactgggatcggcaattattgataatttactaaaaaagaaattttcagaaaaaagacataaataagttttattctcaccaattgataaagtgaatgtgtcctttcacggtttgacaatttggcaattttcagacaaaactgccctcaactacaaaggtaactgcacttgttcggttttttggttttgttttattatgttttaatttttttttaattcaaaacaattaaaatgaagaagaacgacgaaggagagaagaggaaaaatctgagttgaaaccggcgaaatccgttttccaatcttccatctaatctctcattctttatcttttatccagagacgcttcaaaattccggcgaattccgtttcgaatcctctttaaatctctcattctacttcggttttcccgagatgagcaaaagcaaacaaatctccgacgacgaagataccagagtacagatgacagcgaaaaaaatgaaactattgaagaagaagagttggcgccgctcaaatgtagtgaaaaattcagagaagaggcaagtgaatagttcaccggagaaggtaatcgagattccgagtaacccgccggagccggagagcacaagtatgggtaagtatctgtaaacactgaattcgattttaattggggatggggattcaggaatccgaaatctgaggatactgattttgaatcgaagatttaatcccaaagtattataatcttctcggctgaagaatatgaatacgtcagaatacaatgatgacgatgtacctccaccttctcacaaggtatttggttttctattttacaagaggaagaaaaagctggccctcaaacttctactaaagaagcagatatgtctgactctaaaattgatggacttgattatggtgtaccttctgaccaggtatgtcgtgtactacaaatagtcagatattgtattagtgtacgtacataaacattttaaatgtttatggtctttatttcaggaaaaagtcaaatctgatggtatgaagtgagtttcaaatatctgaggatgttctccccataaaagagaagaaatctattaaacgatgagttagttttgatgaggacgctcataaaactgcctctacaactgaaaatcttgtaagttatagaggctgttatttataaattttgtacatatatcattaaggtttttaacatgattttaaattaacttaacattattgttgtttgaaggaggaaccaaagaaagatgcagctgtggaaggaagtgatgctcaaattcatgatcgtgtacactccactaaatcagttcaaacaaaagtaacttatgtggaggacccagactatcctgatggttttggcttaaataagaaaagtttgtaactaacgaaatggttagttcgaaaggatgcaatgtttgagatacgaaattatgtaaccgtttgtggtgtaaggtatacgtacacagacaagatcaaaaaccgtacatagttatacgatgtcaaatattaacgtacacagaataaactttggtacacaaagtacatacataaacgtacattgtcaacacgtcgacaaaaaacaaacacacaaagctaaattggattcttaaaagtcttattgttatgacctttttgtctatattttgtacactgattcggagtaagtcttttctgtcttttgttctgaacttgagaaacaacaaaagttaacaacaaatcatgtatatagacatagcatagatatagtcaataagtgtacaagtttaaatgatataacttacccggttttcacccctagatggtatccttttgcaggttggtctcccgagtggtcgtctactgtgtggaggaataagtataatttccgatatattttatgagatgacaacattctttggatccgcgataggtagaatcggttcttgaaaagaatcggaaaatgtttgaaggctataccacaagccaacaacagtctttggattaatcccaaactgtaatgcaactgctagaccatgttcacatgggattcttaacctcgtgtacctaagccacgtacacgtacactcgtcgagtacgacatggaaatgctcaccagacttgcttgtaacctgataactccaaggtctcgacatcttcagcgaatttctcaaactcaggtaaatcttggagaaaacgctcatcaatcttaagcgtcactaaagatttacatttagccacttttttcctcttggctgcgaaccaccgcataaggacctcttgaatgaactctatcatgtagaaaatcggatatgattttgcttttgttaagatgttatttatagactccgagttgttgctagatatgatattgtagcgttcccctttgcagtgagctcttgtccaatgctcaaatccaatttcctctaagtaatttgcgcatccagaacttctgccccttaactctgcaaattatttatcaaaatccctcaccctatatgcttttgcggcaccaaagaataatctcgaaatatcatacttactattatacgtggatatatttcgctcaaggtgtactacatatgctccatgatgagctttcgggaatacaacactgagtcctttgtatatagaagaatgtatgtccgagacaatcattaaatcttcactgtctgtctagtgtacgcacattggtgcaatccgtgttgacatgtccgggttggattcacagttggctgactgtcaccgaaaatagcactggtttctcatgtacgtacacgttgatttgtgtacgtacactctgccaatagacaactgaattcccctggcagttcaacggtcggttgagtgtcacatacgtcctcctcaacatgccaaactccatattcttctacaatcaaatcattccacttgttgtactcgtaatcttcaccactaccttcactgccgtctatagtagggtcgagagtactgcccgcactatatccaccattgtcatcgtcatctttatcaatgttgttgtcgctgtcattcaagtcttccccatccacctcttcgttctcctcatcctctgaatcttcatttcttttttcgtcctctgcgtcattttactcatctacatccgcattagtcgcatccacattagaaggctttaccatggtttttggtgagttttcactccctgacccagggttggtttcagaatcatggccatccatcgtagatatactctttgccagtacctttacttccgtttatagtcggttccaagacattctcgtacttgactcatcgtcatcatcatcatcctcttcctcatcctctttttcctcttttcgtcctcatcctctttctgtttatcctctttattgtcatctacttcttcttccccatatactttctcattgttttcatccacatttagagctccaatatggtctttgttggattttcaccccgaaccatgttagtttcatcagccaaatccttcatcatgcatacactatttataccaccctttatggattagacaaaatgacataaatatgtttacacttagacctccactatgaataaaaagaatgtatccaagttcacttgtctatgatagttgtacttatcttcctgcaagtccccacacatgggacagcgacacaattttcctgtcacgatcactacctcgtctctcacgtacacattactacatgtttacgtacataatcaccatttacgtacaccgttcagatattttgtcagttctgggttcagttcttatttttcgaataggtttggtttgattctttagttttaggtatttttttcagctgtagttcgtacatggtttgaatgttttattttatgttaaaaaaatattttaaacttaaatatacaaattatttagatgtttatgtatatatatgtacacaaattactatcgtgtacgtacacatgagtacatgatattgttaatctcgaattattttcaacaacatgattaaattaagaaataaattattattcaaagttaaaatatatgaaaatgggtcttcgaagatagaaaataaataaattttaactaaaagtacaaaaataataaatctatataaaattgaaataagagaaaaatgtgaaaacaaaagaaggtgaataataataataatcttattatatttttattttttatttttgttttttacactgtagctaacgagagtgtattgtacataacgcgtgtactgtagctaacgagatactgtgtacgtaaccaaaccgtctaactaattcgtccattgtgactgtacactggtttcgctgagagggtaaattcgtccgaaaatgacataattgtcaaaacatgaaagctctcccccactttgtcaaaacctgaaagaaaaacataaaacatgggtctggcccgtaattaacctttactaaaatatatttgattaataaaatgattatgaagtaatggagctatacgttcttacctgtataaatatataaactcaacatcacttaaagtgatcacgtgaataaattaacttaacagtgcgttgacttttttgatatagttaacttgtttaattaagaaagaaacctcgatttttcaaaccgcacatgtaatttcagtttcttcagctacacgaaataaaactgtcaagtactccctccgttatataaaataagataaaatattttcctcgttaaaaacttttttttattctacatctttaaaatcttgtgaaagtttctctgcaaattttgttactctgctgctacaacaatgaaacagaaacaacatattcttaaccaaagcccattatcttcctctcctcgttcttattcttcaatctcaaaccgtcccatctctgtccttagccgcaacggtctcctccttctccttctcgctctcttctttctcctcggtgtattcttaccctggccaggctctcccttattcctgtttccaaacagactttctgctttttcttctttgtcacagtctcggcagtccaaatggcacgactatacccttgctcaggcagctaggttcgtcgctaagaacggcactgtgatcgtctgcgccgtgagctcaccattcttgccttttctcaacaactggttgattagtgtttctagacagaagcatcaagacaaagtcctcgtgatcgctgaggattacgctactctgtataaagttaacgagaagtggcctggccacgccgttcttattcctccagcgctcgattctgaaaccgcatacagtttcggttcccaggtaacgttttcacctttgagatatctttagcttttcagttcatgagatctagctggaaatagcttatatactcgggttttgttaacctatcggcaatgagtagattgactcttgactcatgttcttggaccataagtttgagtagtccctaaggtttcggttctgagatgtgtttagagtacaaaagatggtgatgtagtggcatccatttttcttttggatcgaattcgaataattatgtatcccctatttctgtgtgtgatgaaaacatgtttttactaatttatttatcatatccgattagggtttcttcaatttcacagctcgaaggccgaaacatctcttgcaagttttagagctaggttacaatgttatgtacaacgatgttgatatggtttggttgcaagatccgtttccgtatttggagggaagccatgacgtgtacttcacggatgacatgcctcaagtatgtgaattcttcacacatctttggaaattttagagtgttttattcatctcttattctcgggttgattttggtgccagataaagcctttgaatcactctcatgatttaccacatccggatcgaaacggggagacgtatatatgtagctgcatgatttacttgcgtcccactaatggtgcaaagcttctaatgaagaaatggagtgaggaacttcaatcccaagcttggtctgagtccacccgttttaaagcaaatgaccagcctgcttttaacttggcacttaacaaaacagctcatcaagtatgtttttgtttcctccaagttccatttcttccttatctatttatgaatgttggatttatatatggtttttcttttgttttgcaggtggatctctacttgctctcgcaagtagctttcccaacaggaggattgtacttcagtaacgaggcatgggttaaagagacaaaggggaaacatgtcataatccacaacaactacattatcggttacgataacaaaatgagacgtttccatgactatggtctatggctagtcgatgatcatgctcttgagtctccattagggaaattacagtaaattcgtatcacggaaacaattgttcatatctctctcttttcttcttgttgtttgaatttttaaggctgcgtataaagaaagatagtaccactgagtaaactccttatgtttttgagggtccttaaaaggtaat

SEQ ID NO: 5174 - DNA, 830 bp, Arabidopsis lyrata
  Intron number 1 from transcript 916456 (locus 916456) deri ved from phytozome v7.0 (chr-ID scaffold_8; pos 12538364 t o 12539193 reverse strand)
tcccctaaggtcaattacaaatctcccccaccaccgtatgtctacaagacaccctactattgatactgaattgtttcattatcaagaaacatgattccaatatttgttttttattattatttttttctcttgattcttctgaattttttttcttttgatcaattatatctttaattttttatttgataaataaagttggtatctttttacatacacttttgttttgtttataatttgtttgaattggctcaaaatttttaataattttttttttatccattgattaaaaatattttggttaggatataaagctagtttatatcagaaaactattaaaaacttatatataagatatataagctctttcgtagttcaaagcaaccaagaaacaatgaaactaaacgtattgaagattctcttttggtaaatctttaaatccaattacgatcatcgctaaatcgaagcaaattcgtcccaaataaactgttactgtttgacggagttgcatatatgtcgcatatgtgagactattttgcgactaaagcgagtgacttgataaagcgtctctgaatcgtcatatttttttgtataatttatgaccaaaattccgtagtcgtaaaaatatatcaacatatatagtcgtggataggtgaccactttctgacccgacagttgggtcgtaaatatgcgatgaatgtacctctgtttttgacgtagttgtatagaatggtctacgcaggttttcttgtatatatctaaagatgggttttgtattattctaatgaattatacgttagttttcaaatgtagggtaaaagacaaactctcct

SEQ ID NO: 5175 - DNA, 24929 bp, Arabidopsis lyrata
  Intron number 1 from transcript 480306 (locus 480306) deri ved from phytozome v7.0 (chr-ID scaffold_3; pos 18112991 t o 18137919 reverse strand)
caccggtgatcgtcttgcctttacctcgtcgacctctccgtttttctgttgaattcgatttcgaaggattagattatcgagattctcataagcgtgcttgattttcaaatcaagtgtgtttatgaagaacaagctttagaagattgtggctgttgtcgactgcaagagagagcgcttactttaattgcttgcttcatgtgacaaggtggctctctttaggaacggcaaaatgctgctacttttcagagtccaccttaggcaaatctcacctctcacccaactccgccgccgtatctccaccatctcttccgccggattcactctcaatctcccaaaactcgaacattcctccgacgccgaactaatctcccaaatgctaataacaaatcacaacccattccacttcatggaatcatctctccaactcaacggcatctccctcactcccaacctcatccaccaaaccctcctccgtctccgtcacaattccaaaattgccctctccttcttccaatatttacgctccttaccctccccttcaaccccaacaccaacctccttcaatctcatcatcgatatcctcggccgtgttcgtcaattcgacgttgttagacaactcatcgtcgaaatggatcacacttctccggagacgtttctaatcctcgttaaacggttaatcgccgccgggcttacccgtcaagcagttcgtgctttcgacgatgcgccttgttttctcgagaatcgtcgtttcgggttagtcgaattcgggtttttgctcgatactctttgtaaatacggttacacgaagatggctgttggtgtttttaatgaacgcaaggaagagtttgggtgtgatgagaaggtttatactattttgattgctggttggtgtaaacttaggaggattgatatggcgcagaagtttttggtagagatgattgaatccgggattgaaccgaatgtcgttacgtataatgttttgcttaacgggatttgtcggacggcgagtttgcatccggaagaaaggtttgagaggaatgtgaggaatgcagagaaggtgttcgatgaaatgcgtcagagagggattgagcctgatgttacgagtttttcgattgtgcttcatatgtatagtcgagctcataaagctgagttgacgttggataagttgaaactgatgaaagcaaaagggattagcccgacgattgaaacatatacttcggttgttaaatgtttgtgttcttgtgggagattggaggaagcagaagagttgcttgaaacaatggtggaaactgggataagcccgtcttctgcgacgtacaactgtttttttaaggaatataaaggaaggaaagatgctaatggcgcgatgaatctatataggaagatgaagaatggactgtgtaaaccaagtacgcagacatataatgttttgttaggaacgtttattaatttggggaagatggagacagtgaaagagatatgggatgatcttaaagcaagtgaaacgggtccggatttagactcgtatacttcgttggttcatgggttgtgtagtaaggagaaatggaaggaagcttgtgggtactttgtggagatgatagagaagggtttcttgccacaaaagctaacttttgagacattgtataaaggtttaatacagtctaataagatgaggacttggaggaggttgaagaagaaacttgacgaggaatctataacctttgggtctgagtttcagagatatccttttgagccttacaagagatgagagttagtaaagttgttgatgaagcaaactggcaaatttcctgtctaatttaaggcatggagtcaaattttatttagtctctccttttttttttgttcttttataaagtaataacacatgtaaaatttgtggtcagattaggtcaaaagttttagtgctttatacttaataggaataagaatctactaaatatattatggtcgcaaatgttttcattatatacttaagactacagtaaaacctctataaattaatactcgataaattaataacttctacaaattaataaattcttccggtcccaagttgggaccagtgtaaaaagtgatacaaatcgataaattaataagataataatttttttaaaaatcctatgtaaacatatggtcccatcaatatcataaattaataattgtataaatatgtcaactatatatatatatatatatatatatatatatatatatatatatatatatatatattatgtaagaaacttcaatgaaatataattctgttattattattattattttttaaattcgcattagttcttgtttgaatttaattctaatatctttcctaaatttcgtggatttttttggcgggaaaagtttgatggaattttatttttccgggaaatattgaaaaaaaattttggcgggaaaatttcgaaaacaaatttttggagggaaaatatttttacgtcgcggaaattttttggcgggaaaaataaattttggcgggaaatttctaattttatttatttatttattttaattaaactaattactaatatttaataattaattaaagtttatagtgctatttgtggaatttttcaaatgtagtgctatttttagaagacaaacttattttagtgctatttttgtcaatctccctattttttacttgtaattggtcctagaaagatattttatataatgaagtaaatcttatattttcataaaaaaatttaaaagttgcaaaattaggaaaactctctataaattaataaataaattaatacctctataaattaatagaattttgcagtcccaacattattaatttatagaggttttactgtatatccgaatccgcggtagatttttcttaaatattattcgaaattgtgtatgtatattaatgttacataattttcaaataatatatagttattttattttattgtttagtttttggcaacaaaatatacttaaacttttatcattaggtgttagtgtgctacgggtttgccatatacacaatttcctttttttgtagctggtttattttacaactagtgtctacccggtgctacgcaccgaatttgtttctagaatttggattcgatagtattttttttcttttttgatttgatattatattattgtagttaagccaatcttttcttaagttaaaattcagttgatagtataaatttactctaataaataacaatgaacaaggtaaaatagttcaattaatatggttaatagtgatcttttgtattactggcaaattatatattagatataagaaacatatttgtgtgctattgaatctgtgagtttatttttacatcgagtatggggccgattggtaacgactgtaagttttggctttagaagctttgactttaaaaatttaaggtgtagaaaatttggctgtaaagactttggctgtagaaacttttgctgttaaaatctgattggtagcacaaaactgtagaagctgtgactcttatatattattattattatatattaataataaatataaattatgttagaaatgaattcatatgcaaatatagttttattaatgataggaatttagaaagaaaaaaaacaaaaattgagaaataaagaaataaatagataaatattctgtagagaaaaaaaatttatatattattcattgatttttagtaaccaaacattacaataagaaaaaaactaaaaatccattatttgttttggtaggaacttaaaatccattattaataataaaatatttatttaaaagaaatgataaaagtttataaataaatattctaaatgcatacatttatttatatttattatttcatgccgaaatttaataccatcacattagtaagaagtaggataaacttaaaacttatatggcttttgaaaaaaatactaattctatatactcttttaaaccaacattaatgatgatgatgaaaataaaatgattattagtaaaatggatcttaaaagaaagatagaaaaatgaaaataattaatttataaataaaaagttatgaaaaaatatatgtaaaggtgtagagagtttttaattatcaaggggataagaaaaaaaaagtttttaattgtttatttatttaataaatgtcccgagaaaaccaaagtcacgtttttgagactttagaaaaagaagagaaacaaaaaaggaaaaaaaaaaaaaactttgagaactttaaaaataattaaagtaaaaaagcctaattggctaaaacaaaactatgaagactttagaatagctctaaagtccttaaagccttgtgccaattacccctatatctactctttcttgatacatgctttcttttcttaattcttactacaggctctttgatgattattgtttggaaaaaagatggctggctacacgaagtatctaactacacaaactatatgtattacatgcccacatatacgaactatatgtagtcatgtcgccaacatcacaaacatttttttccgatacatttttcatatacgaaaaattgtagtttgtttcatctaccatttcttgttgccactcgtaaatggaaacacgtaattgtgtgtataataaaaatgtaagattctaagataaacgaagacaagatgtaaccttcttatcagctataatgtcattctccaattccttatttaattcaccttgtgttagatccgataactgttaggatgaatttatagagtttttcatctagagtttttcttaatgcatattttagagtagctaactagaatttgatcttaagattaattaggatgaaagtgtgattttttctgaactattttagatgagcaaaaatccatattctcaaagagatttggtttaggtatttttgtgaacatatcgaccctgatctttatgcttgtttagaagtagtattcacaatgagagttgggatcctagattttagacatagttaaccaaaacaaacgcgtgttgattggtttaatttagtgatttgaattttagaatcgttttaaaaaaatcctaacagtaatttaatttatctgcaattctgctatttcttgagaattttcctaagcctgacgtattttccatttaaatttactttaaatttaattgtttttctctgtttttaatttcatacaatttcgtttaacttgattttgagacttacaattttctgtgtgaataaaaaaagattttcggaaatcgatcctaaagtatttcagagatttcttatttgaaagaataatcttaaaactaatataaacttatcaatattccctgagttagtgggatatacacgttcaaattttttttttttttttttgattattgtcccccaattaaccatgtgatttgatatgaaatttgtttgaaaattatgctcccgttgacacaccaaagtccacacctttaatattgagtatctcgatattttaatccagaatttaccacaaaatatcttagggggtattggacgaaggaaatctatatatataattagagaatcttctctccatttagggtgtccacctaagtatctacctaagcaataatatttattttacattaaaataaatttaaaacatctatttagtgcatttacaagtaatagaaataataaattttaaataaatcaaaaacgaattatgtaaattaaatgaaataataaaataatactaaaattttttataagtaagactaacataattcaacttttaaataataaaaattaaatatggtcactatttaaaattttaattatgttaatgagttttagactggaattaaatttatataattcaatatgtcactacaaaaaaatgatcattttatatcacttattttgaatatttgtattacttataagtgatgtaaaagaattttacatcacttaagtaaatgatttatatattattgatgcaaataatttacatcacttggagaaaatatttgcatcgattatttaaacaagaaaataaaattcaaagtgaaacattagtttcggaaacaatatactacatatttttagttattattaaatttttacttaaagaaaaatataaaattactaaactaaacttaaatttataatttaataagtacgactgatataattcaaattttaaatgataaaaattaaatatggtcactattcaaaattttaattgtgttaatgagttttagaatgaaagtaaatttatgtaattctatatgtgaaactttaaacaagaaaataaaattcaaagtgaaacattagtttagaagaacaatatactacatatttttagttattattaaatttttacttaaagaaaaataaaaaaattactaaactcaacttaaatttataatttaagaagaaatattttaagatgcaaactttatcttgtgaaattataaaaaacaaatcttgaaaattttaaaacattatatatatcttttaaaaaataaataatcaatgatcacattattcatgagttttacaacaaaatatattaaaaaaactcactaaaccggttctagcaacatggtattatagatgtacctttacactaaataatgttcatgaaactcggtatattcacattttatatggaatgatgctatgttcgtatcaacatttaatcataaataaaatctacaattaggtcaacggtcgataattaatatcaaaacttttaagaaatgccttcatggaatatgaataagaaagaaactctgttagagtgttgataccgtttattctttccgcgaatttcttaagtggtttttgttatcacgtgatatatatcaaattatttatttgtcaaataaacattatcgtcgataatatatcttattatataaagtaaggttttcaaagtcaataactcatatgatcgtgacacgtggtaaatctatcgatcttagattttgacacgtgtaaaacaaaaatttcctttttaaaatagaaaaaaataaaataattgtaagtaattatatatttaaataattttaaaaatgtaaaagataattataaggatacttgtaaataattaagatttctataaaaaaaaattaaaaaatgtccaaagataataataaggaaattatacgtttttatatttaaagatatatattaaagtaattatatatttaaataattttaaaaatataaaagataattataaggataattgtaaataattaagatttctataaaaaaaattaaaaaatgtccaaaaataataataaagaaattacattttttatatttaaaaatatatattttaattaaacaagaaaaaaatcaggcaaatttattaaagagagaacatacgttattatataactaatatgatataattttggagaaattgttaataataccctccttcacacacccttttttaacatcgcccctttttgcttgccatttttaaaaataccccttagttaattcaaatatgaccaaagtacccttgctttcataacctaagatctgcacggttaaccattctatctctttctctcatttcgatcggcgacgatctcgattccgatatcagatcggcgtctcctttcgatttcgctttctatcggtggtaaaatctcgttgttcgttttcgatttgatctgttcgatttcgatcggcgttaacatctttttgttcgattttgatttttcagcgtctccgtctccgtctgtgttttatttcgatctgtcccaccgattccaggttagattcctcactatgttttagaagcttttttgaaaggtttgtcttttggaagttagattctgtggtttgattatgtggttagattctgtgtttctgtgaaagttttgtctttttgaagcttttttgatctcattattgactgataacgcttgatttgactgcttgattttgaactgtagattttacaacatttttaaaggttcgttcttaacttgtaaatgcttcttaatgcttgatttagggtatatcctctctgatttattccatttcttgattttataaccgttaactgtggattttacaacattttttaaaggttcgttctgaacttgtaaaggtcttaaatgctgaattattcatttgctgtaatttacaaccgttttaaaaaggtcttaaatgctgaattattcctttgctgtattttacaaccgttttaaatgttttacattcttgacattattctttttctggatttacaaccgttttaaattttttacattcttgacattattccttttgtgatttacaaccgttttaaatttttaacattcttgacagtattccatttctggatatggtttttatgcttggtttttacgcagatgtctaacaatgactcattggatgtgcttaacctaccgccccgtatatataatcccgggtttgaaccaaacattagctgttgttattcaacatttcgaaacgcatttggtcaaaaaagatgagctcgcactaggggaggaatagtttaatctaattaaagcctctttccttggtcctattattgaacaagcaaaaagaagtggagttaatttttcggggaagattttccacttcttgatgcagcgaaggttgcttttaaaggagaagaatctctggttcacatttgactccaagctaatgcgattctcagagagagaattcttgcttaccacaggtatatctaaattagttttgttttgtaagtttttaatcaatttacaatgtattttaaaagttttacaatgtatttaaaaacatttaaaaatgtgttttacaagtttttataaaactctaatatcaaatttgtattcacttataggcagtgttcaagaaagcgctaggcgctaagtgggcggtgacccagtgcctagcgcctagaacgcctaatcggggcctagacgattttttaggcggtttagacgtttataacataaaacattatcaatatgatattatatataaaagttatataaaatatctatataaaactaaaaattagataaaatatttatttatatttatattaaacaatatatgaatatttataactatatatataaataaaactctaattaaaattgaaaaaatacattaaacaagatctatgtaattttaggcggtcaatgcggttatctaggcgtcgcatgagagtctagcgcctagtcggggcctaggcgaccgcgtagaccgctttttagaacactgcttataggtgttcagtgtgacctgattgatagtgaaatgcttcgaaaaggcaaagctccatcaaaagctccatatttctggactcagaaagagcattatacgctggaacaactccaaaaacatttgtttgaaccaaatcagctgcatccgctggatgctgaagagaaactgagtctaggtatggtaattttgacagaagcctttctctttacaccaggttcgttggagaaaatccctttgtctagactggtacatgcttcagaattcgcaatctacacatctcaaccgtggggaaagcatgcatatagggttcttgctacaagcatccaacggataaatgagaatacttgggcaaaaggcacatatgaagtaaagggatttgcaatggcgatactactatgggccttcagcgcagttccatcttttggctcagcgtttgcaacagaatgtgttacatcgagatctgagtatcctttgtgtttgaaatgggaaacaactcaaacaccaagattttctcatgttgtcgatgtcgtcaaaaaaatgaattcagtaagtgtggaatcccctcttttaattgccttagttttaacatatatcttatttttacaagagtttttaaaggttttacaagttgttttcttttgctaggtcaagggtaatacagtgattggaaacccgtacgaatatagctatttagttgctagttcgcatgaagacgacatagacttcgaagaaattgttcgtcttgttcaaaaaggatacagactcaaagcaactgattggagtgctggatttattgatgtttttactgtattacaagaaataggggaacaaacaatgaataacaacttgtctgacagcgagaaactcgacaagatcctaaatttacttcaagacttcaacaggaggattgcagtaatagagtatgttcttaaaagccgtcttgaaaaagatgagactgagagatgcgaaaaaaaagaggtaactaaatgggatttttttttttttttttgtcagttacatgtgtatatagtatatattaagatatttgtatccttttttgtttactgaatatgattgttttgattctgtagcagtctgacaaagctggtcccaatatagatggtgatattggtgttgatggtgatagcagagaaggtgatgaatgtggtccaagtagagatggtgatattgatgtcgatggtgataacaaagaagatgatgaatgtggtcctagtacatttgaagattccattcgtgagccaaacacagaggacgggagctatgctggagatgatgaaaacatccagaagattcgttctgaagatgatacagttgaacctacagcaaaggtatattgatctacttttgtttaaaaagtccttgatatctgagtatcatttttggaactaattctatggttttacaagaggttttaaagtgttttaaacggttttacaagggttaatatgttttacaagggttttataaggattttacaaggagttttaaagtgttttaaagggttttacaagggttttaaaaagattttatatagatcttacaagtgtaacaactttttgaaaacccctaccccaaatttctctactccaaatttcattattatctgagaatcatttttggtactaatcctatggttataaacacttttataggataaaacccctaccccaaatttctctactccaaatttcaatattatctctgaagatagtcaggattgtgggaaagatgtctccaataacaaaaaggtaggtgagagtagtgcaaataagggtaaggataaggagaaggaaggaatttcagtttctgaaacaaacaatgaggcatgtaagaaaaattctgaaagtaagaagtactgtagaaagaagagatatgtcagagaaagaaaagaggttagtattcaatattataaaagaagatttcttacaaaatgaaggtcaatttagagatatgttttaaatgtttataatgaaatatattcaaagtacttacatgggacttttttttacttttttcacctgtagacaaataagcgtaaacaaggggacaattcttataatgatattcctacaagaaaacaggtaagaattcaattttgtaaaacaatctgttcgtttttataaactaatttcacaaggaatgcattgttgcatttcttttgaacatatataagcaaagacattacaagttttacaaattgcaatgtcttttattacttcacaaggaatgcattgttttaaactgagtattcgtggcattgtttgaaatttttacaagttgtttttataagtgttattttgtattttttgtttgcagcctcagagaaaaaaatgcaaaaatactgacaaagttgctgctgatcttggaacaagaacatgtgatcaagaattaggggataaagctgataatgatgttccactaaaaactagtcaacaagatgtagataataaatcagaagcttatggtccatcaagaagaagccagcgaagtcaagtgccttcgatttattctcagccaccttacacggcagagaagaagaagcacccaacacttcacccctttgcaaaagttgacacaaaaggtttgaaagtttatgtgaatggaagaagtcgacaaaaaacaagtttgttgtagggtgctaacagttgggggaatcaaagtagattccaaatggttcacaacactagaaacgcagggaaaaccaatatcaggatcggtatgtatgattttctttcaagtattctaatcttgtaaaactttaaaaaaccattgtaaattttaaagttcatatagactagcaaacatgagtaatttgttttccttttcgtgtgtgtttttcttagcatgttgatgcagctttacacttgatcaaaactagaagggaaaatcatccagaaatgtaccttaacaaaactgttgtttttgttggatcatctttcttaaatgcgattgacgatgagtatgctgagtttgtagtcgcaaaagatgattttcagtttagttctgaagagataagtaagctggagattggaagcaagacaaattacatatatgctcctatgtgcttgaaaggaaaatgttgggttccagtagtgatcaatatcgagagaaggtctttgatcattctcgatatcgcgacatcatttgtttcagaaaatgttaaaaggatgcatgtggttgcatattctgttgcgatgccgtacattttgcgcaagctcctcaacaaaacagatatggatgttttagcattcaaaatatttgtagtggacgatatatcacaggtaaattttgtgataagtgagattgtagattgtattcattaaaaccttttttatatatctttttttgtttttttttgtttttgatgctaggctgaaaagattgaagatactgggatgtacatgatgaagatgatggaatgctatgctatgcatattaatgcaaatgagaaactttcagaaggaaaaattggagacatgagaaagaaacttgcggttgacatctttacagaaataacagatttctaggtaagacttatctcaggttttaacatgtaaattagaaacctacaactaagcttatatttcttgatttattactttgatcaggagctaattgtaagagctgggatgaaaagattgctgggggaaaaatgatctgttctttttgaagaaaacgttgctgttttacaaatttttaatttttgctgagaatatctgtagtgattttcccatgaattttactttgtataactctctagttgtgaatttaagtttttttttatctatgtacatgcatctataacatccagtcttcatttataccattttatcttttgatgttaagttttacaagctatctaaacattttacaagctatgtgacagtgtttacaccgtatttttaaagtttatgcaaatgttttaaaagatttgagaaagttttagaagatttatctattttatttgtgcatattgaattgaatgttttacaaagtattttaaagttttttatgctatatgtgaatattatgttaaagtttacaacatgtttttaataattttacaatgtatatgattatatatagaaagaacttttaaagttttacaatgtttataagcttatgaaaataaaaccatcttatttatattttaatcaaaattttcatgattctttaaatttacaagtgttttacaaagtattttcaagtttttaaaagatttttcaaaattttgtaaggtaattttagttttatatatttttcaaagatttacagtgtgttttaaaagtttataacgtgttttaaaatggttttacaacctgtttttaatcgaactaagaataagatagttgtaaatagttgggccgaaataaaaaagaaaaaacctttaaaacactttaaaacccaaaaacaaccgtttgatagagaaaaaaaaaatagaaggggggaaaaaaaccgattctctcagtctccttctccgttgagtacaagaagaagaaattaagggttttcgcttagcttcacggctttagattctacagtttcggttccatctcggcttctccgttttcataaggttcaatctcgtcttctccgttttcataaggttcaatctcaacttttcggcttcttcgatttcatctgcctagggttttgggttccgtcacatcagtcaattttacggttaaattactttaaaacttcgttacttttttgattcatatgcgaaattgggttatttccccttcaaaatcgagtttttgtgacattggatgatttttgagattttgtgatttttttttttgtagatccgtttttattcttacaaggacttaaaaggactctagaaattcaattaattttacctttgttttaaaatcttttacaatcgattttacaagcaatttaaatggttttcaaaagggatctaaatggtttgattctttgagaatgtgtttgagtattgatgagacttttcacttttcacaaagcttccaagtagataatgatgtttgcaatgtactactctatttgcatttctagagttgttcgtttacatgatttaattttacatgcgtttttaaagcttcttaaagctgttttacaagcagtttaaaagcttacaaaggggttgtaaatggtttgatttttttgagaatgctttttgatggagatgttttaattgtttttctatctttcctgccacagggtgaaaaatgagtcaacctacaaagaggttgtttctcccaaaaagactgattgacccagggaatgaggtggataatttgagaagaatatcaaagtattcttcagagaaactttgtattgaaggttgtcaaggattcacttagtcccactgagttcaatcagattcataattctttcttgggaccaatcatagattttgcggaacgtgaaggaatctgtttctcatcacagctggtccatcactttcttcagagaagaataatggttaacaatgaggagttgtggtttgtcttctcagaacaacccctcagattttctctgagggagtttgttattactacagggctgcctttgggtgatgatgcatcacaaagctagtcaagaggaaaaaagagaaagaaagaagatacatggatgacggctggtttaagtttgaaagatctccttaataccttgtctacaaaagccaatgcgatggatcctgatgagagggttaggttaggtgctctgattctagtggagggcatcttaattgcttctaaccttgtaaacaagatagagaaagaacatctggtaagagctagtagtttcatagagttctgcaagtatccgtgggctcgcattgtttacgggtctttggtggattgcttgaagaagataactccgactcaattgtttagagaccaatgtgggcttcctgggtttgtttttgcaatccagatttgggctttaaccgcagttgcagagttgggacagaattttggcagtcgggtcctagaacccaacgacaatcgtccactgttttcgtaatggatgacaacaaaatgcccaactaagaaagatatagcaaacgttacacaggttgcaacggtatgacagtttttctctactacttttttccaactaataaggtttacaattgttttactttgttatacaagaattttaagaagtttacaagggttttaaaaaaatggcaagatttttacaagatatttttaaaggttttacaagacattttaaacgtttttacaagctttaatacagattgtaaaaccttcaaaatagatagtaaatgctttatgaaataattgtggatcacatttctaacttaaattcatattcttttttatgcagtttgatattaaacatatcattggcgatcctgaacaatattctcatttggttctccccccaaatctagaagacaaggactggtttgaagtctttgaccttgtagtccaaggttataggatgaccaggcaacaatggattcaaggatggattgaggttgcagaatggaaaacgcaaaagcctgtgaatcagcctagacaaaggcaaccaaagtctgagactgtaaatcagacaaaaccaaggaaatcaatgtctgatagtgaaacactagacttgatctacaagtcatgtttagaattgaacaagagaatgttggtggtggagaaacatttagggatcaaagcacctgatgccagggatgctgaagaaatggaattcccagcttcgtcaagtggatttgccagggatgatgaagaagaggttgaaataccaatcaacaatcaagaaaataaacagagatcagagaagaatcatgcagtccacctgatgaagattcacacgagaatgtgaatgatgaaaaggtatgtaactaaatgaatctgattggtttttataaagaatatctgtagttatttaaaatttcttttaaatttataggttgctcaagaagagggagccacgaatgaggttccacatgttgatgaagaaagcgatccacaatcctcgaatgtcaatgataaggtatgctttagaagatttacaacgtttttaaaggattttacaacttatttaaacgtttctataaaaaatttacaacctattttaaactatttataggtttctcaaaaaaaggagaaacaacatgaagagatgagaaacatggatggggctccacagggaactcaagaaagtgattcacaacgatcgaatgtgaatgataaggtatgccttaatgaataagatttataaaaaagttttttgcaatgtttacaacattttttaaaggattttacaacttatttataggatgacaaatgtttctacaacttaattataggttgctcaaacagaggaggcacaacataacaagatgggacacacagaggagccgtcacaagagagtgattcacaacaatcgaaagtgaatgataaggtatgcattagttaaatcataataatttacaaaattatttttataagttttacaacgttttttacaaggttttagtatgtatttaaatgattataataagacgttttcatggtcttctgtgttttgctaatttatttctctaggaagaagaagctcggctaaagaaggaacattcaggtacaccattattttttttttgttaaaaatgatgtttttttttaataataaaatggaacatctaatattttcatggtgtcatttactgtctaagattgaaaactaagtgagatagaacagaaggaaattgataatagggtcatactctgggctaaaaacaagaacttcatttttatgatgtcatcacttcaccaggtaatcttataataatttgttatttttctcataactacaaaaagtaacgaaatatattatacattacagattatttggtccaatagttcatgggagactgttcatcacttcgatttgctaaacaatgacaatgagataggtttagcaaaacgtaaagcactgcttgctttacatccagacaaacaacatggagctagcaccgaacagaagtatctggcaacaagacttttcagcgtaataaaggttagtttaaaacagtttttcaaaataaatgcgaaaacaattttttttatgttgaatcgtttcttattgtttttttattaacttattttgcagcaagaatgggatacctacattaggaaaaagaaagtgtgaaagaatgtagttaacataagttccttttttattgtagttatcttttaaaccagtatgttattttgtaaaacagtgataacgaatgtgtttatgaaacagtttattagatgaagaatattgttaactattgcaatttatatccagcttgtttcaaagtgttataaagggttttacaagggtttttataggttaatacgtttttacaagatttttataagggttttacaagaggttttaaagtgttttaaagggttttacaagggtttttgtaggttaaaaggtttttacaagagtttttataggttaatacatgtgttttataagggttttacaaggctttaaaagatttatgatgttatttctataaggaggttttaaggtttttacaatggtttttaaaggtttataagggttttacaaggggttaaaaagtgtttttaaagtgttttagaaaggaccattctactctatcatatgccttggacatatcagtcttgaaagccatatattccttagaaatttctcattggttctcaaactatggacaatctcatgagctacaagattattatcatatactagtctgtcaggtacaaaagccgattgagttgtagacactaaagccggaagatgttttttcaatatggcagtcaaaatcttggatatccccttattattaaaagggaagtacaaattgaaaaatggtctaatttggcctcaatttcaatttcaattttggattttgtagagtatttgatgaaattggaaaggactaattggtaaaaaaatctcattaagaagtttaggatccgcgtgtttagtatatgggcggatattgggtcaaatttttggaaaaccgaattcaaataactaatcgggtttgatcatcaccaaaatgcaaaaacgagaacgaatatctaatcagtattttacccaatcgaatttaaaatcgaaaaatattaaaaaagactcgacttttcttttgtgtatggctcaaatcgaatactagatgtcggatctatcattttgttgtcaaactcagttaaatcagaggaaaaaataggtgaaacaagttaagacagccatagattagggtttcaggtgggcagcagtcgggtggagaagaagaagatgaggaaattaccattttgcctctgactaatagaattgagaaaaagacacaaaacatttttcacagattcgaacccgggtgttacaccacaacacatagaagagtaaccaactgagcttctcgaaattattggaacatacatgcaaacaaaatatataacgaatatcttataggatatttaaagaatatttggatcattatttttgtttccctaattgggttgcttaagaatttttaattggtttaactaatcgaatattgactttagtgaaatttaaattctattaattttgggatccaattttttattttaggagattttgggaactaattttaaataatattcctcttaaacaatatgttcaatacttatcaccaaaatatagatttttcaaagatttcaaaaactaaatctaaaaaagcaatctaaataaaacaaactatatagttattagttttagatattttttaatcaaaaatattatgttggtaaaaaatatttagagctcgcaaatcaattggtgaaacgggttagaattagcattaattcgtaattgtgcatatgtaaagaaattatctatgaaaatctcgtaaaatcacacactttccggatattatttaaactaaccatcttaaatgtttattaagactttccaaatcaaaagcaataataacgtaattattataaactttgatttaattaaaaatcagcacgattaacattcctaaaataaagtttcctataaactgaatcctataaatttccatatcatataattcgaaaaattcctctgcaagctaaagaatataaatttattgcaaacagaatattcctttctaatatccctaaatcgccacgtcatcttcactatataagagcatgtcattctactgaaacgaaatatcattaaaataatcccaatttcgtttcatttgtttaattcattttttttgaataacatttttgtttataatttataaaactttattttcatactgtttctcacatttgttttttttaatatttatgcatgtagtgtgatgtgcgaaagatgataatgtaggcgcacacatgattttgaggtatttattcatattttttttatcaagctttaattgaaatattatttttttataactaatctttatttttttcttatagatcattctcatactaaaaacatattaggagaagaatacttcctttgactacaacgcatgatgatactatgattttattctttgtaagtcaatttcaaatgatcacaaatataattaattctttgttgaaaacagtttacacattccatcataattttattggattgtacatattctaacatttgccgtcaaaaaacaacatattctaacatatgattttttaatccatcatttttttatgtatttttttgaattattttttttgctgatatatatactcgaaatatatatgtcaacaaatttacgtaacaattttttttaaaataagaaataatatatttggaaataaaatcttcaaaaaatatctataaaacattattggaaaatttggtcaatatctaaaaatgtattgagaaaagatatatttttagattttatgaataatttcgttttgggtttcgccataatttaaggaataatccgattaaaaattttcgggtctaaattaaaaacaccgacccgcaaaagcgggttagaattagtatttattcaatagaaaatgagttaaatggaattgttaatgacacattaaatttataattacaatactaaatgcacgtaacacgtgttaaattatcaaaaaaaaatatatatatatatatatatataattgtaatactaatttgaaaactgtaaaaataaaaaatttcccgcggtgaaccgcgggttagatcctagtaatcttgtataaaacaaagcataagctaattggcctaagattctgtcattctctgaggtttacttatgttgggaataaaaaaaatatgtgtatgattccattcttgaggtaaaactccattctgaaaaaaagctaaaaattttctgcagaatttgtgatttcactaaggaccaatattgttgttggaagaacaatgcaataaaaacatctggaccagcaacactttcactcttaatagagaaaaccgcatgatgaacttcctattcagtaaaaactttggttaaatcctgattcatgactgttgaaactttagcttgcaaattgaaaaccttccaaataagcattcaaacctattggaaaggaagacgagaatagattctcaaaaaaggaagatgcaacttgccctttctcactattacaagtatgctcattcccattctcatccaaaaggaaactcaaggcatttccagttctattagctttcacaacagcgtgaaaaaaacccagtattcttatcaccctcaaaaaaccatttttgtctgcttttatgtctccaaaaagattcttcacatagtcttgaacccatgatttttcagaatcaaaaacaaattccaagacttgacccacacactccgctatttttgagatcatttctttagtaaaataattcaccgagatattgtgcaggggaatctaaactggaagaaacaacaaataatcatctgagggtttctcgatccatctttccattataatacaccaatcgtcctatgtccagactccaattttcagaatttcttctaaatcctcctccgtcttgaagaaaaactgaaacctatctttgattagagccacacctcgaactcaattattgactccccaaattcttggcatgtctaatatccaattagacatccttcgattcttaggattcagaaatcgacccaaaagactgcagcaatttctttcatttgaacataactgagttgattagagagaatcagaggtttttcatcttctatagacattttctgaatagttttatccaaatccatactaagattgcaaacacaccacaacgaaacaaaaggaccaccaacaatcttcaaaagctttggatttgagtaatagaaacaaacaacagacacaaagagcagcaaacttgcgaaatcggaatttgtaaactgcatcgacagaaaacgatgaaatcttcggacgaaggcactgctcaatagaagataatcttttagtgggagatattttcttaagcccaagtgaattcgggacgacgacaataagaactacgatttaagaaaacgaattgagctgctatgaaagaaaacagagagaaagttttttggggtaaaaacatacaacaaatacattttacatctattaagcaaaaattaagatttggattttttttatttgtctatcatgtttatgatattaataaaacaaatagtattgtgcgcttattactggatctattttacgtgagcaaaagtagctaaatacagatgagagttggtttagataattttgtaaacatatcgaacctgatcgttaatgcttgtttagttttagggatttacatacgagagttggaattcctactattaagcatagataatcaatactaacgagagttggttgattatagtttgggaaaaatgttgaaaaatgcgcgaactttcaaatttgggacgaaaaaagcatgaactttcgaaatgccatttaaatcataaagtttagtttgactttttgataaaatggtctagtttcgttgacttagccatttcgggcatgtcgctaaatcctgcattggttgactcttttgcttattttgagtttggttttctgttgaattggattgagttttctatttagatcttggattgcatttagattttatttaattcagttaattctaaattcatatgttaagtaattacgattagacaaatttttttataaaactatagaaaatatagtttataaaatagtttttgtttgtgtttctcgatgcgatcatatacattttctagttggtatgtgtgaccatataacaaaattttttctttcaaataatcataatctaatcatatatacgaaagttggctaactctttccatatgagtgtcacatcatcacacaagaaaatgacatgtgccattctacattattttaaaaataattagcaaaattaaatgagaaatttttttaaagttctttattgcattaaatcctccatcaatcctacccttaaatgattccttaaaactaaaataaaaatttacaaaattatgttaataaatcaagcactaatttccttatatttttctgattttactcatattttattaatggtgaattgttattactcgataatgactaaaaatatatttgtgttgtggtttagttgtttgctacccaacctcttatcctctataattaatagagaaacatttaaaaaaaaaaaacttaccatcatatgttattaacaagattgtcacgctgatgtgtcgctctcacaatgatttggcttctatttagataattacccaagatttattagactatttacagaatttgtcattagtctcatatatccatatatcccattaataattaaaaacatacacttttttgtttatcttatattactatgtttttatatttatatttttctttatatacatttatataaattttctttagccgatgggtaaacaatctttttatttatatttatatttatgtttatatttaaatgataaaatatatacatttgattcaaaaatctcgaattcaaaactacaaaatctttacatctttcataaattttttacttaaataaataagataatctcctttctatatatgttacgaatacttaaaatatatacatttgattcaagaatctcgaattcaaaactacaaaatcttagcttggaaactatcaaatttcatcttttttttgctaaacatgtaaatatcaaatctcatctttgctaaattttggatttcttatacttattataaaaaaaaatttctttttatactacaaaatctcgaaatctttaaaacatacggaaagacatattgccataaatggtaacatttcctcaatacttttttatcacgttgaagctttattcaaggttcaaatatttcaccggtaaaacatatttttatatgaaatagtcccaaatttgaataaaacaaaaaaaatttgtaacatgtttcgttttacacaaacggatcttggatcccggataataattttaatcataataattttacttgaatcacttcatcccgcacatagtgcgggttgttatctagttagttagttattttatcttgaatcttttgtcattttgtagtttctatacgacttatcatatgctttctcttttttccattttttgctttatggtacattggtaatattgacatgcaaattttttcaagtaatggacaattgaaacgttagacataccacaaaatttaagacacgaccatttctcttatatggatatatgcaatggcagtagatctaaaagtgttgactaaaatgacttttaatttttgttttttttcttcttttcatataaaaactcttgagagcttgttcaaattatgacaatccagtgtttaatcatgagcttataatgatgtggttggaataaggagagtacatagaacaaaatttttttaatttataatcaagttagacaagttttaatccacataattacatatcattgtatcaaaatatcatatattgttgttgtatgtatgcatgataaaaaaaatattaggatctttaatacaaataaatttgatttatacatgaaaaattgatatttcgaatcaaaaatgaatctaactataaaaattgtaactacataagatgtgtttaacttaattaattacacaataacaaacacaaaaataaacataaattagcaattaaaacaattaacatatttttttcttcagaatttacaaaataacccacgcatagcataacgtgggtattcatctagttcatataattttaacttttttttgtggtctccaaattcaaaagtttaaccctaaccctaagtaaaatatcccatgcctaccctaaaaacaaagaataaggagcagtccataattgcatatatatatatatacatatataagaaaagaaaatgaggacttgattatagagaaaaaccaaaactaaaactacagtcttatcaaccaaataatattaatcgtccgataacccaatctctcttctctccaaacgttttttttttttcctttctctcacttgaaaatcaccccgagacctctctccttctctctcgcagccgacgatcccatccacaaccaaaactcgctcaccggcgatcgtctttctcatacctcgccgacctctccgtcttctcaattacgatctaccatcaccag

SEQ ID NO: 5176 - DNA, 4321 bp, Arabidopsis lyrata
  Intron number 1 from transcript 495970 (locus 495970) deri ved from phytozome v7.0 (chr-ID scaffold_8; pos 18636677 t o 18640997 reverse strand)
tgtgtgatcggaggatctgcaagagttcctttacccagaagaacagagagagagtttcaggcacacaatggtggaagaccaacaggggaagctgctgccccggctgagctaaagatcgagtaacgaccgactcgatggtctcttcctcttcagctgcagataatcgttgacaattgctttgagacgcatcggaaccgatcacaagtgactttcccgggagtttctttagtatctccacaatgagatccagaggaagttgcaaatattcttcttcacggtaattcttttcttcatttccttttctcatgacctctgtttttctccttcttttgtaaacactaaaacgtgactgtaatctaagaaacataactgaaactcacaagagttgtgaaatatcgagacggccaagaagacgattaatatagagatggtgttaaggactttagggttttgtgtatataaaaaaagttaagtttctcttagagataagaatcccaaaaccagaagtaatctcaaaacgattacgtcacaaggacagagtaaaagaacttccaagaagacgattaatatagagatggtgatattgaaacttctttatagttcttggatcattatttcataaactatacaaatatagaattcaagatctcaccattttcatcaatatttactaggaaatactgaaattaacattatcaaaagagacacaatatatcttataactacatatagtaattaattttttttattttcttgtaagccctttaaaataattataataaaaaaatttctgtgagcagttatattaactaaccttccagtttaactatgaaaaacaaatgaaggatcgattgatattaaccttactgtttaactatgaaaaaaaatattaaaggaactattcatattaaaaggtttaaaataatattacaaccacattgtattctcgacaaaatcatgaatggcaaatacgcgaataatatctctaggttgttttcttgtctttagcctagcaccttctatttcaactcttctgtagcttttttgcttcacgttataataatgaacatacaatggcataatacaagtataacacatactttgaacaataaatatctcaccagcaggagtgatacctgagaaagttctgaaatcacctccagggtattcaagcaagtcaaaagtaatgttggaccattcttgtttctcagcattctccataatccacacacttgtattgttttcgttattacttatgcatcctagcttcccttggtggttgaaaagagctcgatcattccacttgggactccacaatgcttcaggagtgcggacatgataaaatatttccgacctcacgtcaaaactcagcattatagtttcaccatagttgaacatttcttttcttccaactgctacgtaataaatagttccgtcaatgcatacccccgcttggccgtttggaatgagttcctcatcaatattgcctcggattgtcctccattgttgacaatctttaaccaatgtgaaaatgtgaaaagtttgcgttaactcttgtgagtcaataaccatggccaacactttgtattcattcatgacatggtcgtatccaaagtaacagtttttgtgtctctttggtgacggtgccattgattcgatcttgggtaaaggaatgcattgcctcgtggtagggttgtataccgtaaccacatcatatactggtgaagaacaacagataaagccttggatgtattgatacctgaacgaataatagttgtttggtccaggcattattgatactttgggttttgtgcttagagagaatgtagacgacacggtgaaggaagtttcaggcgcacaccggtggaagatgaagaccggaagcttatgaggcggctgtctcaaagaccgagacatgatcgagtcaacgaagtctctacggttgcttataatggatgaccattgctttgagacacatcggaacctcatcaaagattttgtcgggagttttttgagtatctccacaattaggtcaaggggtagttgaaaatcttttaattttgacaaaagaagttgaaaatcttccaatcttctttcttcttgttttgatgatctctgctttgtcaaatatctgatagatttagcaatggacaaaaagaaaataaagacagagaaggcttgtgttcttttattaacactaaacatggagccggtggtctatgaaaacttaaactcaaaagaataatcgatatgtcatatgtggaatagaggtgggggaaaaatgaagagaacagcgtgaagaatgaaggtggaggagatataggaagttatcaaaaaggcgaagtaaaggatgatatatatcgtgttagagaattagggttttggttaccaaaagaaaaacagattagggtataatgtgtatatttttcaaaaggtataattcaagaacttaggattttgtattaaaaaaaaaaaactaaaggggtgttattggtttgtgattgtttatgacttttaatgacttaaaatgttatgaaaaatcttttattattcaattaagattttttaagactcttaaagtttggtgttattagttttggatttgtaaaaactaatttaaaatcttcataaatctggagttattggatacatattttaataaagtcattgaaaattttgtgttattcaattaaaacaaaagtatctttgattgttaattaatgatttaaattattatgttattagttcatgattttaatacatttttcttcacaaactaaatcatgaaaggcatcataaaaaaatagagattatgaatcatactaggatatgacccgcggtacaccgcgggttaattatttgatttttttatttttataaattgatgaatttattgtgtataatattttttgttgtataccgcgggtcacatgcgttgtatctaaaataaaaaattttaagttgtatttgttttgtttagtgtttaagattgtataattgtattttgatttgttatttataggatttcacatgtggtatattgtctcgtattaatattgacccaaacccgtccaaccatataatctaaaatgaaattaaacatcattttgttatttttttaataacacttttatttaaatgtcatataattcgaattaatttgaaagttgcttttaaatagtttccatgtatatttttaaattagtgtgtttttggaccaacccgtaaaaacaatttataattgtatcttaaaatactaattaggatttcacccgtgatatactgtcccattttagataattgtaaaaattaaagaaagatccgaatgacttaattttgggtctgaataaaacaacgacatgattaaatgctcaatttgttcttaaaaatgttaatatagattacacacatatttttattcatcgattgagtaatatatgtccgttttaaaaaatttgaattgtaacatatggagaaaaaaaaaaactaaaatttactaactatttatatattttataataatttaaaataatataaatataagatcaaataaaagtgaaataagaatcatatatttatgtttaaattaggtagagaggttttaggaaattagtgcaaatttgttatattagcattaaatcatcatatttgatttctttatctataaaaatcgtggagaatataccataaataaagcgtttaaatatagtaattagttgagaaagtatatatattttagattttattaattattttcgttttttaattttgccaaaatttaaagaaagatccgattgaagatttccgggtcaaaattaaacaaatttgacccgatttgggtacttcaaaaactgctgcaaaaactgctgtctcgtctaggaagaaagatatattccaaaaggttaaagtaattccgattattaagaagttagataacaacaaaaagattagattagtactactcttgaatttttattaatcatgtgagtatgtgactacttaaatttgactattgagaataaagtagtaatgggccaatatgtggcccatttagattattattggcctttttgtcgtcggacagagaaaaacttcgcaaatagaatgcaacccgttttctatcaaaccaaacggcacgcgttgttcttgccgtttgtcaaagtctcaagtcagattcgaacgacgacgtttcatctgtaactttaccatcatcgtcgttgttctttacccgaagcggatctcttcgtctgtgtgatcggaggatctgcaagagttcctttacccagaagaacagagagagagagaccgagagatatacgct

SEQ ID NO: 5177 - DNA, 4313 bp, Arabidopsis lyrata
  Intron number 1 from transcript 898000 (locus 898000) deri ved from phytozome v7.0 (chr-ID scaffold_5; pos 15454267 t o 15458579)
gaattcaccagactggaaccaacacgggctatggtaacactggcggtcttcaccacgagaaggaaggtatgacggagaaagttatggagcagctaccaggtcatcaggggtcacaccaaactggtactaatactaatgtcgttcaccatgaggaaaaaggtatagctgaaaaacttaaagagcagctaccaggtaatcatggaactcaccagactggaaccactgcaaatcatggtaacactgacgttgttcaccacgagaagaaaagtatgattgataagactaaagagaagcttcccggtggtcatcactaaatttgcttaagactattaagtctttgtgtggtgtaataatatgatggtgtggcttttctatttaaaaataaaataaaaagcagactagttattaggtggtttttaataaagcacgttatgcagtgtttccttttgttgtttcgctaactaataatatatgtaagtgatttgtgttgttgaattaatataaagtatttactatttactttcaactgtactagtttttggttagtttcgattttccgttttcttttggaattttctgacgatgtaaagcaaaattcgatcgctcattagttgtgagaacacctccagtagaaggtttttaaaattaaaataacaaaaaaaaaaaaattttaaaaagacagtataggttttcatttacaaacctgtgagtcttgtttaattttttttttttttgtcaatatttagaatttttttacaccacttgttttactataattggatcaactttttatttaaaaatgaattaaataacaaaattatactaaatatatttataatattggtttggagatgctttggcctctgaggcgaccttttattttttaagtaataaataatatgatcaaaagatgaacatcaaaggtggaaacatcaacaaaacgaccgcgtttgttcggctatatggattattagggttaaaaatttaggcccaaacggcccaaataagctattttacggatatttaattataagatgtgtggctggctggtttataacggacatgtgacaatgacatgtgtcactctaaccacaaaacgattgtctaacgtaaacgccacgtgtgtcacttcaacacgatttgataatgtatgtataaaaagtaccattcaagagcgtatgaatcatcatcaatcattgtcttaatttcgtcgagaataattttgtctatagctaaaaaaggcataagaagttaagtttcaattgtaaaaggaacatggagtcttactaaaaccagtccggagcgcagcagactcaccaacagcttgtgttgaaatgataaattgttttagaatttatttgaactattttcaaagtagagcacatatttaaaaattactagataaaatatggaaagtgttgcaacaatttatagcatttaatgatattctattgatttaacacgtgtatgcatgcatgatggaggacgatggactaggtggaaggaggaggaagaagaaaggaataaaggagaagattaaagagatgctgccgggtcatcacgaatccaacaagacttctttaggttctaccacgacggcctatgataccggcaccgttcaccacgagaagaaaggcatgatggagaagatcaaagagaagcttccgggtggtcatcattagtttcattttaatcaacttgtttgcgtatgttatatagtagtatagtactgtgtgtattgtacaaactaataatttggtgtggctcttaaccaaaaagaatatgacgtagttacgcttagggtcgttgcatgtaggcttgggcacaagacaagtacttgctgtttttcaagtacttgtgactcgacttgacttgtacaagtaattgaaattccggcttgttactcaacttgtttgagcaaatacttgctataacaagtaccggtttaaaatcttgttacttgcaagtaacttgacccggcttgttacttgcaagataacttgacttgacttgttacttgtaaggtacttgttatttgaagtcttgaactaaaaaatttaaatataaaaacaatcttatacatattacaaaacattcagaattttaaacatcataaaatcactaaacattaaagttcaaaacatcatagaataacaacacattcaaacatccaaaccctaaaaaatttctgaaatcgaaagtcttctctcgattgttcttttgttattgggtttaaaagtaattgagtttaataggctttatatattgtattgttagttgttactaacgttggcctttatagttttagtttataacgttgagctttatagttttagtagttgggtttaatggtagttgggctttatagtttatatcttgtaatataaaatggggcgagtaacgggacaacagggcgagtaacgggacaagtatcaaaacgggatttgatccttgcgccttctcattggcaagaacttcctataaagaaatcatcaaaaacatacaagtactcacaggttatctacacagccaaaaaaacatcaaaaaactcataaagtctacaacttttacaaacattaaacacagatcaatcaattaacatatgcacaaagaaagaaacttaccaacatcatatgcttgaaacacgaaaacgtagatataatcgaacaatttccaaaaaatttagagaaaaaggtaactatgaaatcgaattcgatggattaaccaaaaactcaaagaaaatttttttttaccttttgataatttcttgcagcagccaccattacatttccgaatgctagattctagagagtcgatttcactgcatctggatccatctttgaacaccaaaaatctgaaacaacaacacgaaaagcattaggattcagagataaacgaaagctaaagcttaataatcatacctttttcaattccttctattaattaagagagttctcattcctttcattaggtaaatgtacaacttatatagtctctacactaggtttaactaattaagaattacaattagatccttaaactatatcacaccttatacaccccctcaagatggaggcaattccttgactccaatcttggaattgagttcttgaaaccttggtcttggtagcggttttgtaagtgcgtctgccaattgatctttagttgatacataagagactcgaagtgcgccagactgaatattcccacgaacaaaatgatagtcaagagcaacatatttcattctcgaatggaaaactggattggcacataggtatgtggctcccatattatcacagtatatcaccggtgctgttggcaaggaaattcccatttcaaagagtaatgagcatatccaccgtagttcagaggccgtgtttgcgacagcccgatattcagcctctgtggaagatcgggctacactcttttgtttctttgaagaccacgaaatcggactgccgccaaagtagacaatgtatgcgtttgtggagaggtagtcatcattatctcgtgcccaatctgcatcggagaagctttttgttgaaacgggaaacttgtctccacgaattgtacatgcctcgatgcgaagaagaagaacaaaaaaaagcacagcttgagaaatcgaaattagagctttttgtttttgtttgtttactaacgatttcaaatctggagcgcccaaaaacaaaaaagatgacgaacaacaaaggtggaaacataccaaacgacatcgttttccatttggtaaaaggtatatattattgggccttccgtatctaaaagcccatgaggcccacttaagctatttacgtcggtggctaacaactactactagaccgacgtcttatcttatttagatgccatgtgtgtcactttaatcaactacggattaaatctattacttttgtgatgttggccaacacgtattgcgtaaaatatctatatgatgaattcctatccaatatgaaaacttgcgggtctataaaagtatcattcaagagctcattaatcttcaacgatcaaagtctttaatttcatctatagctaacaaaagagtagcaagtttattttaaattcgaagaagaaaatggattcttaccagaaccaaaccggagtgccaaagaaagggatgacggagaaaatcatggagaagctaccaggtcatcatggaactcatcagactcatggaaccaacacgggttatggtaacactggtggtgttcaccacgagaagaaaggtatgactgagaaagttatggagcagctaccaggtcatcatggaactcaccagactcatggaaccaacacgggtt

SEQ ID NO: 5178 - DNA, 12954 bp, Arabidopsis lyrata
  Intron number 1 from transcript 912628 (locus 912628) deri ved from phytozome v7.0 (chr-ID scaffold_1; pos 12300298 t o 12313251 reverse strand)
tgatcactgtttccacgttgaatgtatcgatgcatggctcaagattcataattcatgtcctgtttgtcggaactcacgctcgtaatggaagttgttgtcgttgttgttgttgttgtaattgttgttttgaatatgaagtatttcgacattttaatgaatgtcactaattcttctatttggtgataaatatgtgtttatatgtatgttctagattaaagattaatgatattgtttttgatttttccactagacttatctcgtaaacttacgcttcataattatttcggagacaaattaatgcttcatcatagtaatgaagtattacgccaaacataaaaaagacctaagtttatttattttattttaataggcatacgttattgaaagaataatgaaagatttaagtataatagcgtaaaaggaacaagcaaaaaaagcttttaaaaggaacaaatcaaaccaaaccagaagcagggaaaactcagcagtcaggtgccatctctaacttaagtttatggcgatcaaaataatgttggacttccatcctctgattgtataatgactcaaataattctggagtttctgtaaatcaggttttattacatgttcaaacatatgaaaaaacaactcaagagcaaaaagcaaacaaccgaacaaagcatatatagctaatgatcaaatgatacatagttttatttattcgcagggcataatatataataatgtttcgataatatacttaaagggcacagtaagtggtgagatcagatatgtctttccttgcattaggtaagttgctgaatttcaagaaaccccaaaaatcaaaaggcttatagagacgaggatgttcatcatctaccatctcctcaggcgcatttatgatcactccttctttaggaatcgtgaacagtgcagccacataccgatctttctttccggttataaccacacggtgaagcggaggaaataccccaccattcaacagtacctacaacaccgtattcttacatatgttaaatcacataattaaaaggttataaaagaatgaaacttgagagacaaggaagcttaattttagttacatgaagagaagctccggccataacaatgaaagaagaagcttgagatggcttaactttgatccactcttggccatctttggttttgatctccaagccatctactgcatcgttctggcagagtattgtgaggaaatgcctatcgatatgagggtaaaaacctatcttattctctgtattatcatcggagagtcctttgtatttaagtaactgaaagtgcttattcgctgagttaagatgctcctccatgtatttctcgagtccgaaactctccagagtcattgtcctcaccttcaagtttaattctattaacttctccgcaaacgactgaacattcttgctgaaatatatatgtaatacatcttagtaatcgatatatacctctgttttgacatttttaaattattaaccatcattcatgatatataaaatattgtaaacatatactatactgatatagactgaactttatagacgattatatagttaagtgagacaaatatttggtttacatgtattagagcggattttaggtgattaaaaaataaattcatcaatctatcttcatcacactccgcttattggttaaaatgttctgattggttatattaaaaaaaatttgcattaaaaaggtgacaaatcatgaattaaagttgacaaatcatgaattgcccaaagtggagaaatcagaaacgaagatttattggtgtcattaaaccatgatagagaaatggtccaaattttttaagacgaaaaagggttaaattaaatatttttaataagttattataaaaaaattatagataaaaatcgtaagtgtcattcaaagagataattaaatatatatttttcgtaagttattataacagctttattttgttctaaaaactttacacaaaactaaagctaaaactaatattaaaatataaaaacttatcttagaactcatttttatttcaaaagttgttaaaaaccaaatactaaataaattaccattcacatttttaaataaattaaaaccaagagccaaatatttctgtaaaagcctacaattcattgccaaaagtttgtttcaagtgataactgataagaagggtacctgacgaagatgttgccttgatcccaaagcttgtgagtcaagtcattcacaacattaggattatctacaccataaaagcccatgccctcttgtaaagggactctcggaatcgtcaagtatccttcgtaatgcacgtctgtctttgtactcagtttggtctccaatggcaaatcgaaaacctccttggaggcctcgaacaaggccttccttagctccatggaagctccatcgaacaaggcctcgaaacatccgtactcttctaaggcttttcggacttgggatctcaccaagtcccactcgggggtttccggtttgagatcttgactggagaagtcgatgatcgggagcgaaaggggaagttgggtttccgaacttatcgccatctttagttggtgttgtgtaaagatttcaagattaggaggagaaacctaagaggagaaaggccaagtgttcacatatatagtccaagtgttcaccacgtgttcacatatatttcggcccaaaagaccaaacatgacaacccaatcaaatatcacattcatacattgatcatatgattacataccatttaaacattgatcatatgattacataccaaatcaacaataaaaataattagaaattatgaataaaataaagaaataaattctatttattttatgaattaagaaaattaaatttatataaacaatcaaaactaaaatagaaaaaatctcttaataataacaatcctagaaaatgaatcctaaggggatgtattcgaactaggattttaataaattttgggtttttattgaaatcacctgttattgaacttgtgattttaaataattttctatcccatgttattgaacttgcattgtatatatatatatatatatatatactttttttcgtcgaaacaagaattatattaatgatataagtcaatacagagctgtttttagagccacaatggctgggttacagaatcagaataaaacacagaagttagacaaccaaactttgctagattatgtgcagccatatttccttctctcttcgtgaaaatgaaccgtgtccgttggaacttccttgcccaaaatttgatatcttgcaggagatttgtcaatgttccaattcgtgatgactcgtttatagttcgtattaagatttcacaatccccttcaaaggaaatcgttttgtagccgcgaacccaggtttgttgcatagccgctattaaagcttttgtttcggcttctagaggagaagcagcgtagcctaattgcagtgaaccccaatgtttagatagtccatgatgatctctaataatccagcccgctgtagcttgttgagtgtgaatatcaaaaccagcatcaaaattgcatttaatgtatggaaacgacggggctgtccaacaccggagagatggaggtggagatgtgttgtgactgggcatggtgtctctgcgcttgtgaggtgtagtggctataatccattgtgttgtttcagcttgtgccttcaaaactgtcttggaagcactctctcggcctttgttgaagacaaaatggtttctagctttccatattctccaaagaaaccaatagggcattaatttttggtcatcctgaattgtttggtttgtaaggagattcattaagttgcttagattttcttcaaaaacaggggtgaagcgaatattccgtagaggaggtatactcgctaatctccaaaccatcattgcgaaagggcaggaaaacagagcatggtttatactttcttcttcttttcgacatcgggggcacatacgatcaacattcataccacgtgaatttaatctagtcatggtggctaaagcttgagaaagggacctccagaggaaatgttttatctttggcataattggtaacttccaaactctattcttcaaatctatagaacctggaggaatatggagcctattgtgatcgtgagggtcatgggttaataaccaatagcctgaacgaaccgagtagtctcctgaggtattatagttccaaataatggtgtcgcagttctgttccattgaaaggtgagagttttggagaagtgaactatctctttggtcaacgtgagcagctatctttgaagtatcccatgagcgaatattaccttgatttgagatgaggttttctaataggctattcctgtatgattcattgacacggattggcctgggagggtggtcatcaaaaacattatcaacacctaaacgaatagttttgccatctccgactatatatctggatccttttttgagtaaggcaatgcctgatagaagagatgaccagccataagattggtatttacgatcctttgcatctagaatcgattcatcacggaagtaacgagccttcatgattttggcaaatagagaattgggatgttgaataatacgccaagcttgttttgcaagtaatgcatcgttgaattttgccaaatcacgaaaaccgagtcctccttcttttttagaaaattgcaatcttttccaagcaatccaaggtattcctcttttttttgaattcttctcccaccagaagttcatcagaagtgactcaatttccgagattattccttgtggtagtttgaaacatgacatcgcatacaccggcattgctagagccaccgattttattaagatttcttttccagccggtgacaggaattttgcactccaggaggttgttctcttctttacacgttcgataatgtattcaaacatctcctttttcttccggccgaactgctcaggtagtcctaaatatttacctcctccaccatggttttggatggataaaatgttcttaagccgatgttgagtattgccaaaaattcgtgagccaaaagttatcatagatttttctttatttattttttggcccgaataatattcatagacatcgaaaacatctttaagggcttgacaattttttgtgtttgcttggcaaaagaagagaggatcatccgcaaactgtaaatgtgtaatggccggtactccattgccgattctcacacctcttatttccccatcttgagctttacttcgaattaagtgacttaaaatgttactacaaaggataaatagatatggggatagtggatcaccttgtcttatacctcttgatggtgtgatatatccatgaggagtaccattaattaagactgaatagcggactgatcggactgttgccataatccagtttatccatttgtcgcagaaaccaaacaaacgcattgttgtttccaagaaactccattcaactctatcatacgctttgctcacatccgttttcaccgccatataagtttgcgaaactcgttttctggttttcaatgaatgcataacttcatgtgctatcatgacattgtcattgataaggccgggatgaaagcggcttgtgcatcggagacaatcgaattaagatgcgttttgagacgtcgaaccaagcatttagagatgatcttatatagcacattgcacaaagcaatcggtctatagtcagagagagttaatgggtttgttattttaggtatcatacaaatgtttgtatggtttaaaattttttccattcgagaagttgcgaaaaacgatttaacctccttaataacgtccttaccaactatgtgccaacattgcttgtagaagcgtgctgttaatccatccggcccaggagctttatcatcgccaattaagcaaatagcttcatagatttaggtgtcactgaattcctttgttaattctgtattcaccgttggagtgactgttgattggaaatctccaaagtcaattggtgcgacagggttaccattggaggtataaatatttgtgaagaaatcctgagcatgaataccaatctctttatcaccacggtacgtcgtaccctcgttgtcatctattgaatgaatccgattatgggaaaatcttgtttttgtgcaggcatggaagaaaccagtgttgcgatctccttcattcatccattgatttcggctcttttgttgccaatatatttcttcatccgagtaagcttttgagagagcaacttgaagctgtgggatttgttgtctctctaatggtagctgactgtttaaggctttgttaagtcgagactttatcattttgatgcgaatgtctgcattcaaattggaatgatgtttcagtcttgccattgcttgacgacaagatcttatacgatctgagataggagtctggtacgtgtagtttctttttgaccatccttccttgaccacgtccttaaacgtcaatacatcaatcaacctcttatcaaaccggaaaactttatttcttggtggttctatgttgtttagtcgaaccaggattggtttatgatcagaaccagtaaaatctaaaaattcagcttcagcgttagggtactctgttctccaaactgagtttatgaaaactctatctagacaacttttgattgaatgattatgtctctctcctgaccacgaaaacctgtctccctttgattgcatatcagtgagatcacaatttgttatcatatttcggaaatttctgaaagtccagttctccctttgaggaccccctattttctctgaatttgataagatttcattaaagtcaccaacaaggatccaagctccgttacgattctgtgaaagtgtttcaatgtgttgccataggagataacgttcactttgaattggatggccatatacacaagacaagtagaagctcttttcattatatattacatcaacatcaatgagtctttcatctcgagaaatcagagataaggacacattattcttccacataatagctaggccaccactccttccttgagggggctgagtaatgacattagcataacctaaatcacacgctaatttacatactatttcacacttatttagagtttctattaggaataggatatcacacttaaataaacgtacaaattgaaacaaacgagactgctttgaagacgaaccaagaccttgacaattccaggatgcgatcctcatgggggaaagtataggggtaccgggccccccgcgcctccgtcacgtcctgttgttgaacacgagccctcaaattcaactcttttcttcttacgaatctggcttaaaacagcaaaatcctctgtagcctcccattccctgtagtactcttgagagtccatcctcttgcgcttgatgaacattggtccattagcattgtctgagacatgatcatgaaaggatggttcacgaagacctgcctggccattgaggagcttggcatgaaggtaggttagcctctccgctgttaattccgtgtcctcaaaaaagcttggtaagtcagatagacttgtgttgctaggagtaacctgctgtggtgaaggaaagacagcctttccattcttcgagccaataccagggattacctcaaaaggatcaattgtttgcagagagtctgtgtcaacattgtcaccttgaatagtcttatcttttcctggatcatcattgtctggatcctaaggatcaacaggtggatcctgcggatcatcaaatacaaggttgcaatctttgacatcatgcttcagcgacccacatttggagcagaaactccttagacgctcaaacttgaacttcacaattgttcccaactcagaattgaaattgaaaaccctttgaaagcgaagaggattgtcgatgttccaagccatttgaaccctaacaaattccaccttattggtgttctcatcaaaatcaacatcctttaccagccccaattggtttcctacatactcagccatatcccttgacaagtagagtaaagggattcctttaatctgaacccagaaattgattaccttcatttcttcttcactgatgttaggataccatcggtgaacggtaagcatccagtcattgaaagcccaaggtcctcgacgcaacactagattgagtgcttcctcactctggaacacaaattggacacgaccctgtcccagaattcgaccgatgcacgaatccgtgaacccccaaacacgaggcatttggccaatcaaagctttgagattttgcttccggggattgacagtcgtgaccacgagagagtagcggtttgcagtcgccgctttggcacagaattccggtggtaatgaaacaggagcctcgtcaattccgaggtccaaatcttggattgacttgcgtaagtaatcgctcattgttgaaagaaaggtgtttaagattgtggagtggagtagaacagagaaaaatggaagaattccgacagatatataggtcagccatggcggtttcagaaagcggttttgatgaaacggttgagaaaaccgaaaactaccatggaaactgccccgaaaacgaagcagatggaaaccgactgattcaatttcagggacataaatcgaatctgccggaaaaacgctccaaaaaagaggagaagagaggcgtcgatggaggaatctccgatcgcccaaaaaatcgccacagagaaacttgcattgtatataaattcattcaaaataacctagaattttttgttattcaatcaaagatttataaaaatcatatcaaatatgttattcaaacttaacaaaataattaaaaataatattgaaaactgattttaggagattttagattcattttaattgaataataaaaatgaaaaaaatcacaccaatagggttgcgtctttttgttgtatttttttttcaagtatcttttcgtctttaatcgtttattttatttgtcgcatcttctaatatttttatttttttgtcttttcattaagcaaacttagaaaataaatcatcttattatttgcattttttaagatttttacacttgtgtcttttcactaagcaattctagaagatgaatcatagggtagcgtcttttcgttatatttttaaccatgtagctttccgtttttaatcgtttttctcatgagtcgcatgttttaagagcatctccatcggaagatactcttttgggtatctcaaaaaaaaaatattattattttaattgtgtaatatattttaattgttttttaataattaaaccaacaattgattgataagtggcaaaaaaattttagaaacgtttctcatggtatctcatttgagatatgtttctccccttctctcctactttttctttttttagttatgattttaattttaactttctacatgagaaacactaagagcatgtgtattggaaaattctcacatagattctcaataataaaaaataaaaaaataataaaaagtggaaaagagaaaccaaaatcgattctcatttcagaacatttgataaccctttgagagactacctttacacatgttagcatataattggtttttagtttttttcttttttgttatttaaaattaaaataaataactgaattaaatgatatatattaaaataatatatttgagagacttacaaagtttctatgcactgcacagtggtagagactctcaaagtctctcagaatatatttatataatatacataaatcagtttaattatttattaaaattttaagtaataaaaaaaagttaaaaccaattatatgttgacatgtatgacatgagtctctcaagagattatcaaaagttctcatgtgagaatctgtgctcatgtctctctcttattttttatttttttatttttttttaatatttttgaaaatatttgtaagaacctcccattacacatgttttaataaaatggtctaagattttatatagttgtatcttttcattaagaaactcgtcttaatctctagaaaatgaattgtagggatgcggttttcttagcatattttttcttaaccgatttaatacagaaatgttttgtaaataaaacataattatttccatttgaacgagttgcatttttgacaaaaagaaggtttcatttttgatatactataaatttaaaccacattgttaatttaaaaaatctaaaaataaaatatacgtgttctaacgaaaactgaactgaaacccaaaatcatatatatatatatataaacgtaatcatattagattcaattttaatttgataactacatttcttaaactgaaaactacaaaaaaaaaaaaaatactaaaatcaaactataattcttaaattattttttatcaacaacattcattatgcggtttttaattaggctggtgattaatcaactatgacattaatacaaacctacaaatcttgatcattaaattcctaagtagttgaaacactatatacattcacggtttagactcattcttgaaacgttagttgacatgtcatttgagcactagattacgagtactaattataaccctctgcgcaattggaggaggtttcaccgtcttcgctacttgttttgctgtccgcatttacaattccgagaggtttgtctatcagagaagacaaaatgcagccatcgcagccagaaccataacgcaacaaccacgaggggttgtggtcactacaggtcttcaccagtctacaatagaatcatacaaaaaattggagttgggagaaagtagaaggcttccgggtactaatggtattggtatcatctgtcccatttgttttatcggaatatgctataccagaatgtgatcactgtttccacgtcgaatgtatcgatgagtactggctcaagattcatggttcatgtcctgtttgtcggaactctcgctcgtaatggaagttattgttgtcaatatatcaacattataaatacgtgtttatatgggctgaagatgtatgttctggattaacaactattaatatcgtttaagcagcttatatatacaaaataaaatagaaaatcccaaccttttctcaactatttcattcactaaataaatttctaaccttgcgttgatttgaactgtcattagacacgcccatctgtcatgaaatgcttacaatttaggttattttattctttaacaagataaaacaaacaaacaaacacaagcctaaacaataggaaactacacaccagcataatagtatcctatcaaaataacaaaaaataaaaaatatatatatacactatcatagttcttaaaattaattaatctatatataatagcaatctaataaataccatttgcacatttgaacggttgtgtctttttatcgtaacctttcgtttaaatcggttatttttttacggttattttggttgcgcctttttatcgcaattttcgttttaattggttatttttttacggttatgtcgtttccaataaatactatttgcacatctgaacggttgcgtctttttattgcaacctttcgtttaaatatataataacaatctcaataaatatcttttgcaaatttgaacggttgtgtattttcatcgcaacctttcgttaagtttttttttttaaactataaaatattattgcttttttaaaaaagttgcatctgttcaatttttaactataaaaaatctgaacatatatgtctttttgtcgtaatatttcgttttttttttaaatagctataaaatataatttgtggttgtgtacttgtgttttcttaaagttgcatctgtttagtttttaaatataaaatatttgaactattgtgtcttatcgtcacaaccttttcgttaagtttttttaataattataaaatataatttatagttgtgttttcttaaagttgcatatatttaatttttaactataaattataaattttatggttttgttatttagaaagttgcatatgttccgtggttgaaacggttcgtcaaataaactttttcattttacaattttgaaaagttgcatttgttcaatttttaactataaagtataaattttatggttttgatttgttcaaaagttacaacagttcatttttaataactataaaatataatttatggttatgttttttttttttaagttgcatctgttcaatttttaactatataatataattttatggtttgtgtttagaaagttgcatatgttcaaagattgcaatggttaatcaaataaaccttttcattttacggttgttggcattttttcgctatctagcattcatatatatatatatactttgttatctatattattatttatttttttctaaataactagtattattttggttattagttaattttttccgaggattatctctctttaacaacacaatttaaagtattgtgtatttttatcataatgttttgttgaatgtatttatataattatgtttagaagtgtttaaaaacttgaaaaagtacgtctactcattataatgattaattaaactttttgattaatatatttgtttatgatcatatcttttcaccataatgttttttaataataataataactgtttctgaaggttacgtctctttaatctttatcataatttttcgcaaaatatatcttgatttatttttaaaaagtattttttgaaagttatctaaatacattataatttttcgtttaatatttttttttttaaagatttttgaaatcattttccccgcgacatcgcgggggtctgagtcctagtgaaattagtatccacaaaagaagaaggcacaaaacccacagtaacataaaaccctagtccgtgtatcttctccttccagctttaggatgatgcgaaatcttctacaacacgcaacacgttacagggttcgctccttcggaaccctatcatcccccacggcggcgggccaaacattgcagcatcgtatcacgg

SEQ ID NO: 5179 - DNA, 3415 bp, Arabidopsis lyrata
  Intron number 1 from transcript 473435 (locus 473435) deri ved from phytozome v7.0 (chr-ID scaffold_1; pos 14837234 t o 14840648)
actttgataaactatcaagggaagttaggatttatgtgttgcaagaagggtgtggaaatttgggttatggaggatgcgaagaggaaacaagaatggtccaagattatcttttataagatggagggtttagaaaaatggcgtattgcgggtgtcactcatggtggtgagatcgtttttatcaatgggatgttaaaaacttatgatagattatatgttttctattatgatccaaagcgaaatagtatgagagacgttgaagtcgaaggtacaatggtgaaggatatagagggtgaacgtaaacattatcttcgtgtatgggttgttccgaatcttgtcgagaatacaatgcgcttgtaacttcctttcacaaggtatactttctcatactaattaagctgaccttccgtattaattatggttaacttgtcttgaacgaaacataggttaggctagttaaattattttctttttgtagtcactattaataaagtggggatgtgactttagtaagtggttaagtctacttgactccgccttccccactagaattcgaccactaagtcgcgttaccccgcgtagtaggaattattagtaggaaactttgtaggattctttgcatttgcttatatgatcttttctcttatggtcaaattgtggttatcctctatataattttgaacatactcagccttttctgattttccaacgtactcggttacttgattctttgttcatctcttcatacacttaccctctacaaaatactgataaagaactcgcatctgcaggcaaagatggttatacatcagtagtttcggatcaagttgctaggcggtgtatcaataggtctgcagattgatcttttgtagtctttttagcctccttgcattggctgcaaatgtgaactgtaagaagatggttcatgtttaattaattaatttcttcaatatgattttattcatgtggagacaatacaattcctcaaactgggaacacatgatgataacatgtgaaatagaaaacatgtacaaaactcttttgttgcaagatctaaacataaccattttaagactatcccaaaagctttagtaatccaacaagaagtgaaagctaacaaattcttcgaaagaatattatttccgaatcgaatacaggaccactagagttaaactgagtccactaaacatgtttcaatctagtctgttttagactatcaaaaataatttattttgccaaaagaaaacgctaaacgaagttttagcttccgaaacaaccaaataaagaactaaagccggatccaaagccaagagagattacaggctaagggtttagaacttccttataaattaaaccaaaaacgaaaaaagataagagaaaaaattgtagaagaaaaccaaaaaagaaacaaatcgtaagaaaattgaacttgtaattctgcttcttctctttgacctccaggaattaggaccaaattgggaaaataagtaaaatgcaaaggccaaggatcggccacagaatccaagtgaactttattgatcaacttattttcccccacaacatagatccaagcccgaccagtttcatcacaagaacaaatgacgagccttttatcgtcaataaagtaacttggctgatagtagaatgtggtttgtactaaattcgacatgttaggaattgacacctccatgaaactcatccatttcacatccccaccgtactgattatcaatcttgttcttggtcacccaaatctttatcttctttgtttcatggcactgcttcaacaacgaaaaccgatctttcctaaaaacacttaggacaagagcatcgcgagcatggttcttcccacttggtagatcacaaaacttcaagaattcttcgctagaaaaattgaagctaagtacgtagaacgagaagaggtcagtatcatgagtcttgtcatcattataagcaacccaatacaaagttccattcaccgaaacaacacttgttaagtcaacaataaaacggtttttaattcccagagtaatacttctactatattcttctttattaaactcttggtctttccacgcatcggaggcaaagtcatggattttccatgtatgagaagagcccttcatataaaccgaaagggtcttgtaaacaatttcctcaactctcttattattatcataacctatgccaataaaatccaaactaggttggttaacctcgggcttgatgcatctagtctgtcttaaccaagggttccaaaccacggctccttcacccatgccacaaagcaagaatccactggtatcaaccaagcttataggtatctgaggttttaaaccgggagtatttagggttaactcacgcacctctaccttgggattgacgctaaccgaataaatcttggatctagttgttaaaatgaattgaaacgtcatcttgtggttgttgatgaatgcattgttgtcgaagagactgttccatcgtttgcaaacggttttgaatcggacaagagaagtaggagggacacgagataggatctcttcctccaaatcccatggaagcttctccttattcgccatttaggtattttgttttcaagttactatgtgtttagattgattacttataaagcattcccagttggggtatctactgattgttcatgacatatatctccaaaaatccagattttactctcttttttattcttcataaaatctggattttataaaacacatatttgttagtatatttatgagatccatattctcttcatttctgtttattattttttattattttatttttccatcttttattttacataatggttggttatcattagatactagttaagaatccggtttcatgcacatgtaaatcttatgctatttaattttataaatatttttatttcttatatttctaaataaatctattttaatatataggggatgttttatgttcaaattttaagagtattttaaaaaaatcaaagcattaaatataatggaatttcgaaatatcatatatggtactaataaaaaaaatttaaaaatccaaatttgaatattctagatatattataaatttagaataaaatgaggtgtaaaattgtgggtttaccacatccaaaaaaaaaaaactcttttaatatgactatgaaagcaattataatatttaatgaaatcacttaactatagaaattaatttagtttcaattaaatactagatatttaagttcttctcaaagcactctctttagttacacatacataggggatgataacacatatataggttcgacatatttcttggtgagttttgatgtaaggtccgagaaatttaatcatgtcaaggctccggaaataatggatcaccatttcaccttgataaactatcaaggcaagttaggattc

SEQ ID NO: 5180 - DNA, 554 bp, Arabidopsis lyrata
  Intron number 6 from transcript 312036 (locus 312036) deri ved from phytozome v7.0 (chr-ID scaffold_1; pos 3786596 to 3787149 reverse strand)
ttgctactagaggtcttcactttgttaagtgaccacgaactttcaatttttagactcacatttttcatttttaaatggtggtccatatctttaaaaatatctcaacgtccgatatgggacattctgacatccatcatttcgaaactacaactataagacaaattagctggccaaaaaaagaaagaaaaaaaactacaaaacgaactactatatagtgaaaatatcatttcatgaattacgaacttctaactcaaaattagttgataatgaagtgacacatatatctcttatttgctaagttagaaatatattcatcattctaaataacattatgttaatccattttacctaattgttcgaataagtttttaggcttggaatcaagatctcggtgtatgattcaaaattatagacaattctctggagttatttcttatgttttcataaatataaatccacataattttctcatatatctgatctatgtctttgccaacattaatacactaataatctaattcataattaaagaaaaaaaaaaacatgtgtaggtt

SEQ ID NO: 5181 - DNA, 462 bp, Arabidopsis lyrata
  Intron number 5 from transcript 888526 (locus 888526) deri ved from phytozome v7.0 (chr-ID scaffold_7; pos 2344597 to 2345058)
tatcactctaacgcgcaggtaaacctgcatctgtttccccttggtttaactgtttgtccccagatcgccttttcatatttgattttttaatgaacctaactggctaacctagtcttccatatggcaagagtgtgtactgtgtagagagtctgtgttactataaattgggctgccaggtttcccatattggatgtagttgaagttaaattagttcaaagaaattttacttgcaacttgttgtttgctcatcaaaggaaaggagtgagtagcaaagtccagtttgctagattttttattcttagaattgttatctggtctagagttaataccaaagttattgacccagcaaataagtttcctcaattcatttgaaacttttctgcgtagattctgcactggagatgatactgttttttcttaactttttctcttgcttgacctggcagggctctagcgaccaga

SEQ ID NO: 5182 - DNA, 619 bp, Arabidopsis lyrata
  Intron number 1 from transcript 918987 (locus 918987) deri ved from phytozome v7.0 (chr-ID scaffold_1; pos 940678 to 941296 reverse strand)
aaccaagacattgtgcagaaagtaaggcaaaagaggtaatgttttcttttgatgttttgatcactcttcaagcatgatggaatccgttactctgtctttattgtggatacaaatatataggcgtgtggaaaaattttattcgtttaatcgtttacaagagactgatttttcatagccaagacgcaaccttccattacagtgattgttttgcctctgatcagaaccctctgcttatctttgtccagatgaaccttcaacggttcagcctctgcttgaagcttaaacagcaaacaaacacattccaataatacccaaattcctcatgaacactcatcattttaaattggtctgttaacttgtataactcgtaagtcaaaacccctaaagtattaggttaaaagattgtaaataacgttgtaaagataattgtaaaagtattatgcattatcgacattagtttagtttctactaatcccacatcgataagattttaaagaataagctcgaaacgtttcttatatatgaagactatgttgaaagtgatttatttttccgcaggattctaagagacaatttgcatgtacaattttactgacatactataatatagcaagaagcc

SEQ ID NO: 5183 - DNA, 22227 bp, Arabidopsis lyrata
  Intron number 14 from transcript 484897 (locus 484897) der ived from phytozome v7.0 (chr-ID scaffold_5; pos 11654172 to 11676398 reverse strand)
actcctctgcttgtagtaagttaagcctagagtcattctacattttcccacttaatgtacataacaaagtatcttactactaaccacacttcctcttgttaattgccatatctgttaagagaaataaatttttgtatatccttcagaattcccataatgtcttccatattcaagctgcaaaaatgaatcagtgatagaactgagagtctgagattatatcacaaagattttactattccaggagaggcttttctgaaatgttgcagtgattgtggatgtctatataaagctgtaacaaggtttagattaaacacacatgctatgtatatgacagaacatgttataacataatatgaaggagacgcaatacttgaaacagtacataaagcattcattacatatagaatggacagttgcttatttggtgagtccggatcacgaaaaacaccatctcacgatgacatattatggaacagaaaaataaaccagagaggactgtataactattttttgtggacaacggttctcacaatagtagcaaataggtcgagacatatgatgattgttgggtaaagcctacaatggggagaatttgaatcgattcttgttaacatgagactaaaagagatcccaaaaaatattacaggtggagtttgaagtgtcgaaacaaaaaaacgttcaagaaggtttgagtttttttctttctcttctctgggtgctccctcttccttttctcatccctccgagttttatctgctcctcttcttctctttccttcccttccctttccttctctttccttccctcgggcccgatccggggctgatggcacggatgaaagaagggttttggatcccccagctcaacttcaaatagcatcttctcgctatgctccaagacacgcaagttgtagttccagcttatgcctttaggtacctgcgaaaattcaaacttagcttatcagcccacaatatgtcagtcacacaaaaacatcaaatcacaacacacgatatcactcaccatgaagtgacctacagcctttgaagtgacaagggaagaaacaacgtcacagaaatgagctggaaggctctctgggtcaatgctggcgaagtctctgtctcggttttctctgccccattgaagagcttcatgagtaagctgcacaacacttggggtgctaaaataaccttgaaacaatatggttcatctttccgctgcagaatatctaggtatattcaaaccctatgatctagatttaattctttatttacacggttcctaggaattgaattcgttattagtatttataaatcgttataaaccggtatgaattcctacacagccacctgtgtaaaacccattaaagattagaagaaagtttataatttatgatgcaagtttcagagggattatttattttcaaaaccttttctccaattactgttctcttgttctaattggagaaagaagcttaatcctagattagtaagaaaaaaaagtttccatgggtaacagacctcaagcccaacattattagggtgtaagcgttaatgacatgggtgaaagaagggttttggatctcccagctcaacctcaaatagcatattctcgctatgctcgaaggcacgtaagttgtagttctagcttatatccttaggaacctgcgaaaattcaaacttattagcacatagtatgtcagtgacacagaaacatcaaaatatcactcaccatgaagtgacctgcagcctttgaagtgacaagagaaggaacaacgtcacataaatgaactggaaagctcttcaggtcaatggtggtatatgctttgcctctgtttgctatgccccactcagaagcttcatgagtaagctggtacatcttcagactcctttctaaagctagagataaagtggcaatcacggcattctcatccaaatgttgtgagcagtgaaagagaatgtccaaaggcgtcagagtgtttatctcttcactttgtgtacgtatgaaaccaattggttttaagccatctggaatctgatcttgagggataggtgaagcaacgtgaaagtgttgaagatattcccattgtggcaccatcactatacaatagatctttctctcttcatagccatagaggaagccaacaatctgactgttgggatcagacacaccaaagaacttttcaactagactgactggaatgatgtagctttctcattccgcagatacaacctgtgtataacccattaaagatgagaagaaaatacctaatatttaacacatgatccaacatacttgagagggaatcattgtcaataagctactttttgttatgaaaatgaatgggtattaataacatgcatattgatccaattagagcagacctcaagcttaagcccaacatcttctgatagttctttgacctcattggttttcctttgtggaactccgaaactaactcgcgaaagtattgaagaatcaaataagatgacctgtaaaaaatgtgaaaaaatcatgcaatgaagtgattgatcgaaaccgtaaatagcgatgaacaagaatcggcaaaattgatctgaattttttcaaaacgcatgtctctaaaattgtgtaagatcaagaaaacaacgaaattgagtgaaccctatatcgcgacgaggaattaaaaaaagaaggcaaaactgactatgaattttttgaaatgcaaactcgtgaaagttgtgtaaatatcaaaaaacgccgaaagtgatcaatcgcgaacattgtgaagcataataaaccaaaacaaatatatcagtttaggcggcgactagacaccgtatattcatgaaccttcgaatgctccaatattagataaatcggtttagacgttcaaaatttgtactaatcggtaaaatcggccaaatttgtcggtttaatgcatgctattttttttgtttcttttcctaatatgactttttttttttttttccgacaaaatcagatttcattaattataaaagtattacaaagacattatacagaattactgtaacacaattattacatacgcggctgtatgtgccatacactaagaaaaatacagcagaagggagattgacgatgctttccgaagagtagtcttactcgctaaccgatcagacgatctgttattgtccaacttcatatttgatttttctttgttacgatttgcatgcaacatcttgtggctgaactttctttttgcgaaccgtaactgtaaacccgatgtgtccaaacataactctgaaatgtagacataatggtaccaaggcttccgtaccaaagtctttctggaatatctagcctctgcaactttcttcaacataatcacaaataactttaccgtagtagcaattgcaaccttaacatcctttgagaacagcttcttgccagattttagcgaatctctatagcttaccgggaatgaccatagatctcgacgtaatatccggttgattaaagaaacaagttgtgatgtgattgattctacaacacgctcagcatcatcatcaccaacagtccacccgtgtgggatttgagaagtcatagtccatagattttgtttttgtggattcaaagataccataacaaggaggaaatgatttgtcgtcgccatatgttctatatggtccatagataaagtaatgggaaaagcatcaattacaatgtgaattccttgattattgcgtccaacttgatctctgaaactttgaaatccttgatgcgcaaattgcaatccattcagccataacggtttccttagtcgattttcaatcctccgagattctatccacatacgaatgattttgagattcttatttcttatttcttcccaccattgtttcttagaaaccatccacgacgatacgtgccagagatcacaagatgattggccgaatgagaacaatccattaccgtattcgacgtaaacgtattcagtcccaaatataaccaagttgaatccgatggattccgggatcaaaaacccaagtgaaacctccatttttgtttgagaaccatacccgatacgatttctgagaatctcaagccctccaagcaaagtgtgtacgccatggattccgggatcaaaaacccaagtgaaacctccataccatcgagtaggaggacattcaccggttaagaaccggaaattccaccggcaaacaccggaaacaaaccttctaaacggaaggacataatgattctttcgaatcggaattggattgacccaaatttgagaaaatctccaatttttacggaaaagaacagatgctactcttgccacactcggatacaaaaatctgaatacaatttgagtgtgttgtaacgctacgcaaattagagatggatccgttatcgagaccgtgtaatgaattgaagtcctcggactcgtaccaatcatcaccatcgttaaaaggagggaaaaaaagaggatttgtgattctgaatttgtcatgaaatcacctaaatcaatattgaaagggaagataagaacaaaaaggaaaaggaagagccgaccgacgccggagaagccagcgccggccggaatcaaatgctgaaaaggaagtttttttgtcggagaggtgcctttggggaaatcgccttggcgagagaaaaaacagtttttaagacggtttcttaagtcacccctaatatgactttttttaaatgaacaaaaaaattaagaaaaaatgcctgatttttaaaattgtaaattatgatttagtcaatcccaattttttttatacttactagcactaacctattttaattcccatataaactattaacgataatatgagatttcatgatatatatatatatatatatatatatatatatatatatatatgatgccagaggtaattattgtcataaactatgtgacttacatcaactattttttttttttttttaacgtctacaacttacatcaactatttatgaattcataatacctttatgaactcacaaaagacgtagttattttggctgaaaaaaatatgtaactaacatcaattatttatgaactcgtaatacgtttacaacattaattttttgatcatggtacataaattagaaatcaattgtgatcggaggagtagtttagtaattttaaagatattaaatccgcatgtgctaatttttccgggttttagaaatatatttcaaattttaaatttttttttttgtcatccgaaattaattaaagctcaaaagagccattcctgaggaatgttgtttacataggtgatatgaagcggttctgtacgaacttttcgtgccagattatccgctttaacattagccctacgagaaattaaagataaagaaaaagataaaaacttttccttgtagctctgaaatttctccaaatacactgaaaacgccggccattcggttggagaagacaccatcttcaccaggtctgaacagtctgtaaagaacgctacctcttgatgatctgcaccaatcatacacttcattgcccagagaagggcttcgacttcggcatgtagtggagataaacttctacggaggttcgcagctcccatggttgacggctctccatttgacgatgtacagaaccaccctgtaccagaaaacttatcactttctttccatgatccatccacaaaacaacggtatcctgaataattcgactcaagtaaagcatctctcactcgagttcgagtcaccaagtccatagaaccatgattttcattaaggagctcaatttgagctgattgccacaattgtgcctctttttccgctaatcgtaatacctctattgggtctttatctatattttcaaatatcttttcattccttgctttccaaatataccaaataatccatgggaaggctaatgaatcaaattctgaaggtattctccaaaacaaatgatccaaattcgcaaaattagattctgtaggaaaaatccctacacccgtaggaatctgtgaaagcgcccaaatctgccgtgcagggtggcactgaaaaagtgtatgattgattgtttcctctactgcgccacatctggcacatcccgtgtcacaatcaattcctctttttcgcaaattttccgtaactggtacacaacccgttaagatttgccacaagaaatggcgtatcttaggtggacactgtactttccaagaatgtgcttttagtaggttgatgtcagggccaaaaacaggtaaattggtctccgacttttctatccgtatggtatgatatcccgatttgactgtatattttccggattttgtaaaatgccaacccaaagaatcttcctttgttggcacacccacatgtatggcgcttattagcgcgacatcttctggatcaaagatcgcttttaagagatcaatattccaaaaattcgaccgactatctataagatcgttaacttttaaagatgggtcagcaactgaaccattactttttgctggtctcgggaattgagctggaatctagggatcctcccaaaccgagatggatgtcccagatccgactcttttaataagtcctttattaaccagagatctagctgaacatatactctgccatccatatgatggagaatatgatttatattttccaaaggattggatttcctaaaataccgtcctttaaacacctttgcgaaaagagagtccggaaccgtgatcaaccgccataattgttttgctagtaaagctgaattaaaatcgtcaacgttccgaaatcctaatcccccttccgatttgctattgcacaatttattccaagccatccagtgcatacctctagaatcaccatttgagctccaccaaaaattagcaaccgcactagtaagtttagaagtgattgtttttggcaatctgaagcatgacataacataggttggtaatgctgcagctaccgattttatcatcacttctttttccccttttcataaaaattttgccgaccatccgttaatccttgtttgtagtctatctctgacaaaagagaagatttttgtcttcgagccccccaaactctccggcaatccaagataagaacccattccaccgatattagtgatacctaaggtagatttgatttcttccttaatttcatcatctaccttatgtccaaactgaaccgaggattttaaaaaattaatctgttgtcccgagaccgcttcatacttctttaaaatccctaaaattaccccacactggtctttattagccttgcaaaaaaacaagctatcatccgcaaataacagatgtgaaaccgaatgacttgcattagctactttgatacctgtaattaatttttcccgttcagctttccgaatgttcgcaattagcacttttgtgcataggatgaataaataaggagaaagcgggtctccttgtcgtaaacccctatctggtattattagtcctttaggttttccattaaggagaactctatattggaccgttgtaatacaccacattatccatttaatccatttttcacagaaacccaattttcttaaaaccttctctatgaaaatccattccaccctatcataagctttactcatatccgttttaatggccatgaattttcctttacatgatgggttagttctcaacccatggaacatctcttgtgcaatgagaatattatctgaaatcaatcgtccttctacaaaagccgattgtgtttccgaaatcagttttggtagcaccgtcttaagtctttggcaaagaatattcgatataattttatacccaacattgcaaagactgataggccgtaattccgtcatccatgtcggtctttccgtttttggaatcagacaaatattagtcgtatttaaccgtttatcaaaaatttcatcctctaaaaaggaattgaccagcaataaaaggtctgttttaatagtaacccaagccttttggaaaaataaagctgtcattccatcaggtcctggtgctttttccggatgcatcataaacagagctgttttcacctcacattccgttgcgggtgccgttagaaaattgttaatctgatccgtaatcagagtttgaacttctgccaaggattcttcaaaagcctcaggcttaattgtagtaaagaattccttaaaataagttaccgctatattttgaatatctttatcctctgcagaccaaattccgttttcatcatgtaaccccgttattcggttccttgcccgtctttcttttgttaaagcatgaaaatactttgaattattatcccctagtttcatccaaaagcttctgctttttttaggccaatacagttcctcatctcgataagcctctttcaaccgcaaagttaattctgtaatctcctcccgtggtctcctatcatctctttgtgccataagtaattccgattttagttcctcaattatttgccgcccaaaaggagttaaatctttcctccactgcgaaatagcccgcctacaattagtcaatttttccacaaattttccttctcctaactcagagtcagaattccaaccatttgaaattgcctcgagtaatccttccttcccaatccatcttttatcaaacctgaaatttcttttcccacgtgggaccttatccatgagggtagctaccaccggtgaatggtcggaagctaccattggtaaatattcaacgaaagaattgcaaaataattcatgccaatcttcgtttgctaaagctctatccaaccgacaccgtattggtttcttatcccgccaaccccgccatgataaccaatctccgatatatgggaactccaaaagaccacaattttgaatcattaaattaaaagggataaaagaagatgcatgtcttaaattaccacctcttttctcgtgatttccggttaactcattaaaatctcctattaagaaccagggtgtgtctctaatcaaaccaatccgtgttaaccgttcccaaacttgatctctgtttttcggaaccggatcaccataaacaaaagtaagatgtattgtttttccttttatcaccgcttcaacatcaattaaccgattactttcataaataattgaagcattaaaatcattattataataaagggctaaaccgccactacaaccaataggatcaaccgtttttaaatttttgtaaccaaaatgaccgataaatttttccatgaaccaagaaggttgttttgtttccgaaagaaataaaaagtctggccggtgttgtttccatatatccctaaaataaccgatagttgccttattcccaagtcattgacaattccaactcaaaaccttcatttatcaaccttgtgtattggtgggttgcgtccacccatgaagtcctttaccgtaccatagtacgtcgagttatggccttcattcctttgattcttctttaaagaaatccaatcataatttaatctagatattttaacccttatagtatccacaaccaaccataaaaaaccggaaataaaaccgtagtaaaaccgtttgttacaaccactgaacctcaactccatacactcaaaatccaaccacaatcgaccaacatcatactttttaggaaaattctgaccacccacaatagcccttggaagagaaatcaacaccctcccactattatcctttgacaaccatttgttaaaaattcctcgatctgaccgtctcttttcaattgttttcaaccgaaagtatctttgatccgcagcccaaaaccaaattgtgactaaaagaaactcaaattccgacaacaacacatcgcaatctaaaaattgtatcccattgaaactcaaatccaaaaactcaaactcccaatacaatcggaaaactaactgaatcaaacagcgaccaccaccgggaaccatcatgtctgaactctccatcttggtctctttctttgccaaaatcaatccatcaacttctaaatacccagaagctagattaaacccattaatcaaccactcaccaccaccagattgagcacaaagccgccggacttaccatacaagaccaccaattctgaattataaccaccatacaagccaagaaggaaccttcacaaagagacatctcagatccaaaccttcttaaccaaaaccatttcaaaccttcccttgaacatctaaatcagatcgggttctactcaaaaccgcttttaattgcgatttcgtttctctctccgatccttgagtcaaccgtgataatccaaaccagaaccccaattcaaccgaatccaacctaatcatggttggctcaagaccgagactctgaatcccatcaaaaacttgaaaacaggatgagttcttcgttatcacctcaactgcagattccttaccactcctggaagagtgtactttcagaatttggaaagcaaaaaccagcttaaaacctgaaattctcaaaaaccttgacataaccttccctgagattctcaaaaccctcgacggaatcttccctgaggcttcctttcctacctctggcatcgaaaaaaccttatcaaccattgcaaacagacccatggccaacaatacatcaatcgaaaaccccaaaataggcccgtattccttcatatctctccccgggaccagaccccacggctttgccttgaaaccaaaccggaaaacacagcaaacttctgattcttcctgaatcgagatcctcatagactggagaacaatcattgatcctaaacaaaggtcaccgaatctcatcgacagcgactccgtagcctttagaatccatcgatccccatgaatccaccctctgggattcccatccaacccgataaacgacctaaataaaagtctccgatcatcaaccctcctcgagaaccactccgtaaccttgaaaaacctttgatacccatagatccacacactgaagctccaatccgacgcaagaatcaaccgaatcaagagtctccggtcaaaaatcctcatggtcgggttctataaccctatcgccgcctccatcgccgccggttacggtttctaattttcaaattttaaattaaaacgttaaattaagaatagtcgttggattgtttaatcttttatctcaaccgttcacaatctcagactctcagttaggggcctcgaggccttttttagtcaaacaatatatcgattatttgggcttagctagcaccagcccaattcattatctccttttaagtggtcttctccgtttctattgggtcaatttcgaaaatgatataaatcatggatggactccataaccggcccaaggcccattatattttatctccttctatgtgtttccgtgtaaactcatatatatactctcttatgtgttaataagattacacagtttatcacacgttatcagcacgacgctctaaagaaataaaaccaccttcaaaaagccctaaccctaaaaattgctaaaaccctaaaaaccgcacatcatcagatccgatcgcggtactgttcatcatcggtactgttcttcatcggcactgttcatcgtcgacactgttcatcgcggtactgtttgcggttcgttgcagcagcgtgtaaaattcgacctgctcttgttcatgatctcttggtggtccattcaacccatcaaaaggttaaagatatacctaactctaaaacccagaatcgaatctgattaatgttcaaactaaaaccctaaaatctgaaaccctaatttacgtgtgcatggattgttttgttgattaattgaatgatcctttgaggttttaaatctgtgtgagttaggttgatagagattttataatctgattgattgatttagaggtttaaaaccctgatctgtttcgaaattgaaaccctaaaacccttaatccgtgtattgcaagttaattgaactgttttgtatgttcttgaggtttgatatgctaggtttatagaatctgctttgtctcatgaatctaaaccctcaatcataaaatagaatctgttttgattaaatcctatgcgcatatcttaaaccctaaaatcttaaatcgcgattctcaatatataaaaccctaaaatatgttgcttgtttttgattgaattgaatccctaatgatagaaatctaaatcgcgatcttattccctaaaagtctaaaccggtttgcttgattgttatctcatgccataaaacctccataaatataaaccctaatcgcgaaaaccaaaccgccatttccgtttttcattctaaaccgaaaccttaatcgaaaccttaaccagaacataaccggtttgattaaccggtttaatcctaatcgcgatttaaaaatgcgaaaccctaactgcaagttacggtttgattatagacctaaaaccggacttatgttcggtataatccaaaagaaaaccgaaaccttaaatcctcgattaaatctggttctcgtaaaccctaagtctcggttcccgattaaatttcctaaaatggcaaaattttcccgtaatagaaagcttcccaaaataagcataaatagaaagtttccagaaatagaaactttcgtaaaatagcaagttttccaaaatagaaagttaccaaaataggaaaccccttcataaggaaatattccaaaaccctaaagtacacgtttgtttaggatttctttctagatgagaaatagaaagtttccataaattgaaagttccatataaggaaagtttccataaatagaaagttccatacataaaaccgaaaccctagcaaaaaccctagtactataaatcgcggacgctaaaaccctaaaacttaaccgcgaaatcctaatatcctaatctagtatgatccgattgtttggttgtttttttgttgcatactagatcaatcttctagggttgatttcatccatatatatataacatgattgtttagaaaacatttgctcaagacaagcatggctcggtcttaaataccgcatgacttggtctaaccgattacatgagttctcatttaactctatatattgtagatgtcagaaatcaactattatgaatacacgacactcaatgcctctggtgacaattatttacaatggactttggacactgagattgtcctaaaggaaaaagggcttggtgaatctattgtggaaggaaacaatgtcaccagaagagaaagatataaggcgattactaacatacgccatcacctcaatgacagtctcaaaatcagtacctcactattaagaatcctctggacctcaggacaaagttgaaaaaaaaattaatataaccaccaaagaacggtgctattacccaaaagcccgattcgatcgaaagaatctcagattccaggaattcaaatccatgaatgagtataactcagcactatttaaaatagtgtcaatactgagattccgtggtgaggaagttactgagaatgacttgctagagaaagcattctcgacctttcacacaaacaatatattgcctcagcaacaatatcgtgaaaaaggtttttaccatatatgcaagtctaaactcttgttttgctacttgctgagcaaaacaatgagttataaatagtgaaatgagacctcctggtcctaccccattatcagaagcccattgggctgaagagcctaaagagcctaatgagactaaagagtctaaccacgtccaaagagataagtatcatggccacagtcatggtaaatggaatgaacgtggtagaagtggcaattataatttatatgatcaaggaaaccattcatatggttaaggccgccgacccgactttggtcgtaatcaaggtagaggccgcggtatacccaaaccacaacactcaaataaacttgttagccactaatgatgaatggggaaaccattggactaagacgtgcaggacacctaagcatctcgttgatctctatcaagagagtttgaaaagaatctagaagctcatttagttcatcacgatggtgaagaagatttcgaccctaagatagatgattatgagacttcggattgcctagaagaggcttaattgttttcggcatctaagtgttcttgatttgttttcttgacttgttttgttttgtcttgatgttttctatgttctatgactttgaattgattgatttataagttatgagaattcaataaacgaaatatctaaagacatggttcattagccaaattgcgggtatagctaaatttagtgaaggctaagggcaggcccatggcaggcccatattcccaagggcacgcatcctcagatgcttcatattcacccagctcaaaggggcttgttgagtttcaaagaaatgtgtttgaatggtttccacattgaaactaagggtgaagggaacaaaggattcccatatattactaagagcacccaagaccatgagaaggtcttagagactatacctgcgtcatagacctttactatgccaaggtcaatatgataaaggctaatacagtaaacaaaagggtttactgagaaattcactaatggcatgaccggcttagccagcctggttctaacatgatgcgtaaagctgatattaaaatcaaaagggcacaccccttaaggacctcacgtgtgtagcatgtacacaagggaaactcatactaaggccatcaccagtcaaagcaactagaaacttggtgtttgctagattgttggcccagaccataagtctgtgagcccacatacttaagactatatgtctagataatgctggtaaattatgtcccaagcgttttatggctacagtatgtccatgagggggagagtagtataccccgtggcacatgtccatacttgaactcacaatagctgcttggggacacgcaatattacatgcaacaagagcttatatgcatcaggccattctagtgagcatagatattcaccatcccaactactcacaggtcaggagccagatatatcccatctaaagacatttgggtgtgtcacctatttacccatagcaccaccacagagagcaaatgatgggacctcaaaaggggatgggaatatacgttaaaaatgattctcccaccatcattaactatctcgagccaaaggccagatacaaggattgtcatctcaatgaatccgttttcccaacactgggtggatagactaacaagctggtcaaagaacttacatggaatcaaacatccttcacatggcaagatccttggactccatcagagatccaaaagactatatatctgcaaaagctagctaaaacagttgccaagattcctataatgacccaaagagagtaacaaaatcgtacataccagcttgtaatgcaccagtacgtattgatgttcacaaggaacataatcaagttgctacagaggctacaacacgtaagaaacgtggtagacccaaaaggttccaaagacaagaaccctcgaaaatcaaagaaaggtgcaaggaaaaccgaaaaggttcaagaaaccatagacatggccgactaatagacataaccctaaagtaccaatcaatgaggtttgggacgccaaacctcaaggtcctgaaagtgtaaagagatctctataaactataacatgtctagaatacaatggaaccgaaaagatgtcgacatcaatgataaaatatttgcgtacaaggtagcaactgaaataaatgaggatcaggagcccacgtctatactagagtgcactcaaagacctgattgattaaaatggtacaagaccataaaacgtggagctaagaatcattaagaagaggaatgtgtttggtccaatacgaaggacaccattcaatgtaaagccagtgggacaaatgagtctttgtgattgtgtgaaataaacatagtgaaagcgtgatatatcagacacggcttatcgcacaagaattcacacaaagacctaaaatagaggagatatactcccctgtggtggatgctaagacatttaaatttttgctaagtctggctatataaaagagaaagacttgatgtgcggctaatggatgtaatgcctgcatatttatataagtccactggataatatatgagattaccagagggtattgagcacaaagataagaaagattctcgagaacagcactgcataaggctggacaaatcctttcatggacttagactaagtgggcgtatggaaggttataaatgatcccatcagtccatgtattttcataaagaggtttgcaaataaaggatttgtaatcatagcagtgtatatgaatgatttaaacctctgggtaatcgaccaaacagttgagtatatctaaagaaagaatctgaaatgaaagacctaggcaataattaagttctgtttgggattacaacctgagtacgtgaataatggaatccttgtgcatcaaatggcatacactgaaagagtactcaaggagatttaataaggaccaggcccacccattgaccaggcccaatggtggtgagaagcctcagattggatagtgatccattcagtccggaaatgccatacctcagtgccataggagttctaatgaatttggctagacacactagaccaaacatttgttttgccgtgagtctcctgtctaaatttagttcatgatcaacccaaaggcactggaaaggtttaaaggaaggtttggttaagttttaaagtctattattcctgcgttgtttacttgggttttattctatactgatctaagcaaagaaggtccagtttgctttggtttagtttgatttgctgatgcaggttattcataagatcagattatggcatggtcaatgaataggaactatgtgtggcttgatcccttccaagggtacgtaggcagccttctttaaggcgcatctactactacatcaaagaccatcatatttgaagacaacgcagcctgtattgctcaactcaaggacggctacactaagagagaccggacgaagcacattttgccaaagctcttcttcacacacgagttacagaaagccggtgaagtacaagttcaacaagtccggtccagcaacaactcagccgatctattcaccaagtctttgccaacatcaacacttaagaaactcatatatcagattgggatgcgaagacttaaggagcttcagtgatgtacaaatcagggggagtaatgtgtgttgtactattttttcttcaccatggttttgtcccactgggttttcctggtaaggttttaatgaggcagcattcccaagcatattacgaagatctctgaacatctacacggttatgtcatccaagggggagtgttataaatcatatggatggactccataaccgacccaaggcccattagattttatctccttctatgtgtttccgtgtaaactcatatatatactctcttatgtgttaataagattacacagtttataacagaaaaagatttttaccaaatgtactacattttttaaattctttaacatctctaccacaatagagaatggtttaccacttgtacctagagatgttaatatgggttaacccaccccatttagacccaccccatttaaaactaaccccatttaaaacccacccatttaagcctatttaagtttacaccccatttaacctccccatttaaacccatttaaattttctttacccatttaaacccatttagggggtgttattggatgggggtttttaatggattttgaaatctgctgttattggattagtatttgcaaaattacgttaaaaatctgctgttattagattagtatttgtttgatgtattctaaaatgaatcaaaaacaactgttattgaatattcatttgatttgtttcattttggatttaaatgtacttttactcataaaacatgaacaaaaacaatcctagcattttatcaagtatttcatctctctccctctctccctctctctctccgaaaattggtatccacgaataaaaaattataacctattacctagtgttttcttttgcaattctctcagttattttgcaatacacatacttttaagttattttttacaaaacatcaacaaccttgggttcttcatcttccacggcggcgctctccagactccagcccacccaaccttgggttcttcaacctagttattatatatatatatatatatattttttacagccgttcctgaaatatttattattttgttattggaataaagttttaaaatgtataattttgtaattcttgacataaattatatgcattggaattcaaaatccattaccaatgacttcaaaattccattaccaatgactttcaagttcaatggacaccccacgtttaagcattggacttcaaaatccaattcactttatatgtcaattcaactcatctaacattgttttgttctaaacaatataatataatcaataattattttaattgattatttaaaatttacagattattttattaaataattgataaataatgatataactgtttttattattttgttgaagaataatatagtttcaaaaaatgcaattttacgattatggcgggaaaattcgggtttacggttttgcgggaaaacatcattttatagtatgatatttttgttgataaaacgcaattttacgattatggcgggaaaatgcgggttaacggtgttggcgggaaaacgtcattttctgccaaaatcgcaaaatcgcgttttcccgccaaaaccgtaaacatgcgtttttccgccaaaaccgtaaactcgcgtttcccgccaaaaccgtaaatccgcattttcccaccaaaaccgtaaatccgcgttttttcgccaaaaccgtaaactcatattttcccgccaaaaccgtaaatccgcgttttcccgctaaaaccgtaaactcacattttcccgccaaaaccgtaaatcctcgttttcccgccaaaaccgtagatctgcgttttcccgcaaaaatcgcataaccatgttatagaagacgtggttttacgttttgttttaaatatttaaatcaaaaattgaatttaagtagaatattagtttaaaaaatatttaatatttttgcggtgtacggtacaagttgtacggtacaagttgtaccacattcatgttgtattgtggtatgaaaaagacggttttgccctcggctgatgtggcagataaagtgtaacatttagggacaagtatctggggacaaaaaacctattcggggacaataatcaaacgaaatataaacatcaaacaaaataaaaataccgcaattagagtttacatactaaaatccaagaacaatgaattaaaattgagggacaaaaactagcaaacatgcaaaaataagatgaaattatggagaaactcaaacttcggggacaaatatatgtaaacttctttttgtgtgctcaaactatgaattttgtccctgaaatttgaacaaacaaaaagaagggcaaaatggtcattacatacctcaattgtggtatgagtgataaatgggcttcgaaagtggtactagacctaaattttgggccaaatgtggtacccaatctaattttccctttcgaaaattaggataccaattaattactttttcgaaatttaattgtttctattaccaattaatttttattaagaactaaatttaatttttaaaaatgaatatatataaccaggtttcatacaagaacaaaacacgaattcatacatgttcagatgttcatacgaattcatataggtaggtactcaatcttaaaaaatcttatgctgtatttagtaacgtacgttagagaaaagtttagtaactacaacctaatagtatcatagtagtatcatctaggtttaaccatggacatgtcttgcctgagtatcccatggctactccctcttcatcctctctctctccgccttcctcgtcgagatctgcgtcgagacttctccgtttcttctctctcgtttcagctccggcgactgctactacaactttcagcatatccctcacaagagtttttagccgtcagtcatgaaatggttttgtctctatggaactatggattcaattgaaactttcctcttttgattccacatatttctgtttcaccttccaactaatgccacttttataggggaagcacttcttctgaccagtggtcttgttctctattttggcgactttttggcatgcacaattcacaattgcaaaggttagaattctttattttttccaatctttgaacacgtcatgcgtttttgtgccttcattggttactgcatgcattcaagaatgactcagtgatttcgtctctgtaactttggtatgacaaattttacagattttcgagaaattgatacctgtggatcttgtctcaataagctatggaataaggaggactgaaaccggcataatcgtccaggtatgattataataaaagagatattaaatgcatagtaacttgaccgtattgctgcataacaacttacctgtctcctccttcttagggtctacttttggggcttctacttttcccaatggtgtttagattcgttgtgcatatatatgaaagctctttgagaaagagagatgctcgacaaagaaactgcagtgatactgcaaaatctgtcttattctttgtttcacttctattatttatgatcgtggctgttccttcttggatgcagtttgtacacgaattcgaccagcattccttcatatggtacgtaatctctactatcaattatctatcctgtgtcctctcagcgtcggtagcgatcctttgtacactaacttccacatgctaagattgtatccaactttaatactctttctattgcagggtgctcacatttgtcttttctgaacctctgaagagactttcattatgtatctactgggttctgttgatcgttgtgtctgtctcacgattttataacatctcgaggaatagaaaggttgagagaatcttgcttcggaagtacaaccatctgatggctgttctactcttgtcttacagatcaataatttataattttactatttggaaatccgtatgtgttagccttctccagtcctctagtcgattcttattattttcatgtccttccattcagcctaaatttctcgatctagcatttggtgctgcattggcggtatttgttgcattggagatcattcgagtaagctcccttcttttgaaagaactcaccttctaggtttcattgcgttcaatgggcttaatgcaagatactcacagatctggagaattcagccgctaggagagcctttacatcaattcatgaatgctttcatggaccatcgtgactcagagcatctgattgtcaggtatgccaaaactgtttagaccatggatgggaaaactcagtgtagaattatcacattttttgtttggtttgtataattactccctccgttttcgaatagttgtcgttttagagattttttttgttttaaattagttttcgttttaaggtaataatgtaatttatgccaataactacccaaattacccttattttattgaacacaaattatttgtaaataattacttgtcatttttatgaggttaatatagtcattgtataccttttcttaatttgtctaaatacagttaaaacgacaactttaaaaaaacagagggagtattgattattatgtcttgttttatagccacttctcactcttgcttgggtgtgcgcttccaatttggatgtcatctgggttcaatgaccgagctttatccccatttgccggaattctcagcctcgggattggagatacaatggtaaacttttagcttctacttacattgtccggagatactaacttagaaaaccgcagtctctcccaatgttatgttataacgattttctcttcaggcatcgatggttgggcacaagtatggggtattgagatggagcaagacaggaagtaagtcttttcttttccttttaaataatctcaactattgcttttatcggaaactaatattgtcaagtgcgtaaaataatgtttgcggaacggagaaacggttgaaggaacagcagcgggaataacatcggtgatggcagtgtgctttgtactggtcccagtattagcatcaatgggttatatactaagtcaagggtggtggtcgcttctggttgctgtgacagccaccgggatgttggaagcttacaccgcacagttagacaatgcctttatacctcttgtctactactcactcctctgtttgtagtaagttaagcctagagtcattcttcgtttttccactta

SEQ ID NO: 5184 - DNA, 38066 bp, Arabidopsis lyrata
  Intron number 3 from transcript 477758 (locus 477758) deri ved from phytozome v7.0 (chr-ID scaffold_3; pos 1703588 to 1741653)
agtgttaacggtaattagccaaacaaaaattaaatctttactgtctcttctgcgtcaggttgattcctttggatgtttcggattctgggtgaatttgattcttgagaaaatcggattttttatggaaattctgagaaattggcatgtactaggattaaaaggcttagctttatgtcaagaacaaccccacttttgaagaggatcaagtttcaattctcatggcatatagatgagctcaatctattaattttgatgagaaacaatttctttcttggcatatagataaattctgaactctgaaggtttagataaaaagatgaaactcttttgtttatataatcagtttagcttattcatgggaagtagagtggttgacgaatcaagtttagatttgaggtttcatgttatgaaaagttttctcttccaatcatgttctggagcatcctgattctcgatcatctcttactgtttaaatggtctggttatccaaaggggttatttcctccacagcctgtaccgtacaagggacctaagctgaaagaagccattataggagatgtagagcttttggatcagggtcactaggtgtttcctccgctgcctttagctgtttacctttgatttggttgcataaatgtgtaattttcgtgattgtttcaggtagatatatatgattctaggacattcattggtggcaaagtgggttcttttgtagatagacgtgggaaccatattgaaatgggattacatgttttctttggatgctacaacaatctcttccgttcgatgaaaaaggtttttgtttctcaaagcttccacgcgaatttgcttgatgattgaatctcatactcgtgtctgaatttgtttttggtgatgtaggtgggtgccgagaaaaaccttcttgtcaaagaccatactcattcatttataaacaaagacggcacaattggaggtatggctcagttcattattctcttgctatgatagcctctgtgattttatcatactgagatgtacatataatttgtagagcttgattttcggtttcctgttacgtgcatttttggtcacaaatcaactcaaggtctaagttaaagttttaaattgatttctctggagatatctaaatctttggattcatgtcaatgcacttttctgctgtgggaaatcggcaacaattttctcgaatttcacagcaatatctagcttactaatggcttattcttgttttgactgaacagccctatgataaactaaggaattcactggctcttgcattaagcccggttgttaaagctctcgtcgaccttgatggagcaatgagagacattcgcaatcttgacagcgtaaaggatgatagataacctttgcttcttctcatttgtactcctatttatgttctcttaagtttctgagatacttctgcagataagtttctcggattggttcctgtcgaaaggtgggacacaggcaagtacccagagaatttgggatcctgttgcttatgctctcggtttcatagactgcgataacatgattgcacgatgcatgcttaccctattctcattattcgccaccaaagcagaagcttctttgttgcgtatgctcaagggctctcctgtgtttacttgagtggtcctatcaaacaatatatcacagatagaggtggcaggtgtgtctctgttattatctacaataactgatccccgcatttattatctcatcggcttatggggtaatgataatgtcttccaacagaatccatctaaagtggggttgcagggagatactttatgataaatcagcagatggagaaacttatgtcactggactagcaatttataaggtgaaatttagcttcagacatagaattttagcggactgcgaaaatgtcttaatacgttctgaagtttgcagcttctgggtagagaaaaagctcaaaacttagatatgaaagttaatggcttttttttttttttggtttgctttcaggctaagaacaagaagattgtgaaagctgatgtgtatgttgcagcatgtgatatgcggggaatcaaaaggttacttccaaaagaatggagggaatctcggtttttcaacgatatatatgagctcgagggagtacctgctgttacagtacagctcagatacaatggttgggtcacagagttacaagacattgaactttccaggttggtaatctagaatcctatgttgtgggatgatcatgatggatcgattctgtgtgggtttttttaagtctttgttttgtgtttcggaaaattgtaggcagttgaaacgagcggttggtttagataaccttctttacactcctgatgctgatttctcgtgctttgcggatcttgcactcgcttcgcctgctgattattacatcgaaggacaaggcactttacttcagtaagaaagaacttattctttctttgtccacaaaatagcatgcacgtctctcagtgtcttgaaactgaattctgttttcataggtgcgttctaacaccgggagatccgtacatgcgaatgccgaacgataagatcatagagaaagtagcgatgcaggtaaagaacatggttaaattcaactcttgagaaaacttttgtcaagctggttttttgttgattctcaaatcttattcaggtcactgagttgtttccatcgtcacggagcctagaagtcacttggtcatcggttgtaaaaatcgctcagtctctgtaccgtgaagcacccggaaaagatccattcagacccgatcagaagacgcccataaagaatttcttcgtcgctggttcatacacaaagcaggtaaccccaatagtgacaaatgcaagcaagaactgcctccaaattgtgtctgagaaatccgaaagataagtgagaattttgtttctggacttgttacacttacaggattacatagatagtatggaaggagcgacattatcagggagacaagcttcgtcatacatatgtgataccggtgaagaactagtagagctaaacaagaagctttcttcttctgcaactgtagttcctgatgagctaagtctggtctaatgatgggaaaatgttggaaagtagttcccaatggcgctaattgatgaaggtttgagacactatgggtacatgaagaagaagcatatgtagaagaaaccctttatatagtgttcataagaagaagcatttgtattattacgacaaacagagccgatcgtaaatctgaaagtgactccacaaagcaacaggtccggagaaggcgtaacagaagaaacgccatgaagctgacctgagtgaagacaagagtgaagccttgagcggacctgagctcaaaggaaaacgttcaacgtatatacctctaaggctctaactaaagccatttgaatctgaaagtattgattttgaaacttatatgagttattttgattgctggtaattgatgatatgataatgttgttctgtgttgtggatggatatacagatcaaattaaggagttgaaacttctctcagatctttgaaatatgtggtctaaaagcgtgggacagagattttcacatgggttggtccatctttgttgttctgatctatcgtgtttcaattttttgtaatgatttatgtcatgtttcttgaatttaagatggggaatggatctctgtggccaaaaagttttaagtttttaaacaacaagtttccaatcacaatttattcaagagcagatcaaatgacaaatgctatatagattggaagtttctgtggcctagctaacacggtcccatgtattgatcaaggttctgtagacagactctgacaggattggttagattgtattagttctgttttaaatgagagaacagaaccatgcaaggaaaactgtgttcatgtgtgtccaacacttgtagacagacaatttttcctttaattgatttgagaaaggtttgaagtttcaaatcccttacaaatctgtatatagagaaggaacgacgtctttaacatcaacaagttgcaagcaatccagaacaataaactctcgttattattcatgtatgttcagaagcttcaaaacaagaaaacggctttggtgagaagtctctttagcgcaaagaagattcttggcggcactttagtaagaacatgcaaagcagcaccaaaaaggtttcttgtaaagacacttctatcagtataacgtccagctccgaggatgaagatgatatccaacagaaacatattaacaatttacctttttactcaaactagagatggtgtattccatgtaaatagaagacatctgttttctcccctttccattataatggagtttgttcaagagaattaaaaatgtttgaatgtgaataccatcttcgtataccgaaggtcattaaatcattacaagcaaatacaattttttttatcaaatcataacgagtatgcatgaaagaagactaacaatctaaatatcagttactgcaaaaatgtaaaagatctctgctggtaagcaacttcataaccccaccccccgcctaagtttgagctaatagaaaacagatttggcaatgagaaatcaatttcaaataccgaaataagaatccgacagctattcattgagtttttctctcgcataaaacctatcaaaccttaacttttaaaagacaacaaagtcgcatgaagaacacatttatcgagagagttgaactagaaacagaaactgcaaattacagagatagaaatgaaaaaaagggagagcaagtgcaacatcacacccatagacgtactatcttgtcaaacatttcgtcttaattcatttgtccacgggagattttacgaatctccacttctgcttcgtactgcttggtgaattgagttactaagtaatattctgaggtatattaaaaaaagaagtcaccaccaatgaatttgttttttctaaacaatctaaattttcaaagtaataatatatgatggaaatctcaagattacctttaccaacgtaaagcaaaaagccagtagacgtccatgcgccagcatcaaaagtcttaaaagatggaataaccttcgtcttcgcggcgactaggaagtcatacatctcttctccgaatagaacaataacagcaaataaaactcaccgaaaaacaaccaaaacgaaccgagaatggtatagatctgagaactttaccgttgctgctaccaggcgatgaagagaaattgcggcgagaccgaatcgatctcaagccctgtaaaaactttggttaatcgatggaacacagaaaaggagaaagtagaaaacataatcatatatctcgatctacctgtgcaacgatagatctcagattcggcgtcatgacctgaaactagggtttcacttttctgtctgatttcgtcaagacggggcttaaataagtttttctacggtcggtcaggccttagccagagtttatgaccttattaattctattgttgggccttagcccaatttcttttcgggcccggagtttatgaccttttaatccgcctataatgttgggccttagcccaatttattttcggatccggagtttatgatcttttaatccgccaatcacgttatttccctagttgttcaaatcaacggccttgaaatgacgacgcctgatttcgagagacctaaataaaacgataagagacgaccggaagaaaattcgactgaagaagatgtcgattcggtgaaggtaattcatatggtgactccgaataaacgagcccagcgagtagttgaattcttccacaacataagggggcagggttgcgtgcgtgtcatagatgcacaacctgagcgagaaatagctaagggactagatcggttatttcagttgcaaagaaagagagggctagagctaatttttataagctaatgtgttaagcatatatgctcaaaataaccttagcccggaaacaactcctcaatcaattataagggtcgctgagtttggttgcgtccataaaaatgggaagtggagtggtgaggcggagaatattcattaatgattattaacgattaggcagagaatagtttcattttagtctggagagagactcacaggaactcgccggagaaagtgtgaaatcgaagaagaagatgaagaagccattgttgttgaatagaagagtgactattccagctcataaaagaaaaagaaattattgatacagcgcgaatcgatccctgttgccagaattgtgaccggagaagaagaaggcacaaatcatatgaagcaacaatggcaattcatgatcctctgcttgttcaccttgtttctagtggcggatgctcgtgatagacggtaacaacttttacacaagtttctggcgggtaattggaattagaagaaattggtttcagctgctactcaagttaccggtcagaggggactcgttgacgagtaggcaaactcattaatgaagaaggccagccttgtaaaatgggggaagaaagattgctcggatccaattatggcacaaagaggaaataggattcagggatgaactaaaaccactgtgctggatctaattaagacatactcgaatctaaaccaactggctgatgacgaacgatcgaaacattccatgttagcatttctgtataatgactcgtcctcttcacattgttacctgatttatatatgcttccttcatcattgggaggtatcattaacttacatgttaaccataatagttcacataagcagattctataacttgtatcacatcagttgcaaatcagagatcatgtgtaatcaaaaataacacacccacatacattcgacaaaagtaaagacaactccataatttatatgtctgactagtccacagtgacacggaatacaaagcttaaaaaataactagaaatttcgtccagttatcttcctttggcatcacaggattactccaatttactctgtgcacaacaaagataatgactagtcctcccctctagccattttccacagatcccttgacggatgtcttactatcaccaaaccttaaaaccacacacacacaaacacaaagtttttaaaatcaaattcattcaagtactgaaaaaattctctctccctctcgatccatacctaacaaatatcccccacccaggcaaagacctcgttttgcaagatcatcaaaggtgagcgatgagaaagtcccgcctccgcccgtggaggctacaatcacaaatcagagatttttgttttacatccgaatataaaacgaaccgagaatggtatagatctgagaactttaccgttgctgctaccaggcgatgaagagaaattgcggcgagaccgaatcgatctcaagccctgtaaaaactttggttaatcgatggaacacagaaaaggagaaagtagaaaacataatcatatatctcgatctacctgtgcaacgatagatctcagattcggcgtcatgacctgaaactagggtttcacttttctgtctgatttcgtcaagacggggcttaaataagtttttctacggtcggtcaggccttagccagagtttatgaccttattaattctattgttgggccttagcccaatttcttttcgggcccggagcttatgaccttttaatccgcctataatgttgggccttagcccaattaattttcggatccggagtttatgatcttttaatccgccaattacgttatttccctagttgttcaaatcaacggccttgaaatgacgacgcctattttcgagagacctaaataaaacgataagagacgaccggaaaaaaaattcgactgaagaagatgtcgattcggtgaaggtaattcatatggtgacaatcatatgcatctccgcatttacaaatgagaactggaatatatcttgattgtggcattatgattagaaaagaacttgatctttagaaaataaaacattgctttaagaaaaaaccgacaccaaatgaaatcaaactccaagtgaagataagatatggttttgaattactggtagtttctttcttttcctcttttttttttttttttttataatcttcaaatttgaattgtggtatcaaacaaaaaaaagaagaaaataataatctaaatataatagcaatctcaataaatgccttttacatttctgaacggttgcgtctttttatcacaatctttcgtttaaatatttacgattattttcttcggttgtgtatttttatcgcatctttccgttgaaatatttacggttatttttttacggctgtgtcttattatcgcatctctttgttaatatatttacgtttttcttacagttatattttttcaattacagtcgtatcttttcagtttacggttgtatcttcatagttgtaactattcatttaaaattacgtctcatattatatagatttaaattttggttttttaactaaaatatatgttttacggttgttttttcaaaaagttgcaatctgaataaatatttacaacggttgcagttatttatcgtaacacatcataaacaattgtgattgtttacttgaaccattgcaatatttaatttatttaacgaataattgtaatttttgatttcttttataaattgttaaaacatttgattttttattttaaactaaaaatatatattttacggttgaatttttttagaaagttgcgatccgaataaatatcttctacagttgtgtttttttttatcgtaacttttcgtaaacggttgcaaccatttagttgaaccattgcaacatttaatttatttcacgaacaaatgcaactcatggtttattttataaaccgttataacatttaattatctacaatcacgtctttcggtgtaactttttataaactattattcaattttagttactaaaatgtatttaaataaattgtaaccgttttattgaaccgttgcaacatttggtttatttgacaaattattgaaacttttggttttgttttatgaaccgttgtaatctttagtttatttgacgaactgttgcaacatttggtatatttgaaaaacgattgcaacttttactatatatgatatctacggtcgcgtctttctgttatagtttttcatcaaaattttaaattaaattactatttaaatgaatatgttgctcccttttaattgaacatagtaatatttggtttatttgacgaaccaatgaatattttggcttttctgatgaaccgttgtaacctttggtttatttgataaaccgttacaatatttgatatatttgatgaaccattgcaactttagtttatttgatgaattattaccactttacgtatatgtgatgaaccgttgcatcatagccttttgtaatacattttttagagcattaactaaagctttttttttaacaaaataataactaaagttatagggatatttgttcatttagagtattatcttgtcactatgttttattcttgtttttcatcaaaaacccttggttccattaattgtgtcttttacaaacaaatttttatatttaaactttcaaagtctttttaactctatatatatatatatataaagaaaaagtggtgtaaatttattattttttttgtttgatatttttcatagaaagttatatttttgctaattagcattcatgtatatattttgttatctattttggttatttgttaaatttttcgaagattttctctttttaacataatacaatttaaaatattgcgtctttttatcgtaataatttgattaatatatttagtgtatatagttatatttaaaattaaaaatttgcatttactcattataacttttgtttaatattttttatttatgatcgcatcttttcaccataatattttctaatactaatacaaatctttaaaaaaaaatttgagggtttacgtctctttatcaatttttgtaaaatatatctttagttattgttaaaaataatttttttttgaaacttgttgtctcaatttattatgacttttcgtttgatattttttgaaattttttcccccgcaacatcgtagaggtctaagtcctagtaataataaaacaacttttttaattgggaatcttcataagttgtcgaagttgagcttgcacatatgcaagaattcatcgcaatgggttctcatcaacggtccaaattgtgcgacaaatcgataaaattttataatattaatttcagttgtgtatcttgaaagtgctgacctaatttgttgttctaatttaaaataaatcttatgaggtgtaatatgctattcaataatcatgatttatttatttatatttctcccttatattttacaagtatatcatggtttggtaaaataagataacaaaatctcaatttcatttttaactataaatcatcagcaccaaaaataagataacaaaatctcaatttcatttttaattataaaccaagatgatccggtttaaatgtcgagatagggagattaaggttatcaatgactcttacaaaaattaagtcacagatcagaaataatagaaactattaaggacttaaatgtaaatactctacaagtttatagatcggagcttcgttgcataagcccaaaccggtcgagagaagacggaaagagtctgagagaaaagaaatggggagagaagtggcggagagctgtgtagacactatgttaatggagatggtggcgatgtacagtggtcgattctacgctaacaagccggaactcgccgctcggaggatcgaggccattggttatcaggtcggccaccaactctccgagaggtttgttgttgttagtttacacttgatcatcgtcttctttcgatctggttcatacttcgtgagacttttctcggtaggtgtttcggatgttagtattagttgtagatctgaagatgatggcgaatttatattgttagcaatgattctctgatattggatttatcgtttctcgtgtgtaattggctgagaatgtgtgcgaatgtgatagataggaagataaatcgcgctgatttgagtttttctcattcgtcggggttttggtgttgaggaactgtgaaaatttggggattttgagatcaatttggtactgaaatgaagatatttgcgatttctgttgttctgtgacctagtaattgttagaaatcaagaaacttggaacttcgactgttcttgttagtttcttggatatgaggttttttattaatcaatggctggctctgaggattgccattactcaagaattttaaatctgaggtcaactgtcatgaattcggattgcatgttttactgaattagaaaattggaatggtggactcggttctagtagctaatatttctttttagttgtgcaatgttttggtgaggaaattcccttgttgccagacatatatgtcagaagattttgattctcttagtccctgtttacctataatatgtgtaagaagaatgattttagtctgttgaagcatgttttgttgcttctaaaggtgtttgcctacataaaaactgttttacagtgttgtatcatggcagatattgagcatcttacttgactatgcataacgcctgcctttttatgtccctaggtacactatggaaagaccaaggttcagtgaccatctagaggcaatcaagtttatctgcaaagacttctggtctgaggtcttcaagaagcagatagataacttaaagacaaatcaccgggtgagatttcctctaaaaaaactggaattgcctgaacaaaggcgaaactcttcttgtgtgctaaattctaacaaatgtttcttcagggtacttttgtattgcaagacaacaagttccggtggttgtctcgtgtctcaattgacccttcatctgagaacgaaaccgaagatccatctactccaggggaaagcaaagcagcacaagcggtgagcatgtacctctatttcccatgtggaatcataagaggtgtcctctccaacttggggataccgtgtgctgtctctgcagatatatcaagccttcccacatgtgagttcaccgcttatttttcttgttttcgaaaatcttaatctttcttcttctcaaaatcacacattggagggaagaaaaatagaaaattgttaaaaatattacttattttggtatatattggctgtaagcatactcgtcttttagaagcttaagtacacatttgttaagtttgctcacataaactcagcttggagtcatatttcaaaacctgtattacatgtcattataagttgcttcagttcagtaactatccttgtcatgtgctcacaggctctttcgtgattcgggtaaaggcttgattctgcattaagctcgagtcctcggctttagattgcagctcggctttatactctcaaggaagacagatccttcgggtctgatgtaactaaaccccattgcagacttatgtttgctgttcttttgacacacgcaagaagaagaaacagtgaaggcttggtttcatgtttgaaatgacttttattttcccaatgtaaattttgttgagatctcaaatagaataattctgatgcatctcatttcatataattttttaaaaaaagacgtacatttgggaaaacttgaaaaactctttttgaacaaattttactaaaaatatatatatatataaaaaaatccaaatccaaatcgttggtttattggagcttccttctcggccttaaagtcactgatttgggacttaagtctagaatatgtctctaaaaggccacgatactcttctaaggttctagaggacggactgtggtatatatgtttcctctcctactcgattcatataatttagggttttttttttttcttgtgaatctgactcctgtgtaaggttggtttgacttcttattctagggtttcaatttctcacctttttatgtcgattcttcatttgttggtagtgttccggcatgtgtctttggagacgtggttcatactcgtaatcatctgattgttttgtaaaacatttttggttgagtgctcatagagtccatgtttaaaaatctgatggtggtgttttgcttacgcttgagtcttagtgtgacggtttataatcaggaacttctactcagtggcggaggtaggaattattcttatgggggtcaaaggatgtaaactttagttaatgggggtcaatatagagacttccagccatttcatgtgtgtttgggtcataatcacctaaggattatgattattttcaaaatcttatgggggtcatctgaccctcttacccttcatgtagctccgccagtcttctaggttaatcattcacaattatgaaagtacgtagtctggaatttctgttgtgcagggactatatatgagtgattggttccttctggttgaacgccctgcatcgggtaactattttgggtaactatttcctttaggaataggagactgacctaaatacagtataaataagggatagtagttccaataggaagaagaaggattcattaagtcgattccaccacaatcggtgaattttatctcttttcaatttgctttgattccacaatcttaattgcttttggacagtggagactatggaaagaattggtgaatctctcgaggggtttacacagcaagccaatcaaaccctagccgttactcaacaattgaagaaacacgaagatgcattgaattggattctagcggccatggataggggaggtcatgattttgccacaatagacatgcactgtttattgaggagtcaacagctaccaacaaaggctgaacgtatcgctgaaagggacagcttgaagaaccaaattgctgacttggaggggaaaaatttagatcggaaaactgctaatactgatttggataaagatatcgagaaaaaacaagaggaattaactgcggatctgagtgaagaagtgaaacaagatctcgaacgggtaacaaaacaaattgaagctgaaaagatcacgttggaagcgaagaagaatctgttaactaccgctacccaaaactatgatgagaagaatgcgaggtattatgctcttgatacaaagttgggaacaattcaggataccatcgacaacatgaagaaggaccgcaaagcgaacgacacagaatacagagcagtagatactgggctgaaaaacacaaaaagtaatttgcattgggataaagaacgttacatagagttacatcataaaatcgatcagcaagtcacagaacttaacaagagaaactgctcactctacacttctttccaagaaatataatttgccgctgattatattgcttctaattttttattcaagagatcgtagcttcttcaaccgctgcctttttgttcttttctttttttagttggattctgtttatgtgattttcaactaattatataaatttctttttatgaatttcttaaatttaacattgacaccaaacttggtttgataccaaacacatgcacaacggatgtttggtgtctatttggaatcgaaggacaagttgaagatatatgcaagcatcagacttggaaacttgtctacatcgatcattaaaacgacttatccagatagagagacagagcgcttccattattttcacatgttttagtcccttaacaaatcttgaattttttgagggaattcgtaaattgtgtttgagagcataaggtccttttattacatgagattcaatagctgtggcgatacatgttttgctcggaatagctcattacacgacaactccaccacctcgtttaacggatgaagactgaagaaaatttcccacagacagaaacgttgtaaaaggctctgtaaaaatgttgggaggttttggacaagggaggtcttctgttgctggatagaggaccaaggcgtgctcaacatcaaggaatcagtgactttagtatcggctgtttttttcccatttgatacacgttagccttgtgatgcaagaaactgtgaaggcttggtttcaacttgccttctttttcttcttctttttttttttttttttttatgtaaattctttattgagatctcaaatagagtaattctggtacatctccatttcatttttaaccaaactcttggaaaaaaggtcaaagatatacaaacctagctagggtatattaatatttaaccaaaaggcgtacaattaggaaaaccatatatttatgaacaaaaataaaagggtttatttatacataggctaatcatttcctttttaaatggtccaaaatttgaatcatggtttggttcaaatttcatattcatgttcggtacggcacaggcgaaaccagtctatataaaccacaggcgactggagccgaccggcttccttctcggccttggttagccaactttccaaactcagaagaagtcactgatttgggacttaattaggtctagaatctgtctctaaaaggccacaatactcttctaaggttctagaggacggaccacggtattttgtttcattactctcctattcgtttaatttagtttatgtttttctttttgttcttgtgaatctgactcctgtgtaaggtggttcgacttcttattctagggtttcaatttcttcatttgttaatcaaccatttgttggtagtgttccggtatatatgtgtctttggagacgtggttcatattgatttaaacactttgtgattttagaagattagaactataaaagacttctctcttttattcctttaagaaacttacacaaaacttaaagctctctaatctctcaatctcttaaaactcataaggttaaccacaacattggcaactcttatatagagatctttgatgactccaaaacaagctaggactaggtttagatatctcctaaacaatatttagataactcctaaatattctcaatattatctcttcctttattttagtaacttatggctcaagttactcttcaagctttatcaacattctcccccttaagcttgaagtcgatactcaacacgtcttgaactcccacaagatctctcatttccttcaacttgattcttccaagtccttttgtcaaaatgtcggccttttgttcctctcctggaacgtgctccacttctacttgctcattctccacacattcacgaataaaatggtatctcttgtgaatatgtttgctacgtccgtggaacaccgggtttttggcaagagcaattgccgacttgttatcaatcagtagcttcactctttcacatggttttccgacaacttcactaagaagttcttgaagccaaattgcttgtttagctccctcggtggctgccatgaactcagcttcacatgaagataaagctacggtctcttgcttttgtgtacaccaagtgataggatactcgtcaagatagaatatatgtccagttgtgcttttaccgtcatcttcagtttcgttacttgagctgttccacttccatctcttgttttcattgaaaaacacgtctctgctcactgttatccgacgggttgttggatccaacatgcgataagcctttgatccaggctctgtccctaagggaactagtacacgtgatcgatcatcaagtttttttagatgtggtatctcaatttttgtgtagcctatgcaaccaaatacccgcaagtgttctatgtttggttttcttcccttgaaagcttcatatggagtttgtgtagctaacactcttgtacccactctgtttatcaagtatgttgcatgtctcactgcctctccccacaagtaattcggtatgctcatatgtttcaagatactcctagtcatctccattagcgttttgtttcttctctcgactactccgttttgctgaggagtatatggtgctgtcaagtgtctttgtattccggcattgtcacaaaaaatttggaattcttgggacaagaactcaccgcccctgtcagttctaaaagttttgatggtagtgccggtttcttgctcaaccaacatcttgaaccttttaaatttctcgaacgcttcactcttttcttttagaagtatggaccacatgtagcgagagtaatcgttaattagaacgaatacataccttttttgtgcagctgtagacggcgtaatgggtccacaaatatctccatgtatgagttcaagtttgttggttgctcgatatgcggttgcttggggaaacactttccttacgtgttttcctagcagacaagaagcacatgtatccttttgaattgacatcattggcattccatttactaattctttcttcaacatgattttcattgtctctatgccaatgtgtcctaacctcgcgtgccaaatctccgagtcacttaacacttctgattgtaaacacttcgcagattccaactccatgagtaccttgtataagcgattcttggaccttcttgctttcactagcagctttccatcacgatcgtgtaccgtcaagtagtcctctctcattctaatatcacatcctgcctctgttgcttggccaaggcttatgatgttacttttcaattctggaatgaaataaacatctgccaagacctttttttctttgttcttgctaatgaagaggactgaaccctttcctttgatatatatacgcgaatcatcgccaaatcttaccttccctgtgactgtttcatcaattttttgaaaataggacctatttcctgacatgtgattactggccccattatccaaataccaaacattgctttcatcttatgaagtttcaaaatcacttagcttcacgtttttctcattgaggtatatgacctcgtgcatcatcagattctcagcctcttgtgtatcgctgtcgtcaacttcttgtgcttcctggagtttgagtaacctgtcgggacagtttgatgcatagtgtccggtcttgtcgcaccggtaacacactatcttcgaagcatctctctgttggttcccgtagcggccacgtcctcttccccgttgagagaatcttcctcctctgcctctagcaaatccttggtttccttgatatgtctgtgtgtcggagctagcatacataagcttactttgatcgttagattgatcttcttcatcgtcacctatacgttcttcataaactttcaatcgcccgacaatgtcttcaaaacttgtttttttcagatctaggacttgttcaagtgaggcggtgatgtgtatgaatctcttccttggtaagcttttaagaaatttcttaactagcttcgactcttcaatctcttctcctaaagttgcggatttggtagacaattctgaaagcttcccggcaaaatcatcaattgattctccatctttcatcttcaatctgtcaaagtcagccatcagagtttgaagcctagcttctttaacacgttcagctcctacatacctagcttttatagcatcccaaactgcttttgaagtatcatgttctccgacttgaagaaccattgactccggtatagattggaaaagaagagccttccccacgtcgttcttctcctcatcattagaaccgggataaatggtatcccacactttgtgaactttaagagctgccttcatacgcatcgcccatacaatatagttgacattgttgagcatcagacattttatggatcccatactaatctctttcggtttgtccggtacaggtattatatcagccatggtatgatttcacgagaaacacgtatgaacacaacttggtcgtctccgatgcttaaataaataaagctctgataccaaatattgatttaaacactttgtgattttagaagattagaactataaaagacttctctcttttattcctttaagaaacttacacaaaacttaaagctctctaatctctcaatctcttaaaactcataaggttaaccacaacattggcaactcttatatagagatctttgatgactccaaaacaagctaggactaggtttagatatctcctaaacaatatttagataactcctaaatattctcaatattatctcttcctttattttagtaacttatggctcaagttactcttcaagctttatcaacagttcatactcgtaatcatctgattgttttgttaaacatttttggttgagtgctcatagagtcttgtttaaaaatctgatggtggtcttttgcttactcttgagtcttagtgtgacggtttagaatcaggaacttctaggttaatcaatcacaattatgaaagtaagtagtctggaatttgtgtgcatggactgtatatgagtgattggttcctttcgtttgaggctgcgagggcgaaaaagttagcagaggaaaagatgagggctggtgatttttttggggatcataaatttaataccaaggcgcaaagacccttcaatttttttgcagacacgttttggacgcgttgcgttaactgtggccatgggcatacatactcgagagaatgtatgaacacagtcatgcattgttccatttgccagaaatcttaccttgcctgcaacataggggatgaacctagtattgaacctaatgagcacaagccatgtgtggaaccacatgtggggaaccaaaaggggctacccatcccttggaggctttatgaacatgtggaaccaaaaaggggttgcccatcccttggatgctttgcccatcccttaggctttgaatatattttggacccatcacttctctctttacaagacattgtctacacatttaaatgtgtagttttgtctttaagtgagctactttgaatgctcatgaccgttggctttaggtctagaagtgagacaacttgtctcttttatttgtgtataaatatgtaacacatactcattgaataaactaagctctcaatttgggatgtcttccccttatacaaaacgtcttctttacactaaaatgggtagattctagtcttgataatctcatggagagaccaagatttggcaatgcttggtctcatcccttctattcaattttgttctcccattctctctaaacgtttctataagggtatttgggttcttgttggtatgagagagctgttgcttctcatgcttattctcaagtatacacagcccatattggtgtgtattactcttcctttacctcaagaatagctcacgttgagttagtctcttgatggatttacacatgaacacacaaacccgtttttggtgttcttgtgattctcgttggagtgaagcaagagctgctcactctcattcgtcctaggctcataacctaggcctctattccgcatatattctaacacctagtagttcaaccgctggtgaaaaagaatctcaagatggagagaccaaaaagaggagaacaactgttgatgatgaatgtaataagaggataaaggagaacgcagaggattacactcagctccagaaaaagatggatgaaatggaaaagcctatagatgacaagcttaagcaacacgaggaattcatgcatgatgttaaacccacgcatgttcaacagcctgattcctgcagtgatcacatgaatatgaccatgaagaaggtccaagggaagataacaaatacaggtccaatattatcgcaatctgaattgtttcaatctctttcaatactatatttttttttaattatcagtcgttattgcaatggcagaggacgaatttctctccttgttgagaaacgagacgatatatcacactcttgtggatgtttcaaggcaagctgctgaaatccagaatgttacagaaagatggaacgatatgccacctgcgttgaagacaattcgagacgccatatttgataaaggtcggatgttaattgcgaaagaagcgcaacaacgacagagccaagaacttgaagcgaagattctttcaatacgtgaaattgaagccctagggatagggattgctgaacttcatcaacgcaaggggaatctcactttagaggcatcggatttgggaaaaaaatctgaggattctcagcagcaattaaacacacttcaggaacagaatacgaaaagactacacggtcacttagttttaatgaaccagcttgaggaaaagaagagtgagttggaatcgataaaggatcagtcagcgtctactacacgaaaattgcgtaggaagcaaaagaaactcgactctgttgttaaagatgtgaggtggatagaggatcaaatcatcgaaaaagaggaggaggaaagggaggttaaagaaagttatgaacgaggaaaaactgacctgatccgaataaaaacagagctggattactataagcagcactcataacagatacggaagaaaatcaacgacgacctccttgcactcaacgaggcgaacaagttgatcgtcgatatttctacacaattctgatttatgctcgggattactttcttcctgtcattaatgctcgtttaaaccatgaaagctctggctatgttatgcttaacatagatgagctcaagagccaaaaagtgtctgtttccagcaaaattgggtttgaacatatggggactgctaaggaagggaacatagtgaggatcggtgatgaacactcgtttcgattgctcataagtagattggagttttggttatactacattgcgtatttctgtggtggcactattggccttgtttatagcaacaatttgggacagattgctcagtctttgggaccaaactctacaaccctcgtcacaatctactcttcattctccttcttcggtcgattgctctctgccgcaccagattttatgcacaagtaagtttcgttttttagattaaggaatgtctaatgtgaaatttggataacagattctcattaagaatattggttcttgcaggagatttcgtttgacaagaaccggctggtttgcaattgcactcttaccaactccaatcgctttctttttactagcgatatcatcctcacaacaaatagcattacaaaccgcaaccgccttaatcggtctgagctcaggtttcatattcgcagctgcagtctccataacatctgatctctttggacccaatagcgtaggtgttaaccacaacattctcatcacaaacataccaatcggctcactcctaggaggaaagggaggtgtatgatgacatatatcgagcatcttacttgactgtgcataactccagcctttttatgtcactacgtacactatggaaagacctccatgataacttttcttgtagacttgtagtatcatatgatttataacttttatctcagtactaggtattacttgtcattataagttgcttcggttcggtttcggtaactatccttgtcatgtgctcacaagctcttttgtgattcgggtcaaggcttgattctgcatttagctcgagtcctcggctttagatttttggttttagtgtttggttttagcttcaatttctatagaattgattcaacccgatagggatgtaatttaataatatttatttatttttagaaatttgaataatcataagtttttataaaattaaaaaaaaaaatcagaaaaatataacaagtgttggatggtaaggcccaacaagacaacaagcagcccatctagcaatgcaacggctacaacattagagtcagggaaaccaacgtcagcttaatccaacggctgttatttcattcaatctaacgatcactaaatttttgccaataaagaaattagacgttagtagaaaacgaaaatagaaaacaacattaattatttgcttttactcttcagtctccctccatttatcttttgtcatcttcttcttcttccacctccagcagaagaaactcagactttgttagcacaaagagatcagtcttaggtttgcactttatttctctctaaaacctgcgcattctgtcttcaaaccctcattttctcgccgtttctctctacattttcttttttataattttgttgccactttgattcaaagaccaaagttagggtttttattgttcttctgaggtgacttgcttttagttcttacttcagtttgagcttgtttttctgttattgtaagcaaggatttttgtcgttgcttaggctagggtttttcacctttgccttgattttcctctgttcgtcctctcacaactaaaaaaagaaaagctttcgtctgtgtggttgattttgtaacaatgtgctcatttctggagacttattttgctttagatctaagattctcgtttcccttttgatttgatttcatgggttttgtgttcatgcttataaatctcatgtcttttgttgtttttgaatcaggtttgcagattttcaacagtaaaatttcagaaagtcttcatctttgcctggtgggttgggtttgttcactgttaatcgttttgttatttgctcactgtaatggagaagactagttatgaagaatgcactgagtcaaagatacagaatcaccgcaaatcaatggagaaacttaaagctgatgcgtctggaatattgacctacaccagtcaattgaaaggtttactcaagcattttgacagtgttgaagccaatattaaaaagaggtcacgagagctagagctaaaggagaaggaactgcaaattttgagctcagaccttgagaaaaagagtcaaacttttgaagcagaaaaatctgaagctggtgatttgaagaaattggctgaagagtgtactgaagaactgaggtccaagaggaatctactgactgtgagactcgattctttgacaaggattcagagagagctggagtcaaaggataaccaattgggacaggttatggctgagattaagaggcgttgcagtgaggctcgtaatgttcaagagcgtaagagagaagtggaagatgaaacagctagaaacaagaaagagttatcattgattgttgagcagattgaagaatctggaaaacagcttgcgacggtagatgagcaagtagaggcgcgtcagaaacagcttgcaaaggtagatgagcaactagaggcgcggcagaaactgcttgagattcggtcattggagctagtttctacagagaagatgttggcaagtatgagagaatccattaagttttccaattctgaccttgagctgaaagaaaataagatacaatcactaaacaatttgataacggactgtagtaacacgattgactcgaaatctcaagaattaggggaaaaccagaagctgattgaccaacagatcaatgagcttggtgtcttgcagaatcagcgtgatactattaagcagtttatccaaatactttctgaagagcttgttgctaaggagcagacaagcaaggagattttggagactatttgcagaagctcctctgagatggaagaaagggctaaagagattaaagcagcagagacagaagcaagtaatttaaatgtaagatctgaaagggttaggcaggaggttgaaggtaaagaaaaggaactagatctgcttaagaatcagatagagtcaggggaaaataaacttactcagcttaagagagaaatggaagaggagacagatataaagaagagagatttggaacttgttttttccaaaattggagaatctggcaagcagcttgcaactgtgaatgagcaactggcgtctcagcagagactgcttgagatacagtcactggaactagtttctaaagagactgagttgggatgcgtgagagaatctatcaagctttccagttctgacctaaagctgaaagaaaagatggtagaatcactcaaccacagggtatcagtttgtggtaagacgattgactcgaaatccaaagaattaggagaaatccaaaagctgattgagcaacaaaccaatgagcttggtgtcatgcatagaaagaagagagatttggcactgattcttaacaggattgaagaatcgggcaaacagcttgcgacgatagataggcaactagagtcgcgacggaaactgcttaagattcggtcatttaagttactttctgcgaataagaagttgggatatgtgagaaaatccatcaagctttccagctctgacctgaagcagaaagagaggatgatacattctttaaacaacagggtaacagtttgcggtaatacagttgactcgaaatccaaagaattaggagaaatccaaaagctgattgatcaacataccaatgagcttgttgtcttgcgtactcagcgagattctatctggcagttaatccagggactatctgaagagcttgtcgctaaagagatggagttggaatgtgttctagaatcaagcaaggacttcaaatttgacattgatgtcaaagaaaagagagtccaagcattaaacaatctgataacgatctcaggtgaacagcttgacatgaaatctaaagagttgggtgaaattcaaagagagcttgacttgaagaacacgctttggacctttgtaaaaaagatttaatccataaagctgatattatgagacaaatttgaaactacaaaatcttccattatccatttattacagattgctcttaatctgaatctgtaagaaaatcaatcaattcagatcctcggggtccaagtaagaagtatggaatgttcagtgaacttgtaaacttaccttacgaaaaatcttctcaatctgcttctggagatttctaactcctgattctctgcagtaattttctatcaaggaaagaagagctgcatcgctcacattaacctggaaagaggtacaaacaacttgagcgaaatcttttatgacattcaaacaataagaaaataaaataaacagcaaatggcatcagaaatgacaggagactggggaacaatggttgtgagtgagacctgttcaggcttaatgccacaatctctgcctgcggttttctccaaatagtctctcgcaatatacattttctccttagtaatgtatcctgagagattaatcacctccattctatttagcaggggactcggaatggtatctgccacgtttgctgtgcatacaaataaaacctgcaataaatttgattagacctaagtttgaactcaaacttcctattatgaaaccaattcatagatcggatcaatggattccggttttccttgaatttggtggatcacaaagaaagaaaattgcaaatgtaaagagaagaaaaaatgtccatgaaaaccttggataagccaatagtaatgtcgagatagtggtctagaaaatttgcattctgctctggatccaaaagctccaacattgcactggctgggtcaccatcgtggcacctaactccaagctgccaaggatacatatatagacaattattgcaaagagtttcaagctttaacaaagaagcaagagattcattttgactacaaactctaaaaagccagttcaaatactaacaagctagctaccttatcaatctcatcgatcagaacaagaggattttctgttcccacattctttagacattgcaccatctttccaggcatggcaccaatacatgttcgacggtgcccctaaacaatgtataagataatagattattatctataaatactttattaacagatttgaatcatagttttgtcatgtgtataccttaatttcagcaacatcaaatagtcctccaacagagaacaggaagaacttgcagtcaagagcacgtgcaattgaacgcccaatgctagttttacctactccaggtgggccagaaagacgtatgatcttccctattgacaaattttacaaaatgatgaggacaaaaagttttagcaaagaagattgaattagaaaggcaaaagatacgaccttttgaagtgcctctaagtcttcccacagcaataaactctagtattctttcttttacttcagataatctgtaatgatcctcgtcaagcatcttttctgcccgtaggacatcaaaattctcatcactgcaaaccaaattaatatgattataaatgagagttctcaatcaatgtacaaaaagatgaattacaaatgctgttatatatataactctcttcaagacataaacatgaagaaaatggcaaacctgaaatttccccaaggcaacacggtcaaccaatcaaggtataggtcacatcgtattcgctggaactggtttcaaacagctgcagcttttaagctcttcttctacgacttttagtacatgttctggaatcttgtctttaatagggtcaatccttcccctaaacttttctgcagtaaaaaacagactatagcttcagttgttttacacccagattaccttgtatgtatcgattccctgagtaatgtatctctcttgtttgtttaagaggctccatttggttccacacaaaacaattgtagaggagttaccaatctcggcaatcattagtcttgcaccatcaatctctgttattgaaattgaatcagtatatcccagatgctgaggcaagaaaagctgagatgaggcaactgcaccagctttacagcagaaactggtaaagtcaatttcggaagtaatctgcagaaccattatcctgaaaaaacagtattgccaaaacagtattatcaaaaggtgcaacataacaattcaaaataagtaggttaaaatgttgaggtaaacacttacttgtagagttcgcagagatttagtgtcattttacaaattgatgaccgactaacaatgacttttgctcctgaatcagcaatagctttaatcaaagcctcaaccacagcttcctttgtctttccaaagttctctacctagaacccaaaataaaagaggaaaactgtaaacgattaaaaacacacaaccatccttgagaaagctataatagaagccacattttaaaaatacagtaacagatctaagtgcaaaaaaggagaaaactcgtatgctttattcataaagaagctcatcacctgctcagcagtatgaacgagatcagggacaacagcaacctagcataagaaaatgtatttgttcagaaaaagcttttcatctagtcaatcaaaagcataaacaaagatatatcaccttcgcattttccactcgcctaatggatcatcacttttcaaaaggataccacggacaacgcaagatttgcgcgagtctactcccaagatcttggcaacataaatctcatcaaggttaacagacattggattccttaagacttgagagcctgcctgtaaacaaatgaaccagtcaattgcaataacattgaagaaataagaaataaaaatcttattggaataaaatacctcaagtattaaagagtttaaatttttttggttaaactgctggctagttctcatcctcatccgggaaataaaaatttgttggacaaccatattctcggaaatcttaacatgttctccaagtatctcaagaacctacagaaacaaaaaacaattgcttcaactctgatatttatttttgaactctggaataaatagtaataaggaaggaaattcaccttattcacggattttgagaattgagatagcaaaaggaattgcgaaatcatctgtttcatctatctgcttagaaactatagcagaaatcataaaaagctcatctatcctatcaaggatagatgttgtcatgcctgaaaaagtaataactatatcatttttctatcaaacagtaactatatcacagagatagtgaatggtagagtcatcttagagactataagagtaatcacaaaaaagctcatcgatgtatgaatgaaaatgtatttcaggcgcatcaagcaataagttagtattccatagagacatacatactataccacagaagcataagtaatgactaaatcctgaagagatacttacttaggagaatcgaagctttaaaggtttcggaatctttagctgaaggaaaaagaacaacaaatcaaaatacggaataccaccaaaagatccaaaactaagggaaaatatatagattttaccgctttttatgctacgaacggacgaacagaacttgcgacgagagagaatggatctccagccctgaacaacgacagatcgcgtcatgatctgaaattagggtttctcgattcacctgagcggctgagcgtgagtgtgtgtgggtttagactttagagttctttttggttggaagtgacgaaatgtttttcgatctcgagtttatgcaaaaaaatttgttgggccgggcacttttaagcccgattcttttatcagacaaattttgctggaccggcactaaccatatgaaaaaagactccaaccaaaactcaaagcatatgctctcgaatgtcatctgcataagacattgaatgtttagtataataataaaacataatttcatataaacataaacaaataaacaaagacgtaatcattacaatttaggttgtttcaaaaaaactgataaaattatgttttcatgaggaaaaaagattgatacctaggaaagttttaaatatattgctcggaaaacttgtgttgaaggaaattgatgttctcttatatagagatcgaattagttagggctttctatattattgcttcttcttttttttgtcaagactaacaaagatatttaccttagatatagtagattatgatatcaaggttacttaaattaaattttggctgatttggtgtatattttttcttctactttcaggttatttatagagatggttcaatatggaagggatcaagatgaatcgagaaaatgtaggggaacaagcataaaatttttgcaaatatcataattccaaattaatgaaaatttatttagctttttaaaaggaatatgcgaatattaaggggtgccattatgttaagtactttctattttataatttatttctatataacattgttttgtttaatgaggagtatatagagataaaggatctaaattaaactataagatttgcaatttaaattacataccaaaactggaatgtgtgagatataaggcgaaatcaaaggtcacatttattgcatgtcctaatctacgtaagctattctagatttttaactactaaaacaagtgtttttgctgatgttattttcttagaagtaatctaatcaactatctttcttattatcttaggagatttgacagtccgtcctagggggcatgagacatgccttttttttttgtataacgcaattatttttacttctctgacttattctttttttgttccaaggtggttcttctgttcttttcttgaccatttgagtgtattactttctcggttatcattattcattaatttacaagacttttttttaaatgaaattgaaatagaaagtttgaattgagtccaggcttctagatgtatttgatatttcttgactattagatttgacgtttataatttttatatgataaggtttttataaatttatattgttttataaaggatcaaacgacgcaagataaacagaaaaaaaaaaatcatttagaggaaaacagatataattgttggtacaagtacaataaagaaatccaataaacaattatttgtaaccaaagaaaaaaatcaaagaaaaaaaaaaaaaaatagatgaaaaaaaaaaaaaaaaccaaagaaaaaaatcaattgtcattgttatgattcttaatcaattctatgtttatgtaataaatatcgactacgaaataaatttcgcaaatacattgtagtggctggaactgggaaggaacgatactgaccttgaggacaccagcggcagctaagatttgttgtccgtggcagaattcatgaatttttttttttttttttttgaacatgtttgttcaatgccagatattctggaactctgcctcccggaatgaccagagcatcagaacaggaggaattttttttttttttttttttttttgccaatcaaacaccatatatttgttcacggaataagactctcttctagagagagccaatcaggtactgtcgaacttacatgagaaaaacagaacccgcgatttcttgcacatttcgcaagataatcgacggaggtattaccactacgagggatatgcttaagacagaaagtagtaaaacgatccctgtaatatgtaaagtccttcaattctgtagaaaacgtaggccactcttcaggagcacgtgtcatagtcaataggtcagaacaatccgtctgaatgaggatactcgttattgggatcgccaataagcatttcatcgtccatatgagagtatccagctttgcatgaaggggagaaagacttctacgcgagccttttaagcctaagtgtagcagtcgtcctccttgaaaaacaagccacctgtgtccacttctagtctccgtcccgagccaagacccatcaatggagcataccggtctgtcctctggggatggcgactcgtgcgcactaagtaccaactgggtctgggggtcttctctctgatttgctcgcctccacgcgccttcctcttgagttgcaagatctagcgtttcctgaggttgtacgctcaaattctcgaaaatctttcgattgcgcgccttccaaatataccacataatccatgggaatactcttaggctctcatcatccgcacccgcctatttaccctgccaatacagataatctaagttattgtagatcgacgccgagggaaacagcgctggggaagatgggatgttggagagagcccagacttgtctagcaggtggacattcaaagagcaaatggttgattaattcttcttctacaccacatcttgaacatccattatctctaccaatatggcgataaaatatcgttgacttgaagccaagcaaccagtcacacattgccacacgaaatgctttaattttcgcgtagtttttaatttccaagcttgcgccttaagtgtcgtaacactaggtccctgagaaggttggtcgcaaacagggcaagaaaaacttctcgcgacctcgtatccagatttgacggtataattaccagacttttgtccaacaataaccatcactcgagataaaacgactcggtttaatccctaatatgagggtaatttcctccgagggaaacaattctcggagacgatccatcttccactatttagatccaaagtcaatcaaggtattgacgcaggccaaagtgtctctctccaccgttaaccccttaggtgggtgtgccggagtatctggtatccatgagtctgtccaaatgtaggtaccgaagcccgagccaatggtcttgcggattccatatctaagaacatccttggaggccaacatgcttctccaaccaaacgatggtcgattggagacggtgatctctagcagactagaataccggaagtaacgtcctttaagaaccctacaaaggagggagtctggaaatcgtaataatctccacaattgcttcgccaagagtgcgagattgaaatcttccaaggacctaaatcctagccctccttctgatagttgggtgcaaatttggtcccaagctatccagtgtattcctcgactttctgctttattactccaccaaaagttggcaattgcgctagtaagtttagagcatatttcttttggcagtaggaagcacgacataacatatgtcggaagagcttgtgcttgtgatttaattaggacttcttttccgcctttagagaggaattttgacgaccacgagtttactctagtttgtaatctatctctcacaaacacgaagacctgagcttttgatccatggattttttccggaaggcctaaatatgttcccatcccgccttcacgtgaaataccaagaatcgatttgatttcctgccgtacggggggagggacctcgttaccgaacataatggatgatttattcagattaacctcttgcccagatgcctcgccataagagcggatgatatcaataacttatttactcttatcggcattggcctgacagaaaaataagctgtcatcggcaaacagaagatgtgagacacgagggctcgcataagaaattcgaagcccttgaattttgccttccctttcagccttcctaatctgagcgataagtgcttccgtacacaagataaataggtacagagaaactgggtctctttgacgaatgcctcgagatggtctaaaccgtccttttggatcgccattaatcaaaatccgatatgaaactgaggtaatgcattgcattatccagtctatccatcgaaggttaaatcccatcttttccatcaaggctcggaggaacccccattccacccgatcgtaggccttactcatatccgtttttagtgccataaacttcttacgatttgccggattggaacgaagagcatggaagttttcttgggcgattaggatattatcagtgattaatctccctgcaacgaatgcagattgcgtctcggatattaattccggaagaaatctctttagtcgtaggctcaagattttcgaaatggccttatagcttacattacataagctaataggacgaaaacctgacatttcgcgcggtctttcacctttagggataagacatatattggtctcattcagctttctgtcaaaaattccggagctaaagaagttcttcaccatgttggtgagatcgccttttatgacttcccaaaaccgttggaaaaacagagcagtcatcccgtctggacctggggctttagttggtttcaaggagaataaggctcgcttgacttcttcttcggtgacttctttgactaagaactcattcatagctggggtaaccgatggtgagatgtctctaagggcggagattggatctatcgggttcgatgacgtaaacaggttttcaaaatattccaccgcgactctttcgatgccatcttcattatccacccacgtcccattatcatctagaatgcctaaaatcttgttcttcgcccttcgttgtttcgttaaagcgtaaaaatattttgtgtttttatcaccaagcgctagccaattttggcgactcttttggtaccaaaatatttcttcctctgtataggcatcgcccaattgccttttgagctcccgaagttcatccaaagatgcgttatcatccgcgtaattttcctcaattttatcatggagttccttgataagaatctcagaattagttcgcgttgatttcttccagatggagataactcgtttacagttttggatttttttcattaagggtcggtcgacccgaccgttctctccattccatccttccaacactgcttcgttgagtcccggttttccaatccatcttttatcaaacatgaattttctcgaggattttctcggacttgattgtatagatgctagaagtggtctatggtccgaaccccacatctttaagtactccacattagtgtgggaaaaaatattatgccattcttcattccccatggctctgtctaaacgacatcgaatcttaccatttgaccgttgtccaatccatgaaaattgatttccatgaaagggaaaatcaataagtccacatgaatggatcatagcacgaaaaggtagaaaggaggcttcagagcgttttttgcctcctcttttctcatgattgcctgttatctcattaaagtctccaatgataaaccaagcttcgggtctagagacaccgatacgcattagtcgttcccaaacataatcacgatttgagacaacaggatcaccatagataaaagtcataaaaactcgattaccattaatgatagtttcaatgtcgattaatcgatcatctaacaacaaaaacttaatcggatattctttagaagaaaataaagctaaaccttcactagtgccatccggttcaacagtgtggaggttgtcaaatccaagatcaacttgcaaagtttgcagatacattttgtcatttttggtctcagataaaaacatgaaacctggagagtacatacgacacaactctaccagtcgacgagaagtttcttttgctttcgccccttgacaattccacgccaaagtcctcatttcttagttccggagggagctggataccccaccgtactaacattacctcgtgtgtccttgcattttgaaaatgaaaactcctcattatgagggaaaaaaactaagtttttagagactagtagttttgcaaatcccggattgttgtcttgatattccattgtggatggctccttcatgctagaggaaattagagtagctcgtactacaaacaaaattatacgtttacatgatgagttattggaatctcccttctttaatttccaataattctccaaaatagagtacgatgtcatatatatagtctttccatataggaagaatgtctgaatagtctttctttgatggaagaatttaattttgatggatccacaactgggagaagacctgaaccagcatcaccggaggatgaacatgacacggtgagaggagacgaggtctccgctagagaacacggatctacttctggcacagaacacagggcagcagaagaagctagatcgggaagagaaatcatcgagagaggtgcggaggaggaagaagaagccgctgtaagaccattggccggcgcggcaccattagctgaaccaacgccgagagtcttcttcccatttccagagacgacgcgagcagagagccgggataccttcgaatgtactctagaggaggcgatcgacgcacaagaagggaactcaacggtggcatgaactgtcgcaaccaccacaagtgagtcaaccagagcaaagggagaggcaagagacagggaaaagccaagatccctaagactacacacagcagtaaagtctctccaagagctggaggagggggagacatgaggtgccggaaaaccgtcggcaaagtcaccggaaaatggtagggacaggcggaggaaaacggagcccgcggaaccgatgggaggttgaggctgtggcgagaaagccagggaaaagtctatccgactccggcgagccactcctccaccggcatcggaaaacggtgattcttcagttgccccggtaatgtcacctaggagagagagcgctcttggccagttagcaaaaaacgctgggactctgattcgcggaggttgaggtggccggagcggattctccggaggaattaagtccatcaaagttagcagtttgtagcaaaagtgtggctcgtttttttcttagtacttttctttttatcggatttgcccattactttttttacaaataatgtacatgaaaatcccaaatcttggtataaaacaaccaaaccaacataattgatgcgggttatcttttcttgagacttaacaacgacgaatagaaaatactcagaagttagaaccgagattatagttagaaaacactcttaacgtttagtcggctaaccagagaatcaatttatatgtctctcaactcaagtggaaagttaaaactctttttctcggacataaaatctagaaggttaggaaagctcaaatcagattaaaatttttggtaatatgaactaaagtttagtaaaaaatcgtttcattttttttttgttttctaaatggaccattttaaatgggtttaggctcaattcttcacctaatttaaatcttagagtttatgaggagagaaagcatcatacatcatcattatcacaaccaagtttcttcatcgctcgctactcattagaccatgtttaacggcccatcttcaggcctgatcttagagtttaataataataaactttggaaaaagtgggtttagaacacttctcatgttcttgggctagaactgtttttgggctgatcttgtggcgacgtggcatggtctgattcgttgcgatttgtgataacgaaaatctttcaaatatttgtaactttgtactccctctgtcccattttattagatgtttgaactaaaagcacaaatattaagaaacaataaatatattcttatttatgaaaattcaaccaataaaagaaaatactgcataattaaaataattaaaaactattaaactaatataaatcatgcattgaaggtaaataaaatcttatataatggaacaaataaaaaggcctaaaacatcttatatattgggacagagggagtattaattaaataaaatgtttgtaacctttaattaatatgtttgattgtttttttgtttttcatttatatctttaatgtttttttgttctttttattttcaaatcaatgttaatataagtttacttttttatgttttcaattttaaaactaattttttaattttaatatactttaaaatgttttgattattaaattattaattcatatgatctaaacatgttctaccaataatcaattactttacaaaagatcttaattaaagattttataatattttaatattttttctccgttaagatcaatcttgaaagatgcttagtacttttacttcttccttcttcctcttttattataagaagaaaaaaaaacagagcgattgctcttatctcagttgattggccatggcttcttcaatcgtcttcgccgcaactccggctactgggtttctctcccagccttcattgaagtctcggagattttatgttaattcttcactcgactccgatgtttccgacatgagtgttaacggtaattagccaaacaaaaattaaatctttactgtctcttctgcgtcaggttgattcctttggatgtttcggattctgggtgaatttgattcttgagaaaatcggattttttatggaaattctgagaaattggcatgtactaggattaaaaggcttagctttatgtcaagaacaatcccacttttgaagaggatcaagtttcaattctcatggcatatagatgaaaaagatgaaactcttgtggcttgtatatgctaaaggcaaatcaatagtattggaaatggagagctaggtcgaggttttacagtccatccaagattctcttttgtttatattatcagtttagtttatccatgggaagtagtagctgttgaggaatcaaatttagatttgaggtttcatgttatgaaaagctttcttcttctaatcatgttctggagcatcgtgattcttcatctcttactgttttaaatggtctggttatgaatgcagctccaaaggggttatttcctccagagcctgtacca

SEQ ID NO: 5185 - DNA, 12919 bp, Arabidopsis lyrata
  Intron number 3 from transcript 480670 (locus 480670) deri ved from phytozome v7.0 (chr-ID scaffold_3; pos 22237329 t o 22250247)
aagttccaaagctattccagctcgagttactttggggtaagtaatttcttccttacagacttccgagtatgtgatataataaaagtataaaactatttgatgtttcttgaaccatctattatgtttcaagcctaaacctttgggttttcatcttaaaaatctttctgtgctagagcagatgtggtcaagttcagactggtgtattccatgatggtgctgctccaaatggtcttttcgggcttgggttggaagacatatctgttcctagcgtactagcaaaggaaggaattgcagctaactcattctcaatgtgttttgggaacgatggagctggtaggatcagttttggagataaaggtagcgtagaccaacgagaaacgccattgggagtaacattatataatgtccaccatgtgttcgacgaaatgtctgaacgagttctaatgttactcccaattgcagttaatcttcaataagacactgtgcttatgtcaatctatcaaatttcgtaacctacattcaacgaaaatgaaaaaatctgacatttgaatgaagatcgactaacctcattatcggataattgttattcttcaggaaaagcagtttatttcatcatgtagaagaagaaatccagactatggatcttcagaattcccctcagaatgcccctgtagctcatggtgcctcatctagcagcctagccatacagccatcagaggttgttcctgttgctcatggtgcttcagctagcagccttaccatacagccatcagaggatgttcctcttcgaactaagtatggacgggtggtaattcagccatctaggctcgagcaaagtggcaagaaacccaaaaagaagaagaacaacaggaagaaataaagcgtctgcttcagtttagcatctgaatcagccatctaggttcctcagttcttccgactgtcaaaatttatcaaactcttttgttcctctgttatttatttcagcaacttatgcttctaaatgttagacttcagatttgcttgtattttgaattttatgataatattttcttcggaaaaattccctaaaaaagccccacttatttaatatttgccagaaaactacctaaacttttttcgttgccagaaaaatacacaaactaatttgggttggaaataaaaaatacgatctaatttttttttccgattacctcccttcgccgtaacggccgtcaacgacgttaacgaaatcatcaaacgtttttaattttatttacgaaaaattctagaaaaaacccaacttatttaatatttgccaaaacaatacctgaactttttttctttgccagaaaaatatacagatcaatttaaagttgaaataaaaagcacgacctattttttgttccaattttacccactttattgtaacagttatcaatatgttaaccaaatagtaaataccgttattttctcattttctttgcacatgataaataagaatggctaaaaaaccgatgttatctccttataaaatcaaaatcgatataatacttatattaaatcctagttttaacatacaacatctatctatatctgatgcgaacaacaataaattgaagaaattaagaagaaccttcggctaacaaagtgggtaaaatttctttaatttactattgctcacatatgatagattgttgaaaaaagcattagcaatttagaaaaagttacacactaataacatgattttagttgattttactgaagaactgaaggttttagaggatttctttaatatgtcaagtttttttaggaatttttcttaaacaaaattaaaagcatttgacgatttggttggagaaatccttaaaaaaaaaacagatagtgttttttatttccaagttaaattagtctgggtatttttatgacaacaacaaagttcatgtattttttggcaaatattaaataagtcggggatttttttaggaatttttccgtaaataaaattaacagcgtttgacgatttggataacgctgctaacggccgttacggcgaagggaggaaatcggaaaaaaaaattagttagtgttttttatttccaatccaaattagtttgtgtattgttctgacaacgaaaaaagtttaggtagttttctggcaaatattaaataagtggggcttttttagggaattttccctattttcttcagcatcctaattcttttaaaataatgttttgacctcataggattttagtattgattatgtaagtgtggatgacgtaatcatcgtaatccgtaatctaataaccagcgtaatcgtgcgtgatggcgtaatcatcgtaaccgcgttcttcaaaactgtgtggagtgatagtgggcattcggttcggggtaatattattatctaagtggatggcgtaatttctgtaatccgtaatctgaataatcagcgtgcgtaatcttcaaaactgtgtggagtgatagtgggcattcggttcagggtaatattattatctaagtggatggcgtaattcccgtaatccgtaatctgaataatcagcgtgcgtaatggcgtaatcatcgtaaccgctcaatcgtaacaacaattctacaaaacattgatcccactatttgttactctcaagttgaacgtatatacataaaacccaacaaaccaagagaaaaatgcataaaaaaaaatgtcacattctatatacactataagagttaacaagatatagcaacatacttgagtgacaagaaccacttgaggaaccaaaaagacactgaagcagggtgaaggcttgcaaaacaggtaggcatagctacgaagaagcatgatggcaataagagtcttgccagaaccagtctccaagaagaaaatagtgttctgcttgatagctttctcaagtgcctctacctggtaacgagtaatagagcatcatcatatatacaagatgtaaggcttgagatagagataaattatgataaagagcaccatattacatatgataacacagaatatcatagtttcttatatctcattagagcagagtaaaacagagctccttttcttatctagccgggtctcttaggtggcaaatcctgattgggtataataaaaggagtgaaggttcacctctaggggttaacccaagaattgtccattaatataataattttttttgttatctttaacatacattaataatattataaagatttataaaaaaacggtctatgacgccaaacccacacttttgtttgggaaatggtttgtgactagaattaaaggaagaataagagatcatgaattgtcatgaatctaataaacaattttctttttatttataaaatctgctcacagatcgatcacacgagacagcttctggatccggtttagcaagaaatccccttgcttgattgttgcctggtaaagtgtattctttgcatcaggacggttagtctccacaacacctgcaacattgtctatcttgcagtgaagcttcccagcagcaatgaagcgtgacagctccctggataaccataaacattgaagccggtttaagatattttattttatacagaaagacggggtaaactaaaagatactaaagaatgtaaattgagtgttcgccagtgtgcttactgatcaatgaaatccacggaaacgccaaaggcttttgccatcgcttcaactgtcacactcttgtaagattccaaaaactgggagtacaccaccgttctgacttccctcatgtagaaccggaaatgcgggtacaggtaatggtcaagctttatctgctccgccattccagctgagagaacatacccccaataatggagttagtaaacacgcaaagaaaaaccaaacaacatgcatgcggaaatattacatatggtccttgtaatgaactcaccaaatgctgagaaaaacgccttgtactggcactcataccaggagttcagaaactcagaaaggaacggaatctttccaagcacggttaagatctcaggtgcatcaacgacctgtcaaattaataacactttatcattttctcaaaaaaatttacatccccggaaaggaatttcaacaaacaacaacgatttatatcatttgaataagtctgacatttactaaatttagaaagctcgaagtagaggactgagccattgacaaataccttttgcttaagagaaactctgtccaaagttatgatgcttgtcaggacggtgtagaatattaaggtctcatatggaaaaatttcatatgttgtgaaggttgatatagaatctagaaataagctggcagccttattgaagtttctggtggccatgcagtacaagccttcatagacctttagtcgatttttcctctcccagtcaccaccctcttcaaacaatctggcaagagagaacacaatgtgttagatcaacgttttcagttgtgctatgtatcaaaagtagtcgcaatgcagccaaaaagccaaattgacacttacttttttgctttgtcaatgttctttgataccagatcaaagtccatgtagaagaaagcaagctgcaatgtatagaatactaaatccattttttgactaacagaaatagtttttccttcagtgagtaatagctgctccagggctttctcctaggttcacaacgcaagaatttaatgaccagggaagttctctgaagtgcacaattttattaactttgacatgctcacataccttatcactaatcctgatgaaatacagagccttagcaagatgagcttcatggacttcactttcacccaaattttcttctgcatatgcaatcctaaacaaaggagaagaaaaggaatatgtcagagaacaacaacaataccaatgatagagcacaatattagtcagtggttatcttcaacagaatacttacttctcgtcgagctttttgagctcctcctcgttatcggcactagagctgtcaaataacatgaattgacttcatgaacaaaaaacgagattagaacaaagtgttagcaaattatagttttcaaacaagtaaactaaactgcagcaaacttatcacgtagacaatcaaaacacttatcaaaacaagtactcttcagactctagctttagcaataatttaagtaacaaacatttataaatgcttagtaactacttagtactgactagtcaaatattatccaacacattcataattaacagaaacacaaacaatcaccaacacattcataattaaaagaaacacaaagccatttatgatacacaaagcattcaaactgcagataaatcagacacaacctctttttaagcttagaaaatagcagctaaatcaatgaccaacacattctcagattctattacttggaacattaaagcaatacgtcagatattttagattcaaattcggataattactgcaattgggagtaacattatataatgtccaccatgtgttcgacgaaatgtctgaacgagttctaatgttactcccaattgcagttaatcttcaataagacactgtgcttatgtcaatctatcaaatttcgtaacctacattcaacgaaaatgaaaaaatctgacatttgaatgaagatcgactaacctcattatcggacccaaacttccctttcgacttaaaattgtcgattcgaagaacacttataccggatctccgatcttctccgtcaatcgactcagaattcgtctcactctgttgctgggaccccctctctgctcgtctcaagtatctctcaaaccctcgattttgccccgacaaagagaaggaagaaccctaaatcgtgactaaaaaccccccaaattataaaacgacgtcgttctgtcttgttgtcaaatgagaatccacctagaccaaaacgcagtcgtttaaaatgatcacgtgtcgtcctcgtcagcatccgttaacggaacagtaacaccgtcacacgatttgagggatcctaccggagtagaataatttgtgatgaaaattcaaattaaattgaagttcatgagggtttaaacacagacaaaaattctgtgtatgaaaacgataaaataacttagttcagggtggaataggccgttttcccatttttgtttacacttttgaaaattaacttttctttactaaaatttacttaaacttaataacaattaatcaaaatatctgtattttaaatagaaaataaatttattgataagaatgttttttatataactaacaattccaaaaatttactatcataaatattttttttaaataatgcataacaacattctaccgatattaagtcatgatttttgttaagtcatgtgttattttttaaaacaaaaaaaaatcaaagagaattatatattgaattgaagcaaagttttgtgaaatgttgagttgaaaaatgtgtttggagtgttggagatttttactttatataacatgacaaatattaagtggtagattttataattttttagatattatcttgttaaattttaatatgtaaaattgataaactatattagtgttaaatatatgggaaattgttaaaaatgccccttttggtgtgcctattttcaaaaatgccccttttagatgtccattttcaaaaatacccttttttaaatctaaaatttttataaagttttattaggttgataaggtacttatggattgtaactactacttgaagactcgatccaagtatttataatgttttataaggtgtttttaaaggttttacaagttattttaaaggatttttaaggtttttcaaaggttttacaaaatattttaaaggtttttaaaggtatttaaaatgtatttataagatatttataaagtatttataagattttagatacatagaaatgtagtttgtgtatgttttaataatgttacatacatatttgggtaaatcttatatttttaagaacattttttataaggttttaaagaaggggcatttttgaaaagtgtcattgaaaaaggggcatttttgcaaaagcccctaaatatatatatatatataaaatttaattaaaattattttgaatttagttttttttttcctttccctaaatttcaaatttagttatttattaaaaatatagctttaaatttaaattaataccaaattgtcattttatatataaaagactgtagttttcatgaaaaataaaaaagaaaaggtaattttcaaagtataacttaaaaatagggtagttttcaaaataacccaaacataaatcgctacaatcatattctgataaggttgatcagtctaccaaattaactttattgagttattagaagtattgtgaatctcttcagactcacgtgcaggctctcgaaacaaatagctaaccagacgatcgaagtacataaatccacaagcataacttggtcattttttattttttggccaaaataacttggtcaaaccgtcgcacaatcataatttttggagtaatttttttttgtaaccatctatctattttctgaaaaccaattacgattcattataaaaaaaaaaaaaaaaaaaattgatttgagttttgttatcttcgctattattttaaagaaaatcggtaacacgatttagttttccctccaatccaattataggcaaaccattaaactattttccacttttagttagatcatctaactatacctataaacaaaaacaaattagggaactaataatcagcagaattgtttaaaatcttaccaacgacggatcatacatatttattaatgtatatataggccttgaatggttgatcggtaaacttcagactagactaaaatcgaaccaattcgttttgttttaccactcacataattatctgatatattctgggctaactctataccaataaaatacatgttaatatacaatgaaacattaattacatatgtatcttatttcttttggtttgcaataaaggtgaagcgtattataatatagaatttaacgtattaaaatgttgatacgcatggggatgtgtctttagtcaagtggttaaatctatttgactccgtcttttttaccggagttcgactccagtaagtcacgttaccccacgtaatatggattggcaatagatcgggctttgtcgatccaaaaatgtaaaaaaaaaaaaaaaaaatgttgatacgcattgtccaatatgtaacatacttacgaacattcaaagccttaatcacgttttaaaaacgagaatgacgaaaagttggtccaacactccaactacttgcatataacatataactaatatcaagcattaaataatggaatgacgtgttgacaaacaaatatttatcaattcaatttgcgtaaccataatataattcaataggactcttaattgtggattacaaattttacacaaacgttgaatattcttacatagatgactgcgtgtggttctacttcgatgacttctacgttgacttttgctgttttaggtagagaaggaaaattacctgccaccttttttactataattaaataaactaaataataataatctttaaaaaaaaactttattttattattttttcaggaaaaataaattgacttcaaagttcatcatcatactcaaacagcttttgtatctgagcgactgatttctgataatatctcaattgctcatgaaatggttcatgctcttaggactcacccggttatctcttctgagtttatggccattaagacagacatgtccaaagcctttgatagactggaatggagttatcttcaaggtttgctaactgctttagggtttcaccaaaaatggattaattggataatgttctgcgtttcttctgttacttattcaacagtaatcaatgatcaaccgtttggtatggtagtgcctcagcgtggactgcgtcaaggagaccccatatctccttttctatttgctttgtgcactgaaggactatctcacctgttgaaccgagctgaaagagaaggatctattcaaggaattcaattttctccaaatggaccagcaattcatcatcttctatttgcggatgacagtcttttcagctgtaaagcctctgtggagcaagcaacttcacttcagcatattctggactcttatggagctatgactggtcaaaggattaatttgaacaaatcttcaattacctttggttccaaaatcaacattcaggtgcagcaatcaatcaaatccctgacaggcattcacaatgaaggaggaacaggtacatatcttggactccctgagtgttttagtggttctaaagttcaaatgttagactacatctttcaaagattgaagactaagctatctggctggtttgaacgcactttatcactcggaggaaaagaagttctccttaaagcaattgcaatggctcttcctgtttatgccatgtcttgctttaagctgccaaaaacaacatgtgaaaaaattactgcagcaatgtctaatttctggtggaattcattggaacataaaaaaaaaactcactggataagttgggaaaaactttgcttaaacaaggaacaaggtggcttggggtttaaagatctacaatgctttaatcaggccctattagcaaaacaagtctggagaattttgaagcatcctaattgcttatttgctagagttatgaagagtagatattttgaagattctgatatcctctctgcaaatttgggttcacggccttcatacatttggcgaagtattattcatggccgtcaactgcttcttccaggtctcagaaaaatgattggaaatggtaactcttcacttgtatggattgatccctggctgtttgatgcgagaatgcgggttcccttcatgatgaacatctttgtagatctaaaccttaaggtatcagccctaattgactttcaggaaagagcatggaatttacaaagattgcaggaattattttatcccagagatgtgaacctcatacttctcaataaacctgtgacaactaaagatgatttttggtgttggatgcataataggagtggggactactcagttaaatctggttattggttagctaaccaattacacaattctgaccttattgcagctgctgaggcaaaaccctccttaaatgatttaaaggtccaggtttggtcattacacacttctccaaaaataaaatgctttatttggagagctttgagtggtgctattgctgtagcagataagttagaaatgagaggaatgagctacgatttgagatgtcaattttgtggctggaataaggagtctactaaccatgttcttttccagtgttctattgcgcgtcaggtttgggcattatctgactttccctgtccacctggtggttttgaatctcactctgaatacaccaactttcagtatctgcttacattggctcagaatccagacataccagatcacattcgtcggagctttccatggacactttggtacttatggaagaatagaaatgggttctgctttgaaggtaaacttgttgtaccaatagaattggttttgaaaattaaagatgaagcatcacaatggattaatgctcaaatcctcggctccaaatatacaagatcaaaaatttttgatagaggcaagcattcaaagacatggtctaaacccccagctccatgggttaaatgcaacattggaatgtcttggtcaaagcgaaatcacattggtggtttctcatgggttttaagagatgagaatggtgtagttttgctacatagtagacgttgcttctccaacattgtctctctgacagaagctaaatttcacagcatcttatgggctattgatagtatgattagtcacaaatacaactttgtgatctttgcatctgaagccactgacatggtaaacactatcaataaacctcaagactggccttctctacaatattttggtgctgaactcaacaggaagttagcttcaattcagaactggagaatcgaaaatgcagacactgaatcaaacaaaggagcttcacttattgctcacagtgtcattcaaggcaatcgatatcagtcttatgtggcaacaggttttcccttttggcttaaatctctctttgattcagaaggtcaggttgttttttgagacttttgttataacctgcaactcctttgattcagcaggttattctatccttatcatcttcccttttaatgattattttcttcttgtaatcgttgtcagtttatgcttttgatcaactgaacctttttagtcatgttttagtttgtaatatgtctggttgtaatggctctcatactggctttgatactgacttatgatataaaacagacactcttgcgacaaaaaaaaaaagttcatcatcatacaaaggagaaaactttggagctttctcactttctttacttcacgatccttcttttgcctaatttctcggtttcatttacaaaattctcattttgattctttcttactctttagctagagaagatttatactgggttttgagtatttctcggaaagtttcgttttttttttttctgggaaagtttccgagatctcggcggagtacttttttttacgacgaaccagtatggtttggtactcaagctgtagaattttgtttctgggtctgattattttgttagcttcgagctgggttttggaaagatgcgaaggatttggtgaatttgggtttgaatttcatcatcgtttctccgatcaggttgttggggttttacctggagatggtttacctaatcgagattcttctaagtattatagagtgatggctcatcgtgatcggttaatcagaggtcgtcgacttgcaaacgaagatcaatcacttgttactttctctgacggcaacgaaactattcgtgttgatgccctaggattgtaaggttttctaaattcgttgtcaattactgattttgagcttgaagttagtttcaagtttaatttttttatggaggcgtgaattgtttatgagagagttaaggtttggagatgtttgtgctgacttgtttggttgatgttttgtaacagtttgcattacgctaatgtgacggttgggacgccgtctgattggtttctggttgctttagatactggaagtgacttgttttggttgccctgtgactgcaccaattgtgttcgtgaactgaaagcgcctggtggctcggtaatgttaattattgcttatagtatgatgcttgctgatgtatcttttgttctcttgagtttttggtctagattgtgaagaactttatgggtttgttttaagtcagggtttagctgtggtataaagatcaattattgcatagaatctgactttgggcaactcttaaatacagtgagattgacactagacttatcgaggatgcttctatgttttcaaagctaataattttgtgtaagaaaattttagtgaacaagatattcttgtgcttagattttacgttattgacatttttttgtgttgtatcttaagaaattttttatatctgcgagtttttgggttccttatataggtttttcctttttttgttgaccagagtttggacctcaatatttatagccctaatgcttcatcgacaagtactaaagttccttgtaatagcacattatgtacaagaggtgatcgatgcgcttcccctgaaagtaattgcccataccagatccggtatctttctaatggtacctcgtctaccggagtcttggtggaggatgtacttcacttagtttcaaatgacaaaagttccaaagctattccagctcgagttactttggggtaagtaatttcttccttacagacttccgagtatgtgatataataaaagtataaaactatttgatgtttcttgaaccatctattatgtttcaagcctaaacctttgggttttcatcttaaaaatctttctgtgctagagcag

SEQ ID NO: 5186 - DNA, 14164 bp, Arabidopsis lyrata
  Intron number 2 from transcript 474285 (locus 474285) deri ved from phytozome v7.0 (chr-ID scaffold_1; pos 27261846 t o 27276009)
cagcagaagaattttccaagagacaggtaacacttttcaatcttgatatattcaagtctcattttcttgcaacgtaaacctacacacattgcgaaaactttgtttcacctttaatgaatgtcaaaaaatgttatcttcttataagaaaacccaaagtcagcaacacactcttcatatatatatgccagtgtcattagtcacctaatcgtatatatatcaaatcatcaacaaagtccacttgacctagcgaaccaccggtccaccactgacaaaggccggttaaaagtaagggtaaattgcatgttatggcagttgaccaagttttaatttcaagttttggcaaactgaaaatgggctttcaagttttgacattttggctaaaatctgaccattttacccctaccaacggaccgatgtactgttcactgtacggttcagttaagcggttcagttacgtacactgttccggttaagcaatatatttcgttcgttcttaattgatttgtgcgggagtacagtgacaagttgggattaataacattaaaacacaatgagacatcagtatttaatgcccaaaaagtttagacatgactcatgtcacaattaatgcaaaagtcatcattactttttctaatattagtttatatgtgtgaatagttgtaagagacaaacatgatccatcaaagaaacaaatttttctgaacgaatgtgattctgcatcggtttgatcttcttgatttacaaagtttggagccaagacaagcattgaacgtgtaagtaatgaaattggttaagaagttttttgttttaacacactagggtcttgattgtgtgctaagatcaacattgtttttatataaaaaaccagaatatttttatttccactttttttaattgaaattgctaaatgaggatagatttatgtttataagtgtgtagttgggaattctttttgtttttttgtagatataatcatgctttcatttgcatttaatggggttctgctgaatttatgatgcaggttggtaatggatattcccgtatttactatggtgggtgagtggaaatgcaaagaagaagaatggaaatttgaaccatgggaaggctggtttggtcgttgtgtacgtgttaggcaaaacatgacgtacacggcatttgtacgtacattatgcgaggttttcagtttgaagtgcaccgaatgcaatccaataattagttactggatgccgggaaagatgtcagtgatgatagaaagtaaacgccctcctgtatacattgacaatcaaatgaacctggatacattctttttgattcgtggtggggatcctagtgtcaccttgtttgtctctttcattacaaccgtcaaggcactcgggaatactgtccctaggaccgatggtgagagttactgtgtgtgtgggagtgcaacgacaccaaatcccatcgtagcggcttcaaatgtaaataatgaggccgtagatgagcaagacgacgttgaagacgataaaacagatgaggatgaagaagaggaggaggacaacgaagatggtgctgggtatgatgattatcagggtgatgatggatctatggggggaagtaccctcgatcctactatagacggtagtgaaggcagtggcgaagattacgattacaacaagtggaacgatttaattattgaagaatatggaatagggaatgttgaggaggacgtcattctcactcaacaaacggttcaacatccaggggaattcagtcgtctattggcagagtgtacgtacacaagtcatcgtgtacgtggggaaaataactcggttgaccgtacaccaacggtgactccaagacgtacgtgtcaacatggtttgtaccaatgtacgtacacaacagaatgtgtacaagatacaggctgcgaaggtaacaccgataccaatattaatggtatagacgatgtctctggggatgatgttatcgaccgtggtattggagattccccaaatgggacactgaatgataatcggctagttactgcacctggcggagataacatttctcattcgggtgaccgtacaccaacggtgactccaagacgtacgtgtcaacatggtttgtaccaatgtacgtacactacagagtgtgtacaagatacaggctgcgaaggtaacacggataccaatattaatggtatatacaaagtcactatcgaccgtggtattggagcttccacaagtaggacactgaatgataatcggttagttaccgcagctgaggcttacgaagtgtataatgacttttctacattacatggtggcgagttggagattctcgataatgatgctactccggtattcgaggatttagccaatttacgagatgatgagacacaagtcgaactgagtacgacaggtgagactttgtatgtcgggagtgtttttaagaacagaaaagtcatacaacaaacaatgtcttatctcgcaatcaaacaatgcttttgctacaagcaacgtaggtcatgtcctacaagattggagatggtctgcgttgatggtacttgtccatggcatttgacagctcaagttgtcaagaattcagaatgtttcaaaatcacatcgtatgataccacccatacgtgtgacatcgacactcgtaagaattataataaacatgctagttataagcttctcggagaggtagtgaagagcagatacagttctacgcaagggggtccgagagctgtcgatttaccacagttgctcctaaatgatctcaatgttcggatttcatattctaccgcttggagagctaaagaggttgcagtggaaaatgtaaggggggatgatataaaaagttacaggtttttgcctacctatttgtatcttcttaaattagctaatccgggtacgataactcacctacactctacacctgaagctgatggtacgcagcgctttaagtatgtttttatatctctcggggcttctataaaaggtctgaagtatatgaggaaggtaattgtcgtagatggaacgcagctagtaggacgttacaagggatgtctcctcattgcatgtgcccaagacgggaacttccaaatatttccaatagcgtttggtgttgtggatggtgagactgacgcttcatgggtgtggttctttgataaattagctgacattgttccagataatgaagatttaatgattgtatcggacagacattcttcaatatataaaggcctcagtgtggtttatccgaaagctcatcatggtgcatgtgaagtacaccttgagcgaaatatctccacccattatggtaagtatggtgtatctggattattcttcagcgctgctaaagcttacagagtgagagattttgaaaaatacttcgaacggttaagggctaagagtgctgcatgcgcaaattacttagaggaaattggatttgaaaattggacaagagctcactgtaaaggggaacgctacaatatcatgtctagcaacaattcggagtctatgaataatgtcttaacaagagccaaatcatatccgattgtgtacatgatagagttcattcgagaggtcctaatgcgatggttcgcagcaaggaggcaaaaagtggctaggtgtaagtctttagtgacgcctgaggttgatgagcgttttctccaagatttgcctgcgtcagggaaattagcggttaagatgtctggaccgtggagttatcaagttacaagcaagtcaggtgagcattttcatgtcgtcctggacgagtgtacgtgtacgtgtcttaggtacacaaagttgagaatcccatgtgaacacggtctagcagctgcaatcgagtttggaatagatccgaaggttgttgtaggatggtggtatggacttcaaacgttttccgattcttttcaagaactgattctacctatcgcggatccgaaggatgttgtcatcccacaacatatatcggatttgatactaattcctccatatgtagacgaccaccaggaagaccaacaactaaacggattccatctagaggtgaaaaccgggtaagtgctatcattcaaacgtgtacagatttttcaaacattatgttttgagtataagatacgtagattattaacttattgttgttgtcatttcagaaaaagagacagaaaagacttattccgaatcagtgcacacgatgtagacaagcaggtcataacaagaagacttgcaaaaatcctatttagttctccttataagctttatgtctccgcgaagacagtgtacgtttatgtgtggacagtgtgtaccaaagtgttgtgacggtgtacgtacgtttaatgtttgccatcgtataactatgtacattttctgagagtacgtttttgttagtgtacgtgtttgttgtgtctgtgtacgtataatcttcaggcaataaacggttacaaacggttacacacatttgtatcttaaccgttggaacactttcgcactacccaccccgtccgttacggaatttccttatttaagccacatctcctcctcaattttatccacgttccttcaaacaaaaaccctttcacattcggcagttacatcaatcaaacacaaagtctttcgattgttcttgctaaccgtgtgatggccgggtatcacaccatctccgaattgtgtcctcagatcactgggtggacaatttgtgtatttgtcgtgagagtgtttaagaagtttgttgcgcccaacatcttcaaactcggccttatcttggcagataattcggtagtttccctgtgccgtgtttgtgtttttttatcatacgttaggttcaattctatataaatctgttatatatcatattctgtagggatcccgttcccgtatcgaggccaccattgatcgtcgccttgctcctttttacatagaccgaatcaaagaaaatgagtggaaaattgtgaccactttcttggtccgtaacgtcgctgacccagtgagagcaacatctcatgactacggcatatggtttatggatcggaccgtcgttactaacgccttacgaagggacccaatatcgttttacgatttcactcaattcgactacattttggagaaaacagttgataagaaagttttagtcggtgagatgttttttaagttacgttttatttacacatttttgaaattagaagtttgtttctattttttggcccttgatgtagatgtcattggagcgttgttggaagttggccacttgaccggagacttctacggtctcaagcttcctttcaagatcaaagatagatagtaaatgttcttttcacatttgattcacttacactttttaatctaaacgctgacttgattcttcttttaatctaatgtagcaacgaagttttggaatgcgaagcacacaatgaacaggcgttggaattccaaaccttctttcggattctaggtcagcgcaatgttgttgtcgcactcgtcttctggcgtttaaccgacagagctaatcctaaggttgtgagtcatggtcctgtgtcaaaggtctttgccgatccggacacaccgaaagtggaagagatcaagtaggtcgttttttagatagggggatttgttttccccagtcttcttattattaaagaccagatttatattcagtattgtaaaactacataaacttgttgtcgttttctaattacttgaatttgtataataaactattgggtaactgtacgtattttttatacgtacagtgtctacaattacaattaatttgccagtgtacgttttactagctttttggttcttcaatcagcaaattgtacgaaacccgtgttcgtacacgaaaacatacatatatcataattgttgtcctcaaacatcaaaaacttcattcattcataattaaatgcccgaagaaggacatacattcaagaaagtcaaactatatattagatgcggaagcaataaactaaaaagtagagcccgaagcatacacatgagccggaaaattgtatgcctcatccgtcattatcaaagtcatatctaatagaagacacacatctccctcgcgtaccagtaaaagaaacaccctctgcatccggaactgtacgtgcaacggccaagacatgccggtgtgtgcacatacctccatgaacgttgccagagccgaggaccttcggtgtgaagctggcttatgtgatacatcaccatctcccccactgcatgagctgccgctaatgtgggtgtcatcgcccagaacatatcgctgtctggaagaaagtcgacatggttgccagtacaagttaggaataagccggtcgcgaagcaggcgagagggttggatggagcgacggagttgagtagtgtaatgccgtgggccaccgttaggaagctgcttgcctggcggacaccttcgaggtatatagccaggatcgcacccctttccagcaagaggctgaagtaggccctgaagggagactccggctgcacgaagtgaggccatgtgatgaagtcgtccatcactattgcgtttacgtcacttgcttcgaccaagtggcggagggtctcgatgggagtctgggatacgggcaggtagttgatgaggacggaaatcgggtttggcaattgtattgcaaggtacatctcggttggaggggttgcggggaaagccatgttgttaacaaaggaggtttagaaataatcttgcagttgatgaaagaaggaagttttagaataatgtgagcaaataaattagtgtgtgtgatatcgtttatatagggcctaaatattgagttcatgtacatggctacatttggaggggaacgcattaataaagtgtcattattttaaagttcctcttgtctgacaaatgcaagtgtacattaattgcaaaccgtgtacgtaaagtaaggagatttatgggaaaagatagaggtcattctatgaatagagcttgacagtatgcattaaataaccactccaaaacttgtagatatgtgttattacaagtcaaatcaatcagcattgcatcatcatttactaccatctcgaaagtcgcttctcatatttctagtttcaaaccaactaaaatacgtgtacacagtaatgtatacccgtgtacgtatgtctacccttattacgttctctgactaaaagtttgagttgatgtctgtcgccgaattagggaaaaagattgagttcatgtatatggctaaatctgggggaaacgcgttaaaaaccaaatctctttcttttgcaatttcgttttatctgacaaaagacagtgtacattaattacagggatgtgtacgtatatatgtacattaatttgcgtttcttttttttttttgaaaagatagaggtcattatcaatggctaaatcaagtcagtatgtatttactgataattcgtaagcctgtgtagacaaggcaccattatctaacattaagaaacttgtttctcaatttaatataaaatattacaattatttgtaaccattcataagattgagtagtatatgagaaacaagcaaggatatagataaaaagatattcattactgataagcctatgtacaattgcaaaggccacatattataacataaaaacttagaaattcagataatattacgtaagaaatccctagagaatttgactaattcttctcgcacaccaccagaggtaacatacgttgcacacattcttgaagggtccagatctgatgtaacacagcatcgcgcaaggaggcgtttgaataccacgttcctcagggtacgtaaaggttgcgccgtatgtgttgtttaacctaattccataattttttatttcttctaggagttcctcacacatgtcacgtgtttcttctgattccaaagcttaatggttgtttgcgaacaggcgtaggtacacaccacccatgtgagcattcccgtcgcatatgcacagaatagcgcaggccagggttgcatcggcgtgccttggtacattccgctgtaaaagtacaatggcgcccttaatatcagactcatgggtaactagacgcagtccttcatggtaaatagcaatcgggttaccagcctctagacaccttttgaaaaagggtctatatcgaccttcagcgttgatgtcattcggatcatggcctgccgcatggaagtcatcgggatcactgcacatgctataaatattagcatctttcaagacatccggcctgtagacaatgtttcttccaccacgccctgatcttaacagaggtccgaggtaccaccaacatttgtcagccatttttttggctatcttggctagcaaatcttctggtagatttggtgtagacatttcttggaatttggtgtttcaaaacaatgcaattcctactcttaaataaagaacaatgaagttagttggttaagttatggttgtagttaatgcaatcttacgtaagtgatgatgtagtgagggagggttgtcaaatcaatgtaagtaaagaaatagatatcttattatgagaaaaatcgactttgtgtaaaagacgtacgttatataagatgtacgtacacatgttggtttttgaataagtgtacgatgtgcagattgtttagagaagatagttataacgattacataaatattttgaggatctccataattaattacgttgttctaattaggttgttgaaataaggaaataagtactaggaaataaaaataattcaacatccagggatgattacaataaacgccgattaccacactcgcgcttgccgtgctcgtagatttctgttgcgtacacctgacggtaggtggccatatctgcttcttgaatattcaccaagtctgacgttgggttaccaaacgccagcaagtccaagaacttcattgcgtaaggcccgcaatctcctgtacttgggttttgagcgaccataacatttctctcataggcaaaaggttcaactgagtacttcgcaggcaatacatccgcacatcgctctcactaggtacggcatcatctcgcagacaggctgcatctttgaccatgcaacagactcccgcgtgtgttctatgagagcgtcgtagacaactatattccgggctctgaggtggattgccaacccaacccaatgatcacctttccagttcatcggagcatataccacgtcgacatccttgaaccacctaagactaggttcacggtgtatgtgtattccattggccatgtcgtatagccggtcgccccatttgaacccaagcttatttatacaattcctgaagctgacagcacgcttagtaagctcataaagcaggaaggagtccaaaacaacgcatcggtttgctatcatttgttgaccgttcttgtgccacatcaagattgcgagcatttccaagacctgaaatgataatagcataggcagtcagtgtacgtacaattcaggcatatttaaaaaatgtacacaaatgtactatttcaacttaccatattatccacccactgtccttgtgctataagcatggagaaaaactcgttgtccactttgcgatacccgaaaagagtgtgcttcctgtatatccaatattatagtatgactggttgttatagaaaaccaatgtatcaattaagggataattttgataatgcacgatacttacaaattcggaccacggaggacattggttaagagctctaatttggaagcatcaaccttctccaaggggttgtaagggacatttccagccgctataaccacctctgaatcttcagctcgtccaggaacatcctccacgaggactgttgtttccttaaaaccttccggaagggcttcatccatctcaacaattatttgcttcttcacctttttgggtacaaccggcgtagaaattttaactgctattgcttcgactgcagcatcgttgtttggttcatcctgtaaagaagtattattataaacagcatgattaaacaatttcaaaatgtaatgataatatttactgggaagataatcacaatattttctagtgtaccaactgtcgtgtctgcttcatctaaccctgggtttgaatcctcttgttcttccaccccgtcgacaatcccctgctgctccaacactcccttttcaaattaacgtgcagaattatttaaatgtacgcatacaatcctatgtacgtatgttaataactgtgtataattttaaaaacacgagatttttacttcctttacattagctgcatccacatccatggaggctttcgttgccaactcctgtaacacctgcataatagaagattataaatttaaacaagcctacactattttatttaaaaatatagttagcttacattcctaactactgcaaatggtgaagggggatcccctagggtgccctcaagtactgagtcatccactttactctctgcaactacattgggtacatctcccgcatcaacctgtggcagtagttatcaacttcatcggctatatactctattttgtgatgtctgaaacaatcattacttatacgtacacgggaaataagaaagacaaatgtacgtacacttacaccgggttcctcggtgtattcagcctgagaagatgtatctctatcattatcctcagaaatttctggttgctccccaacatttgcttcactctcaagaccggcaccatgttcttctccctgaaacaaatataccatacacgtcattcagtgagtacacatatggaaatataccatacacgtcattcagtgagtacacatatggaaaactacatttgactattagcagaccatatacctgtccagatgttgcaggtaaacctgatggattttctaccatctctgtgtcagcagttggtttttcatctgtccctcgctgtgtaccaactacgacaggctcaccaccatcaattggtcctttatcctaaaacatagtataccatacacttcttaagctatatgtacgtggagaactgaaaataattgataatggtacacttatggaaaacagtatgtgactattagcacaagacatacctgtacagaggttgaaggtacaggagatggaatttcttccatctctgtgtcagcattagctttttcctcggtccctgactgtgtaccaacaaggacagactcaccaccatcacgtgctccttcatcctgaaacatagtataccatacacttctgaagcctatgtgtacgtacacaactggaaataattgaaaaaaatatttgtacacgacatacctgatgggaaggtgtaggtccaccaactgaaatgttagctactccagtgtcaaccataccttcgtctctgttcgaaaaatctcctccatcatttacagaaaaaccaccttcattgttggcttcatcttgtaccatagcagacaagttacagttattaatcttcatgtacatacatttaaaatactatatataaatgtatgtacatgccatacctagtcatcttcctcagaggaagagttaccatcagaaagctgagtaatctcagcaactaacgtcattatattcttcagccttgaagactttcttgttccagacttgaagactttctttgtagacatctttttagatgcctttgtcacactcatcggtgccttaaccacctatttatttgggccctgtgaagcatgggaagttttggttggttctgtctttttgacctttggaactaaggcagcacgaatctccttacggacaaatttcttcaagtcttcttgcatttatttattttgtgcttcctgcctcttgaaacacctcctaagttcaactacaaacttctcaaactggggatcttcagaacaatcctcagcagtgtcctcattttcttcttccacaacagatttctgttttttcaaagcaggtgcattcggggctggtacatttcttttcctcttcttcacacctacgatagaccagtttaatcattgattggtcttcaagggacaataatcagaaagtataaaaacaacatttacactcacgtatctctccaagttgtggtgggcgctcctgctttggaaatgcagcattacctccaacccattcttcctccttccactcatgaccagctaacaacagtcgctcaatgtaagcaactcttggatcctcaacttcatcatcccatgacagggatggaggacaaatattatcctctggtttcacaagataggttacctcaacctacaccaataagtttgttaaccacttagagaatgtacacttactttttaaataatgtacgtacataaacaattgtacatacctcttcagcagcctcacactccaagatgctggatgtcctgattgcccgcagagaggcaagatgatggatagacctctgagtaaatgtcctgttagcttcatcatcaggtactagcttagcaagggatgggattgtttcgaacgcaaacagctggagtgctaatgggaatccatgtagtgcataagacccatcctttacacaccttatcagtttttgagcatctgaaggggtttggaattttgctatcctctccaaagtacgggtaaaagacacccttccccaagggtatttgcagaagaattgcacgtccttcgtcatctcaacagtgaacttagaaggccttatggggttattatggcaccctatcacaccatctaccaagattataagagataaggccagctgcttccacccatccatggtttcctcctccttcagccagaccaccaaatcattcactgttggattcggcttctccccaaacttctcctcaaacagagttttccagacactttgactaccagctttaacctttagcacatccctcacgtctttcttgttgggatatgtcccacattctagaccagttaccagactaaattctcttaatccgaattttattggatgaccgccgaagaccatccacatctcattcactttactcgtcactaactgacgacatattagtccaagaacaagcttacctgagaaggaagacttgttagcaggtatcctaaaaaggtccccaaatggagactcgagaagaaacttcatctcctcttttcccttaagaacttgcgctatgtcagaaaggtactccggtttggagtacgcgttcatcttcgtcttcacagggtaccggtctagggcaaagagtctaggtggtaactcttcaactataagatcttcagtcggagccacgcttgtactgcctgcaattacaagtgatatacaattaagtacggatgtatgaattcgtgtacgtacacagtaattatcatcattatatactcaacatctgaattttggcggaaacagagatttccaattcaacttctcaaattttcaaactacagatttagcaaaatccggcaacttctatccctttaatcaaacaagctttaagattccgatacacccaaagaaactacaaacggaataatatcggaacttacccaattcctccggcggatttctcggagggagtttcctcctcggggatactctgagttccaccttgtccttctcggggccttcttgcgtatgcttcttcctagagactacgtcgtttggtttattcccagccatctcgaaggttggtatctcgccggatgtttctcaggtcgccttcgccggaaaaactggaactttctcttcgccggttttttgagttcaatgcaatgcctcaaatcaagtagcagacaattcgaacggagatgtcgaaaacgaagatagatgaatgaattccgaactgatttctacttctctctcgaatctctcggagatgtcgaacgaagatgatgaattcttcgttttcttgaattttttttttttttttttcaaaacaaaaagtaactaaaccacgatatgaaactaaaccgtaacgtaactgtgccatttggtttttcgtcaggggcattttcgtcataaaatggaataactgtcaaaacatgagatttgaatctcactttgccaaagggtgagatcaaatctttttttcatgttaaacgtgaaaatttctttaaaagtaaagcatcatagttcaaaagtgttactagatactagtttttcacctttgttctctttttgacaatccttacaacacacaatgtaacagtttattagtctttgtttgtattaattcttaccttaaaggttaaagcctgcaactaaattgttaccagtgg

SEQ ID NO: 5187 - DNA, 36218 bp, Arabidopsis lyrata
  Intron number 3 from transcript 489433 (locus 489433) deri ved from phytozome v7.0 (chr-ID scaffold_6; pos 11601951 t o 11638168 reverse strand)
cttattcttgaatattctcccgatatacatataatcttccgacttctttaaattcatgtttgccttgtctccggtaactgccactgcgttgtccttgaacggagtcgcgtcacctaaaaatatcgggtcgtcctacggaacttcacacactgcattatacctacacctggggggcatcatttgatttccaatgtccatcaaagccaaagctccctcttctggtctcgtactgtccccatcttctacacctatattatacccacttgggacatacttcgattttcgaggtgtctttcatctactagttttgatcccccagaactctcattacctacatcttcagcaactacattattccgtcctcgcagcgataacctactacatcttctaggttgttgtcgattagtacacctttcatcagctaaacttccttcagtcgagttgattatcgggaacaccaggcttgttactccatagtcgatcatttaagttggtcttcttgacgacccactatcatcgtccgcatccccaacactaccatctggtgcatgcctaaccctaatgatcccgctcggggacaactgtctttcgacttcgatgtctgtgttttcctgcgttatcgtttcgcatgcaatatatctcctcaccgaggacacaactcactgcgccaattctaaggacaacaatgactcgttatctggttcatcttccgcgtctgtcccccgctcttcttcgctggccatctctgcaccatttgtttctcctacttcggtgtttagtaatgactgcgccaactgttcatagctaaacattacagcatcatcaggtctacactcctcaacttcccgataatcacatgtacgtgttcttgctatcggggacagcctgagatttgcaccgactattgatgaactcgtctcctgcgttgtagtcttgttaccacccgaggtgaccgctacatcgtcttctcctctaacttcagcatcgccactagcggaccaactcttgactctcttagggttgtaaggatcccagtccgtcgggtagtctctatcgatcatgtctctcattttatcaaaatcataatcttctgagatctcacaactcaccaacgtttccccagaattagccccaaactcctccaaataatccgatcctcgaccttttttcacattaatagccttgtatacttgctctatctcatccacttctgctaggaaatctacctcttcatacgtatatggaagacagtgacttcctaagtcttgtccccccatagcctggaaacttcctctgtgacctgtctccgcgattgctacagctcttaacacgttctcatcgaaagcgctgagttcactctgtcctccgcgatctggcatgtcgtcctcgtcttcatcaacacttacgtacatgttcatgctccctttctttagacgaatttttttgaattttgtcaacgaactctcgctgtccacagaaacagctgagttccattttcgtctttttcttatctatcccatacactttcgcgattttatcttccactccctcaaacttgtcttcgtcttctacatcaacacattttgcaaagtaccgatctgacatacgaaaccgccacataccaccctccagacatttccaatttccgaccagcatcatcacagatttgtccatcctaacctgtccccaaaataatgcaaaaaccaacattagttcaaatttacaatagactatttataccttctggtttcccactatttactgcaattgcatttatgtagctactcaagaagaaattttgtacctctgtaaactttcagtccttcgccttaaatgtccctcagcctccaccactccttcgcgttaaatgtcgcccaccagaaactctctcaagaacactccataaaccaatcaatttttagagctctttttccccaaatccttccccatcacgtccccatttaatgttattatcttccttattattacctcaattattttgttattaactataataaaactaatcatcactttcatttaatgcagcagacctgctccccggttcccaacaagcgactcctggcgactcctgtagctccttccacactcctgacgcatgcagaagggtaaactcgtccgtcctctaccacgctaccaaagacatgtggtatgaatgctaaatcgttttgcaatgtggtacattttctaggattttcgaaaattgtggcacatttgccaaatctctataacttatctagaaacttaacattttatattgtgaaacaaatttttttttctaaaacatcttatattataaaacggaagaagtatcatttacactctttttatataaaaaagctattccttattgttccacaaacctgtttttattgagaacttttgtctttgtggaaaaacaattattgcactactaattttttaataaaattttgaaatttcatcaaataaatatgtgtatgaaatggtagtttcaacaagtggttttataactaaagttcatcatgaggttcaacagaaaatatcaatttgaaataagagataattggctaggagacaaagattttgagtctaattagtttttcataaaatcttgtcgtagtacataacatagaagacattagcccctttttttttttgccaaaaatagccttacgtgtgtttccattcgatatgatccggtttaatacatgagacatcaatatgttgtgcatgaatatccaaaaatctttatagatctatgtatatatcttacatgtaatcttcctcgtgtgccgctatcgttcatattgagccaggatcgaacagagcaccgcactgtaatagcaacactttaaattcaacacaattagtgttgctattatgatgaatcttcgtaagttctgtgacaatttaacaaaaactgatgaaaatgcaatgacagttcgacgaaaatctgtgaagatccggtgataattcaaagaaatccggtaaaaactcgacgaaaaccgctaaaaatccatcgaaaatttgacaaaatttatgattccaatgatatttcaatgtccaattataacgcatcattcacttgctccgttcagcggtttgggatacagtagttataattatgtttgtagcatgcatacaagtataataatgttaataacgttctatatacgttttttttttgtaatatcttgctctatatacgtgtttacatatatacaaatgttataacgctcaatatatgtgtttacatgcatacaaatgttaataatgattcatgtacatgtttatatatatacaaatattaataacgttctatatatgtatacatagatccaataatttaacactataattatttttaacgctctatacatgtattttacatgtatacaaacgttaaaatcgtctaatatatatttgtagcgtgctaaaaattttccattttgacaaaaaaacaacaattaatgttagtctgtccgttattaaatgtttggttatagtagatacccctcaattttttttgtctcatataaacgttatatcatctgattaaataccgctttattcctttttgccaaaaaagtcaagggtgctatcccacacgcataagcgtgtaagcaactggtattttgtaaattttttgaaaccgagggccattgatagcgatctattttttttcgtctgagacaaatcaacttttttcgattcgctaatttgatgctctatttttgtctccgcccaatcgacctttaaaataattgatgctcaatttgatatcagcataataataatggtcaattgtaatatcgatgtgatgtcacttgtcaaacaccatcttttgtctacatgcatgtaaattttggttttcactatcctgattttgctttgtcccaaaatgattaattaatttcacactttccgtatctcgataaattatagttgaatgtaaaaataaattgtctcaatatacaagcaaccttaatggcatcccatttttcattgcaaagattttcaataaaatgcaacgaattgtatcatttttaataatagtattagaagccgataacttaataatatgggttttgacggcaaaaaaaaagtgaaaaaaaaaataatagttctagaaggacgacaaaaaaaaaagtaggaaaaaggtaaggaaactttagtcaataaagatgtatattccttaaaaaattaataaatacacttctctgtatattggtacgtctgacgataagtaaaaaaactgtaaaaagtaaaaacagagcattgaagatatttttgtccaaatcaatttggtttgttttcaatttgatcgattgtttggtttagttcttttaattctgtacagattgtgagattgttactcaaactggaaagaaggtttgtatgttgatttggggttgagtttaagattagttcaatcgaaagaactaaaccgagtcaaacttttattaattggtttcaatttgtcaatgtaactaattttggtaataattgaacaaaaaaaaaaaggatgatacaataccaaatgtaactgtttataaattaaaaattgtttttaatttttacttgaagatgatttgctgtatcttttccgtggattaactataacgcatcgtcttataacgcatgaagagccagcaggattactcagacaaaagtttaaaaaaaaaaaaaaaaaaaaagagaagaatctttttgtgacttcagaagacgaagaagatacaaagcgtggcggctctaaactcaaaattcctcctcccaaattcccaaattaccctctcttttatttttctaataccctaaataatgagttcttgattccaaagagtcgtccattgggtttctcgtaaaccagagagatactcattaggaagaaaatcagacaaggagaaactctttttgtcatctcttgtttgttggtgagtcttgtgttgactataatccgaccaattttgatctttgtttgacttctgatcaacttctcaacttcgtaagctttctctgattctctgtctctgttcttgcctcttggagaataaaatcatatgtcgatcattacggttctttattctcttttaatatattgcatgcaatgatgaaaaattaaaagtgattattcggatgataatcattacagatatcaaaaaaaaaaaaagattgagaagaacagagaaaaataaatcgttgactatattagattcaagaatcatgttgcattatgatccttgttcttaaagattgatatttttgagtaacaaaactcgaatttcctctgtaaaaattgcttcaagttagctctagaattcacaattttgtctaatgtttataatcgaatttgataaattggtttttaggcgttgaccatatcagattatgtaaatcacattgaattagtattgttgttcttaaagattgttacttttgaggaatcagattgatttatatgatttggttgatcataaatattgatacttttgagtttaacaggtaattgcagggcttgaagatgaggcgtgagtgtccatggctatggaaagtcgaaagcagacggcttctatggctattgggactcacatttgctctcattgttacctttcaatacatcgagctaccttacgctatctcatccatattttcttccaccaagattcccatttcaagaaactcaacttcacttataggtgactcgacttccgctatggcgccgagtcccctgggagatgatgaagaagttgaggttgatcagattttcgatagtaccgtgaattcctctgcccccgccatttcgcctattaccgctacattaccgcctttactgcctgctcctagtgcaaagtctccggctgcattacctggtttaaacccgtctttagtaaaggaaaatgcaacctcgcctgctcctagtgcaaagcccccagctgcattacctggtttaaacccgtctctggtaaatgcaaccgcgcctgctcctagtgtagaggccccagctgcattacctgatttaaatccgtctttggtaaaggaaaatgcaaccgcgcctgtggctagtgcaaaggccccggttgcattacctggtataaacccgtctccggtaaaggaaaacgtaacattgcctaccactagcaaggtaccggaaaggaatccaactaagaaaaatgttggtgatgcttcttctattgtcagatttgttcctgatgtaaaagagaacgcgaaaatgcctgcttccggggtgatgtcaatatccgatatgagcaagcagttgcgtcaaaaccgtatttctcataatcgtctagcaaaggttcatcaagatcttgatataatacatccttacttaagaagtaacaatagtataacatgtttctttttctcttttcagaaaccaaaatgggttactaaacctgacttagagcttttacaagcaaaatatgatatcgagaatgcaccgatcgatgacaaagatcctctcctatacgctcctctttatcgcaatgtttccatgttcaaaaggtgagtcggtttttttttacttgaaaactgcatcaaagatcatattctaatgatactaatttgagttgacattgaattctctaggagctatgagttgatggagaaaattttaaaggtttatgcttacaaagaaggaaacaaaccaataatgcatagtccaatacttagagggatttatgcatcagaaggctggtttatgaacattattgaatccaacaacaacaaatttgtcacaaaggaccctgcaaaagctcatcttttctatctacccttcagttcccggatgcttgaggtgactctatatgttcaggactcccacagtcaccgcaatcttattaagtatctaaaagactatatagacttcatttctgctaaataccctttttggaatcgaacttccggtgccgatcattttcttgccgcctgccacgattgggtaatgccttctactcttttccatgaggatattttgtgacatttctatatgaagttataaagatgtgattattgagaacattttttctgataaattatggtcttttgtgacatatttctttgaggttataaggttggatttttgaggtcattttctgataaatgtgtggtctttcatgacattttcaggctccatcggagacgcggacgcatatggcgaagagtataagggcgttgtgcaactcggatgtcaaagaaggctttgtctttggaaaggacacatctttaccagaaacttacgttagagatcccaaaaaacccttaagtaacatgggtggaaagtccgcgaaccaaaggccgatacttgctttcttcgctgggaaacccaaccacgggtacctcaggccaatccttctctcctactggggtaacaacaaagatcccgacttgaaaatattcggtaaacttccgcggactaaaggaaacaagaactaccttcagttcatgaagacgagcaagtactgcatttgcgccaaaggctttgaagtgaacagcccgagagtggtagaggccattttctatgattgtgttccggtcatcatatctgataactttgtcccgccctttttcgaggttttgaactgggaatcatttgcgatttttataccggagaaagatatcccgaatttgaagaagattctcatgtcgataccagaacgccggtaccggtcaatgcaaatgagagtgaagaaagtgcagaagcattttctgtggcatgcaaagccagagaagtatgatatgttccatatgattcttcattcgatttggtataaccgagttttccaaatttctgtttaaaaattttgtccaacaattcaatgtacatttcttacagataaaatttctgagtaaactcaatttacaaaaaaactatatcacaaaaccaagtggccacaattttattcgatcagtaaatctagtagtagtagaatgttttcacttattacaatgatacagtgtatagtttgatttcaatcagtaacaaaacagaagcatgtgagaaacaagaagcagaattgaagctgccatgttcagaaaaccaatcttagtctctagaatttctctggaattatcttaaccttttggaaaattattcaacaccgaagaggacaataaatggagatggtgatgtttgacgtaactggagacatgtttctttttcatatgtttcgtctgtctcttacattaaccttatcatttctaacttttcagtattttcttggccaaaaaaaaaaaaaaaacctttcaacgtttttaacttttcaccaaacatatattatataaataataaataatagggtgcgaatataatttgtttaacttttgactgattgtttctactacttctatgtctgaaatatatttagataatttaatgttttgtccaaaaaaaaacagataatttaatgttattatctctgaaaatgtactgcattatcctcttcagcctataaaaagtagaatctcgaactggcatggaagtgtttgtctcctggtggtctgaaaatcatgattaaatatttacggcattaccattttactcaatatcgtattttaaaatttcaataacatctaatctaatctagatgtgggagagaaaatttttagttatgcttggattttgtggttcatcgggaaagatgggaataaaaaggttttcaagagattacaatctgaacccagagatattttaaatcatgctttgagtgaaaaattaatgtgggaagaagctcagttgcatccgatctaaactagttctactacggaaactttggaacgaccggttcaatctataagatgtcggattgatggttcttggaaaaattcagatccaacaatgggtataggatggtggtgttttcaaggaaatgatcaaacgttattgctcggtgcaaagtaccttcggaggtgtccctcccctcttcactcggagatggaagctttaatttaggctatgaaaaatatcctttcaagagggatcgattgtcaggtgtttgaatcagactgctcggagttagtctcgatgatacagtcaccggatgaatggcctgctttctccaatcttctagacgagtttggttttctccgtgtctctttccctttcttttcgctttctcttatttctcgtttatgtaatgttcaagcggactgcttagcccgttcttctagacttttattttctgaagttacttttgtaaactctactcctcctaattaggcaaccaatcaaagaattatttattaatcaatgtgtagttgacaaaaaaaaaaaaaaaattcaataacattatttatcaaaagtttcggcattttgcaggtattcattcttgagtagcacaaaaaatatggaaacatcgtcgtttttgaggatatcatatacacaaccattttaatgtggaacatcatcaccaaatggaaagccttaattatgtttcttgaatcaaaactctcttactccatcaaaaccctaaactctaaatcgttataacttggtgggattgtagatccatataacccaaaattagtttcattccaacattgttattgtatagatacactgaaagttgaattctaatagataacaattatgacatacgcaatattagaactgtaaatggaaaaacaaaaaaattcaaatcatcattgcatgctgaatttcaaacactactttagacactacaatcaatatgatgtgtgtaatgctaattggttatatattgtgaaagactaaaaaggtgatgctctgtcgttatcgctttttttctagaatcaaccatagcgacatcatataagagaaaacaaaaaaaaccacatttatatccccacttgttataattttgaaaagcaaaataatttcaagatttagacactggtggtccaatttcaataattttgtagaaatataaatgaaactgctcactgattataacccaacccgtcggcaatagttttgagtgtgtgtgttctgccccgaactgtaaaaattattgcaatagttagattgttgttaaaaaaaatggtgatgaaaaaaagataatgcataagattccaaaataaaaagattaatagcaccaaataatgcattttatcgtacatggtttttaataataggacattatataatccgatgtcacgttatttcgcttaggcactaaatggtaacatcaaaaatatattcagctgaattcagccagattcagcaattccctagtcaccatttgcataaaactaaattcagttcaattcagccagattcagcaattttttcaacactaacagatatgtagatatatttatttctggtaaaaattcagataataaagaatacacaactcgaattaaaatattttatatatgagaaattacaaatcaaatttatattttaaaataagtcgtactatatagatacaaatacgatattgaatcattcagacacataaaattactaccagaatagacaagagacaaatttatgttcgaatattatagatatttttggataattttaataactttaagctaatctaaaataaatttttaaaattcgcaaaaacaactcatacatatgctaaaataattttttaaaaatcaaagttttgataattctattaatcattctcgtcatattattgattaaactactagatgacaataaaaaatatagataatctttattttattatcatgttaatttttgaaattaatttttcaataatgttttgacaaaaatttcattaataatctctacatttttaacagttcaaaaactaaataggataaaataatggagtttttgcaaaaatgtcattttttcaatgccacttttcaaaaatacccctttttaaaaccttataaaaaatactcttaaaaatataagatttacccaaatatgtatgtaatattattaaaacatacacaaactacatttctatgtatctaaaatcttataaatactttataaataccttataaatccattttaaatacctttaaaaacctttaaaatatcttgtaaaacttttgaaaaaccttaaaaatcttttaaaataacttgtaaaaccttttaaagcaccttataaaaccttataaatacttggatcgagtcttcaagtagtagttacaatccataagtaccttataaacctaataaaactttataaaaatttcagatttaaaaaggggcatttttaaaaatggacatctaaaaggggcatttttgaaaaggggtacaccaaaagaggtatttttaacaatttcaattttgctaaccaatatattatttatattagtattagttttagataattttagtatttatttattaatataagagttacttagacaattagataattttatctattttatttagatatttcttagttattctattgattaagattcataattatttgacgatatttttcagtttaagtcttaactattttgacagattttaccaaaaatcacaaaaacaaaattcagctagattcagcagttaccatttagaaatgtaaaaattcagctagattcagctaaaaatcactaaaaattcagccagattcctcggttaccatttagacccttagtatcaattttttttccacaaatctttttcaaaaaaaaaatcaattttttttccaaaaacatgcgcgataaattatactgtttattgacggaaatatatcatgagtttttggccaattatcatccctcaaatagtcatgcaccattaccaaaatcatccaaaattttttttacaaaaacaattcatgaaaatgttctgaatacacattcttttattgttcaacaagattttatatatattgctactttctatcgaaaaaggatctaggttcaaaagacgtcacagataaaaaaattgccgctataaaagttaagcggaaaccataaaacttgtagataataggataaatagaagcaatcctaacaatcaaaccataaacgttatcgcggaatctttaaactttgataagaataaaaaaaaagaggtaaaccaatgcattgaaaaacaaagaacacctatagtgatctattattcgtgattaacattaatcgaagcttagaggtcgccagttcgagtgacgtttgagacgaaactaatattacatactgtggtttcgggtctggggagattacggattttggcctagaacctcctggtattcaaaaaaaaaaaaaaaaagtagggtataattaacagtcctaagttcgactaatgtagttcttgcaagaaccttgataaaattgggaaattggtcactacaaaccttgataaaattttgtttggattagaatggtctcttgttcgtaaatagtagacaattttcaaattcgtttcgtacattctgtttattcattcagattaattcaagttataaattgacaaaaacataaacaaatatctcttccatttattatatgaatcatcgacaaaaaaaaataacatgggtcggtgaattcctgtagaatatcttcgaataacactgtagcatttgcaataattgagttgaaactgttacatgcataaatatgtatgagtgggtccaaaacgacaaccatacgcgcgtttcgttgactaccttatactctcttaggaagaaaatcaaaaatctttatggtcatgtcctacatttccagatgtctcatggaccactacttttttccatttaaatcatatttttgttccaatgtttttcgctatcctttttttttttctcgtcgacacataaaatgtctttttctgccgtcgacacaaaaaatgcctttttctcttttctttataaactcattcttctttcacgtctttttccgtaatttttgttcttattattaaatattatcaggattatactattatcttgttaaaggaacaattacaaacaaaaaaagaatccaatatatagcctcactcaaaagaacgacaaacttttaagatgttatttgaaacttatagaaattaatgacttcataaaccaaatgaacaatgaaaattatgatatacaactattttagttctgagttacaccactttattatgcattttaagataattcctttaaaatgaaaataggcaatgtcaaagtgtatttgacatcgcattcgaacatttgtttgaatactaaaatatgccaatatccatgcgtcctttgtgaaataacgatgtctagacaagacattaccgcttaattgttcatacaaattcgttttcacaatttccaaatacatatatgttgaattcgtgcaaactgaacagaaaattggattgagaggacgtaaacgtacggtaaccttgtcaaatattctctaatacgtttccaacaactataaaacattcttcttcttttctaaccaaaccattatagattgttgtcaagaaatagtttcttcttcaaacaatattagtcgccgaacactaaaatccgtgttgtgaaaaatgtgagtagatagatatagaaaatctaacgcaaaaacataaatttacgtagttcacccaacaaagtttgttggttacgttcattggtaaatgagatcaattttattactaggaacgtattacggaatttcataatacaatgtagattagagtaaatacaaatatttatagaaattttctaatctaaaactgcggttcatatagataatagcgaggctcttgtaagtgttttctatatatatagaccgcaatctcagtttaaactttttgcttgaactccttacgtgtgacattgatattgatttgtaccagattcaagcttatcaaaaatcagtaatcatgtaaacatttgagaaaatcaaattttaatatcacgatctaagtttatattgttgattcttttaattataagatcatctaataatggacaatcgttcctttccttttctctcttttctctcctctgttttagatctagggttttctcgagtcgcagccgccgtagctttatgttcttcatcgccggtggctgggtcagggtttgaagcggtggtgggcgccttcttctccggtgatgtgtggtgtggttggatcctctgctcgatgcaagttggtggctcttcttctcggctgcttggaggtgcggttcctgcgttctgctggtcaaggacgctggcggttctgggactgtctctctcggctcggtggcttcagagatgtagctctggcttgcggcggaagttgggctttggattggtgggtttcatcactttgcgaagagattaacggtagatctttggcaggatcttagatggctagatgcgggtttctttggccggatctgtgtggtttgtggatagtttgagcctcttccatctgccgccgccgtgtttggctttctcttcgccggatctgaagttcggtttgctcgggttggttcgagggtgcttgacggaggaggtaagggttagatttgtgttctctcttcttgctaggtaggggagaagagaggagaggtctcggttgtggcagatctacctttccgagaggaatgttccggttgtggcgtgtttccggcgatggcttgaggcaagaaccgctaactccggctgattgcttgtcgtcgaatactctgttgctatggagtcgtccttgttagcgtcggtcttctaggttagatttcgtgttttccggtgtaccgtccggatcagatcttctttttccgtcaatcttcgatttgggcttttcctattttgtatccgtgtaatttcgctggcccaaaagccaaagcccagtttgggatgaatttaatatatataaaaagtaatttaaaaaaaaaaaaaaaaaaaaaaaaaaaaaaaaaaaaaaaaaaaagatcatctaataataaaagaaaattctgttaatactctatacttttagcgccgaaacataagactatgccatatatacccatacgttttattacttcattaaaaaaatagagcttcgtctctccagagaacaaagtggcctgcttcaattttggtttggtaaaagcagacatgattaactgtttggggggaatgggctatattttttacaaaatcatgaaaagattctatgaattaaaacaaaatatttgcttacgatttaaggtgaggttaatttttttttttatcaacaaggtgaggttgatttataaacactttttcttacccattcgaaaattatttgcttatgtttcaaagttatgtataatttatctgattactatgtgtgttaccaatcggatccatattattattagtaaattattattatcaatattcaatacacatgacccttttcctttatggtgaagtgacaagtacaaattatttagtggccatagtgccggcctgattgtggaataagatgatcaagatgatattatttgttattgattactattaaaatttgttggatggactacttttggccacaatctgaaaatgaaataattgaagaaatactttagttaatgtactataaactaaaattagtaagaaaaataaacaaagtgaatgctaaataaacaaaacaatttccattaatttcttttttgataaagagattttgctatctttagtttctcatttttcattaattcagtgttcaataatttgttcgtaccacttcaacgtatttaatgcatccatactaataatcacactaaccgctctattacaattgccgttaaacttcattcttaaccaatctatagactattggtcaaatgatccagttagtcaccaagtaatccaactactaaatatatttttttggctaatcgattattttttattaaaaaaaaaaaaccatgataaagtaaattggtctttttctctccgttggtagaattcgaacccatgatctaatcttaatcactctcaaaatttctccaaaatcaactgatagagctatcgtagaggactaaattgctttgtataaagataatatcaatgaacaaacaaaaaaactaatttcttatagaaaaacatgttgcattttatctttggtagctaaacctaattcgaactcaagaatgtaggtagctacaaaactaagatgttttaaattctcttcatccatgtatagaattaactatagtgtggtgatctttcggggagaagtccactctgaagcacttcggtgcgtttctaccggagctaaccggatcagccgatagagtttatataaaacaaaaaaaaatcataaaatagctaaacattattaatctgaacattattaattatattcttagaatctgaacatttatatcccttgtttttttccatcaaaaatagactttttctctcacaagtcacacccacctaccgtgatggtttagtttattatatactttgaccaactttagcgttggacaactaataatttcggttgtgatcgatcgacccctaaatattaccactgccaaaccatgcattgtgatttattgatcatataattataagattcaacgatattaagctctattttcaaatatataatacaaaactatcaaataacataaaataataacatcgactagtcatcgttaagtcggcgtaatcgcaagttggccatccagcaaatgagtagcgactagcaccttttagaagtttgatcgccacaaccatatcaatcaatctttagtctataatagaatatttataccaattttaaatgcatgtatggatatcgaacatgcggttaaggaacgcaaaacgtcgatcgttgctgctacttgaattagtatatatgttcatacccaaatttgtaaccaactttgtcttatatcatcaattatttaatttgtgcttgttatttccctagaatttgtctttaatttgtatatttatgtaagactaattccaaaacatataaaaattatatagaataaattataaaatatatagggataaacaaagaattatgggtttgtccaaaaaaaaaaaaaaaatagctttgcttgttgaaatagcgatggcgccgtcttgagaccaaagggtaagacattccattgaagatgtctatttggaaggtaaaacgcagttttgtatctttcttcagaatgaacgccgagttgccaaaatcctgactttagatcaaacttcgaaaatatttttgcaccttggagatgttggagaagcgctcttttatttggtagtggaaacttgacgtcttgcagatattggtttagcggcttgtagtcaataactaatctgagtttttctcttgcttgttctgcacgattattaacgtagaacgctttgcatgcccatggagaatttgttcttgagatgataccttgatccatcaattgattgcattcttcatttgccttctgcaacaatgttggaggcattcctgcatggcttgcctttgttggtgttgtgtgtacatcttccttgaattgtaaggatacgaagaagcttgagtttaactatagcggatgattacacttttgaaggaactccgtgtgtgaatcagcacatgatgtcatctttaattcttcttcaattttgttgaattctgcagatactgagtcttcgattgagaacaagcgatgcatcgtggtaaaagccttgtagagatttttccatctcacacctcttggttctagagaaataccgaatttctttttcagtaccgaataagtatcccacccaaggattaagtctttaccaggtgcagatgaacctagtacttccttagtaacttgacatccagggaaaagctcgattgtgattggttttgatttcagcttaaccgttagggatccagcattcgcgactctaaaatcttgttgatgaggcatccacatggttcgtgagagaatctttggatttatgattgttgtatgagctcttgtgtcgaagaatgcgattgcatgcactggctcttctcttttggaaggatcaaagatggttactggtagatgtggtgtctgaagttcatcttcttgaggcatctgggtaatcttgaaacaacaatcatctttttcatcttcggatgaggattctgaagattcatcataatctgaataactgcatatagcatcattctcgtcactatcgtaagatagtattgactcaagatcgtggttatcgatatcaagatctggagctatcttggatatcgaatgaatgagatattgtttcttctttttagacttgtttggacagtcttttgcaaaatgcccagtctttctgcatagaaaacatctcgaagttttcttgaagcttttcttcttcctaaagaatcgcttgcgtttagtcttgttgaaatatttcgacttcaagaatgatttcttggatcttcttcggtcttttcgtcgatcttcacatgaacattttttctttttcgaacatttgatgttcagatccgggcgagcacatatcttcgaaagatgctttgacttgtccatgaattctgaccaaaactccttttgcttacaaagcttgtcaagggttctgaacacgtgctgctggatttgtccaatcgagatttcttcgattgtctgcccttgatctctgatatacagctttgtttgttgacttaggtaatcgtctatggatgagagatacacttgcttcaggcttggattgtttagaccattgagagcataataccttcgagtttgtcgctcgaaatgctttgctaaatctctcttcttcaatgaacaacaccttgctgtgtagaactcttcttgtagttgttcttttagatgacttggggtgccaacgaattctctatgtatttctccaagaagtagaggtatcgttgtctgatacacctgctgctgccgatattctccaagcgaattccaccattcttttaatgcgcctgaaagtctcgatgtgaattgttgtatcaccatttctgttggggaagtgattgcttcggaggtcatccacgcatgaaattcgtcaagacgactattccatttttcaaaatgaatgtcatcgaatgtgaacaccattatctttgatgcaaattgcttctttggtacgccttgaggttcatagcccatctcctcgtcacttgaaatttcttcatagattggctcttcttttggaatatgtgactcatctcctattgcaaactgatttggaagagattcatctgtttctgattcattgacagaagaggttgaatccgaaagagctgaaatgtgagtcattgtaacaattggtagcgactgctgctcttttgattgaacttgcaattcttgtctttcgtcatcagatgttttcacaagattgtctagtaaactagacatcaaaaactcgatcatcgcaatttctttttcttttgcaacatcctctttcttttcatcttgagcggactcatggcttgataaagatgtgaaatttggcttcttggatggattgatgtgaaactcagaatccttttgacgccttggattagatcttgccacctttgttctgaaattgctggttgaagttgtaccaaaccgagatgtaaaggcttcatcagaggataagaatccaggtacatgctgttttggttttggatcttgatatccagacagaaatcctggagaatatgattcttgatatgtgggtaatccagatgacatatagtcaaaaggattatacacattaactcgcctctgattctagactagactttctaggctcctttgaagatctttgagttgatatttaagattggtttgttcagcttctttacttctgaactgagatgtattaactttcatctgtttcgccatagacatcatttccaggtgcaagttgctgagtttctgttgaatctctgatatggctccttgtagactgttgaatcttctattgttgttctccgacatttgatcaatcttgtggctaatggatgacagtaattgattctgaacaaaggcattttctgtttgccagttgagaaccttctctgcttggcttaattcgtcgggtccagaggagttgatgttgttcggaacaatttttggtgtatgcacaatattgtccttgacaaagtcttttggtggaggaaaatccatccttatcatcatgagttgctggtttgagtcatccttctttgttgaatactcgactatgaagtcgtagttgtcgtcaccaagtggacctactgtaggatctccttcaaggtagcgtttataaagtggatccttcttttttctccgtcttcttcgcttttcatcatctgattcataagaatcttccaaacatgcggtgcatgagcagacatcgaagtaacaatgtccgttctcatctttgaatggatatacaacagttccattctgaccaaaagcgattggttgaagatctttctttttgacgggatcatagaactcttgctcctcaatttggatagtgaattgagtaaagagtttcttttgaaaagacgatctaggcttttcgaactttatctcagtggttccatcgcttctagagtgaaagcttacgtcagatgactggatcggtgcttgagatgcttgatgtatcttctcatagcttgttacccatgactctggcagttttcgtagcaattcttctcgagatatctgtcttgtttatcttcttctgaactgcttggtcttcctttgttgaacttcaccatgtaatactgtaaatcttcatcaagttgcatctgatagtcgaccggataatgaacccagttgggtatgaacggaaaaattgaataagttcacattttacattattcacaaaaccaattattcacaaaaccaaccactgccgtgaatttagtttagaggtttgatttcacatgtgtgaaaagggggttatcctaccaacgttgtgttggtctagtggtaaatcttccaggtggagatactgggttcgacgcccgttgggagtaatcttttcggacttgaaacttccagatattcaaaaaaaaaaaaaaaggggttatcctaaactgttctaacgtttaagtctaaccctcttctttgatacaaattattggtaacatgataaaaattttagtgtgtggatgttctataatttattattgatccgattggtaacaaaatttttacaaaaattttaacggtaaatttttacggaataatgtaaaactttaaaaaagattgatataaaagttgtacaaaaaaactttgagtattgcttttggtaatgcttttaatattgcttttgtaattgataattatcaaagcggtacatcatgtaccacatcggtacatagttaccaatcaaaaccattatttcattatttacacatggatgttgctagtattctaaaaacagaccatctagatgcaaaacggccatatgccttctgaatcatacggttttttgttaatatgtggtctcaagtcttaaccgttgaaaattatcgtttatttatttattgatgtagtttttaatttataattacataagattaaatttcaagttctagatttatcaaaattctaaattcttagcgcttaacgatttttaaaaaatagatatttaataccaaaatcgattgcaaagattgttaaaattcaatttgcccaaaaaaaaaaaagattgttaaaattcatagatactctcaaccattgactacaattacattaacaattatttacaatttttgggcccacatcattacaatgcaataaatgtctaagaattatagaaaatttctctctgtggaaataaaaggatgcaaggatctcttggataaaaacgtgcatgcagaaatccttaagaaagttgagactttgcagcttaacaatctcgaatataacttttctacttaaattcatcagaatcctctgtattgtatacctatagaggaacctcataagcgtatgaatatatatattttttttttcaaaatgcgtatgaatatatataaacacacatgctagaccaaaaaaaagtatttgaattttatagttgacaaaaaatatatttaattttatacatagataatgtttctgtagtgacaagcatgatgatgtatcgagatcacgataagggatagttgaacagtaaatttgagatgaaaacttaaaataaataaaaacagttgacacaccattttctccccgaagaagaaaattcataaaatctaataaaaagtcacgatcatgtattaaaataaaagtttattatgtcggctctacaccaaaatagtttatctcgtcaagttgtcttgattcttgaattctaaagggaacttttatttatttatatattatattcattctaaagagaactttgatgaaatttgcttttaggaaacacgatagatcattgatttcacattagatcctaatcttctacataattgcattagttcttgaccttatttttctttagtttcaaaatcataatataacctcttaaaaataaaaccattttagcttagttctgagatagcagaataatatattattttttttatcaaactgataattttcattgaaattaaatctcaaattcactcaaaagaggaagaaatacaatccagtaaaagataaatataagataacaaagcaaaaaatactttaaaatattctaaaaaaataaactaaagataaatacaagatacaattttataaaggaagccaaaagagatcgaaacaggacgatcccaaagactccacgagagagtgtatccagtgcaacccgaagggttacaaactccgcaacaagggcagaggaagctctaacaacctggaaaaagatctttttaataccgacgacgcttgatcatccaaaccactccaaataagagagacttttgagaagacaaagaggcaatgggtgccaagatgaggaagcatagccctaaacagagacttatctcaggggcggatctaccttaattaaaacgggggcagttgtcacccctaattttttgaaacctttgaagagttttaaggaattaatttaattgcccccctataaaaaatccatcttgcctcccttaaatttttgttttccaattaaccaaattgacgttaccgaaaaaaaaggtaaatgaatattagttatctctttacccctttaatttatctaattagttacaaatttaaatctaaatagaaataacaacattatctaaatgcatagaccataatatttcttttcttttgtatcaagtaaaaaattaatgtttaaaaaatttgtctcttcccataactttgacggttcataattatgataactggtttctttatattttttatgtgttgttttccaaatatttgagttttctataaaaaaaaacttaactaaaaaacaaaaaatctagtaaatataaattttaaatcaaactaaatattttaattcaaaatctctaagttttaaacattactctttgatttatttaaactcaaatgatttttaaaagaaatattgtatccattttacttttcttatatagtataataaattttatatatcataaataacaaagcaaaaaatatattcaatattttatatttaatattcttatatatatatatatatatatattattttttttacataagatataaatattgatcgccccctctaaatttttgttctagatccgccactgacttctctacacttcccaaattacatcaacaaaaacatagatgtcaatgctaaagatccggacaaaacctttggtaacataacatatttgaacaagtctaacagagacctgatcaatacaaagtaaaacagaatcaccattaatagattagtgatgtagtttgtccttctcatatttttaacaaaataataacatattacatatatatatagatgatgattaatgaataatgtattttttttgtttacagtttgatgtttcgaaaacgtgtttctactagtatatttcactattaataacataataacattttcatgtttggtcgaccaaaaagttttcatgttttcgaaaattgatgatgtacaatgtgtttgaaatataactagagaaaaacgaaaccttattaatatacaaaaacatatcttatagcttttattataattttggatactctactaattaatgagagttcttactgtttgatcattgggttgttccactatcctattattcatacgacatacaaagtcatatttatagggttaggataagttaccataatgtggaataacttacaataaacgtgaaaacttgtggattgttgtcacaatcacaactatttattatctttagatctcacacaaattttgttctgtcaagtgaatgtatccaacgtcaaattggcaaaagccagctagctataaacaaccaaaaaaaaaaaaaatacctctcaataaaaatagggtcatcaaaacacaagcaaatatggacttatgttgttgtcatgataaataaaaatatgtacgggtctttttaagagcatcaaatcaatttagcccgtgggtccttttttcttttacttactaaagacttagtgaaatatttgtcccatatctccctttacccctaccacaccccacctccaccctcaaactattgttgcatataaataaggaagtgattgataaatgtagagacaaatacccatcaaactctgtctctcactttccttcattattaactcattccccaaaataattcatttatcatatccccaaactttttttctacaccgcaaaatccaaaaaaacacaagggttaagtgtggcattgatgtttttggtataaagctcttcttaaagtaagatcaccaatgatagcttcagagagtacttccaagacctcggaaactaactcagtaagtcaagagagcaaagaagagaagaagataccggttaaagataccggtaagcacccggtttaccggggagtccgaaagaggaactggggaaaatgggtgtcggagatacgcgaaccgaggaaaaagtcccgtatatggcttggaacttttccttccccggagatggcggcgcgtgcacatgacgtagctgctctaagcattaaaggagcctccgctatactcaacttccctgacctagccggctctttcccgcggcctagctcgcttaaccctcgagacatccaagtcgcggctctcaaagccgcacacatggagacctcgcagtattctttctcttcttcttctttaacgttttcgtcttcacagtcttcttcttcgcttgagtctctcgtgtcttcctctgggaccggctccgaggagctaggggagatcgtagagctgccaagtttgggatcgagctacgacggtttgactcaactaggtaacgagtttatattctctgactctgcagacttatgggcttatccaccgcaatggtccgaaagtgattatcaaatgattccttcctcgttatcacaagattgggatcttcaaggactgtataattattaagtcataatcataaaaaaatatactagtaatgttgtgtttaataattactttttaatgaaccctttattttgtagggtgactttagggttatttgtctttaaattctctttttctcaatttgtgtgtgagagagttcgatatatgaatacttgtacatacttctcataaacatgtgtttctttttttaataatcagtgtggaaaatttggaaaataaataatattggagtaatagtagccaatggaagccacgtacctttctattttgaatgtaggttgttgatttaaaagtattattattatttttgataacattgatataaaatcatgtaggttgttgatttaaaattattgaagattccttttcagttttctcccttagagttaaaactttcttctgattaagcataaattaatcctaaccaattgtttgttttttgccttttcctgtttccactaccagttattgaatttttatatctgttgatgcatattaaaatatccaacacttgaattattttgccttcgagtctattattttatttatcaaacaatgacttactcattgcatttccttttgcgaaccaattgtagaacaaaagaatctcctcttcggtctttggagcactaagttctatatagtgtgtactattgtaatacaagtagttttagtttgattatgtgtaaataaattaataactgtaatgaatggttcaaaatggatcccacttttttttttttggtcacgatcttacgtatctcgtcgttgataaaaggctataaactttaatgattaactgtaattagaatccgtcactatccattaaatacattgaaagaagaatctattgaaatgacttctctataatcaaagattaatgtaataactcaatatatgcaatatgtttatcagttttttttttttttttttttttgaaaaagatgcatgtttatcagtttatggttccatgtatacacatataactaggtatctttgccgttaaaaacatccaaaatttctaacaatgaaaaatttatatttaagtgttaaatatggtttagtttgtccaaaaaaagaaagtgttaaatatgataactaaaatttgtataatgaacattttgcaaaatattgtggcaaattgttgattaaattaaatttcgttatcaaaattataatataaattatttttttcataaatacatttgatttcatctattagagtttcagttttaataaatatcaagtcaaggttgataaaaaaaaattatatttgcattcatttttgattagtgatactcacttaattaataaaaaaatgaatgcagatataatttttgtatgttttcactagatcactagaatagaaattagaaatacaaaaagtatgaatcatatacgattggaattcgttggcaaagaaaatgaaaataaaacgtaaagatctattgaaaacttctttgtagaatacgagtgtacacaaaaaaaattcattttctcataaaagaacaaaaggtcacagagcacccaaaaatcaggcaaatattacgcaaaaaaaaaaaaatgtaacatgcaaacagtaataacgaaaatgcaattgaataagttcgaatatcacggaataaaattaagtataacctttcaagcacagaatgaacttttttgacaaacttttaatttgaatttttacctttttcttgcttgccatttcaagaatgctctcaattattgtctttgtgaaagatattagatagtggagtccgatatagtaaggaaaagtatatactactaattactatgtgcaaaaccttaattttaaaatgttttgttccgacaagacaatattaaattttaactttatcaaagaagttataaaaagctgacattttattgttagaaaattttgtaatcaacgtccaggtaatagttgattattagaataactaactcagaataatgcagcattcaaagccgtttctatgtattgttgcttttaggtttgtaactatatagatgttctagaaaatatgatatcatcaggaattccaaacatctctttataaatatctccatttgatatgattacttctaactattatattagtcgttcaatgtttcaatattatatgattataatgtgtattaattagagtcagtcattcaaaacatcgatctttttatacatatatctccatttgatatgattcaatcatgactatatttaaaatgtgattagagtctcctatgactcaaacccgaaatctccaatattttgaatagctagtcttgaaacttgtaagggtttcacgtcatatatcatgttttggaatcttgtattaagtttaacaagaaaattaaagctcttcaagagctacaagaagaggcatgcatgtagagttgtgttttttgatgacatctctaatacacacttgtttcttacctcctacccactgaacaatcaattgaggtttttgacactttttcaggcaaacacacgtttcattatgcagcttgatgagaaaatattgaggtaacttgggaagcaagacagcggaccaagcccgtgaagcctatgaagcccgtgaagccgaagaatattctagatatcctattgtgataaggattaagagatttagaatatttacttattcatgtttatctatttcctattccaattaggttaaacataagttagtctatatattgtgtatcaattctcttgagattaacaacacataataaagagttttcccacaaatcctcctctagtttcaacatggtatcagagcagtcgatccttgtggatcaaaattaaaattctgcatttaaagttttgtgatctcacactcagaagagatcatggaaacaatgaccgtcgaaggacttgacgttgaagacagtggggacggagatgatgaagatgatgacgttaagtgtggatttgttccacgttagatttttaattataattcaatggaatttggtttttcgtttttttttttttaagaaaagaaatttactcttagttagtaatgattctaagggtttatggcttatatgggtttctagttttattgtttctagaattatttttgagttaagaatttttcagagtaattttatatctcgcttttcttattgtgggagagtttggtaatagttttaccattacgggggagtttggttatagtttaaccattagtatagtttattggaacgctcatgtttttaggtcatgtttagtccgagttatggaccatctaagataaggatgattgtttgtggagcagcataatttgcgcccacgggatgtattcccttttaccaagaccgaagacgagcaaaaattccacccctattttcaaagttgaagcttaaaccctgaggcgtgtgttgacatgatttgtccgtcttcgacatattgtccatgactagagatgtcaatcgggccttttgtccgcaggcctggtccgtttagtgacctagcggggcgggcacgggcctatgtagtgaagcccaaaaaatagcgggcctagcgggcttggtccgtttgaattgcggattaaacaagacatgcccattaagggctgcgggtttgcgggtcgggtttgcgggcgacccacttgtttttcttccttcgtaccgtacaaactgcagaatgaggagagaagatcgatccaaattaaaatcgaaatcaaaatcaaaattgaaatcgagattgttgtgattgtcgcggttcttgttgctgtgattttgataggaatcttagctctatttctatggattatttgagccatttaaagaactagcttaggacttccaattccacaaacctgaaaatcacctcatatgtttcaagcttttcccttaaatctttctttcttcaattttcagtgtcttaaactaagaaccaccaactttcttcttcttcctcattacttccaattccttttccataaccagaatccatagaagcagatcttgaatatgtagatctcttccacctccaagaaaatctatgttttatagtcctttctaaatctcacgacacctccgatttcaccattttgagcaaacaaccatggaagtcgtcttcaccgttgagcttcttcacgagaatactctacccgcgggctggtccgtctaaccgatgggctttgcggggcgggttaggactgagttttataacccgcggtcatcggcgggccggtccgtcgcggatcagaagaaaagcgggcacctcgcgggcggtccgtttggtcgcgggcaggcccgtctgccatccctatccacgacatacgtgttctgctttgtgaatgcaaagtttgcgttttgcgtaccacgtttgtcgtgcgggggagtattgaggtaacttgggaagcaagacagcggaccaagcccgtgaagcctatgaagcccgtgaagccgaagaatattctagatatcctattgtgataaggattaagagatttaaaatatttacttattcatgtttatctatttcctattccaattaggttaaacataagttagtctctatatattgtgtatcaattcttttgagattaacaacacataataaagagttttcccacaaatcctcctctagtttcaacagaaaagttcgattttcacgatcggttttaagcatgttctaggatcattcatattcaatatcatcaattttgttggctttacggaattcaccttctcaaggctataatttataaataaactttatagcttccatgaaatttttcagaattttcggatagcaaatgtatgtaatgtaaaattgtattacaacttaaaccatctactatgggtttaattacctctaaaatgactaaaattaaacaagttgacttcgggatattacataatttacattcaataattctgtcacttctgtggcacttattataccatcaccatttggactatatacaatgtttatgaagtcaaactttataaaatgatatttgacacgagtcatggatcttatggataattaataaaaaattacggtaaacgctaataagaaattctagtaatgaagagtagaaatgatcaatgaccgtgggaaaagaaatttgttcgattctcattagcaagaaacaattcgtgcatttttgtttgcatctatattattgcagaattggcaataaaatacaaagattatacatttgataagactatatatttgaaatgacattgcaacggtttttgaatgatatgatggcacagtaccatgcgttatattaatatataattagttatatgtatcaaagacaaacttttggactaattctatttgaaagtttctaagtatgcaactttcaatttttgtttaattcgacattaccagtattatgagattttcccaatgaagcctgaaaaatcatatagatttatcttgattacatgttttagtaactcatgttgatatcttgtttatcaattgttttttatttattttgtaaccgtaaagttcaaatcaaaatttcctattctccgcaaatctgtagtcatgtcaatttgttcataaatcgttaggcggatgtagaacggtcaaataaaatttttgattaaacggattttgcggatgtgagtcttttatatggtggtgcgggtgcatgtcatagtctttttcaatgggattcgaacctatggcttactatagtctatagactataaaaaccgtaaaatggataattttcttaaaacaaaaaagaaaaagaagatgttagttgatttaggaggtgttattggttcctaatttacaaagaattttgatgactttaataaaatcatagaaaataaacaaatgaaagattccaaactattgttagaaaattttcgagagttttctataatcttgctgattaatacttcataatcttgtaaaaatttcccaaacaatttctttattttgatgatacttttcatgattttattttgtaaaaaaaaaatgtagaaagtcataaaccaataacataataatttaatttattaacaatcataaattcttttgttttaattgaataacactacaataaatctacaataaatctacaatgtaaagtcacttaattaacgacactttagaaaatgacgttaacttgtttaaaaagaagggatttagagtcggttactaaaccgacggcataaaccaacgcaaaggtggttaaaactggtgggctattattgggtttaaagcccaaccactaaagacttgagagaaaacacgagcattctcttcttcggagaactacgactacgagcatcctcttcttctccaaagcttctcaaacccagaaaatacgagcatcgtcttcttcggagaacttcaatgtcatcgaacaaatcatggggttttttgtttctttgagtttctaagtagatttcaagcgctcatcagtctcaatagatcccgaatcgtcatcgatctcatcaatctcgatttgattttttctcgccgactccaaaattcaaggtaccattcacttgctccctctagattgactgtcgactatttgtctatttgagatttgtgtttgttatattgaagttttgattatgctatggttctcaaaaggaaaaaaaactaagggactttaacatgaacattaacatatccttgaaatagatactgacaacacacacaattcatcatgttttccttgttttgcttcttgcctgagtgaaattgattctggatttgtgaatattgttttaaattttggttgaaaatgagtgaaaattgattctgggtatgtattttactgatgagcattggatgtttaacacgtttgattgatgttgcttctggattttgtctcaataagaatatatgtttaactgacatttttatgactccatgagttatcgattatttttttttgtttgtggtttccaatttccatttctatggaagttagagtgtgtttgtttattgcttgaacttgtatagtttcagaattgagaatggacaagtcttagattacaaaacatcgtatatctcaagactatataagtggagtcaaagatcttttaatagagaaggagaagagagttatgtgacatgtgtgctagagttacgtgccttgtgtgctagaatgcagccagaaaaataggattccatgtgtagattactttttaaactgctaaaaattttgaaagtgtttcatgagttttttttgtgtttacatttacataaacacataagaagttttggtttgatgatccaagaaggaggaggaaatatactttatctgctttaggaggtagatgtcgagacttgaagcaacatctctggaaaaagtatagaagaaatactctagaggaatcatttgatgtgagaccaggactgattccagaagatcaatggaaagagtttgtggaaatgcaattcagtgatatggctaaggtaaaacttatagaacatagatttttactacttttatatatacatacatgatacatcacatataaataactatgtactattgtgttaaaattttgcaattatagaaaatgagagagcgtaatattaaaagtcgaagcaaacttaagataccacatgcacttggaaaaaaagagtttagcccgaaagtctaaggagatggtaagtttagtctcacaaacttatatcagatttacattgcattatatagtcttacggttctttttattcttattaattctttgcaatcataatttttaggaagaggtgtcgggcatagaaccgaatcgagctgaactttttattgcatcacgaactaagtcagatggaagtttaatgtgcaacgaagcaagaataccggtggtaagtctcagtctctttttagaacacgatagtgattctctgtctctttctagaatatgatagtgattttctgtctctcttttacattttatgtctctatggtaagatttagatattaagtgccgcatgaaaggactcgaaaataaagtagagatcctgactaatgctctttacgctcttgttggacaaagaaatcattttcaagtaatgtacaatctctttgtgaacttgaagttatcatctcctgcagataacataacgtgaatttttacaggtaaatgcagtaggtgggaacacaaagtttaacaccaatcttcatcaatcatctagtgttagcagtgaccaggtaataaaattatatgtatcttcaggataacacttaaagtagctttatctacaatttatctacaatatcaggaaagtaacatttcaaaaactggaatttgaactgaaccagagtcatttgatttagatttcatttgaaactggtatgtttatcattgtatagttcagaacttcatattgatttaggagaaattaatgtcatagttagacatagaatccaaaagtttggtgttatcacagtcttgagaaaacatagtaatttgctttactaaattgttcttcgtgagattgctgtcaaaaagaaaacatagtcattgaaatgatactattggagatcatgttaaactgagactctgctgttattttattttctggttactgattatggctactttgtttttatttcaggtcagatatgcttatttctctttcaagaattggtgttatggtgacattttatattccgtgtaaaatgaatatattttattaattgatttttatgtgttggtcaaagaattattacgtgttatctatcttttgaaatttgtattcactaaggtcatctatataaactaactatatatgtgtatatatgtacacattatattaattaaagaaaaaataattaaaaatgaacactagttacgtcggttttataagtgacataaacaaacgagatttgacttttgagtcggttattaaactgtggttagatttagtaaaaccgacgcatgttttcgacgaaaaagtaaacgtcactttttaaaatgaagttagtatagagactgattggtaacagctgtagttttacattttttgctgtagaattatgactgtaggtttatttgctgtgactgtatattttcttggtgtagaattttggctatagaatttaaaattttggaaagttgaaaattatgtgctttaggaaaaaaagcattctacagccaaaaaaatgaattaagaaaatattttggatgtaagaaaaaaaggaaagccaaagcttctaaagcttgattagatatatttcaaatctttagaaatttttttgctttgtaaagactctaaagcacttgtcaatcaggcccatagttaacgtcacacgatgttacgacggttattaaaccaacgttaacttgtttaagtcaattaataactgacgttaaagtcattaataactgacgtaaagtgccgcatcttttgtagtgtaactccagatttgtgaagattttagattactttttctaaatcttaaattaataacaccaaacttttaaaaaatcttgattgaataacaatagattctacataacatttacggggtgttattcaaccatgaagttaaagtcaattatttaaggtttagatttgttttctgatattggttttaagaatctgtttgtgtggatttcaaaatctctgcagtatatcttggattttgattctaatagtttactcgtaaaactctaaagaggtttcatttcaaatgatttaatatacaaagattttacaagtcttttagttttgaataacaccatattttaaagttagatttagaatcattagttgaataacaccaaatattaaaatctaatgaagtataagatccaataacaccagattttaaagttagatttagaatcattagttgaataacactggattagtattggatttcaattctattaaaatccatcaatgaataacaccaccttaaagtcactaaaactctatttaaatcacaaaccaataaccaccctcagtaatttaccatgagaattgagtttacaccttaggcctaatactaatactgtagtctccttgtaaccggttcggtttgcttaaatttcgaattaattattctttactttcgatttttgtttattataccgaatcagaccaaaactgaatggttctgtacttttctcaaatcatataaacttttaaaaccctcaatttgtccgacggtgttacgcgacggcgatattcggcggcggaatcgtttcgtctcactctctcggttaattcatccaatatctttccgccgtctcaaaaatgtcgtcttcgaagcggaagcgcgacgccgaaaccgccgcggaagattgtgacgacggtagtgataagagcaataccggaaacagtttcttcgatatatatggacccgaagtataaacaccttcttctgtatgatttgattgattagtgctcaatattgtcatatgtgaattgaatcttcttcttcttcttggtaggcgaaagcagaactcgatttcaaaagccctgatacaacattgaacttacaagtaggttttgtgatgcaaaggagagttttttttttttcgtaactattctatttttggaagtttatgatgataaatgtaataatttgcatcatgggtttgattaggatgttcaaggacttgtgacatgggttcttgcagaaggttttatgccttcgtgggtgtttattaaggtatgaacaagattgattgtgttgtgtctttacggtttctttgaagtttaaatgacattttaaagatatggtttttgcagaacaagcctctcattccaaaggttgtaatgctctaccttcctggattggatgcagctttatacttatcacagtctaaaacactgtctagtttgaaatc

SEQ ID NO: 5188 - DNA, 2005 bp, Arabidopsis lyrata
  Intron number 3 from transcript 487296 (locus 487296) deri ved from phytozome v7.0 (chr-ID scaffold_6; pos 1798184 to 1800188 reverse strand)
agaaacgattgttcttctacgtcaatctcgccaaggtacatagtttaattcgattgctttgaaagttcttgactctttcgggtcgagaggatattagtgtgaatcaagtccagaagctcaattttttctggaaatctatatatacttctatatgattgtactgtttcaattaggaagagccaatctgtttctctatgagtattttagcttattctcgtgtttgggtttttttagggattaggtttttgtggttattacttgtgtttttgatgtaagtgagtttttgttgtttggatttgttaagaggtatatgcagcaaacaatgatgtcgaactctctgcccttggaatgggtatgtatgatcttaacctctctttttttattcttctgtatatattctattgatactgtaatgtgtatttttatttcagtattctctgattcttgacttgattaagctaattttctcagaatacattgtttgttggtgatacttactcttctcatatgcaaatcaaccttcttctcaatttattaatttggtcttggttttacagattgaaattacgcttgcaaagtcagagaagtttgatgaactaatggttgcagccaatgtagaaaaagaagttacagaagctcaggtgcggaactgaaaatagctattactattttggttatgtgatgcttattttataaaggggctttatttgttttatttcattaatgctttagctgccaagattgagaatgtaggaattaacttttagtgtgaatgtcgttgaaaggtataagctttactattgcataattcaaactttattttctttctttattagctctctgcttatggttgattttttttttctttgtatttcaaagctgttataaccccttagcaaagtgagcagctgaaaagagtggttttgctacaagtaagatatgttctttctatgactttaagtgtcaatgtctgtgattgatatattactttctaagtttgagtttaattttcctaaagatctttgttttgttcaattaagtttgtttgcttcatacaaaatgagaaggaaggtgtttaggagaaggagcttgcatgtggttgcaggagcttaagtggtaagacgtttcttcaagttttaaactccatattagcttaattctaaggctatcatgattatgttcaaactaaccaagtacgtagtatacatatgtgtatgtttggtagatgtattcccatgtgtcgattttttttttcatcttagtcaataagagttctaagatggtgtcttctatccccttgttcttttgtttcatgtagcatatcgaagggagtactaataggaacaattgttcaaattgaagttttatgtgttctacttttgatgaggaggcgaaatagatagatgagaagaaattgaagagatcgaagtttgtctctgtccttatgatgttagttttattgtttaagacttatgatgttagtataagacttggttgatgttctgtaagacttgtttggctaattggttaatgtaatattacttgttgatgatttataaaatttataaaaagtaaattttacaaaattgggttccaatataaaatttattctatataataaattaaatttatataacaaaaaaatgttatgatattatataaaacaacattaaacgggtgttaaaataaagtatagtatagcattcgattaatgctataatatgaaaatgctatcgtatatgagggtctatcatagcatgctaaaaacgtcatcgtatatggggggtctaccataacaggggcataagatagcgtttatgaaaacgctattgatgacatataatagctcttctctcttgctaataatgtagatatttcttgtagtgtgacgtttgctcttgtttgctgatgaatctcttaattaacgtatatatattaagtgtgttggttatggtgatgcatgattgtaggattcaagtttggaacttgtcaaggttttgagagc

SEQ ID NO: 5189 - DNA, 31066 bp, Arabidopsis lyrata
  Intron number 21 from transcript 481901 (locus 481901) der ived from phytozome v7.0 (chr-ID scaffold_4; pos 13798170 to 13829235)
ttacattgacgaaaaaaacatacctaaaaaaagattctgttttgttctatttaggctttatagttttgtacactgaatattgattctgttttgctctgtttagggtttatagttcaattgatgtcgttcagtattgttgaattttgttcctcatctttgtttcataaagattaatgtctcatgtaaaatatgactaatgttttatttcctaatttccctatatcaattaattataatataaatgtaaatcttaattagactaataaaatcaattgattctcatatataattccataaagtgagtaagaaaattcttgaacatgaatatggagattgggatcaacgaaaatacagttcaacacttaaatcactatcttcttcacgtttcttttgtcacatatttggagttgcaaatattaatcttagttttgtgatttaattggttgtggattgtggaatagtttttgtggctgtgccaaagtgaaataaacactctcctagaagacatattcacgcaaattaaatgagaatttttttttaaggaaaacaaaaatctttctgcaacccatcaaatatatatataaagagagacccatcaaatatctctcttcacacacacacactccatggaaatgctttttcttggttcgcttatgcatttctcttctttctttttttttttttttttattattttttttttctttttatgtttaacaacaaatgtttgctaaaatctcttaacatcatgtttccttattctatcatgctcaacaattcaacatataccgagattctaacaaacgtttgttgttaaagagaaatgcataagtgaaccaatgaggtgtaacgtgtatcacaagacacaaatgccaaaacagagctgaaaccggaccaaaaagactctttgtcaccaaaaagctttaaattctcaccaagaaagaaacatgacattgcgaagctttgggccttagacaatcaacgaagcccaacaatatctcaccatcaaccgttacaaaagtcacaaaaatatttttaactcgaacgatgtggaaagggtcagatattttttggtccgaggttttcactttttctattattgtcgaaaatatatttgacgattctctagctaccgtcacttttctacgtcacccctccaatcataaccttccaacgaccctttcttttcaacacccattcgtccttcacgcaatcccgtcacagtcatcttctagacccgaccaaccgcttaccgggtcggtttcttccacgtgtccccccgaagatatctttagaaacaaaaaaattcccatcgcgtcgtcaactatgaatgaattttgatgaatttgtaaaatatggaagcatcgagaaatcgatcgctcgtcggaaacaaccgagctctggagatgaatcacgaagacgacgacggcgaagatgtagcggcggtggcggtggaagacgtggaggtgtgggatacgttgagtaatggattcaagcgtgcacagctttttcttgatcagaatcgtgatttgatccaacgagtcaacgaaaaccacatgtctcgaatccctgataacgtcgctagaaacgttggcttgatcaacgaaatcaacggtaatattttccgagttatggagatttactctgatttatctgtcgatttagccaaaaatttcgatcagcggcggaggacggccaagaacggtgacactacaactaccaccaccggttcttacggcggtaaacggagcccttgcggttcctaagcgcaatacgcaacaacaaactccgattttagctaatttcatgccaggagtcactgttctgtttcatgaagtttgtatatgattacaagaattaggagttgattttggggttgatgtaaattagtgtggtggattaggatgttgcactagtctcttacgtgttctctaaggtattctatgcttatgtattcagctcctctgcttttgtttgattcttgcatgtctcattcgtataatcattcactagtttcatgatttttcgatggctggttgtttgtattatggatttaaactagattttaacccgcggtacaccgcggggctatattttcttaaaaaaatcaaaatgtaatttgtttgatagattattttgattgttaattttaggatttcacccgtggtatacgatcttttataaatatcaacccaaacccgtcccatcatattacccgtcccgtgaaattaaacattatttagttatttttctttttaataatacttttatttaaaagctatataattcaagtcaatttaaaaatttcttttaaatggttcccataagatatatatacatatatattaaatttgtatagagttgaaataatattaatattacaaattttttatataatttaaatattataaatatttttaaaaatatgtaatatatattttttgttattgaataagaggatattatgtgtaagaaatgtagaaaataagagtttaatatttttattatgatgtaaattagtgtggtggattaggatgttgcactagtctcttacgtgttctctaaggtattctatgcttatgtattcagctcctctgcttttgtttgattcttgcatgtctcattcgtataatcattcactagtttcatgatttttcgatggctggttgtttgtattatggatttaaatagcttttagagaagatatgagttgcaccaaaaacagatggctttggttagttcttgaatagagtcaggtcatgttgatccatgagaatgagcaatgagtgggtaggttatttggaaatgcctgtaagcacaagagagttttagatgagcgacactaggttccacacacattagaaatagttcactacaataggtctccaggcacaagacttggtctacaagccaaacacgttgatgttcttgtcggcttttgtactatattatcactcacatgactaaacttgatctttttggccttttcactggtttttcccttttacgagtagttagattatcttctatattacaacagagatttcgtgtcaccatgtccaacttgagataaaatgaaacaaataaaatattagagtaactaatgtattcaccttattctaaatcatcaatctaaaacttttcgatgcaaattttttataatgactaaacatctatcaatatgttataattactgaaataacgtaaataatcaagagaaaataaattgatcaaaaatttgcaaatgttaagcaaaatataggcaaaacataaataatatatatttttaaaaaactgacaaaaagtcacagattcaaaattgagattctaaacaaatagaaacaaacatatatatgaccataattttgtgtttttggcggctcctgataaattactacatgaagttgataattaatttgatgataaattaccacatttacctgataattcattatccttcttcctagacctatgttataaaggaatccttttgattcattattattcatcaattttcaagatgtcctcaatttccaatcctcgttttcctcaatagaaaaactagagtaaccaatttattcaccttgttctaaatcatcaatttaaaaattttgatttaacttttttgttcttttatattttacaaatcgaccacattatcaagttataagattattcgttatgatttctgtttgtcatctaagaatagtagtttgtataattttactaaaattttaaacaaaaaaaaaataattggctattaatctactatagtgatggttgattcatgtttgtttttttaagattcgattaataaatcttaaaaatgttggtagaaaaatattttgtttattggtgtagttcttttgtcacaaaacgatgatattttttaacttttggtttttttttttttaatattcgtctctgatctccatatatgttggcacgcctttgatggcacagtcaaagaatttattgaactttacttcggctacaagccaaacatgatcggtgtgtctgctgcagttcttgtcggtttttgtgctctcttcttctcagcatttgcactttcagtcaaatacctcaacttccagcgaagataaaagtccaatgtgactaactttgatatttttggccattgtcattggtgttccgttttaagaatagctaggattcttttaaaagttagtttttgtgacattgacggaaaagaaacaaacctaaaaaaaaaatttctgttttgctttatttagctttatagttttgttcactgaatattgattctgttttgctctgtttagggtttatagttcaactgatgtcgttcaatattgttcgtaatctttgtttcataaagattaatgtctcctttaaaataaaaataatgttttatttcctaatttctctatgtcagttaaatataatatgaatgtaaatcctagttagactaataaaattaggttatagtattgcacatatgtataattctataaagtgagtaagaaaaattctagaacatgaatatggagattgggaccaatgaaaattcagttcaacacttaatctctatcttcttcacgtttcttttgtcacatatttggagttacaaatattaatcgttgtttttgtgatataattggttgtggattttggaatagttattgtggctgtgccaaagtgaaacacactctcctagaagacaacctaaacaccaattcacgcaaattttatgagaaaaaaaaaaaaaaacaatgataaggaaaaactaaaatctttctgcaaccctccttgtgccttgactatatatataaagagagacccatcaaatatctctcttcacacacacactctccatggaaatcgtttttcttggttcacttatgcatttctcttcttttttttctttttattattatttattttttctttttatgtttaacaacaaattttttctctgcaagatctgtaaaattgtgtagttgcttacggtttttctatgatagaaccaaacatcccacgttaggctgatagtgagagaggaaaacaagcgtgcacagctttttcttgatcaaaatcgtggtttgatccaacgagtcaatgaaaaccaaaggtctcgaatcccagataacgtctctcgaaacgttggcttgatcaacgaaatcaacggtaatatttttcgagttatggagatttactctgatttatctgtcgatttagccaaaaatttcgatcagcggcggaggacggccatgaacggcggcactacaactaccaccaccggttcttacggcggtagacggagatcctgcggttcctaagcgcaatacgcaacagcaaactccgattttagctaatttcatgccaggagtcactgttctgtttcatggagtttgtatatatgattacaagaattaggagttgattttggggttgatgtgaattagtgtggtggattaggatgttgcactagtctcttacgtgttctctaaggtattctatgcttatgcattcagctcctctgcttttgtttgattcttgcatgtctcattcgtataatcattcactagtttcatgattttttcgatggatggttgtctgtattatggatttaaatagcttttagagaagatatgagttgcaccaaaaaaaagatggctctggttagttcttgaatagatcatgatgatccatgagaatgagcaatgagtggctaggttatttggaaatggtacgtagagtcttgaaaagcacaagagagtcttagataagcgagactaggttccacacacattagaaatagttcactgcaataggtctctaggagcacatgacttggcctacaagccaaacacgttgctgttcttgtcgactaaacttgatctttttggccttttcactggttttttttttcccattttacgagtagtttgattatcttctatattacaacagagatttcgtgtcaacatgtccaacttacgataaaatgaatcaaaaccatatagtctaaaagaaacttcccacaagttacaagtgcaccatataaaccaaatgagatttggaaatttcaaaacatctttggatccatacggttatagggaacctgacaaatggatattaaatcataataattataataataataaacgatttcataatcttggattctaaataagcatgaggtatgtttgagaggaagaaaacctagtggtctatgatcagtagtcataggcaggcccggcccgccaccaatacccaagatagacctccaaattttaaagattttgagtactaaaattaggcctcaaatataattttttattgcaaaaaaagccttatttttccaaaattttaagatttagtctcaaatcttaaattttaaaatattgtaaaaataggcccaatttttctgaaaatttaagatttggtatcatttttaaatttgtctacaaaatccatcaaaaaaaaaaattattctgtattgggcctcatatataataggaccgggcctcgtcataggtttcaccttcaatgaacaccttgaatggacactgagtctcaccttgaatagagtactcaaacttgagttgagtagaaaagagaagatgagatgatgctgaaagccttgccattgatttcaactcctttttaactctaccactactccaggttggtgcgatggagattccaactctctttaaacactccgagttggcaagtagatatctcaccaattctttctctccgtttcttcctttatagtttttccactcaaagatctcgagacggtttaacaaacactctggaacagaactcggtgggttgaaacaaagtgggagctcttcgttacagacctgttaagcaacaacatcaagataagtaactaaaacgtttatttcattttgaatttgttaaaccgtccatatatatgtacctgctcgatgagaaggacttttagcttaggagaattttgaagaaaaagcataaatggttgcaaccaatgtaatccaaatgggataatttttttttttttttttttttttttttttttttttttttaaaagggataattttacattctacaagctgcgagaagttaatgttgtaacaacatccaacctgcaacaatgaacatatacctcacaaataagttgacgatggcaatttgatcataataatcataaataaggttgaaaaagccacttatacgtaccgtctgtgtgttcaaaatgaagtcgagatgcataaccgaggaaagagatttggtaaaactcgtcatcaagattagaaaaaacttggataagtgccttatcaaggcgaggcttgttctcaattgagtacaagtttgccgaaatatcccgaaggaagatttttcttaaatttggagaatcgatagccaaagacccccctgcatatccgtcattattttttgctacttccatatgactataatataaggtctttaaagaaggcactttgacactgatatttttcaagttgtcaataccatgtctaaccacacctaaatgcttgagaataggacaaccagataaaagcctaacaagagcatcttcatatttgtacaccacagagaagaggcaaagaatttctagacatggaaagcaaaccacagaaggaacatccaccaaaatcttatcggagatagtaagaaagacgagcgtgttgcatacgtaaaggcgatctggtaacctgataggctctgacaaccagcttagcttgaactctagctttcgcactttgcgatcaactgcatctgcaatccactttataacatcaacatcaataggacatccaggaccgagttgtacacaaagagtttctaaaacatgggccttatggagtttcattgactcgttaagaaaccaccataaactaggctcgttaagaaaccaccacatgttttttttccttccttgtttatattcagtatctctgtactcgagttccggtagcatcgtccaaatagaccgccatcgtttcgacaaaaccactgtagacactgcatcttttgtaggtagaagcaacaatatctttacgagcaaatcatcgggtagtgtactaatcttgtcttcagttgaatcagttctcttgctaatcttgtcttcagttgaatcagttctctcactcttactcttgatgaatcgtcgtgcattatgtattaaatgttgtcccaaccatatggaaccgaatataagcaaaagctgtcctaacatctttttgtcacggctccatactcattcgtcctaacatctttttgtcacggctccatagacgccttcatattagtcattaagcgtatatatacatactagatatgtcggttctatcctttttttagaattagtaactttacattagaattagtaaataattttttcatttctatttttatttaataagatacatataatttccttataattatttttttacctttttaaaatttttttgtataatatttatacatataattcccttataattttttattaaatttctatttttatttaataagatacatcaaatttccttataatgatcttctttagatttttagatttgtttttatagaagatatatacgtataactttcttaaaaaaaaaatctaaatagataaaaggaaattgttgtgttacacgtgtccaaatctgatatcaataaaaaaacaatttttgtaagaaaataggagactatctatttgtttatatagagttgagtaattacaatccttttttctctcgaattaataattgattgtaaaatttccttaagtattgtatttaatataataagattgtataatttcttaactccttttttaattttgaaggaaaaactaatccttttcttttagaattagtagctttaaattagaattagtaaatgaattttttatttctatttttatttaataagatacatatagtttccttataattatcttctttacttttaaaaaattgttttgtataagatttatatgtatagttgccttataatttttttcttaaatttctatttttatttaataagatacataaagttttcttataatgatttttttagatttgtttttatataagatatatacgtataattttcttataattttttttcttgatgaataaaagaaaattgttgtgttacacctgtcaaattctggaatcaataaatttgtcacgtggcacgatcctataaattactaagggctatgcacaaagttaacaaaattataaaaaaaaaaaacaaaaaacaacggaggacggcaaagaacggcgactttgcagctaccaccaccgattcttacggtggtagacggagctcttgcggttcctaagcgcaattcacaacagcaaactccgattttagctaatttcatgctggagtcactgttctgtttcatgaagtttgtatatgattacaagaattaggagtttattttggggttgatgtgaattagtgtggtggattaggatgttgcactagtctcttacgtgttctctaaggtattctattcttctgtattcagctcctctgcttttgtttgattcttgcatgtctcattcgtataatcattcactagtttcatgattttttcgatggatggttgtctgtattatggatttaaatagcttttagagaagatatgagttgcaccaaaaaaaagatggctctggttagttcttgaatagatcatgatgatccatgagaataagcaatgagtggctaggttatttggaaatgcttgtaagcacaagagagtcttagatgagcgacactaggttcctcatacattagaaaatagttcactgcaataggtctctaggagcacaagacttgggctacaagacaaatatgataggtgtattcgttgctgttcttgtcggcttttgtgctctcttattcctcaatttccagagaagatagaagtactatgttattatatatttattagtcacatgactaaatttgatgtttttggccttttaatttcactggtttttctcttttacgagtagttagattatcttctatattaccacatagatttcgtgtcacaatgtctaacttgagataaaatgaatcaaaacccagatagtctaaaagacacttcccaaatgagatttgggaatttcaaaacatctttggatccccaaaaattgaaaagattttgctacggttgattaactttgtagaaccatacggttatagggaatctgacaaatattaatcgttgtttttgtgatttaactggttatggattgtggaatagttattgtggctgtgccaaagtgaaatacactctcctagaagacaagctaaacaccaattcacgcaaattctatgagaaaaaaaaaaaaatttgataaagaaaaactaaaatctttctgcaaccctccttgtgccttgactatatatataaagagagactcatcaaatatctctctatcctttatattataaagcacaagtcacatgaccaatacaattttgacatatcagcaaactcaaatttttttaaaagaatttataaaacaaaaaagagatcatggaaaaaaaaaaggcgatattacatgattaaaacaaaaacctaaatccagttaacgtattacttaaaatgaatatatttctaactttgtagaaactgattctccccacctcccccacgagccatgatccccatttcttcacttcataaatagattataattttaatttgttgcagacgcttttattgtcaatttgtttttctctcatgtccaactctctctcttatttttttcgcaaagcttcgacatctgtttctacgaatcttaaagtgatgctcctcgatttttacacttattttacaaatagctccggcaattgaatcgtgtaaaatcaaagttagggttgtccatctatggacatttccaaaaaagataaacgaggaggatttaccggaatcgatatgcttattttggatgataattaggtaaacatttttatggtattttctactgtgcgatcaattttttatatcacatacatatattgactgtttgaattgccttcacgaatgaagaaagaaaaagtccatttcattgcgttaaattgttgatctttcaaacttaaaattttgtcttataataatcattcaatttccttgaaccatttatttaacctgtctttcattttcaattgagtaactgtctttaatctttatgttttgatgaattacgcctgtgtttgttttgaaaattgttaagataaatatgttaattgtttttatcgctaatttatgtttatttattttttgttattgtatagttaataaaattagacgcatcttatgtacttataatttttatggttagattcctttttgactctaaatattaatttatatattttcatatataatttgattttttatatctaagattctaatattcgttcaccatcatgaatacacacaacaagaatatagggtatttcgatctcaagagttttcgtatgaaaaaaaaaacaaaaattaaataattattgaaataatcttttagattttggccttgaatggtaatggtttttcaaatggtttttggttttagttatccaagaatccattttttagccattcaagattttgagaaaattggttttcctaaaaaatagggaatctagattctaagaatttttattaatttcttaacaaaatccaaaatctcatttcaataagtttttgagaattcctctatgagatctttttttttatcaattttatattagtttttctttttatttttacataatccaaaaaccaaaaacaaaatctaaaatctaaaaaccctctaaaatctctcaaacattcatggcctttatgctattgcgtatagccatataagagaaatggatttgtttgatttattaaaataattttataattttatttttgttttgaaaaatcgtttagaaatagaattaatggaggatttaacataatagaagacttttgattttgcctcaattaattttgatgatttttttaatttaaataatgttgaatgacacatgtcatcttcttgtgtgatgatgtggcacttgtatggagagagttgaccaacttttatatatatgattaatgaaacagggaggtatgatatgtgttctatcaaagagaattcactatcaaaattccagaagcaattacaagaatgggagtgcaacatcctaatgaattttgagttatgcctcaatcttggacaatttagaagttcttcacatccttacatgatcagtctcatgtgtcaagccatgtgagcagctacctaatttattaggaaggttccagattccagtgatgaagagtttatataaactttggcttgatgagtgaggttcaatgaggcacgtttgcatactcactagtcactacaataccaatcatccagtcctcaaaagcgttacaacacaactaaaaattggatggaacatggaagttctacaagacatgaacaataattcggaggaaaaggagaacatgtcataggaagtaggaacttatcttgcggttacagcacggtggaaatataagtaacaatataatttgattatttgctttttagaattaatttgtaatgaatttattttgctttttgttaacatccattttatcttcgtaatatatttcaatgtgcaaattttttttttttttggtcatcatgttaacatggttcattgatattaattgtagtaagtgtgaaataactttagaatctgaatttaatatagatacggaaactattttttttttcaacaatacggaaactattctaagtagaatcattcaaaagaaaatttgggccgtagtacgggctttaatactagtatatatatagcataaatacataatataataatgttgtagatgaggtaaagtttggctcacttaagcgtcatcaaattcataatgttgctagtagtgtgagagaggcaaataactttttaaataaattagtagtgtgagcgaggcaaatattgtataaataaatataatgttgaatctatatcgaatgatcgtgtggttattggctacacaccgcccttattaaatggctcatgtttcctcgttcgattcctcttggctggattaaacaattttttttttttttttgtgtggagaagctgtggtggcacgtgcgtgtaagcatttttttgtaagagtgagtgagacatccaacctgcaacaatgaactgttcataataagttgatgatggcaatatgatcataataataataataaataaggttgaaaaagccactacgcaccgtctcggtgttcaaagggaagtcgagatacataaccggggaaagagatttggtaaactcgtcatcaagattagaaaaaaacttggataagtgccttatcaaggcgaggcttgttctcattcgagtaaaagtttgccgaactatcccggaggaagattgttcttaaatttggagaatcgataaccaaagacccctccgcatatccttgattatcttctgctacttctatatgagtataatataaggtctttaaagatatttaacactgatatttttcaagttgtccctaccatgtctaaccacacccaaatgcttaagaacaggacaacttgaaatcccaacgttcataagtttgtcagtgagggtagggtgaggtttacatgaatcatatgtcgatcattgaatacggttaattaacaaaatctagtcgttcgtacatgacatatataatcatcggaccactttaaatacttgttttttttttttttttttgaataaccgcgggtctcccaaaggcttcctaggcccaaggactaatcccacgaggctggcaattcccctatgtaaacctgccagtggccgtgtctcgaaccctggtggcggaagtcacagctgtgacccctttaccactaggccacaaggcccggttactttaaatacttgttacaacaaactgtggatcttttctccgagctatattatatattggggtttaactgcatggtcaagttacttaaacataaaaaaatgtcaagttgatgtttgttgatttttttttagaaactcatatacatgtatgtatacacagacgtgatgtgttacagatgatgtaaagttactgtaaacacgaattagtgcatagtcatcttttggatctctacgtttcacctaaagatccaataaattaagagattttgaaaacatacacacattagttcactactgattaccatgataaattagaaactaacaagtttattgaatgggaaaaatgtcgaaaaatttgcgaactttcaaatttgggacgaaaaaagcatgaattttcgaaatgtcatttaaatcatgaagtttatgttgactttttgacaaaatagtgaagtttagtttgacttagccatttcgggcataccgttaaatttccgttaaccaaacgataacggtgttaaatttccgttagaattctccgttgagtccaaacgacgtcgttttgaaactctgaaacgacgtcgtttcattagaaaaaaagatggaaaaactgcatctgtcgggaatcgaacaactgacctctggactaatgagaggtgctcaaccgttgcgctacgataacattttggtattgtaccaaaccgaacatatatatactaacaaataactatgtacaattaattaaaacaatatacaatttattaacaataataaaactaaaaactaataaccaaacatatacaaatattaaatatacttccataaatatatattttgaaattttgaaatatttaattttatgtatatagatttcttctttatttgaaaaattgttttttttcctaaattataaaaaaaaaaacaaaaatgaaacttatagaatatagtaaattaaatatatgacataaaaatttataaaatctttctcacataaataaaaaatttatacaattcttctgacataaatataggattaaagattgtataaattataggaataaagattttataaattataggattataggattgtaaaaatttcaatatatatatttatggaagtatatttaatatttgtatatgtttggttattgttttttagttttgttattgttaataaattgtatattgtttgaattaattgtatatagttatttgttagtatatatatgttcggtttggtacaataccaaaatgttatcgtagcgcaacggttgagcacctctcattagtccagtaggtcagctgttcgattccccacagatgcacagttattccattttattttctaatgaaacgacgttgtttcagagtttcaaaacgacgtcgttttgactcaacggagaaatctaacggaaatttaaaactgttatcgcctggttaacggaaattttaacggcatgcccgaaatggccaagtcaaactaaacttcactattttgtcaaaaagtcaacctaaactttatgatttaaatgacatttcgatagttcatgttttttctgtcccaaatttgaaagttcgcgaattttttgacatttttccctttattgaattggtgtaaaatataatagaagacacaaatgatctaaatttcttaaggatgtgatatgatgatataattttgtgacaatttcttggcttcgtagatttctaaaatttcctagtataataaataccatttataaagaagaatgatatgaattttcattgatatacactcgattttggtcacctttaatcttttgtctaaactaagcatactgattctttagttagaatcaacggaacatgtttttggcatatcaacctctgtaatggacgaagtaaagtttacataatcaactaaaaacaaaccaatctaaagataaaaattatttatcaagagcatcatcacacatgatggtacgagacggaagactgttctaaagaaagttgaagcaactgacgtgaaacagcctactactaggccacaatagccgaaaccaaatcctccgcatgacaaagcgcactccattgcccatctaaggcctctgcttctgtcatgagcggagaacgtagtcgaggttaagccttgcttcttttgttaatgaatttgctcttgtacttcatatttataataatataaggtaaatgtgcataggcttggtgaaaaagactcaaagagttattagaacagaagttgctagtattgaccaagcttaattatgtctaacaataaggagatgggtcgatgaaagtggtggatagaagtgttggtggaactaacaaagaagagaacattcgggtgtaagagttgatcaagaagaggtgaccataccgtcaacaagcaagtcaatgtggcctagtatgtgcataagtgttaaaggccgagagatatcaaagcttgaggcctttatcaagacaagcccaaggagaagtcttctagaaggcgctggaacacacatatagccgtttgttgataaggagtgacgcggcattgtcctcctaatacaaacaaaccgtacggcttactcgttggaccactttggccgcctctcatcattgtgttgcctctaaacctagttcttacctctttggtatctcctataaaaggaaatgtaacgcaaatactatttatcaattaatacaatcatctttctcctattctctatttaatctttcagcaaaaacatcaactctcctgttcttacaactctctctgtttttacttattctccaaatctctcttattacttccgcaatatcaacagctaggacttatttaaaggttgcttgtttaaaattctctaaataatagctagtttcttatgaacttgcttttcttgtcattttctttgtttttacatgtatttccataatttcacgttgagaaatgaaataatgtgagataattttatttgttttttggctaaaattttatggttttatatatatcttaggagttacaaatacataggctaagaaagaaataatataaatgaaacggttttttgacgtgcatagaaatgaaacggacgtcagcttcatacggtcactgtgagacaagtattggctagcaacataaatacaatgtttttgtagtacaatatatataaatactaattggacatctagtatcttcttctcgacatattcatcttgtcccgtcttgaatttttcctttttaactaacaatgacaaatatttcaaaactcactctgaaccttcttaattcaaactataattttgggttaacataagaacaaaggtggagaagtccaataaaccttctcaaacaaatttatgtttttttttaatgccagtccagataacaatgataacaaatgatatcctttaactgttatcgaacatgttttataagttacttccactacaagaaaactggattttagcgactacactaaaagtcgctaaatagtcgctaaatggtgggttacgactaaatagcgactaattcatgtagtcgtaaatcgagagtcgctaaaataaatagtcgtaaaaatagtcgctaattagcgactattttacgactaatattcgtagtcgtaaaagtagtcgtagcgtagtcgccaaatttaatgactatttgacgactattttacgactgtgatcttatttatacaaatcaaacaaaataaaaataaatttttttattcatatatatatatatatatatatatatatttatatttatagatttcgtgaaaagatttttttaattaataaatatatttgtattaataaagaacccaaaccgggaatggttaagagttaccaaattgaatcaattacaaaaccccggttgaaccggatgctaaaaacacaaaaaaaaaaccctaatcacacataacagtctttagccgccgcctcagtcttcagccgccgcctgtgtcttcagccggatttcgtttgccgacgagtccagttgccggctgcaacctaaccggtggagggttagaaccggcactccacccgcggtacaagccttttgctccgtcaccgtctccttagaactcttccgtcgccggatttatttttctgtctccttagtactttaacggcgtctctcggctaagtagtggtgtcgccgtggcagtcatgtgcgtccgtcgatgttcggcctcgtcattgacacagatctgcgatgaaacctatttaattatcaaacttccccagatctatctccatatttgaataacgatgtgttgggaaatctagcgatctgatgaattcatgaaacataccttctagaactcatcaattaatcttctgggctttgcaatttttcttcaacttgacgaaaagaagaaggagacaacgagagaagagaagaaaaacagaaaagaaaaaagaagtgatttgcgtggaaaggaaagacaagatgaggagaggaggaaaaaagaaaggaaaaataattagaggattatgtccattggattgactctatcaacggttgatgataaaccaaagggaatctttgtcatttaggatcaaccaatgagagacttttctcttttttttcttttttttttgataaattttgttattgtactatagtttttatgttataatttagatataggggtttaagatttgtaaagtattagatatgatttagatttaaaatcatttatatttttaaatctgaaaattttgattgttttaagtgtttaatttcagttttgaatataaacatattatgggacttttaaaaaattaaatcaaacactttaaaacaaattcacaattttcagatttataaattcaaaacattatatatataatagttacatcatccgtttttttttgtcggttacattattcgtttagaggtatattgtgatttataatttaaaaagtgaataaatttaaacaaaatatttgtatatagtttaaaatggttttattttgattttgtggtttatgatttaatttatatgattaaaagtttaaagatttaaggtttagagtttattttagggttcaaattctgtttaaagaaatttcaaaaccattagttaacatcatatatttataactaaatagtttttggaaagattaatttatatgtaaataataaatagttttacatatttttttattattatacatatataatggttatattttggttgaatggtttactatttaatttttatatatatacattacaagagttaaaaatttaatgtttagggtttgaagtatagggtttgggatttaggtttaaaatttgattaaaacaaataagattttgaaaactataattttttttaagtattagacctcagtttttggatatattatagtaagtagatagttttttgagtttagagatttagagttttgtgttttaggtttagagaaatgggtgaattttgattgtatagatatttatggcgactaaatagcgactacaaagctaccaaatggcgactacgctttgtagtcgcataaaaccggtataccaacaccaaaacggttaacacgtgtttattagtcaccaaattaacgactattttgcgtctattagtttttgtatgcaatgtagtcataaaatagtcgctaaattacgactaaattaccgactactgtcttcggtcgtaaaaaagcgactaatagacgactaaatatttgtagtcgtaaaatagtcgccaaatagtcgctatgtagtcgtaaattttggcgactacttatgtagtcgccagatgtagtcgggaaaaccatgttttcttgtagtgttccagtggcggacccagaaaataatattaccggggtcaaaaatataaataatttaaagtatattatttatatatactactaaaagattctatatatatatatatattatcgataatttttttttctttaatatttatatataacctaatttttaaaattttcttaagatgataccatatttcgataatagtaatgcaaatattaaaattaaatcatctacagtatgcttaatcacatatacttattgtatgaaagtatttggtgttaactacaatttttgtcaattttttaaatccatagaaaaaatgttttgtaatagattaatacttgtaacagaaaatagatgtattatgaaagagaagataattaataattaattatattccagagaaaatgaaatgtaaactaagtgagaaaatgagtgttgcatattaagatattctaaaaaaggaaattatcttcaaaaacaatgaataatgagtgttgcaaggggtgtcattgaactcaggttttgatattaatgaggtcaaacactaccaattattccaaagacattttccatgtaacatataaaacaaagtttctgtaaattttaggggggtcagttgcaccccctccttaacacataggtccgccaatggttacttctatctactaatcgtgtatatatacagaaacaaacttccattaataattatcgaattaagtatctccattgttcatagacgtatagtcgtatctaaagaattaataagcatttctctttctctttggttatttgcttaaagagttttcattttttgatggtaaaatatcaaaatttaagccatctacccaactacaattcagactttcagataaattttgggttaacataagaacaaagaatagtaagtccaatataccaaaaatggctcattccctatttcccttaatccttgttggaattacatctaaacaacaatttcaaaaattctcttgagtgcttgacaacataaaaacaaagaattaataataagtccaataaaaaccttcatatgcatttctatgccttctaggtccatttataaagaccactagattttaacccgcggtacaccgcgggatgatttaattttaaagttagtataaaaatattttgtaaattgtatctccttataacatatttatttatattatagtttacaattgttattaagtaacggtataccacgagtccacgagacaattattaataaactgaggatttaacccgtattaaagcggtatataaatattgattcaaattcgtccgccatataaatcctttccgaaatataacttgttccgtaatttcttaacccgtcccgtgatttgtttttattttaaaatttaatgattatttattatatataaaagtttacaaatcatatcattctctaagacatttatattttaataaactgaagatttaatatgtattaaagcggcatgttaatgatatttaaaattttataaatattgttattaagtaacattataccacgagaaattttttggttttatacaatcttttctaaatgagactgatttaatatatctaatattggtggtattaaaaaaataaggatttaatccgtattgaagcggcggattaatgatattttaatctttttattattgttaattcaaaaacccgtcccgccaaacccgtcccgccaaaaaactcatttattttattaatgttgatcttatttatgatatgattctgaatcattgtctaaatattttaatcgatgtagaacgttgaacacacattttcgtcaattagatcatatatgtctgtttttaaaatttcgaatcacagtatatgcagaaaaaaattgatttttttttttactttatgtattatatgatgattcaaaacagttaaaaacaaatcaaacaaagatgataggagaatcataattctaaatcttaatcaaatcttctaaatatctaaattattaaatatggaatatccggtgtatgagttgagttaaatataacccgacccaacaaattttttgtgaaggattttaaaaaacggatcggatatccgattaatccagaagcatttttacgcacatgtcaccaaagtgttgcaaaaatactagtatagattagaaatttcattttattatatcaacaaatcttatggatataagtatcagaaggatctagatatggattcacacactagactttctctacatagccacttggcccaagcccataataaaataagaaggttagggtttcttttcttcaattctataaatagaggacaagagatcacattgttgtaacaaaaacacaaacttccaaataacaaaacacaaagaaaaaacatgggaaatgtaatgggaaaaaacacaaagattcctcctttggtaaagactggcttgaaaatgggctcctgtgcagctcctgtgcattgattgcttactatgtgttcaagaagcttggagtgccggtagagctccgtattggtgtgggaagggaaggaggacgtccaagaggtgttgggatttggagttctgaagccaaatcggtaataaaagaggttgagattgttattgttgactaaaaggtcttgtcttttaattatgggtctgtaataagtagtgtaatgtgtcatgtgctctaatcgcttactatgttctcaaaaagcttggagtgcatgtagggttccgtattggcgtgggaagggaaggaggaggtccaggtgttgtgatttggagttcggaagccaaatcggtaatgaaagaggttgagatagtgattgttgactaatgatttttaaaaaagtcttatcttttaattatgggtctgtaataattaagtagtgtaacgtgtcatcttctcttttagtttgtcctttgtctttgtaacaagtcaagtttatggtcatgttagtcttcttgttatctaaaagacttaaagtcggttgatgaaaaaaaaaaaaaaaaaaagacttaaagtcggtttggtctagttaactcttatcatgttgttatctgactttctggatttttgtttgaacattcatcatgtttcagctaattttgttcaaaaaccaaaatacttgacatagacatgtttctctaagttttgagacaactaaatcaaaatacaatcttttgtaagagttgtacctttttcttgtcgatcgagagagagagagagttggatctgttgtgtgcaatagccacattttgtcttaaaaaactgatgaagttggttttttaatggaaccttatacacaagaaattttctatacataatagttgcatttatcacttgtgtgtgtaatctatgtacaacttggaataaattttgtaaccaaccaaaagaaattttttggtattgaatacttgtatagacattgtgcgtatatatctctatgatgaaaggagtaacagatactaaaaatataccaacatcataaactaacggtggatttaagtcgacccctaactaataaatttgacataattgcaatgattgaaatataaattgtctatttaatttaagataaatgcaacgctaaaataaatatcaagttttgttgtgatttcgaaatctatttatagacattatacactgaaagaattatgatttgtgacaatatacatttgcaaccaagccagattttgtaaatggcatgatatgtaaattacatcaacctaaaggttctttcgttcaaaaagcttatgtcccaaaaataagttttggtccgtgagtctcacgcgcctgcacctttctctctcaaaaatcgagcaaaactcaaccttcgttttctctttggaggttctctccgtctccggcatccattggagcttcaatggcgaaagggagtttcaagatgaggatttggggttgatttgagacatctctggcggtgctgaggcgtggaaggtcgcagctggaagctgagtggaagccggtgcgtcagtggctagtctggtttgctcctttgtgtcggatctgcgctcgctcaaggatggcggcgagagccagtggagcttttggtcggtcgcttcgcggcggaaatcagaagtcttaaaaacttcctgtttgctcctttgtgtcggatctgcgctcgctcaaggacggcggcgagagccagtggagcttttggtcggtcgcttcgcggcggaaatcagaagtcttaaaaacttcctggacttcttgattgatccgctagagtttggtagaccggattgatgtcccaaatctgagcggtggaggagcaattgaaagtggagcgaagatccgtgtctcgtggaagtagctctctggtggtggttgcttcgcctacgcaaccgcaacaactttccgatgactctccggtttggatgatccgcaaaaaaaaaaaaaattcaggaactttgtaatggtgaggggtcaactgggcatagtcagtgtcagaaactttagagtcaacagaaattgattcattattttttttgttaataaaatacatgaaatagattcattatttttgaagttttctttctgttgcactgataacaattttaaacatattaattaattttctcagtacctctctctctctttttcttttactagtatctaaagtttgaataaaaattattgattttggtttatcgaaagatttgcttcggaaaagtgaatgttattatgtatgctccacttggcttaaaggttcggggggatatagctcagttgttgatatatacttgtttcctgcaagacaataataagtaaaaaaagaaaaagtaactatgggatttacgtatctatactagtataatcgcagcactttttgtgacggatgggtaaaaaagctttcaagtatatcggatatccgacccattttaaaaattccttcaaaaaaaatttgttgggtcgggttatatttaacccaactcatacaccggatattccatatttaataatttagattttagaaaatttgattaagatttataattatgattctcctatcatctttgtttgatttgtttttaactgttttgaatcattaagtaaaaaaaatcaatttttttttctgcatatactgtgattcgaaattttaaaaacggacatatattatccaattgacgaaaatgtgtgttcaacgttctacatcgattaaaatatttagacaatgattcagaatcatatcataaataagaacattaataaaataaatgagtttttttgcgggatgggtttggcgggacgggtttttgaatcagcaataataaaaagattaaaatatcattaatccgccgcttcaatacggatttaatccttattttttttaatacaaatcacaggacgggttaagaaattacggaacgggttatatttcggaaatgatttatatggcggacgaatttgaatcaatattatataccgctttaatacgggttaaattctcagtttattaataattatctcgtgcactcgtggtataccgttacttaataacaattgtaaactataatataaataaatatgttataaggagatacaatttacaaaatatttttatactaactttaaaattaaatcatcccgcggtctaccgcgggttaaaatctagtccatgagtaaacgacgagaacattagtgtagaggatagtatcggactctggaaatataaaatactcttatggatttgtgttttgttgtcgctgaccactaatattttatatgactaattctctacaactttttgtttggcaacgttgagtagtcgtaaaatttcgtgtttgattccgatgttgttttcctgacccgtacgtggtttcggcctgtttttgacatttgcatctaaatatctaattagtgttaattggtgtccttaaacatatcggttttcccttgtaattatatttttttaaaaataaacatatatatatatatataggataattgttttgtctttttagttgaaacgaagaatacaaaaaaaaaaaaaaaaatttgagtgaggctaactcgattttttccaacgattttaaaaccaatccagattacctttggcttcggaataaatagattattggaaaagatcaagcatggatccatagaataaaaaaaattaaatatacagcggatgttagcactgcgtctgaaccggaagcgtttcataatagtaatttcagatttaaaagtagttttaatacttaaactaggatcggatccgcggtccaccgcgggagaatattgatttacatacgttgattttaatattgtgcgtgtttttagtagaaagaatcgtgtaatgtacttataaatattcctaataacaaattgtaaagaaaatattaaattgtttataattaaaccaatcgtattaattatgatttacaaaatggaattttgtgttttagaattcaaaaattagacgaatcatgggaattaaagcagtcaaaataggtcaaaaaccgtgggtcgagcccaaatcatctcactataggctagatttgggaaaatatattaaacccgcaaataagcgggccacatggattgattcgcagtgggtcatcggttttcgtccgggggttggcggatcaacccgcatgatagtatttattgataaaaatataatttattcaacatgtgatagtttaaaaaacttttaataaatgaaattataatatttataaatataatgataaataagattattttctctaaaaacattttaatttatttattttagtagaattttaaattttggttactctaaaattatttaaacaaaatccacggataaccccgcaaatcagcatacattcgcgcgacgaggttgtgtttcttatatgctacccgcgggtcgtgcagacagactaactacatgccaaactatattttgcctattgcaaaacaggcttaacgggacgaatcaactcgttttgacagctctaatggaaatattatttagtcatacaactcaatggagtttggacataggaattatagaatatgtatcttatttgttagattagagattgaaaggtgaaatataatgattaaaaataattaatatttttcatgattcacaaaatttaataaatatttatcatcttgttgaataattctaaaaatcatattcaagaaatctttataatttgaaaattaaacttctttggtaaactataagtatgattgtatgaaaataccataattttgatttaatctaattaaattaaaattagttacatagatttcatatctatttaatttacacgaccaaaataaaaatatctatttaatttataaaatagatgggttagttgtgataaattttttagaaatctctagaagcaagtaagatatcttttaattaatgataactggctaaaataagcaaaattaatgagaaaaacgtcgattgttatggaattagttccaaaagtatatgaacaaatatattatacgtaattaatgtataatattgttcggaatatgattttataattagttatcataagtacaatcaaattttatttgatttccataaacatttgattttagttcgatttttcattattaattcgaatttatattccaaaaaaatttcaaagatccgatttcagaatttcgggtcaattttctgattttgatccgacccatttacatttgtacttctcttttaatagtatagagatagtgttcaaatttatgctatttatatatttttaaaaaaaaccgaccatggtttaatagaataaaagaattaaatatatagcggatgttaacactttatctgaactcgaagagtaacgaaattattgagtttattagtgtggcagatccgggctaggtcttataaaacatgtataataaagacataatggcatcggttaaacgaatgatggttgtgtaaaaggaaattgtattgtctttttagttgaaacgaaaaaaaaaaaaaattgagtgagggaggctaactcggttttttccaacgattttaaaaccgattctgattaccttcgggttcgggataaatagattattggaaaagatcgagcatagcgaggtcattgagtttataagtgtggcggattcgggctgcgtcttataaaccaggtataaaaagaacataatggcataggtatattgaatgatcgtgtggcctattggctacacttttagtttgatgctcatggcttgttccttttttcataatcttaaaagctgctaattcaagtcctatacaggagtgtccagagtgggttctttgttcacctccagcgctctgtatcgtgcatgtgatgtaggcacctggtgtgtgtgttgagttacaacgttttacaggtagctgcatcgttttctctgtgtgaaaattgtactctagttacgagatggtaatccaattttttatgcttcagttcatggctttctagctctcgttcatggtggtgattggtagctttgtgtacttatccaaggctgatgaagcggttaagaggacaatacacacagttgttgccattctcacagttttacacacagttgttgtcattctcacagctttattggccctgactaaagcaacaaggtatatgagatgtttgactgaatggctctgataatttgcacctagatactaattctacaccattacattggcttcttatgtttgccacatctatttgcatagtgagctttcattcatatatctataagtaggattggaaactatgcttcaataatatattctctcatagagttatcctcttttgaaacactatggtgctgctttatagaatcaaagctttatcctcattcagagttacagtttctcgttttgggcagtacttactgccactatggaggacttcctcacaggatttgatcactgtaatgggagctctctactcggcttgtctgtttcttggagttagtaacggcggctattcttcatattcactttcagagactaagtgttaacggactacatcgttaaaagagtagtattggcttgatattgccaactatatgctatgctatgatactgctaacttatttaaactaaccaattaagcctaatggatgatcaccaagaagttcgaccacaaacaagtgcatagtatatttggtttcttgattaatcaataaatttgacgttacatgcatgataattaagaaggtaaactccatgtgattaattaagaatttggtgaatggtgcataataaatttaaaaaaaatcactggtgatacgaccagcaacatacaacggatcatgcgggattttgtttacgtttggattttaaaaacccactggataagatcaaatttatagattaatgagaaattgtaggatgccaataaaaattatgatatccaactatcaaaatattctaagcaaattaaaatatgttattttttgagcaaaatatcttcactttctaagcaaaatatgttgaaaaaataagttttgctacgacaattagctacaaagtagaggagttagaataagagatagttatgacttacacatatgaagatgagtaaccgcttcactacatcttctaggtttccagctgtgaattttcttcattatatctactaacaatgtgtgatacaaataatatagtggagttgggtttgggtttatatatcatcttcatcgtcgattccaaaagaccaaaacagttagattcaaattctaatctcatttgcacaagacaatttttttctccaatgctcatagcaacatgataaagtgggggaaacaatcaagcgtaggactttgatttcggatggaaagggaaattcatgatcttcagataatgaaaactagaggctggaggatttccagttaaaatattactgagattcttcaacgtatcaaaactcttgaagtttacaatccactgtaaatattttgtggatgcttatctgaccaagtcattagctcgtcaagcaagtctattcttcatattcactttcaaaaacactgactatggccagttgacccatcaccattacagatcactgaaagtgaatcgtttcaatcgaaagaacagttttctacagagagaaagccgccggtatgtatgctccaattccatatgcagctgctcaaggtcttgtggagataccttacattctcacccaaaccattctctatggtgtcatcacatacttcaccattggttttgaaagaacatttagtaagttttctttgattctttttcattaatctcaatctttttctacatgcgtcaactatataataatactaatatattaccattgtaacgcaagcaagtttgtactgtatttggtgttcatgttcctcactttcacctacttcaccttctatggcattatggcggttgttctcaccccgaatcagcatttagccgctgttatctcctctgcattttactctctctggaatctcctctccggtttcctcgtccaaaaacctgtaagtatttcactctatgaagtgcaaggtagctatatatttatggattcaaataatcgaaaacttagtgcaaaacattaaggatttgattcttgactaatcagccttaccatattttgaacccttataatcttttaactaatttttgtgtgtgtttgttttggtacttcagttgattccagtgtggtggatatggttctattcaggcccggcccacccataaagcaggcaaagcatttgctttaggccacaaaatataagaaagtttttaggggctcattattaagaatcttccttagtctggtggttaggtagttggttaactagtgtcatgttccgagttcaaatccttatttttacattttttaaaaaaatttaacaatagtttcaaatatgctttaggccccaaaagttcaaggaccggacctggttctattacatatgttcagtggcgtggacacttcaaggagtaatcctttcacagcttgatgacgtggagagcatgatcaacgagccaatgttccatggcacagtctaagaattcattgaactttacttcggctacaagccaaacatgatcggtgtgtctgctgctgttcttgtcggtttttgtgctctcttcttctcaacatttgcactttcagtcaaatacctcaacttccagcgaagataaaagtcctatgtgactaactttgatatttttggccattgtcattcgtgttccgttttaagaatagctaggattcttttttaagttagtttttctgacattgacgaaaaaaaacatacctaaaaaaagattctgttttgctctatttaggcttt

SEQ ID NO: 5190 - DNA, 1828 bp, Arabidopsis lyrata
  Intron number 2 from transcript 347545 (locus 347545) deri ved from phytozome v7.0 (chr-ID scaffold_5; pos 11287749 t o 11289576 reverse strand)
tagactgcatcaggttagaaacccaaaactaaaaggtaagtcccataagaggaacctctgctgaggtcgtcgcttctctcaagattgttaattcctccaaacaagattgagagagaaaagctggcttgtgggttctaagttaggatgtgaaaacaaggatcctaaatttgtaatctcagttctttgttggtctgagaaacagattccaggattgaagttttttggcaattactcagtgaggaaggatatgaggatattatcttggttagtagatatgcttcttttggcgttgaacttgggcttaaaatgttgagatttgtctgtcttttagattgtttggtcggtggttgatatatcgacctatcaagtagacagtggttaacctagacgttggtctattttggtttttggtattgatattgacatgggagatcaacaagtaaataactcaacaagtttatataatctgacaactttttcttgttataatctcgacacatgaaagatttctcgtattgtagtattcatggtgactccttgatagaactgttgaaaaaatttctgagacggagtaagacgcaaaaaaaacaagtgaaaacaaatcacagttcaaactggttttggtcatctctcggtccaagtggattcggtttacttgttatgaatgacaagaaagaagaaagtaaactaaaccgattgatttatacagaatctctgatttaattagatttggttatggattgattcagttcggttcaaatgatgaatagctataccggtctggttttaaaacccatgagtcaaacccgcttttatcaataaaccttgaatgacgtcatctgccacgtcatcagaacactaaaacgctaccgtttcatttttgactctccccttgttcctctcttctctcttcttttcgctttgttgctgctctcttctcttctccgccggaaagtcgtgaaatctctgcgacttcatgaatgaagaaatcgtctcatctctctactgaagctaagcagacttgaaatttctctgtatagtcgttctttaagtttgatttcgtacgttcttcgtgtcttttcttctttaagagatgcgctccaaggacaaaatctcctacttttatgatggtatattcatctctttctctgttcttctttctttaagaaaaaaatccaatagttcttaagaattgaggtctttattctttattcatctaagttttcacttgtaactcttgagcaagttttatccacttgaactgcactacttggtgtctttattgctcaatagatgcatcgaaaggtcgaatctttcaaatctaacgtctagactaagtaaagggttacgattagtttgggaatactccaggtcgatttagtttttgagtagggtttttgatgaaaagaaggaagggttttaggtgaagtttttgatttttcgattctttggatctagtgtaagcttaagctagaagccttcttgtggtgaaaacgactctagttcttgtgaagttgacttctttgattgttttggtcaagtctttgttacttctttgctgaaatatgagaccctagaactttttgttaactttagcattgtgtataaatgtttcaaattgtgttctttcgaggttcctctctgagaaaattttatagacttgatagttatataacctcccttttcgtacttcaagatgttctgcatgattcaaactctgatgagagtttcagatttttttcttgttgatgatgggagcctttttgtggcagtttatatgaaattttgatgttatggttgattgttttttttttttgggttgcagggg

SEQ ID NO: 5191 - DNA, 5511 bp, Arabidopsis lyrata
  Intron number 3 from transcript 905297 (locus 905297) deri ved from phytozome v7.0 (chr-ID scaffold_3; pos 10109521 t o 10115031)
cgagtttggtgttgatagaattcatgaacaaagaaacttgtgaaatgattttctatctttctcaatcagaaaatgttgttacaattggtcttatatacaattacactaaaccaaagtaaaccaaagctaaaacacaaaacagataaaccggatctaattacatggttatctgatcaattctaagagcccccctcaagatggaggtgcatatatattaagaactcccatcttggacatgttttcccgaaaaggagctggataaagagctttggtcaggacatctgcaagttgattgtctgtgcgaacatacatggtcttgaggatccctaattcaatgcattccctgactttgtggcaatcaaattcaatgtgtttcgtacgttcatgaaacactgaattgttagcaatgtgaagagctgcagtgttgtcacaatacaagtaagcagggagagtaaaaggaaccttcaaagcctttagaagagcacttaaccatatcaattctttagtaataaccgacatggctctgtattctgcttcagcagagctcatggaaacaatatcttgcttcttggatctccaggagactaaagaattaccaaggaacactgcaaaaccagtaactgatcttctggaatcacgacatgtaccccaatcagaatctgaaaatcctcgaagtgtaaaatctgcatctgtaccataaaatattccttgaccaatagtacctttcaaatacctcaaaactttatgaatggcctgcaagtgaatcagcttaggagcacttgaatactgagccaactttgagacagtgaaagtgatatcaggtctagtgatggtaagatactgcaatttaccaatcaatctgcgatactgcttgatattttcaatagtatcaccttcagcttcagagaatttctgatttggctccataggaatggaagagggtttgcaatctgaaaatccagaagatgccaacaagtcaagtacatatttcctctgacataaagaaattccctctgcagtcctggcgatctcaataccaagaaaaaattttggttctcctaagtctctgagttgaaaataaccacgcagttgttgtgtaagctcagatgctgcagcctcagtagtactggcaatgagaatatcatccacatatactaagaccaccaaataattgccattactgaacttcacaaacaaggtgtgatcaccatgacatttctcaaaccccaaaccaaccaatgtagtagaaaatttaataaaccattgcctggaagcttgctttagcccataaatagacttgtgcagtctacacacggcattaggagagacttcttcaccttgaatctctgcatatcctggtggtaatttcatgtatatttcctcagcaaggtcaccatttaagaaagcattagaaatatctaattggtttaaaaaccattgcatcttaggtgcgagggatagaagtaatttcacagtcgccatcttggcaacaggtgagaatgtatctataaaatctataccctcttgctgagtataccctttagccaccagacgtgctttatacctttcaatgcttccatcagctaaaaattttatggtaaataaccatttgcaacccactgcaactttcccagcaggtagatcacatatactccaagtacctgttctcacaaaagcaccaatttcctttcccatagcatcattccattgtttgtcaagccgagcctctgaatatttttgtggtaattttgtagtggtgataatattaataaaagcattaaaaggctcagataagtatgaataagaaatataatttgctaaaggataaggagatgttttagtgggagtcttagtaatagtaggagtattattatagcaatgaaagtcctgcaaatgggaaggcagttttctctgcctagtagatttaagttcagaaggaacagaaatcaaggaggatgactcatcagaatgttgaggagcatcataagatggttgcactagaggcatatgtccatcagtgtttggtgcaggaagagaaatatgaggaaagaaatgctttgtatcatctgggatagtagatgatgcaaaaggaaaaatatcctcatagaatataacatgtctagaaatagaaactgagtatgtctctatatctaatagcttgtaacctttataacccataggatatcctataaaaatgcaagccttagctctaggatcaaacttagttctagatttaggtgaagtagaacagtaacataagcaaccaaaagccttaagggatgagtaatctggtgtttcatttgtgagtctttcataaggagttttattatcaatgacaggggatggtaacctattaataagaaacactgctgtcaaaacacattcaccccaatactctaatggaaccccagactgaaacataagagccctagctacattcaacaggtgctgatgttttctctctaccacagaattttgttcaggagtttcagggcatgagtgataagatttaataccttcttttaaaaacaatgcattaaacttcaattcatgagcattatcagacctaactgaacaaactttagcattatactgagtttcaaccattttaagaaaacccggaaaaacagttaacacatcagacttttgtttaagcatatataaccaagtagcacgactaaaatcatcaacaattgtcaagaaatacctataaccatctacagtaggaacagaaaaaggaccccaagtatctatatgaaccaattcaaaggctttttcacgcatatgattcaaagatttaaaaggtaaatgcttctgtttagataaatggcaaatgtgacaatgtgtgattttattattaatcttttgctttggtaacaacaaaacatcagaaagagtatctatcttagcaaaagaagggtgacctaatcttttgtgccacatgtcagcatcaatcttaagactagaacaaacagtagtacctggaaaagaagacatgtcgacaagagttttatccagattcagaacatataaattgccgacttgactaccttttccaagcatcaattccttggtaagagcctgaatcatacattcatcagatgtaaaactcactttagattgcaatgttttagtaattacactaacactcaataaattaaatttgaactcaggaatatacaaaacattgtggagagctaaagcatcagtaagttgaatgtatccagtaccctctattttgactgtttgaccattgggaagtctaacatatgttctatctaaggttttgtattctagatagatttctctttgatgagtaacatgatgactagcccctgaatctactacccaagctctaaaagacaactcagtttcatgaggtacagaagaagtcaacatgtcataataggtgtaatcatagagagaaaggaaagtacctgttatctgtgagatagtaggtacagaatttgaagtcgaggctatagctttgtcagggcatgaagtgatactaggggactgaagctgggtacttaagtatgagatcatttgttggatgtgatccttagacatgtggtctggctcagaactaggtgcagtgatattcaactgatcgacgctagctagatttgctgttccaacataagagttctgctttgccctaggatgacctggaggatacccatgaaccttgtaacatttgtccacagtatgtccaatacgattgcagtgtgaacacttaggtttcttgaagtttccctgagctagtagaattggagtctgatcactgattacaccttgagtctgaaacgctgcaggactagggactggttttgaaacaaaacctaccaacctctgactctcatcttgatctagcatgttatagatctcattcagacttggtctaggcttcatgttgagaatttgacccctaatgttattaaaatcatcattcaaacccatcagaaattgtataaccttacttgtttctgcttcctccagcagttcttttacttgatcacagtcacacttcttcacagtacgagatttggtgttagacaattgttcccacaacgtcttcttcttcgtaaaataagtggagagatccagttgtccctgcttaagagtcatcacagcttgttccaattggtacttccttggtagattattcaccttaaaacgagtaaacaaatcaatccacatctcaacagcatcttcatagtatagaatactgtcatagatttccttattcacgacattaagaatccacgacttcaccatactgttgcatctgctccatagacggaattttgaatcactaacaggtggtcttagcagagatccatcaataaaacctagcttgtttttcgcatctaggctgattctcatcgctattgaccaactattgtagttactaccatcaagaacatgagctacaatcgataaacctggatgatcggaagagtgaagaaacatcggattttcgaaaggatcagaagccttcgatacagatccatgaacttcatacgattccggtttgagagaaaaaggttgtttcatgctcgcaagctttggatcttcatcgatccctgaatcacgaacagatttgaccgcagatccttcatcctccggtgttacacttctgtttctcagttttcctcctttcttcaccattttctaccaaatcgaagctgcggaatagcaatcggacgtgataaaagagattttccggtgaaaaattgaagaatctgaagataaaaagaggtgaaatcaccagattttggagaagaaaagctctgataccatgatagaattcatgaacaaagaaacttgtgaaatgattttctatctttctcaatcagaaaatgttgttacaattggtcttatatacaattacactaaaccaaagtaaaccaaagctaaaacacaaaacagataaaccggatctaattacatggttatctgatcaattctaagagatatcttcaggaaaagtatttggtggcagaaacaactttaaattcgacttctactttcaaagagccttctttgttcaaataagcctcccggagtttagctaaagacacaaattcaggccaaccccaactataagtggaagaattctgataccaacatttacctgcagtaaacagaatttaatctctcatgaatatacatcacaatatctaaacaaaatgttatgacttacttgtcctagtaacgtgattgcatccaaatgggtcgacaattcgcatatccacttgcgcataaacttcttcctttattgttttatcatcagctttcagatagagggataagaatttgcaatttgttttgcccttgggatacaacattatcaccctaaaaacattataaattgttaaaacatagtgatgttatttcagatcattatgttaatataaaactattgattactcaccaattctttcctcccattaaaaacttctttgattcgtaggtattcactttcaacttagagaatttgttgaccgt

SEQ ID NO: 5192 - DNA, 390 bp, Arabidopsis lyrata
  Intron number 1 from transcript 340395 (locus 340395) deri ved from phytozome v7.0 (chr-ID scaffold_3; pos 635001 to 635390)
ctgttcgtaagtctatagaggtagttacttgtggtgctttgtagatttggataatcttattaaggttatgtttttggtgatatataatgtgaatgatcatgattttgaatggtatctatatatgtgattgccttattgaggaagcgcagatttaaggatttggtggtacaatgtgcttaagatagagttaaaaaaggcaatttctgtggtaactctaggttgaaaaatgttaaaaatggacattaggtttgttatccagagctgattcttcgtaaattttgcttcttggtaatgcctttaatgttgcagttgtagtagcattcatatttttaagtttgcctgttaccagttgcagtgaacaaggggttgttaagtaaacggagacaagga

SEQ ID NO: 5193 - DNA, 358 bp, Arabidopsis lyrata
  Intron number 3 from transcript 472688 (locus 472688) deri ved from phytozome v7.0 (chr-ID scaffold_1; pos 10870904 t o 10871261 reverse strand)
attgcatcgacgcaattaactcttattttcaacaggttggtcttcaattatccctcttttgtcactgacacatcatgaaattgatttggttacaacagagtacttacagggcttaagattgtcgatgcaaaaattgatgctttttctatggaatctagatggggtttcaggaatagggtttgattattttatgagtcttggtacgtttttgattcactatgtagctgaattacgatcttgtggctgtgggtagtttttgctctgtttctggattattattcttcaagtttccatctttgtagtttcgtatcggtgattcctgttgatgttgttttgcgatttatgaaggttcttagtt

SEQ ID NO: 5194 - DNA, 3596 bp, Arabidopsis lyrata
  Intron number 3 from transcript 909160 (locus 909160) deri ved from phytozome v7.0 (chr-ID scaffold_2; pos 16664490 t o 16668085 reverse strand)
aaaataatttgatacagaaacataaatgtccttacaaaattgaagattttttagattcccaattaacaggtttcgtagaatgaaattaaaatatcttaaatttatcataatgcaaaatccattgaataaataaataaaatacgacatatatatattggaaaggcaaaagatatatcccacactataaatgtctaaaaaccaaatggttaccacttaccataaaaataataatcgtcacctcaataattttcatctaataaaaaagtttgcttttttttttttggtaggggttttattgcttttaagacatatcacatctaattaattcatcaaaataaagattgatgttaagactttttcttttacagtactacacctaaaaaagatttaatgtcatacaaccatattaggcgaaataacattatttaatattatcaacggtgcgttggactagttgttaggtgcaggggttagatccatgtgctctttagttcgattcccggtgagagagatgttttacgtcatgttataagatatagcaaaggttggtcttggaccatagagggggagattaaaatctaggcccaaaccccctcttagttaaaaaaaaaaaacattattttaatattaatgtttattacttattaggtcaaactagtttacctaactaatttaattagatagagatcttaagaaatttcagaatatttcttgcttaactcagttctaaaacataaattgatcagaatatatattacatagtaatatacttagaacctatattttgacctagtaattcaattaaaaaagtgtaacttctatgcaggttataaattaacgaccatttttttaattaagtttcgatttgaatctcatgataaatgccaaaagtcatcaaaactgatcaaagttgagagatttagtactgcaaagtttggtaagtggtgcgtggtcagtggtgtgatgtctctttttacccaacgcaaaagggagacaagttgcttagtgaaacttatacacatatagggaaaaaagtacttataaaagcaaaggcaaagatactgcgttttgggaaaaacagtttttttaatatcaaaatgtaattattactattgtttacaaaataaaacatgccttgagagagagaagaagaaggtatttaaaaaaaaaatgtgaatgaaagattctgaatctgcctaacacctcaagcacatcacatggccttatgtttcttccttagcattgatctcttttcccattgctttatcctcttttctttgcgagcattgtggagttgttttatatatatgccactttttatcttatatatgtacgtactaccttgaagctaagtaattgatttatggtttttgttagtagcattttataataatggaatggaacaatgaaacagtaacaagaagagaatagaatgatagaaaccgttataaacaaacaaaaaagaattagaaaaccgaaacaacgaatttgttttcttttagttttgttattctagcttaccgaagtgtgaattaccaacaaaatctgcatctgtttatatagttctgtatctatgcatgtctataaaaagtttatacgacattaaaatacaataacactcttttactgaactcgagttagggccgtagaaaagagactatactcctaaaagtatttatctttatatcatatgatctaaatagattatggccacaaagatcactactttttggtctttcaaagagggtaaaatatactaataatttatgtagtaagcaggtgggttgaaattaataacagaaaattgcttttacaattaattgtggaatccctcgatcgaactggaaaacgaaaagccaaaagaagttttgccaaattatttgtaggtgggttctggtgactagtcaatttatatgaatggacactttattaatgttttaatacatacacagaaatatggaaatattaaacaatttgtatgaaggcatcctagaaaaatattccattttcagttaaatctgaacatttttctcttgttgggtttacttagtgaaggtcagattacaatcaaacttgattgataaagaaacccatatatatcctctatatttttagttttaaaattattgatataacagtgtaattgtataagtggaggtggtttgttcgtaatccctaattaagaccacttaatggaaaaaatattgcctaatattcgttgagcatctctatcatagacccttgagatttttatttttctattttctctcacccgtaattgttaattaaaatttgtaagatagaccaattcaattgatttttcaaacaatagtttgggcgacctagggaaacgtagataaattaagggtttttaataataaaaccactcaactaaagatgaatcgtaaaaaaaaacctcaactatatatttagtgcaaaaactcctcaactttaaatatgttcatgaaaattccccttcgtctccattatcgtaaaaattagacggattacagttaaattgaaactgaaaacgacatatatacacttaaacaacatgaattgtaaacaaaaataacaaaatcttcttctatctggttataaatcctcaaacctaagctctaaagttctcaaagtgaaaaatctaaattgatgaaccataatttatcatagtaagattctctgaagtttgtgtggagtagaagtcgattaggagagattttgaaaaatgttacgttctaatttgaactgtagtccgtacaatttttacgacactatagacataggggaatttgcatgaacatattcaaagttgaagagtttttccactaaatatataattgaggggttttcttactacttatctttagttgaagggttttattactaaaaatccataaattaactatggtactcaagactagagtgttggactaacatcaaaagtttgcaaagaaatccatttcttgcagctaaattatcaatgaatgagaacagaaaactaggaagacactgaatctttgatggttggtcatgtagggtcaaacaagagtaaatgcaaacattagggtcattttccatatttctaaaagttagccttcaaaaagcttttttttttttaattaaaaatataaaatgggtatgttcttaaaattcatcattttttttttggtgtgtgtgtgttaatctcttctctttttttgtgtgtgtgttaattttttcttcttcttatgtttttttcagttaacggtttgtaatgtattatttgcgaaacatatttatttttacaaaatcttataaccatttttcaaggttctataaccggtctctatattttttttggtaatcgttttgcaatatacataggtacaccatatttttgaatttgagttttcaaaaagcgacggcaattgtacaaatcgtcgttatactacacaatccaattattataactagcttcaagaaaacaaaactcttagatatcatgaatgtatttatagtgagcaccaacatatatttgttttcaaaattatttttatactaaatttagcactatgatgttccaaaaaaaaaaaaaaaaacagaagatattttcaaaa

SEQ ID NO: 5195 - DNA, 7248 bp, Arabidopsis lyrata
  Intron number 1 from transcript 320178 (locus 320178) deri ved from phytozome v7.0 (chr-ID scaffold_4; pos 1948429 to 1955676 reverse strand)
gataaggtattcgaaccaacctttactttttctctttttggtcttattctaagtcaatgtttatatcaatgatttaacagtgaacactagtccatgactataaagatgaatagagttgaagaatattatttagataattctgtgaatttacttagttatgctaagaatacctttgattgctatttcatatttttatgagcatatagatgaaaagaaactaacaacaaaatctcaagcatatgatacaaagatttcgatctttgaactctttaatatttgtatttatatgctacaagattaaaactctatatcatgtgttgacaatctgacatgtacgttggtcaaatgaatttgctagatttaagaaaattagttggctcgtctttgtttttcggatggcccttgaatcactaacgctatgataccaatttttagaacctatggcttcttaatcccaacataatgatgggttcattgtgtgcaaaagaaggaaaaaaaaaatgatattgtaatcataatagtctagaaagaaatttggaacgaaaacagaggtgaatctgaaatacacatcttctatatattgaaagagagttttggttgttaatgtggcaagcccacaatttttcccaacctttttatttttttcttttcttaattaacctattccacttgccaaacactcttattttctaatttgactattctaatactaattgccaaatacataagaatcctaaaattaccaaaagttattatttcaaaagatcatatattaaatcttaccaagaaatacaaattttttaatatattcgttgtaatataatgcatttttaaaaaaaaattaatgcaaactacaaaaaatacttttctaaaattaaattttcctacaaattttttttttaataatcttctactaagtaaacataagatgaaacaaacattgttaatttgtcaccaatccaaatttacaataaaactaaacacaactactttgtaaattactaacatattaaaaattaataataatctaatcgaatttttatattttaatatagaaaaattaataaattaaatagcataaaatttatccgtacatagtacaggttcttacgtatggtgttgttaaatatggtatgatttttttgtaaaattctataaaactatatataaaatttctataaatatatttaaataatttaagtctaattgatctgcaattaaattgagttcttctgatgaccagacactattttagttttttgtctaagtctaagaacattgatcaaagttattagagtgattcaagaaataattcactatttgatcttaatctttatttttattttgctaaaataaaacatctttattttagatctataatacggtcatctacaaagtgatatgaatcaaaactatgattatttggtgagataaaatcgtacgcacttgtcacaagaatttgagctaccatcatgttgtgtcctctcactcggagatggtccaatatgtcacattagtactcaccccctgaaaaataataagatattggttgcttatgtattatccatcccccatatacccataattgtgacaattttaatatcgtttgcatttagtttgtctgaaatttatcgacacacatattgcttaaacttttttcagcatagattaaggggggtgtattgaaattaggattttagaaatttttgggattttctttaaatgacctgttattcaacttgtgatttttaaatcacttcccaaatccaatgttattgaaattgaaatttctataaaatcacttgtaatctcttgttattcaatcaacaatttgtaaaacttatatcaaatcaactgttattgaaaacataatttttttttgaaagaaatccacaacactgattttgggagactttgtatacatttttacatgttaaacccaatagaaaaaatcacaccttcagaggtggtatttggaacaatttgttataaaaaaaaaaaatcacagaaaaaaatcctctctttcacttttctcgtgttcatcactaaacaggggttttcaaacatgagagatcgtctcactaccgaccatcagatctgtaccgccgctaatctcatatacatcaagaatcactccgactccaccacctttaagcccgcaggtagcatcgccaacgccatcgtcttcgtcgtccttgttgtcgtcgccaacgccatcgtcttcgtcgtccttggtgtcttcgtcgtccaagttttcaatattgaagttgtaacacaaaggcgtaaactatctcagaatcacaaccacaacatgttttctccaaagcaagccttcccatcttttatcaattccatcacgtcatagcgtttttaatggaacgacatgtttcaaaagcacaaacgacattgcaaagagaattcttattgttataggttggctctttgcacttggtacttgttgatggtgatttcagtgacttgagctttggaatggtacatcaatggaatttgtttttgctacgatcgagttacgtcacttccgttttaattgaaatccaatttttcctttttgttctagaaaatctcaccaaatcattcaataatatctgtttaaaatctcaccaaatcacaaattattttttcttttttaaaattaaaatctaacaattccaacgaaagtatcctaaaaattcacaatatctcttcaaatcccaaatttcctaagttccacaaaatcctcctaaatctttactccaatacacccccctaagtaagaaaaaacattagatatactcaataaagtttatctgacaaaacagaagatattctaatccaagaagattgaagttgttgttttatatggtctggaattggcttgccaacaccgcttctatagtatttgaacccaaataaaatttcagcggcaagagcattgcaaatatttcgggcaatttgacttggacggacaagttttgaaatacctcaattgtcgatatccctaaacacgacatttttggcgtacatgtagagggtttcctcttccgcttttaaaataaaaaacagaaattcaaaaaatacagtttctgaaaaatagtagtttgtaaatttgaaaattaattctcttttatcctctcaatgctttattagtaatcctcataaattacgtaatcgtgacacgtgtcatgtctatcgatgatatgtgtcaaaaagtttaattttgttttactgaaagaaaaaaaagaagctaaaaatacatatatatatatatatatatatatatatatatatatatactaatgtatatgtctatatctaaaactttttaacttttattattcttaacaaaaaaaagaaaactaacaatatttttttccatgtgttattggtcaattaatttatcatgtattagttagaaaataataatttagcatagatattaacttataaacaatgaccgttgaagtttaaaataaccatataagttattgaatattaatttaattggataaaattatatttatcattgtaatatagtgtttttttttgttaattaaaagcaaaaaaaattgaaaaattaatgagcttattttttttttgaatacttattttttattatgtttggattaaatgcattaaattattagtatagttgtacgtatattttattttaagaattttagcgcatgtagtcataagtgaaacaataaatgttttggggaaatggcttataggatttaatttttgattacttaatgagaatgttagtatcatttttatttatgttttatttactaattttaactcatttaaaattagttccacatgaggtaaaactatatttcaaacaattatgttttgttatttgctaattttttttatatcaactaagatatatataatttatatgatatacatattatttttataaattatcagcatttatccattaagatgaagtgtgtagaattaaaatccagttttattatgatgaaatagatagttaaattttattgaaaaagaaaataggtcaaatcgaaatttagtttaataaaatacaaaattaaatatataaaaaatgtgtgggttactatttagaattcaaatatcatcaataagatagagtgtgcaaaattaaagttcagtttattatgatgaaatagatagttaaaatgtatagcaaaatagaatgtgtaagattgaatttctattgaaaacataaattactaaattaaatattagtaaaagtgtgtggattaatgtttactattcaaaatttaaataacatcaataaaattttacatttatatctgacatccgcttgtttttgtggctttatctagttattcattaattaggggatgcattcttttttgttgtcaacagcttttaattaaaattcaaaagaaccattccggatgaatgttgcttacataagtaatatgatgcggttcggtacgaatttttcgtgccaaattaggggatgtattcgactctatatttgaaatgatttgggttttaatgagttcttataggatttttatgattttgagtgatttaagggaagttattatgattttatgtatttttacatccttaatgtattgaaagaaagttttcggtgcttatatgtgtcaaacctgcaattattcttaaaatttttattttttcatttattttattttactatttttcttgccaatcaattttaattccatatacaaaactaaacttacataaattaaatatttcaaattttcaaaatacaaaatattctatataaatataaaaatatatattatattcattttaacaccaaaaaaatcttttttatatattataaaattttaaattgaaaccgaaaatatacatattcactattataaatgattaaatatttaaaattatatttataattttatttctagattaaaattttattgcatgatatttatgtagcaccaacttaaattcttaaattttgcaacgaaaataaattatcttggaaaaaacttaatataacataaatatactttttaggtaaaacagttatatatatatatatatatatatatatatatttataacagttatatactttttaggtaaaacagttatatatatatatacataacttatatataaagtctcatacatactatatatatgtaaatatattaatctaaatttttactataaaaaagttaacgtcattgaccaacagttagagtaagtctatccagaaatatattttgatttgatttccgagttgtgtttaaaatatattataaaactaaacgtaaacactatgtactctataacagtactaggactccgatcccccacgatgtcggagagaaaacgattacaacaaaatttaaagaggaaaatatcaaacgaaaattaacaactaaaaaaaactttatacaatatagataacaaaatatatacatgaatgttggataccaaaataatacaacattcattcatataccaaagaataaaatattggttggtcaaataaaccaaatgttactatgttgaattatacggtagcaataattcatttaaatatattttaataattaaaatttaatatttttatgaagaactgaaaccgagagatgcgactgtagatatcaaatataacaaaagttgcaacggtttgccaaatatgtcaaatgttacaacggttcgtcaaataacctaaagattacaacggttcataaaacaaaaccaaaactacaacaatgtaattaaatagttacaatttaaattaaatacatttttgtaattaaaaagttaaactaataatttatggaaagttacaccaagaaatgtgattgtatataattaaatgttataacgattatgttcattatggattatgttccgtccataactctgctttagtctttcttgctctggttttgcattcatttatttgctctgtttctgtcttttgtttttttttaaagctatttatgccaacgatggctagcaaaacagtttctagagaactgatgtatatattttcattattttgatatataaattatacattcaaacaaaaaaaaaatgttataacgatttataaaataaaccaaaagttgcatttgttcgtgaaataaactaaatgttgcaatgattcaactaaacgattgcaaccatttataaagagttacgataaaaagacgcaacgtagaagacttttattcggattgaatttttctaaaaaaatataactgtacaatataacttttattttaaataaatagattttataatgatttagaaaataaaccaaaagttgcaatttttcgtgtaataaactaaataatgcaatgattcaacatttcaactaaatggttgcaaccgtttatgatgagttacgattaaaagacgcaaccgtagaagatatttagtcggattgaaattttctaaaaaatataaccgtaaaatatactttttagtttaaataaataaacgttataatgattcataaaataaaccaaaagttgcaattgttcgtgtaataaactaattgttgcattggttcaactgaacggttacaatcgtttatgaaaatctgcgataaaaagaagcaaccgtagaagacatttattcggattgcaactttctaaaaatacacaaccgtaaaatatatttttaggtaaaaataaataaattttataacgatttgtaaagtaaaccaaaattacaattggttgtgaaacaaactaaatgttacaatggttcaattaaatagtcacaaccgtttatgaagagttatgataaaaaggcgcaaccgtagaagacaattattcggattacaatttttaagaaaaataaaccaaaaaatatatttttttagtttaacaaaaaaattagcgaaaggttgcgataaaaaaacacaaccattcacaagtacaaaatgcatttattgagattattattattattagattgaaaattttgaataaattaatgaaataaatattttcttataaataatccaatgcttaaaatgtttcaataacagtggattttaaaatattttctccaatgattgattaatatccccttttaataactgtcaagaacgttcggaaacggacaagtcatagttctaacttttattgactttacacacaaacctttgacatacgtaatgttttgaaactaaaaccaagtgattcggacaatatttgactgaaatctacagctaagacaaggcatttcacgagaaga

SEQ ID NO: 5196 - DNA, 1348 bp, Arabidopsis lyrata
  Intron number 2 from transcript 320571 (locus 320571) deri ved from phytozome v7.0 (chr-ID scaffold_4; pos 11937976 t o 11939323 reverse strand)
gaagaaggtgtgcaacattctataacataactatatacatgaaatattataaataacattaatatataatgaattgtacccagttatgtaaattaaaaaaaaaaaaaagttgacatactaattttgatgatccctaccatattgacagcaactttatctatatatatatatatatatatatatatatatatatatatatatatatatatatatatatatatatatatatattaatagttgaatcaacaaaattaaatttttattataaaacggttaacgggtgaaatatttaataacaaaatttgctctcctttcttctcgattataacatgttcggtgtacatgtgcttacttattattatgatatgaaatggtctaatcaaaaaaattcagattctcttttttcagaaaaaaaggagcatccatttttttttgttaacaccataacaattgagtattattttcattttcttatcaaaattaattcatttttcgttattttctaacaactaaatttcatctctatgaatataaatttggacctaatccagatttaagccataccataatagttgggaccattataatactaaaacttaatataaaacaaaataactttattctttaaaatattttagaaaattaaataacatctcatatgagttaaaacaataatctcatatatgacttaaactaattacggaaaaaatctcatatgacttaatctgataatttgtaggaagaatatatacattataaaatttagataccagaaccatacatgtaaaatctatctctgaaccataaaactttgtagatgtatatagaaaacaaaatcttatttgtgttgataattgtttgatattggagccatttatcctacaaaagaaacctaatagaacacaaagacatttgttcaaaaaaaaaaaaaacacaaagacattaacatatacacaaaaaaagttctgatgaataaataacattttattttattttgagtctaatttacgattctcctaatttttaaattaaaaatgttgcaaaaataattacttaatattttaattataatgttgaatcaattttataaatggttgatccatatttaaatttaaatgtttaattgacatcatatggtgatcaagttacttaaaattatgctatttgtcgagcttattataaattacattcaaatttatcagtataaattaatggcatggaatcttatggtttgtaaattaaaagttagtttcaattttctgatatttaaaaattattttcgatttttacataccagttaatatatagtggatacatcatatatggtaggtttgctctcgagcttcac

SEQ ID NO: 5197 - DNA, 509 bp, Arabidopsis lyrata
  Intron number 1 from transcript 473331 (locus 473331) deri ved from phytozome v7.0 (chr-ID scaffold_1; pos 14001553 t o 14002061)
tcgtcgaagctttgagctctacctcttcatctccgggttagtaatattcttttgtggatcggtagtggaattttgttcttcgtcttgtaatttcgtatgtgttgttgttgtttctcgattagggattagatctttgctctttcgttgagatttgataaatttcgatggatttagctttgtattgattgtgttattgaacatgaaagcttctgttgaatcatagatctagagttggctttgcattctcgtgattacgaattgagattatgacttattaggatctggtgataaatagttttgtatcattctcggacttttgtagtttagtctttacataatcgaaatcttgaagaagattctatggaatctaagaagtaaatgttgatattagtgtttggtttcaagagttaaagagttttgaagttggagttgttattgattgtggtggttttgtggttgatgtgagataaagatgtgttgattgtgatggttttggtttgatggcagag

SEQ ID NO: 5198 - DNA, 404 bp, Arabidopsis lyrata
  Intron number 2 from transcript 337560 (locus 337560) deri ved from phytozome v7.0 (chr-ID scaffold_1; pos 28913508 t o 28913911)
gcgccggagctttagtcgaaagctttcctggagtaaatatcatcagtttgaattgttccaaatcaatataaatgttgatttgatattttgttcatgctactttaaggaaacaaattaattttgtttccatgtacctacaaaaaactactaactcttggaattctggtttatttcgtattatcactatggctaaactaaatatttgtgataaaaatatatttgaaactttagataatattaattttaaaacaggagaatatatttagagagagagagagagagggagtagaaacaaaaaaaaaatctttattccttcaaagttacctgactatttgacaatttttcacttttttttataaatcattcaaggcaataaatttgggaacacagctaaacaacttcaa

SEQ ID NO: 5199 - DNA, 3636 bp, Arabidopsis lyrata
  Intron number 3 from transcript 915045 (locus 915045) deri ved from phytozome v7.0 (chr-ID scaffold_9; pos 213735 to 217370)
gtgaaggtatccctttttcgctttctagacagttgatagtttgttataattctcatattatgagtttttcacaaattaaattttctacaatattgtttttttaaataagatagattaattttctctctaatcaataaataattctaatatctgtttcacatgtacagtgaaattctttgtaaatagaaagatgttcattgtatcgcctaagattgggaatgatacatcctttattatataaaagagaagtcagtcggcaattctcagagtgacatgtgtcatctacaattttaaaaagggaaatttattttttcttttctctgcaaaagttaaaaaaatatatatattttagttatttttcctttaatcctttttttatctgtcgaaaactgattttttttttaaatcctttattatataaaagagaagtcagtcggcaattctcagagtgacatgtgtcatctacaattttaaaaagggaaattttttttttttttctctgtaaaagttaaaaaaaaaatatattttagttatttttcctttaatcctttttttatctgtcgaaaactgattttttttttaactacaaattgttttaaatgaaaccacgaatccacgatcccactcttctttcttttcaaccataatcaaattaacttcccactttcatccactaatttcttcaaaccatcatgtatcgtttgtctcatattataaaaggatgggatttgcaacttattccagatcttccaattaattttctaaatcttatttctaaatcctttaaaattaacaaaaatcactaaatttttaacaatagcatatgctcctgcatagcaggggccataacactagtaaatatataaactacgattaatgtttgtatatataaatgatataattcattttagaaagaaagaaaaaaaataaaaaagagaaagaaaaaaatgaaatgtctaaccttttcttattctctaaataatgaatcaattatgattgatggttgatggaataaattgtagacttatcatatatagctatgtgattaagattgatgaaattaaaatattttatagtaatgttataagttctaagttctaacttaaaactaccgaaggaaatacacacacacacgatggtcgcgcttttattggatccgcattataatttagtagatctactataatgaagttaatcgagaatcaaaacttcactagtttttttttttttttttttttttttttttttttttttttttttgtcatatagctacattaataaacaaaattaatactgttgacttctttattttgtgacgcacgtcctgccgatgaacatttggtacgatgtgcatgttgaccattttaccctctgtatcaaaaatattaattttatagagtttttaacagtttagttataaataactatttattcataccaaattatttttcataacattaattgataaaaatttaaagaaaatcattttttttgatatttttgatacaaaaataaaacctcaaaaatcattctttatcatacagaaggagtatataattatcaagtgacgtgatttacgcaatccaataaacgtaaaaacaagtcttgatttctaagtaacgcgagtccttaaagtcttcttgatattttggcatatgctcagaagtcaagagttcgaacgagtttcgacgttgaactatttttacatgttgattcacatgtgatgtgagatgttagtactagtaatatttttcatttgtaccccctaggttaaaaatattacaaaactttgtttacgtggtttatattatgaactagacattaaaacatactaaaagatattatagatagtgtcaatagtcatcatgacaaagttatacataccgaaccatatgattgaatggaattaatatgattcatttagggaatttggtcaaaaatgccactttgaccaaaaaacttacaagaaatgccataaaaaaaatttctttttgaaattaccataattttgaattattgtggtttgaactgacgaaattactcctatactaaacaagtgagaaaatgatagacaaaaattgttgtctactaaacaaattagtggacaagattttgaatcaatagatttcgaaaaaatttgacggacaagaatcgttatccacattcaatgctacatatttcacaaaaatttagtggacaagaatatttaatttcatatccacattgaaatcaacagaattcaaaaccatatatccatacaaaattcatttaatcaacatatttttaaaaaaatgagccattgaacttacaagatagcaaaggttgccgaaaattcctcaaaaaatattgtctacaataatttgtatacctaaattgatttaacaaattaggcataaaatttaagttgtccactgaatgttaatttgtccactaaaattttgagatcgagatcacataatttaatgttgaatggacaaaataaatcacaaggaaacggtagacaagatgtgtgaatttgtcatattgtctaccacaaattgttgtgatgataaatgttgtccacaaaattttcaaaataatgtccatgaacctgttctagatctcatggaatcggatctgaatgagattccgttagaaatgtaaaagcttttgttagaagcgagattagagaatggaagctccgaaaaaaagacgtgtttggtaactcgccagaaaaatcattgaaagaagttgttgaaaccggctaaaacgattaagtttttggtgagttagttgtgaaagatgtcgagtactccatgatttttccaaatcatagaatctcggaaggctttctttgttgtcgttggagagagagaggaaagaaggtgagagagagagaaaagagatcgagagaagaaggataggagaagagagagaacaaagaaaaaaaatgagagaaaaaaaagaatgtggcttttagtgaaggatagttaagtctttttaagtgttgatatggcatcccaggaaagaagaaagtcaaagtggcattttagataagtttttataaagtgtgtggcattattcttagttttctcattcatttatttcacgtgtgaacaattacagtatttcaaaaataaaaataattgaaataaatatgttattaattatacttttagctagataagatattataaaacattcagtatatacactgaaataataatagagttatgtaaacttattttttgttactttgaacctcatatatataagtttgttctatgatttgaaaatgtcaaaatcgaaggatttattttgaatacaattgtattgtatattatatataaaatctttgaacgtgattttctattaattcaataaaattctcaatttctaatttttcatattaaactttgaagtgtaattcttttatctatattaaaataaataaaaactagaactatgacattgatctggtgatatattttcatatagaaaagagcttataagacttatattctccaagttggtaaataataaatatatccatgtagtgtttataaagtttttttggttgattagttaattaattagaaaagttgcgtatgtacaatatttaaacgcaggaggaacatttgctttgtactcgctgat

SEQ ID NO: 5200 - DNA, 1196 bp, Arabidopsis lyrata
  Intron number 1 from transcript 914388 (locus 914388) deri ved from phytozome v7.0 (chr-ID scaffold_1; pos 27800514 t o 27801709 reverse strand)
ttggattttggcattggtctaagagcagtaagtgatttttttctttcttatgtacatttcttacaaatggtagatcattaaagaataaaccaatctctacttaccttaatttgttctaaccacgtcttttggtgcttcttcttaacagggatattgcaaaaattccaatttgtagattatatctttgccgcttctcatcaggtgacatctctttcctcttttaaacctagttatgatcttcacaaaagtttaccaaagtttatgatttcttaattgactcaatcttttggtttccattatagttatatttgttgtgtctgaattgttttagtagtaggagttttgggaaactgtatgattcttttgataggaaactgtatgtataaagatttcttctctttgtctcccttacagcaatttttgtctcttgaaaagaaagctctggtttttcaggtatgtcctctttctattgcttctcaaatttcaattatattagttattggctttgtttattttttgttgtagcaagcatgaattcgtttaaggtccgtgtcagagaccaaatgattgttctttcattgtaatgatttgctagtttttctaaaagaaatccatgtgattcatagattgttcacgaagttcagatactgagcggtgagtgttcaacatcatatagcttctttttgggctgatatcaatctcattgttcttatactcattagtgttaatatcaaacgtataagacttacaaagcaccgctaaggtattcctctgaaactatcttcacccatgtaattggaaattttgtatgttttactttatctccataaaacgtagggaggatggttgactttggtctatatgaattctgaatcttatttcttctcttgcaggttttattcatgtgaagactagtataaaaattgatcataaaacctgatatgtttctcaaatcaggacatctttggtacatgttctttttctctgttttcaatatcttactgttagtgcttgcgttttaacttttgtagaattagtccaattcttaaaccaaaattctctccccctcttgagcttcttccacggcctctctaatggcggaacaaaattccccctaagatcttcttcttcttcttcttcttcttctaatcaccggattagagtctcatcaacggctccatttctggcttcaagtg

SEQ ID NO: 5201 - DNA, 575 bp, Arabidopsis lyrata
  Intron number 1 from transcript 484417 (locus 484417) deri ved from phytozome v7.0 (chr-ID scaffold_5; pos 2922741 to 2923315 reverse strand)
cttgtttcctccttagctttgccaccggtggcgaggtaacgtcacttattgccctactaaaccggtttaatgttttggtttcgaaaaattagtcattaaactatataaatctagtacaaataggtttgtttagggtttaacttttagttagggtcaagctaaatatgttattagttttttctaatagtaaaaaccattttaatcgtatatatatcaatgatgttaatttttcatccacccaatttttttatttttttttgagcttgttgttttagaaaactagttactaaaaagtaaaacggattctattataaatatcggtttagtagagttttaatttttgaacttagtagtattttcccaaagaattaagtttcgattctctgttttcttttcttctctaatttgtagtttggttcaaaattatgttcaatccgatttttgaactgaacattttggttgaatattctaactaaaatcacccgtttgacctaacttctccggcaagtaattaaacctttttcaaattattattttcagccaattccagcgttcggtctctctgccggagtagg

SEQ ID NO: 5202 - DNA, 798 bp, Arabidopsis lyrata
  Intron number 1 from transcript 482479 (locus 482479) deri ved from phytozome v7.0 (chr-ID scaffold_4; pos 16686846 t o 16687643)
tccgatcttcgcccccatcgccgtttcgttttccggtaatactccaaaaaaaaaaaaaaaagaataaataaaaccctaatcgcaattctctcatcctagtttccgatcgctagtgcttctttctcttctccttggtgaaattcaatacgtttcttactattttttctcgtttatgttttgggttttggtagtaagtcgaatttaaaaccaggaaactccaagccgtgtcttttctccaggtctgattggttctttctgcattgcttttttttttttaattctcctttaatgttcatggctactgtttaattatctgttaaattatgcttgagagagagagagagagagttacgtcactgttttgattaatgtgtgaattgcgtcatcaacttcttcttttctttgtatgtttgcttacttgttgacttgttctatgagttcttttgattttggattctggggttttactgtttacactatgcaatttttgctttctcaaactactttcagaagttatttttcttcattagattattcagttatgttgtgttctttggtcatgaaaagattcatcaagtgcccaccattttttttgtgcaaaaagtgattttgctttttgttcttcataatttccaaatgaattgctctctctgtcaaaatttgatgccctgtttttttttgtgttgctcaatctactgtttttggctccacaagtctcttgattttctagtgtatcttctcagttcaacaaatgaaggaaagttagttctgttgttattttagttttctgtaacagcc

SEQ ID NO: 5203 - DNA, 1633 bp, Arabidopsis lyrata
  Intron number 1 from transcript 949763 (locus 949763) deri ved from phytozome v7.0 (chr-ID scaffold_8; pos 14957684 t o 14959316)
caaggtaatgcggctatcaatacgtaatgtatcccaattctagtacatctataggaaaacaaaaaggcatgttgaagaattctttgaatttgacacatgtaacactggtgaacacattaaataccccatcttttttgttcacttaagttcatttggtagccatattctgtaacctttcgttccatgtgaatatcttatgaagatcctttttaacaattctaggaactgtctttctttcaataatgtgaacatatgtttttacttgagtgttgttaacaataggcacttttaacatatggcaagtcttgtttggattttgtctagtcatttgagatatcatttacccaaaactttcaattttaggtcaatctttgataggagtaatgtggagtgcacataagtatcttgaagactagttgtaagaattacatactaatcactagaactacttgttaaattactatttgatgcaatgttttgttctttctccttaggcattcctctgtgagtgcccatccttgccacaaatccaacaacctttgttgtttagagatcttaactcaaatttacatacccctccattgtttttgttgctctttggttgttttcctctttcacttccaaaattagatttcctttcgctagtaaacctttttcttatagctccatctcaatgatcctttctattcttagcactcaacgatacctcctggttaggtacgcaacaggctccgaatccaatcatcgagcgtaatatcgtccgtgaagtaactgagaatgataggtggtaagtagttcgatgcgcaagcacgaagactgcaaacactagttatccgatcaccactcatacgccgaacgttcaattgacccaaaaacatcaatcgttcccacaaatcctgccaagccctcttaaatccaaagaccaatcttctcactcttatggaggtgtcttatatgcctctagactatgagctacttggttaattcaatgatttttctttgcaattcgaaactcttatcttctttacatagaactcagtggaccctttgggttgggtatcagtttgatgtaaacccaactatcatatttacttcttttgaatctcttcataaaacacaccaattcttctttttcttttcggcctatatatgaggttgtgccatatatatctcttcttcgagttttccatgaaggaatgatgtgttaacatctaacttctctagttccaactctttgggcactaatttcttacgaaaacatgttttattagatgagaaaagatttcattgtaatttgttactttaactcccatcttcctcaatttctccttgtaactttgatgatctccacctactctatatttcaatggttcgttgactttaatacaagtttttgtatctctgtttcgttttccagatctttatagctttcattcttattgatccaatgcattatacaatcagtagtattaggaagatacatatgcattaagtctaatacaggaatcagtcaaacattatagaattcatcttaatgttgtcatcatatttgagatgcttttctggtataaatagtcgaactaatgtaaaatttcaacgtcttttgtttttgatggttaattagatattggaa

SEQ ID NO: 5204 - DNA, 7796 bp, Arabidopsis lyrata
  Intron number 2 from transcript 315177 (locus 315177) deri ved from phytozome v7.0 (chr-ID scaffold_2; pos 1926705 to 1934500)
ccaatatcatctgttttgacaagtcctagggagaagtttttaaattgttatgttaggaaacatgatgacaagcagcttgttgctgagttgttggttatcttcactggagatagtgtttcactcaccgatcagaagacacgcctagaacaatgagcaatgttaaggattgttttttgctttcttttaggtttagtagattcattagtgaatcttgatgcttgactgtgggaagtagagaatagcttttgtgtacgagtgtctgaaacccatttagacttttgtaatcttaagttgacccggatccaacccttttccttctattatggtatccgtttgggacaataacgaattgtaaatttgaatctctttgtttttggagtccttttaactcttcagcatcgctagtctggaaacagcaacacaactatttactacatgacatttgtggcttattggtacaactagaataaagatccagaggttttggattgtctgaacccgaatacttttaactctgaaggatgatgaatcagtcttgtacgaaacaatcttcacaattaggaatatatcttatttcacaaactttgaatcccttctctaatatattattttcaggtttgtagtctagaaacaacaatgcagccaaatagctgaaggggacatgtgaatccaaatgatatatttgctaattttgttttttttaaatcattgattctctgaaattctagcgaccttgttcgtctgggaggtatgcgtgaacatttctacagtttcttattttgtgtttgatgaacttatcgtcctttcttgatatatcttgagtttaatttctgtaatcacatatcttgtttcgacaatgtgtgtttctttttgttaactatgcttttggatatgcagttattgactgctgatggacctaacggctctctatgactgatattagtatgacctttagaggagttttgcaggttagaggaagacactcttgtgtgcatacattgggagtttatttctcagtcctcctgcaacacaacttgagtatgagtcatatatatgcctctttcaatcgttcgagtcattgcttggatcaacttgagtaagatggaaacaacagaaggcagctcgtatgtgaacacttgagatgagttttgagtctgcaataaacttatatcaagttgcatatcatattgtatttaattgtaggttgtgtggaagcaagtcgtaaatcaatgcacgaaatctagaaaccgcttcaaccgatgaattttaactttaattcgttaacgtttgattttatgtttgattgatagtgttttcttattttaattgttggcaaaaataatttttttgagtttctatagatctgcaggagttactcttattggctttttccttatagcgataaacagacattgatggagcttactttgggacaacatttccccatctgttcctgatgagttatgggcatctcaagccaccaaaggcaacacaaaactatgttcaaagagtactgttcgggttcaaattgcacaaaccgtgaaggaaatttgaagacaaataaaaacccaagaatatatcaagatcgtggcttaggtttggaaaagagaaaagaagagacgtgtgtggtaaacagaaacaacaaaaagcattgtacgtaatccttttaaagttgaagagagcattcatgtctctatttgtcttctggtacatacacattataagaagcaactagaaagcatatggttacaaggaagaaaaacgaaaatccttttgatgagtttgttaaaacttgaaactgtattttcctacgttttgtaatcttttcactttatctctatctcagatttgttctcatggttgcagagcgtttaatcagaatattacatatcaaaacacgtaatatatataaagaggcaagaatgtacgtattgttaactcaagtctctggatattcaaacatcgtcacgtaatttaccattgtgtttatgacgaagattttggttccaatggagctcattgagcttatttctcaagaaaaatcctttagtaatctcctcacaactcgtcttttcatggattgtctgaaaagtgtttgtcctcttataactaaggtattacaaaaaccatgtataaatagcatagacgtgagttattagtttattacaaacttaattatggttaggtggtccttattgtaaaacgctaacgaaacattcattgatggaaattttttgtgatgttgcgacgtaagaggacgtgtgaaggatgacgtattgttcgtgatgtattattatctttgaacaaactagccaactttatataattagataaatggtgtgcataaagctttgttaacgcaataagctacgtacaagatgctgaatcaaaagcacaaacaaagatcaatgatttatttgaagaatgagaataagcaataatcaagaagctaatagatgattataaataagtccgagagatgttggaagagtacaagacggaggtgacagagaagtgatgcaagagaccagtaaagatgttgcatcgagggaatccggccgggattgtagatccgaaagaaacggtaaagaatctacgtaatgaattagagttatgtggaagcggtggacgaagatgcttttgacggcgaagaagtgtgtggtggagataaaagagttttaaaatagggtcagttcgactaagaatcaacattgatcatagcaaaaaagaagacaatagagttagttaggccaaatacaatatactttgaaagaccaaaatactatatgaagttttagtgttaagtttgagattatttttgtttagatgaatattatcatcaatatctatatgttaaaaataatagtttaataattatcattatgcgtatatgctttttacttgtctaattgtttttgttaaaattgtttttgtgaaaaaaaaaacataaatgatatacggttgcatattatatatcactatatacctacttcaaaacaatcaataaacataccctatcaggaataagaaaaagtataaaatttttggttatttattgtgtttaaattactttttgtggtttttatctactatcgactaattactatcctcatgttcaatattttttatgtgttgaaaccaataatttcttttcttccttttttcttcaaattttttggtaaatattattagtaaaacaacagtttcactaaaaattttgcaaataccccgcgctaacctaccaaacaaataagatgaaatttggataataataaaataaaaagtagaaaaaaaggcttaaaaaaacgtgaaaacatcttttttaattgatttaaattattttgatctctacttttcctaaataaactataatgtctattatttttcttaaataactaattatcttttttcaatatttctggctaaaccagactttaaccttatagaaagtgtgtttaggggttataatttagttgtctaggtgacaaaaatgggcttgggcatgaatgggctttcttatttgggtaatttgagtcggtcgaattcattgttggattataaaagatgaaacgaaaagaggatcgatttccaatctgtgaacagatccgtgtggtttttgtgatttctaggtcatatccgatgggtacaaattcagagaaaactcttgctctttcagatattgtgacctttacggttgtttatctcaatttttagtgtttgaattatataagtgttttcatatttccgcagaaccggaatcaggcttacgaattcctgcgctcaacatgaatttcaattttaatccctcagacgtggaggaccttgccaaagtaaataccctttctttttttttttgttttaggctatgataattgaatttctgtggaataaggttggattttgtttttttttagaaaccaaagttccagaaattgcttaagaaattactggctaaagagcctgttaatgacgacgagtggcagagatctattccagttaaactgttaaaagaacatatacctgggttcgacctagaacagtacattgacgaaattcgtgagatgcggaaggaacctggatatatcaaagggaaggagacgttttttaaccgccttcaggtggtagctctttcggtctttcctttgttattatttatcctttacattcactgattgcttttttatttccttgttccaggatccaccaatgtctgtttgtcccgttgacgtgaacaatccagcagcaccggacgcttagagcttttaccgagctcactgatacaattctggtttgatgttttttctcatggttgtaataaatattactaaaactttatatcttctctgtaaaagatatataatcttccacctttccattcgttggggtctccgtcacttttcttacaaccattctctatcaccatcatccttcgtttttgttatccttctctccaaaaccaaaagaattttaagttatcaaagcatatttttttgcttcagcaaccaagaactcaagctcaacactagcagcattatgttatgacttgaaaaatctctgaaaaatttggatatgatgcatcttagctacgtttgtgtgtgtaataaatctgtccccttaatggtttcggttaaatgaactcaacttccaagagttaacgctaaaaagggcatgaaacgaaggagttggaagtaaatgaaatacacaagtttgagcacaagacaagggaagagagagcggccgcacagagaagagaacccagatgaaagcaacccgcgaatccaaagagaaggataagttcgttgaagttcccttgtggtgcaataccaagaggagttcactttgggaagaaatcagtaccgcaacttcatcattctctgaagatctatagatcggattaggagcatacagggttgtttacaaatgcaatctgcatcatacaatcgcccttgtcaaagttttgcttttcgctgaaagtaatctttccaagcaattcgatcgtacacagcccaaaagtgtttctttgtttgaaagttttcttctttcttttttctgctagagtcttggcccagaatcttcctgattgcttcggcctaccgataactgtttatttttatttttttggctcaacttcaaactttgcattaaccaaaatattacatctccatatctagttcgacaatggattttaaccaatttggcataatagagtacaccttaggatcataattctctagagaagaagattccctcgccactctatctgctgctttgtccccctctctcgatgaaaacacgaacttgacctcgttgaagtttggaagcagagatctaatatcttgtagctgagggtctaaatgaggccacccttctccactgttaagcaacttaattagttcttgggcatccgattcaaagatgatgttttggtagtttaacctgctcatgaataagaccgcccatctcaatgcttctgtctccatttccatcactgttctggttctcgggagagcccttgctccgacccataacactttgccctgattgtcccttaggacccagccaatcccccatctgtttccctctttcgaccatgccccatcagtgttgcactttacccatccttgtggaggctttttccactttactgcctcccttgtctctcgggctgggggatttggtgggcaccttggaccattagcttctgcttctcttctctcccattcctcctgatcttccatggccttggtcaaaacctcctgggcattatattctttccctttagagatcagttcattacggttcttccagattctccacagaagccatggcacgagatgagctgcttttgctagattttgtccctccttttccaggttaaatacatccaacgtttctcttattatatgcttgagcttgtccattgccatgggggtgacgcggagtcgatttattcaaacgaatgcgccactttgcacaaaagtcttcgaacagacgtgatgtaaactggttgccgttgtcagcgacgatttcatatgggagttcatgtctgtagatgatgtttttccagacgaattgtcggacatgctcggcttcaactttgacgtatgactcggcctccacccacttagtgaaatagtcagtcataaccaggatgtaaggcttttggcgagaccggggtagtgggccgacaatatccattgcccatctcatgatggggtatggagctgttgtggatctcggatccaacacccaaaaataatggattaaaagtaagaataaatttggtatctcaacaataatttgctctaagaaaaagtgtaaagtataagtaatgtcgtctgttttagtatgtaccgatgagttgttcttaaacaggtatgtgaggaaccatgatgacaaggagctggtgcctgagttgatggctattttcaccagaggtcgtgtatcatcatagatcagaaggcttgtcaaggattttgctttcatttttgaatatctgacaccttgaatttagacttcaaaagcaatccgacttggaacagtaactttacattgtaattttgaatctatttcctgaaatattactaaggtttgcatcctagaaacagaaatgaagcgaaatcacagacctgtgtatccaaactatgtatttactgattttaatgtcctaaatcatctatcttctgaatgtttggtgaccttgtttgtctggactcttgaagtttaagcccaaggcgtataagaggcagtcaagattatgtttgtggatctcttctctatttaccaaaatcttcatttaaaaaaaaaaaactgtgaattgtactgtaatttgcatactcatttggcttggagactttatgaaagaacttgctttggtaggaaacacagatgcacaaaccactttatcttggtattttcttagagtattttagacgcaatcttcaggataaattgccgattttatcgtgtctccaatggcgagataagaccaaaaacgtccatctcttattacacttttagcgatgttccttgctatcgagttcatctttgttgaaactagctttaaataaaaacttagaaacccgaaagaagtcggtgtatcctatcaaaatatgcaagatatcaaggccaattcagaggatccgttacagttactgcagtcacaaaatctgaccaaatctcaaaaacctttaaaagaaggtctcgtaaacattgtaatgcctataggatgcaccttaactctgcagtgtaggcagtgcagctatccgattagttgctggtaaaagaaccgggccttgcggcctagtggtaaagaggtcacatctgtgacttccgccaccagggttacataggagaattgccagcttcgtggaattagtccatacaatgtgattccatacaatccatgatcacacatacatacatgtgccatcaatccaagaagaattaacattgcatttaggaatacctatagggctataggtgaagaaagactatgcggctatacgcattctacaatgaagaatcataaacaaaatcagggttttgagcctaaaccctaaaaatcattttttttttttgcctcctcccaaatccgtattcttgtttagtcaacccacccatcgatctttggcggcactcgatatatgggtcagtgtaagttttgaattttgagattgatcatcgtagcctgggcaatccattttcacgaactgaatcagatagatcgcttctgagctttgtcccgtcatgtatactctgatactccatggaaaaaggttggtccagttgcagaa

SEQ ID NO: 5205 - DNA, 2176 bp, Arabidopsis lyrata
  Intron number 3 from transcript 493257 (locus 493257) deri ved from phytozome v7.0 (chr-ID scaffold_7; pos 12220482 t o 12222657)
tttgatcaaggacaagagaactggacagcagcaaggtatgtcaatctccattttactaggaaatagtcgtgatttatactttttaaatttcaggtctccctgaaaaggctgatgggaagcaaccccagtctcatcattggcctccatttgtttgcaacaattttcgggcttattgcttatgcttgccagcgtcttatctgtgttcaattctgtcacagaagaaggctacctgtgtagtttgctaagaaagggtttatgtacttacattggacaaatagatttcgctacttgtgtgtattctagaagtttagttgtgtttgaaaagtgtagcagactttattgagggtgttttagagttggagttaatgtacagaaaactgaaaagatgttttgttgttgcctttatagtgggtattggttaaaagaacatcgctattttcatctcctattgaaattcatttttctttactcttcctttagatggattgaaaatgttgtgtatggtcttgacttgatgaatgtattttttgagttggtagtttgataaggacataaggttcaaaagatggtttcctaatttgccacccctgctggtcaagatttggcccttttttattgattatatcatgttggaggtttggcgtcttctttttttcatatcaatttatgaatgtctgtctattggttaatgatggaattccttttacctttttggatgtgtgatgccggaatgaatgcttttctccttttcttttgttgatgacatgaggaactatgatgactgtatttcttaccactctctttgaatggcctgagatttcagttttctctatggtattccctctctatttcttggatggcctgcgatgtgatatacccacctcttgtcatagatgaatgaatgtttatgtttagtagctcttatgtttgtattctgtatgttcccacctctctatttcttggatggcttgtgatgtgatataccatctctcgtcatagatgaatgaatgttttgttgagtagctcttatgtttgtatggtaacccttgcactggtgatcgatatttatgtggaaaatgtttgatgatagtttattttgtatactcccttttcgccaaccaagcctttgtgcttgcaactgttttagatctgtctaattgagtttcctttggtactattccatttatatctgtctttattttgtcagtgtaaagaatcactagacgatgaatgttgtgtttgtatgtgcatagttatttattaattcttgactttccaagaagtaattgtatctattactgctacacctttgtggatggcataacaattgcatttgattgtggtgacataaaacttttgatcgcagtttgaatgtactagattccatacaattctttcttcagtcttgtgaaatgttattatgttaggtggtgcaaacatatggaaggaagctgattgttttaatttcttagaatagtttctgaggttaatacaacaatgttgacttcactctctttcccttgatcgatcagcatcaggcaggaacctaattatgtaatacatgaagcaagtgtattcttttctgaattgcaattatttccaatgagttatcttgcccataactgtagttctttaattgaagtcttcaaatgcttgatgtatggtgacgaaaatgtgatatatgttttggttttaagtttttaactatctgctacttatcaatgattgagattcttacatactgaatcctttaccttggacctgtagttatatttttatgttagtaactatctgctattttatgtttgcacaaattcagccaccctttgtctgaaaggccctcttgtagatatgttatctgcagataccgactgttttctattttttaatattttttttactatatgctccatttgaagacattaatttattctctccaacaactttacttcaatgatttaagcggaggctgtcaggacatgtcttgtgattttcctactgaacttatgtgttttgagtaatgccatttatttcttcaaaattgtggttgcgtagcttgtacatttgtaatgcaactttttaaaagtacatattgatgttgattaaaagaaaagttgaaccttgaaacagacagcttaagtatcagtctttaatgcaggctgttgttttgtaaagt

SEQ ID NO: 5206 - DNA, 5547 bp, Arabidopsis lyrata
  Intron number 7 from transcript 473690 (locus 473690) deri ved from phytozome v7.0 (chr-ID scaffold_1; pos 17466860 t o 17472406)
gttatcttctttatggctagtctttttggtattaatcagagaatttttatgtttcaccctatctaaaccgacgattattccattttaattatgaatccttttggctctttagttgaatatctttgtgaaaggcgttcctgaaatctgatgaggtacttacagatatactctgacaactattggtagatcataaaatgattgtagtgaagtaatagagctcgggctaggagaaagcagaggtgttgttgctgacactggtggaacatcatttcctgttcttggattgtgtttacaaaccggacaaaaggatctccaatgtccgagccaagaatcgatacacaccacatgaaattctgccccgagttttaaaaaaaaaaggacaacaacaccaatttcagaagcttatgcaagataattaatcaactcttagttgaacagaacaaattggaacttactgtgtttgcaaggtaaaatccttagtttttcactgaggcaataatcgttgatgcatatagcacaagtaaccgaagttgaaccttcttcaaagacaccggtatatagttcagtcggcatgctttgcaacattttactaggcatacgagaaagtccttggccaccatgtggtaaatccctcacccgccgtctaattcgatgcctatggacaacaaaacaagtggctagaacagcagacacggcgagtaaagatatgaaagtgatacccatgatgggccacgatgaaatcccgaatcccgggatgagccacagctccaactcggctcgacccgcataccctttaagtacctcccctgatgctcttgtaacaagcaagccatgtatacgcacaccagataaatttcctgccactatcattttgatttttttgaagattctaacaaccattgattaatactcacatgaacattgagaacttactaggtactaagagctcatcatatccatcgttataaacaatagcagctttgtatccagctttctgcgcctttctaactttttcctcaaaagtacagccaccacggacaatcaatatataagaggaccttaactttgatcctttttccgccatgttgtttaaatctgagcacgcatcaagaggctctgcagcatacaccaatccgtgttcccccgatctcctaacaattggagctgaaaacatctcaatacgatatatagtgtacacacaattacttaagaaaaactaaatagtatgttactgatcactccaaaaatatagagcgatttggtcactattcagtattttagtagtctatacataattttctaatgcaagccatatatatctccaaccaataagccgtgtaatagtagtaactccgcaacaaccaaaaaacgatatataagtaaactaaatcaatgaaacaataagtacatataactgagaaaacttactgaaagttgcttcgacatcatcaaaggagagaattgtgtttctcccgatcaacactactttcgccgaagccagctgagaaattaccaatagagacatgattgtaatccaactacaattcatgatgctttccctaaattttaatcgaatcgaagctcatagtacgaataaaataccgaccaaaacaaaatgccaaaccaaaccccaagaaaagcaggataggtcgagagaagaagtttctaaagttttaagagatttgatggaaggaaatacttctacttgtattagagaaagcaagaccaggacgtaagtgtatcttgccaattgtgttttctaatccaaatccaaaacatttatgttagtatttttacttttatatttactagggtcaactccttctccatgcataacaaggacctttcactttcgacactaaatattttatcaaagtaaatcagatctctcaaataattaagctccaaattttctctaaaagttttgtagacacatatttaaatttcttttttttttttttttaatgaaatgtgaaattaattaataatgaaaatgttatttacaaggaatgaacaatgagacgaaatataggggaagacatatttaaaattctttttttaattgttcacaaagagtattgcaatagactttaacaacatcatttcacaattatttctggtaatttacatggaaaagctgattgtttggcatataattttagactacgtccctacgatttcatgtatgtagaaatgtagaatttgtattgccggttagattactgaataaattttattctcaaattcttttgacaaaaagcctacactatatttatataataacaaaaatcgttatcaaactatcgtaataatatataattaattaattaattatgacttatgaaagattcacctagaaacatttgaggaggtggagaaagcgagagatagagagaggagaaaaatattgtaatagtaattaagacacgaaaatactgttcacctagaaaatttaaagagatagagaaagagagagagaaaatcttatgtattctgtggcgaaaaaaaacattgtaataatactctttctgcatcattataagtgatatttaaggtttccacatataaattaagaaaagaccaaatatttatttaattgattgtttttacaataaaacatcattaagtgaattcaaccaataagaaaacatgatgtaaaatataattggtcaaaaaaattttaaaacatttaatttttgtataaaaaattaaaaacatcacttataaagttataatgaaacaaaataatattcttaaaacatcacttaaaatgatacagaggaagtagtaattaagacaaaagaataaattaccgattaaaacaacttatagaagaaatgttttctttagctacttaatataataccttgcacatctcatttttgacactatataaattttttattgaagtaatcattaattagaaatctcagacaattatgcataattcgctataagatatttttactctcacgtttatcgtttttaaacaacacattaatattaaaataaaattttgattggttatccaatccggaaaagaaacgtttacaaatgaagcatcaacaaatcttaattgagaaatccatactaaacagccaacatttgaattgagagaaggagaaaaaaaaataagttagaaataaaccaattttgtttagcagattggaaaaaacgaactactgcataattaattacattcgagtagtttgtttcaaaagtctgatagtttgccatgcgatcgagactattcaatattgaccatatagtagcgttttcatctttgaataaaaagatgaccgattatttctttggtacttaacacttaaaagaatcgtcctaccgtccatctgaagacaaatacatcccaaacttaagtacaatgcctaattttccaggttccatctatttgacattttatagattatcatttcctttgtcgcatatgatcacccttgatcattagtgttaacttttaattataattatttttagaaagattaattatgacaaatttatatcagcaggcccggtccgctaccaaaacccaagaaacaaatgtgttgggcctccaaatttttaaagacttttggtactaaaattaggcctcaagaataattttgtattgcaaaaagaggcctcatttttccaaaattttaaaatttaatctcaaattttaaattttatctattttttattgcaaaaataggcctcattttctaaaaatttaagatttagtctcattttaaaaattgtctacaaaatccatctaaatttttttttgccctgtattgggcctctaatataacagggccgggcctgtatatcagtattaaaattttaagaatataatcagagatattaattaaactttatgatttcttagtcataaaatctaattcccagcattatctagaattgacttaatccaaccatgaatactttcttatagaagaagaaacactaaccttgatccatttcttaattggacactttaataaatctagaaacgttaattttgtatgaaagtgaaaactcggtagagaattatattaatgagacaatgctttaagcttatatatgttacaaacttacaataggcttggccaagtatctatacatatttgaccttatcgatatatagaaatattctatatttctatattctaggatattcatatgtatttaaatgatagtatctaacacttcccctcaaaagaagcagtagatggtccgttgtagacgggcgagtgcttagactggttctgaaattaagaaacaatgatgacgagagacccttagtgaatacatctgcaaactgttgagctgacgggacatgaataacacgaacatgaccagtggcaaccttttctcggagaaaatgtatatcaatttcaaattgtttagtgcgttgatgttgaactggattcgaggataggtatatggcagagatattatcacaatagaccatggttgcacgtggcagcaggatcttcatttccaataacagagttcatagccaagtagtttcggagaaggcgctggcaacacctctatattcggcttcaacactaaagcgagagatggttggcgctttgaagaccatgagacgaggttgtctccaaggaagacaaaatagccagaagtcaaacgtcgagtagagggacaaccagcccagtcagcatcggagtaggcgattaaaccactagttattgagcaataaatatgaaggccatgtttgatggtgcctttaaggtatcgcaaaatacgcttgagtgccaaaaaatgagattcacgaggatcatgcatgaatagacatatctgttgaacagaaaaggcaatatcacgaggatcatgcatgaatagatactctgaagttgctgaaggacgatgagagaaagattgtcttgacaatcgtggaagatgaaactcacgaaagcttggataaactaatcaaagcactgagagaagctgctcatgcgaaccgcgaccttgtttttggctacgttggtgtgatggagatgaagaaaagaagacaaatctgcctaagagtgttgtgtgggatggagatgaagagtatgatcaggtaaaaaaattggttttagcaatatccaaaatcgcatcaaattctttgtattgacatactatacgcatatgactggtatagagaccataagccaagaggaagatcatatgactcaagtgtctcggtttctagagagatatagagaaggaagaacagagaagaagaaaatcaacggaccatcgttcatgggatttatcaactcaatgatcgggattaggtcagtgtacatcattgtgttcttggttgctgtcattatgatgctacggagcctcggtcaagttgaggagcctgctggagtcaggaccgccacaacagcccgtgaaagagttgatcagaccactagtgtctctgaaggtgaaactagtggagcataagcctagtgacaaaaaagaggactagttttgttacacttgaatgtggtatgattttttttttatacttgaagctaacttatatagttc

SEQ ID NO: 5207 - DNA, 2083 bp, Arabidopsis lyrata
  Intron number 1 from transcript 353756 (locus 353756) deri ved from phytozome v7.0 (chr-ID scaffold_7; pos 4701602 to 4703684 reverse strand)
ctttggtcaccaggtttgatattaatatcatccaatgttttttttcttcttctattatttaaaatatcgtctacttggataacctaggaaatgtatagttttttgagaaattgttaaaaatgcccctttttaataccccttttcaaaaatgctccttttgagagtccatttttaagtttgccctcttttaatttttaatgaccattttacccttatttgaaacaaaattaggtccacaaaatataaaatattttttggcgggaaaagtgatcccgcaattttcccgccaaaacacttgtaaaaacctttaaaataccttgtaaaattttcccgtaaaaatttttcccgccaaaaaattttcccgccaaaaaattttttttgcgggaaaagtgattccgcaatttttttgccgaaatttttttggcggaaaaatttttggcgggaaaaatttacaaggtattttaaaggttttacggagtatttacaagtgttttgtaaggttttacaatgtattttaaaaggttttacaaggtatttataaggttttataaggtatttataacttgtaaaaccttataacttgtaaaaccttataaaatagcttgtaaaatcttataatatcttataaatactttataaatacgttgtaaaaccttttaaaatacattgtaaaaccttatatataccctgtaaaaaccctttaaaataccttgtaaatttttcctgccaaaaattttcccgccaaaaaatttgcggaatcacttttcccgcaaaaaaaaatttttggcgggaaaaaattttacgggaaaattttacaaggtattttaaaggttttacaaatttttacaagtgttttggcgggaaaaattgggggatcacttttcccgccaaaaaatattttgtattttgtggacctaattttgttatattttcttatatatttatgatatcttttattaaaagaagggtaatttagtcattttgaacataaaaggggtatttttaaaaatggacatccaaagggggcatttttgaaaaggggtattaaaaaaggggcatttttgtgagtctccctagttttttaattacttaccaggtaaattctttatatatataatatatgcatgtgcgtgttagtgtgtgtttttctttctttttttagctaaggtgtgtttttctttcttaaagttctctttaaaaattcgaactatgtacatatactgttttgcctaacttcataagctatgttgtagactagtgctcgactagatgaatctagttttattcaaagtaattaatttaaaatttaaaaataacactgcataattaatattagaatcatcatgctttatttgtgaacttatatattgaaaataatatccttaattaaaaattgaaaattttaacataaaatggaaaagagtgagactgtaataacatttgaatttttaggggggtgtattcaatagaggatttgaaataatttgtattaaaattttaaatcttatgttattcaaacatgaattctaaaattttttctaaaatcaagtgttattggattagtgattttaaaatctacaatcaaatccactgttattggaaatattttaagttgtggatttgaagtgacttgagtgactttgggtgggatttcagagaatatcttagttaaaaattcatacatccaaatctcatggttgtaggtgggatttgggagaattttaataacaaatttcctaattcaccaaaattcaccaaaatcatttcaaaacttattaaaactcaaatcactctaaattctttcttcaatacaccccccttagtttacactcagataatattacagacagaaagtaaatgatgcattggataagtataagttctttcgttgtatctatattagtacgaatatatatttatcaaagaaataactatgtatgtctatataatagatgtatcaacaattgaagctggctagttgaattagtttcatctacatctacacatggtgtttactaatcctcaaaacaatataccttacgtttgttaattgttttttttttttttttgggatttagataat

SEQ ID NO: 5208 - DNA, 16008 bp, Arabidopsis lyrata
  Intron number 6 from transcript 484123 (locus 484123) deri ved from phytozome v7.0 (chr-ID scaffold_5; pos 627105 to 643112 reverse strand)
aaataaaattttattatttttatgggtatgtaataacgtgttttcttctcctacaaaaacatttttctgtgtaaaagaacaaacaatgacacataattggcttaaccattacctaaacaattttatagattcacgagtttaattcaatatttatatgttgcaaaaaaatcataattaactttgtcaatatttatatattgcaaagttggaatattttttcaacgaaaacgtataattgaagctttttataacatctttctctattaaaattaagtgtatttttatttattggaaacatatgctaaggcatggtaatatttcgcattggtttttactgaaaaaataagatctcttttgttttttctttcacgctgtcaccaccaattatatatactttaattatttgcagtttatttgtagtttaagagtcaaatatttttctaaaaggtgataaggtggccctctatatgcagtattatttcagaaagatgttagagccatttttagacatatcagtctatagcaataaatttagtcctaattagtatttcttattcgttttgcaaacaaatttagaaatttaatatgaaatcgaatttatatattactccctccgtttcgttttagttgtcgttttaggacttaaattttgtttcttaatagttgtcgttttaggttttcaatgtaaatgtttggtaaaaattccagtattatccctattgttttaatgttttgaccaatgaaattttttataaaatatattaaaaaagggtaaaacaaaaaatttaatgcttttcttaatttgtgtgaaaaaaccttaaacgacaactaaaacgaaacggagtgagtaattattttgtttttaataaactgataatgtgtcactttagttggagagcttgcattttagtattctatagtatatgatataatatgattcgtttttaaagtgtcaattgttacaagtagcccataattttgtatgatgcgtttattattagtaactagtatttctaaaacgcatcgtagacgacgacgctacacggtgatttgacattttgattttatattatacagtagtttaagcgggtctaaataattcgggcgtttaggcagattctaaattcaagattaattttaaattttttagaaaatactatattactattaatttacacagaaaagaagcactaaactcgtgttttaaggggtaaacatttcttgattagttgggtgattctcatagacactttaattttatttgttttgtcaacatacccactttaattaatttggcagtttcaagtatcactcgcttccgctaattatttgaccattgtttttattttatttgtcacatattttattaatcgtctaaatcgatctatatatgagtcttataactttatcaactgcttctgatgaatttttctctattatataaaccataactatctcgataggatatagggacctaacatatacaaacaagaggccgatatagtgtaaacccaaaatcaatgagacaatttttacgtcacaaagcaaaacaagaagtgagacaaactaatatgaagtggattaaccaatatgatttgcaacacacaacataattttttttcctcttttttatatatatattttttatattctgttctttgattttctattttgacaaccaaaagaaatatgatatgtgtgatactgatgagacgaggagatatttttaaagtaaaataaaataaaaataataagttaatgcgatgccaaaagaaaagaaagaattttagaatttaatatgaaaacgaatttctatatttgtttctataaactgataatgtgcaacttaagttggagagatttcattttagtattctatatatgatgatatgatatgattcagtttaagagttttattttttaaaagtagcctatatataatttaattactggtcttactattttagtaatgaaaaatcattggtgataaaaagttagaaaaggaacccttaaaccagcgatgcttcctttcaagttgcaaacgaaacgaagagaacattctcgtcactatatataccatttgctcttcctcttataatttcatatattcttcaactacaaacaacaacataacattgcacatttctccctctacttttctttcactcacttcaagaagatggttttgtctaagacagctttgaaatccgatgattcaatccattcaaattttgcttctcgttatgtccgcaactctattccacggtaaagagtttaaacacatattgtttttcctgatgttttcgctagtaactagtgttctaaaacgtagcctagacaacgctacatggtgatcgagcatcttgactttatactataatgtaatttaaacggttttaaattatacgggaaatatttatttttaatataaaaggttaagatttcacaatttttgggtacacaagaaagtaaactagattctaatgaaattaaccttcacattaccacttgcactactgaaagatccgagcattatgtgtgttactataagagttttttttaaaaaatttttatcttaaattaaatgtatcaattgtttcattagattcgaaatgcctaagaactcgatccctaaggaagcagcataccaaatcatcaacgacgagctcaagttcgatggaaacccgaggctaaacctggcctcctttgtgaccacttggatggagccagagtgtgacaagctcatgatggaatccatcaacaagaataacgttgagatggaccagtaccctgttaccaccgaccttcagaaccgatgcgttaacatgattgcgcgtctcttcaacgcacctctaggtgacggtgaagccgccattggtgttggcacggtgggttcatcggaggcggtgatgttggccggactggcctttaagagacagtggcaaaacaagcgtaaggcccaagggcttccttatgataagcctaatattgtaaccggagccaatattcaggtaaaccaaacaaaaattaatgaaatattaaaccggtttaggtctatttttgactcaatttccggttcaatacaggtttgcttggagaaattcgcaaggtatttcgaagtggagcttaaggaagtgaagttgagagaaggatattacgtgatggaccctgaaaaggcggtcgaaatggtagatgaaaacactatctgcgtcgtggccatcctcggttcgacgctaacgggagaattcgaagacgttaagctcctcaatgacctcctagtcgagaagaacaagaaaaccgggtaattgagtcattttcaactcaaaaccaattaacgaagaagaccattaatcttatatatttgcttagaaatattacaatttctaaagtgagatattcaagcattctaatatcaaaccgataaacaacaaaaacttataataaatttaaaccggtttgggtccggtttaacgtatttgtagatgggatacgccgattcacgtggacgcagcgagtggtgggtttattgctccgttcttgtatccggagttggagtgggatttccggttaccgttggttaaaagcataaatgtgagtggtcacaaatacggtttggtttatgccggtattggttgggtcgtatggagaaccaaaaccgatttgcctgatgaacttatcttccatatcaattatcttggcgctgatcaacccaccttcacactcaacttctccaaaggtacattaccataacttatatacaattttcgatatatttattgtctcgaattgttttatagattaaattaagatttcataatgcttgtataaaccaggttcaagtcaagtgattgctcaatactaccagctgatacgtcttggattcgaggtaaatgataactcaaaatgacaaaaatagcaatatattttaatttgtttgaaaatcaaatgtcaataaagaaactagaacgtactaaatccaacattacgtactattatcaagttgctactatactttatgtttatgactaggaaagttagaaaaatatggttttaatagagtattatttatttcaaaaataacaaagagaaaactcaaatcatatagaaatttagattaaacgttcctaaactaactagttttggtaattagtggaataattaataatcgttttgtttggtttagggttatcgcaacgtgatggatacctgccatgagaacatgatggtgctaaaacaaggattagagaaaacgggacgttttaacatcatctccaaagaaaacggtgttccgttagtggcgttttctctcaaagacagtagcctccacaacgagttcgaggtggccgatatgctccgccgatttggctggattattccggcctacaagatgcccgcggatgcggaacacgtcacggtcctccgagttgtgatccgagatgatttctctcgaaacttagccgagagacttgtctccgacttcgacaaggttcttcacgagctcgatatgcttccggccaggattcagggaacaaataatggcgttaagaaaacgccagaggagacacaaagagaagtcacgtcttactggaagaagtttgtggagactaagaagacaaacaagaacacgatcaccaagtagtgtttggtccggtgcttggtcgagtaatggtgcatgtatttgctgatgataatatttaataatcaatattatatgttttatccctggacccaagttaatgcttcatttggacctttttctttcatgctgcttggattatttttggttttttttttttataataagttatgtgatttgataatgatgatgagtggtgatttataatgtagttcaatgaaataaattatatattttaagggtatatgaaaatgtaattttttttcgtaaatcacaaatataaaataagatataatttaattacaacaaaaataataaagaatggatctttagcttaatcctaatatatcctaggctgcatcacacattttcttacattttcttttgtgtgtttcacctttgaagggttattaggaatgtggcctaacttaacccaaaagctagctcaagagttaaggattgccacatcctttatataccacccaaagatcttaatcccaagcaatgtgggacattctaataggcctcctcgagatgtgggtgagaaacggtccaacggaaaatagcccaagcccaacatctcagaaatacaataagacatgccacttatatgggccacataggtgggaaaccataggtgggaaactatttttgtgggtgggccaacctttggctctgataccatattaggaatgtggcctaacttaacccaaaagctagctcaagagttaaggattgccacatcctttatatactacccaaagatcttaatcccaagcaatgtgggacattctaataagggtctttgaataaatattgttgaaaaagtcgaattcttgaagaagtttggcgagcttcgtggtgttgtcttccttaatgttggcaggtactttctcttcgtactcactagcgcccataatcttctccatcttctccttttgtctgatcgaaaacgaaacaacagattagtactgtctgaacaagacagaggattgaactctgttcttatgtgttgaaaacttacttctgcagctcctcaatcttgtttctgatcttttcactttcagcttctgcatcaatggcttcatccactttgatataaaccttgaggttctcgttaatcgtttcaaaggctgttctagctaataaggctgcttgttcttctcctccttttagttcaacctataatagttgtgcacataactttgagaaaaataaaacaaaagacaaaaaaagaaacataaaatgaatatgaagatcaagttacctctaaggatgagagatttgcaagggttgtgatctctaactcatgggtctgtacaatctttaacattaactcgttttcacacagagcaaatgcatgcaacctgagaagatattgaaggtaataatgtaagaaaaccgaagaaaattggcggtatcctcgaaaattagtcagtcactgacctttcttttctctgtttctctaacaactctgctctctttgctctgagatatttcacagtcatcagaatcatgtccatttcggtttccgccttttcgtttctccagttctgtgattaaagagtttttagaaaccgcaaaaaaggataatagattcagaagaagattttagaattagagagagacctcaatgggagatgggtagtcacatatcatgatagacgctttccgttcacaatctttaggccaaggtaatcgttgccaaagctcttcggttacaaaaggcagaaacgggtgaagcaatctcaaaccagtctctagacaaacccatagagcatgttgtgcatgagtcctctctaaagaatattctggtttgttaaaataaggcttgattgcttcaatgtatacatcacaaagttggtattgccaccaagcgtataccgcgttggctgcattcgaaaactcgtaagcattcaacgaatcaaccgtctttgatatcaccttatttagtgacgaaagaatccattggcagctcaatggcatggtttcaggacatagagttagcaaaggtgtataaccatcaccaagcttcagcatcgcaaatctcaccgcattccagagcttattacaccattcacggtaaccaatcactcggaggatatccatatttattctatcagactagaaaaagaaacaaaaacaagtctataagatcattttatacaaatgaaagagcaaagagtccatgtgatgtaatcagtacctgagctgtgtaggatacaagtgcaaatcgaagagcatcggaaccacattcagggataccatttggaaaatccttggcatgtccttctttagcagcaacaagcttctttggatctaagatactggtctctaacctcctatgaagacccgcaatagtttcacctttaatgacttcaagcggatcaatgccatttccaagagactttgacacctttcgtccatgtgcatcacataccataggatgcatataaaccttgctaaagggaacatcaccagaaagttgcatacatagcataaccatgcgagcaacccaaaagaagagaatgccatgaccagtttcaagaacagaagttggatagaaagcttttaactcatcagtttcatctggccatcccaaattcgataacgaagagagccctgaagaaaaccatgtgtcaagcacatcaggatcttgagagagctcgcatttcttcccgacaaatctatgttcaacttctttttgagcttctttctcgtttctagcaacgatccaatggtcattgtaagaaccaaaatctttaatttgatcttcttctagagttgcataccatgctggtattctatgtccccaccaaagctgtctcgaaatgcaccagtcatgtatcttctctagccatctgtaattaagatcccttgtgaatgttaatccatgattagttataaacagacaaaacttattcatcataattaatgacagaaccttctccattctgctgtgtactgcttttgtataaactctagcttcttgttttcatcattgatagcaacatcaagagcttcctttcccatcacatgacaattcacgtaccactgaggctttatcataggctcaataacatctttagttcttgaacaacgtttaagttccattgcgttgttttcggcacctctgtacaatccctgaatataagacaattgcaagttagtatgatatgttaatgatatacaaagacacaagaactgattaccttcttcttcagagcttcaacaaccgcttcacgggccgtaaagcgtggcattcccgcgaactcaggcccgccatttgtattgatctttccatcatcagtgaatatgtttataaattcaagattgtggcgctttccgacatcgaaatcatcaagatcatgcatgagcaggagtaatctacaagagaagagcaaagtaattttgaaacagtactaaaacaactcaaggacatatgaaaaaacgagctcataccttaacacaagcagtaccatagttttgatcaacgagatcttcatcgcagataactggtaacttccgtccactaataaacggatgcaccacaaactttccgtgaagatgcttgtacagcaatggcagtatcaccaagcattgtttccactctcgtggtggctacaacaacctctcccgaaccatcctcgagaaggtaagcaaatgaagtaagaaaaccaaattccactagcttctcatatccaggtacttctaacagtgtccttcctttgatctcaataggagtaacctacagatgcacagccataagaagaagcatgtaattcaaaaatcatagagcaaaccaaagttgtttacttacctcatctttagatatggctgatcttaaactacaatcccaattaacaatcctattatctctgcaaaggtaaacagtattgtctttcaggttagtgcttttctctacaacaagattcgtgtagcttattagagatttcaaaacatatacctatagataagcccttccttgtataaccgaacaaaagcctcagtgacagcttttgatctttgctcatccattgtaaaacactacaagttcacatatagaaaacaattctgtatataagatatctcagaaaaacaggtgaagatacagaggatcactgaattttacctcacgagaccaatcaagagaagcacctaaacgccgtagttgtgtcatgattgtatcaccagactggttcttccacgtccatacctatcgcgtaatcatagaacaagcacaagagatttcattataagttcttttataaaaattataacaataaacttcaatcaatcgatcaacaaaattcgaattcaatatacttggatttacgttcaagacaaacgcaaaccaaattccagagtgacaaagatctttacaagagaagagatctcgatcaacaatggtgattctccagaaattcagagctaagagaaagagattacaaaagggaaattattctctgtaaactctaaatcgaaattgtgttcttatttgtttgctgttagtcaacggtcaacatcttctcaattcaaaattggccaatcaacgctctccgtgtcatccttaatgtttccaccaatcatacttcagcatctctccacgtcagccatcactcttcttctttactgtaacaaatctccctccttcagagaaccttgtcctcaaggttcaaaagctgggaacttcctctgtatctcaaacaagtactcccaagtcgcttcctcgacactctgattagtccacttaacaagcaccatcgtaactgcgtgcccctgtctattgaccatcttcctctccaagatcctctcgggttccttgaccaacgcatcataatgcaccgatggtaattcagtagaaaccgagacagggccgacagattccttcaattgagacacatggaaaacaggatggatcttagaagaagatggtaagtccaacctgtaagctactgacccacacttatccaaaatcttgtaaggaccataaaacttgggagcaagcttctggttagatcgcatcaccacagattgttgcctataaggctgcaacttgacaaacaccacatctccaatctcaaaacttctctcagtacgatgaagattggcattctgagtcatcctgtgctgagctctcaataagtggaaccggagaagtagaagcatattctccctatcctgcaagcattgagccaccacagccactttcgattcaccaggcaagtaaggtaaatgaactggcggaggctgaccatacactgcctcataaggcgacatctgaatagctgtatggtaattagtattgtaccaaaactccgcaagaggtaaccatttgctccataaatgtggacgatcactacacatgcatctcaaataggtctccaaacacctattgaccacctctgtctggccatcagattgaggatgataagcactagtgtagtttaaagaaacgccctgcagagaaaacaactcctgccagaattcactaaggaaaactgtatccctatcactcacaatggtcctggggaaaccatgtagcttaaacacctgatccatgaagacttgagccacacttacagctgaataaggatgagtgagagccataaaatgagcagctttgctcaagcgatccaccacaacaaagataactgttttaccaaaggaaggaggtaatctatcgataaaatccatggaaagatcagtccacagtgttgctggaataggtagaggctgtaacaatccaggagaagctatagtctcatacttacacctttgacaaactccacaactcctgatataagtatgaacatctttagccaaccctttccagtagaacaaacccttaactctctgacaagtcgcatcacgaccagaatggcctccacttcctgaacaatgcagccacttaagaatatcattctgaagatccttatcttgaggcaccacaatcttactctttctcctcaatactccttgaacccaagaaaagttcttcttagcattagaatcctgcctcaactgatcaattaatgtcttaagagcaagatctgtagcataacctgcttgaatacgttgcataagatcacagtctaaaacagacattgccatatgtaacacttcagcaccctccacccgtgataaagcatccgcagccacattgtctttaccctgtttatactgaatttcatagtcaaattctaaaagcttgggcaaccattgttgttgaattggtgtgttcaggcgctgctccaacaaatatttaaggctccgctgatctgtttttataacaaaatgatttggtaacagatagtggcgccatttctgaaccgcaaacactaccgcaagcaactccttttcatatatagaaagatgcaattgttttcccctcaagtgtctgctaatataggccaaagggtgaccttcttgcatcaatacagcaccaattccctctccacaagcatcagtctccaccacaaaaggtttatcaaatcgtggtagagctaattccggtgcttcacacaaaacagatttcagtgtattgaaagcttgcaatgcttcctcagaccaaacaaaagactccttcttcgtcatgtcatgtagtggtctagcaattacaccaaaacccttcacaaatttcctgtaatacccagctagtcccaaaaaacctctcagctgttttaaagtcttaggtatgggccaagctttgactgccaatattttctgtggatctgtagagactccactagcttcaatgaagtgccccaaatactctaccttggccacagcaaaagcacacttactcttctttgcatagagactgttactcctcatcaacttgaacacctctcttaaatgcaacaaatgagattccagagtaggactgtaaatgagaatgtcatcgaagaatattaagacaaacttcctcaaaaactcctgaaacacagtattcatcaaactttggaacgtagctggcgcgttagttagcccaaaaggcatcaccaaatattcataatgcccactatgagttttaaaggcagttttatacatgtctgcaggctccattctaacttgatgatatccagctctcaaatcaatcttagaatagatcacagaacctcccaactcatccatcaaatcatctattaagggaataggaaatcgatctttaacagtcatcccattcaaccctctatagtccacacataaacgccaactaccatccttcttcttgactaatactacaggagatgcataaggactactactagcttgtatagtaccagccttaagtaattcctgaaccatcttatcaatctcagttttctgatgtaatgcatacctgtagggacgctggttaatcgggtttgatccttccaataaagggattttatggttgtggttagctctgaatgggggtaaagcctttggttcctcaaaaatatcagcatactcattcactagttgtgtgatctttggattttcctcttcttctccactgtgagtttccaaagaacagagcatcatatcattctcctccggtatattttgcacacacaacatagaaatctgcacttcactctccttcagcttcttgagtttatttgccttcacttctcttattgaaccctgcttcagcccatgtagtaaaactgtttttaaacctcatttaaaactcatctccagtttctgaaagtccaaattaatagggcccaaagaagctaaccactgcacccctaataccatgtcacagcctgcgagaggaataaccatcacatctccttcaaaagtggtctccttaagcgtccatttaaaatccttgaccttgccagtcactcccaactgacgaccatcagccacctttactcttgttaaaccagaatgttgtaatggaagttgtaatctagctactgtcttgggatcaagaaaattgtgtgtagaccccgaatccaatagaaagatcaatggttgttttcccacaacacctctgactttcatagtccaatactctgagataccagaaactgcactaacagacacctgtgcatgctcttgagtgagctcagactctccttcatctgcactatgataatccacagtatcatcatcaccttcctcgacatccatcatatataactgcttccttttatgagtaagataatgctccggtgtatatttttcatcacagaagtaacaaaggccttgagaccttcttttattcatctcttctgtagataaaaattttcgtggctgtgtccccatctcccttgatttagaggcaacatcatgctgtacaggtttatgtacccaatcaggtttggatcccagcactccctttgcttgaaaaccattgctaccactccatctagaactttggttaacatgggatgctgctcctaatccttttttctgatgagcttgctcatacaaccttccaagcatcaaacacttgctaatagaatcaggctgaaacatgcgaatatgcatttgcgtatctgtttttaaacctgcaagataagctctcaccaaatactcctcaggtaacttcaatcgcaaacggatcacttcaaatttctcatgatactccttaatcccgtttgtttcctgtaagtttttcaattccgcaatcggatcatccaacacttcaagaaacctttccaacaacaatcccttatatgcaagccaatcattcatcactccaattcccagatctgattcatacaacgactgatgccaagccgctgcaggaccatcaaaatgaatcgaacacattctcactttgaaatcatcaggcgtacgatccaacgaaaagaattgttccaccttaaataaccaatccttcactctatctccactgaacctaggaaaatccagtttagctaatctagtcacacctgagtattgagattgtggaccagatctagcgcgacgaggtacgtcaacgttgaaaattcccagtcctgatttcacatcctccgccgaagctggactatacggtgattgcgcaccagcattgacgatagaatctaccttctccgctatcatcctgatcgccgcaaacatttccaccgtatgcttctcaatcttcgaattctgctccgccaaagctttaccaatccacgagttcgaagattcctccatctccggagctaccgtatccttcgcacgagtattcgccatcatttccgagtcacgaatggctctgatacctttgataacaataaacttcaatcaatcgatcaacacaaattcgaattcaatatacttggatttacgttcaagacaaacgcaaaccaaattccagagtgacaaagatctttacaagagaagagatctcgatcaacaatggtgattctccagaaattcagagctaagagaaagagattacaaaagggaaattattctctgtaaactctaaatcgaaattgtgttcttatttgtttgctgttagtcaacggtcaacatcttctcaattcgaaattggccaatcaacgctctccgtgtcatccttaatgtttccaccaatcatacttcagcatctctccacgtcagccatcactcttcttctttactgtaacaaaaaaaaggaaagaaagaattactcagtactgcatatgaagttttaaactcacttccttaacgaattcttctcggccaaggtcatgtctactcaatcctcttttagccatgatctctttctcaaccacaacctacattgttgtattcaacaagattagtactactagttatgaccagttttgacatatatcccaacataaactatcaggaggaagaatctgaaacaagaaatttcacaaacaactacagacctgtgtagctataccggcatggtcagtagcgggaacccacaacgcattaaaaccagacattctcttccaacgaataatcgtgtcctgcatcagtcagagcaaattataagtctgatcctttttcacaaaaagtaacagaactaagaatcttatgaaccacaacctctatggctgatgttaatgcgtgcccagtatgcaaaattccagtcacatttggaggaggcagaatctgcaaaacatgtacagtagtatgaaaattaacaaaacattaaacaaactctctagactatacaagctaatttcaaagtaaagttccttacaataacaaaagctggtttggaactcttagcatcagccttaaaaaagccagattgctcccaccattcacaccatctgaccaaaaaaaaaaaacagattttatcaaatattggaacaaacatcagtgttaattaattagtcacaatattcttcacacttacgatttttcaacagcgtcaggactgtattgtttagccataagtggagataactttttcttctcaccaagaggagtctctggatcaacaaaatcctcaggattctcttctgaatcaaatcttttagcactcttctttgtactctttttagaagatttggttccatcttgttcttgttttgcctatattaacaataataatctgatcaaatacgttcgatgatagagtcaaaacacataaagaaaccactacttaccttaagttcttcagctaattttgctttctccaaagctttttgctcctttatttccttttctcgaacctatatataacacattcatggaatgaatcagattctacatgtaaattctggcggggaagaagatgaagaagaagggaaaccttgtcttcattctttttcttccgttggagttccttctcggtgaggatctgctgcttctccgatgattcagactgcaaaaaaaagcagaaacaaagacatgaaacaacggtcgaatctaactatgtacaaaaacaagatcagtgtgtaccattgattagggaagcttgagatgcacgaaaccctaaaaaacaggagacgtacgtacgacgatcagagtttctttaaagtgtcgtaaatttcaaagtgtgaacaaaaattagagagaccagagaagaagaagaagaaattgagaagacgacatataacgtaaacggaaacggcaaaccctatttttgtgatttatagaaaataattgataaattttttaattggagaaaatatggaagattatgattttccataattacttatttccttaatccctcctattttatttttgttttccggaatattgaaacatgggccaaaatttctatttaaagcagtttgggccaaaaaatctagacaaaaggaccaactcttgtacaaggtttcccgaaccgagcacaaaatgtatattctgggcaaacatatccttcttttagctaaaggaccaactacaccaccgttagatctcagaccatgcaacaaaggtttgagatatatatatatatatttttt

SEQ ID NO: 5209 - DNA, 9354 bp, Arabidopsis lyrata
  Intron number 2 from transcript 473492 (locus 473492) deri ved from phytozome v7.0 (chr-ID scaffold_1; pos 15317233 t o 15326586)
ctatcgagatccgtaacttccttggcgagaagaaggtttggcttcttcatttctgttttgttgagctggtttttgaatctgtagatcccggaatgaaatagtttgcctctagattcagctttgttgttgttaaattcgataatgttagctctgatacttggattatgattgatttctgagtttgcgaacattgaacttacttagaaatgtgtttattggatcattaggtgaggaaggtagagatgttggatggtgtaaccattgttcgatctgagaaggtcaaggatgagatcgttcttgatggtaacgatatcgagctcgtctctaggtcttgtgctctgatcaaccaggtactcctactctttaactagtaggtatcaaatttgtgtttatctttccatcaccgccgatagagtctgataaagcatgagcatgtaaatcctttcattagctaacttggttcgatttttgcatattgttgtgtgaaggaaagcatgagcaattgtgattataagaattcttggttgaaagtctgaatttgttgttacatatagcatagttagactggcttgattctttatgttgtactgtcttatttaactgctatggtttttgtgattgtgcagaaatgtcatgtgaagaagaaggatatcaggaagtttcttgacggtatctatgttagcgagaaaagcaagatcgtagaggaagaatgaatactcatatcctcctcttagctcctctttcttatcttttgaatgttagttttgttttatggaccaaatccaccggtgatgtaaaacttggccttcttttgttcgagaatttatgaacttatgcaacaagtttttggagataattttatccacattttcattcatttgccaaattatatttctcggatgaattttttttaattcggaagaatgggttgtgtctttcaatttcagaccattataaatcattatcttgaataaacaagaatcgctgaacaaaagaaaaaaatatttatatttgaagattgaataaaaattctcgccttttttaaaatttgttaaataaatacaattttttcattggtttaaattggtaacaagaaaagaattaaagaaataactttgtgggaggaaaaaaaaaaagaaataactgtgtcagattttgtgggtacctaaccttttctggagtgtaataaatacaaaaatatatttttatttatgtgtttttacaatgaaccatttattacgaaaagatgagaatcacgatgatataatcagaaaaaattttccgattaaaattccggcatgaattcggcgaaaattaatacactatagttttggcatagatccagtttccggcaagagggagagagataaaacaaaaataaaagtcatctagtactggtatgcagagaaagagacagagaagagatccggtgaattgtttatgtaacggcgactatagatacagagatgcaaatcaaagatccgtagataaatgatagagaaagtatgtaattttgaaaaataacatgaattgtttttcttaaaagcaggtcatctataataaatacaatgttattttaaaaaatacaatgtttaaaacaaaaatacatgttaaccatgacatagcgtagtcgcccgtcttcaattgtgagtttcagtaatagaaaatagactagaattgctgaaatatcatggaatatatacaatttacaaggcatctaacataattacgtgtgttatataaaaaaactaatgtgtttttttaaaacatagtgtgatatattgaaagatagtgtgttaagcaaaaaaatagcatgttaaaagtaaaaacattgttgcatgaaataaaattacacaaaattcaaaaaaaaaaacttaaaaaaaaagttgagagggagtattagaaaaagcaacgaaagagagaaacatctatactattaattgggaagcactcaaacataaataaccttataaagtgtaaagtattacaaaaatgccattagtttttgtttttaaataaattcattaaagatacaataataatcacaaaataatatatttaaataaaaaatagtaaaattctttaaaataattattagtttccaaaaaattaaactcactttctctctcatattaattatggacaaaaatttaattttttcttctaaaaagttgttaaccaatgagaattaaaaaactaagatttaatatctaactaaaattttatctaaaccaatcctaataaactattccatatcaaaaataaaaagaaaaataataacattataattcaaaattaaaaacactatcgtttaaaaagttttatcaatggaggattttaagattgaatttgaaatttcgtaaaaatattaaatacaaatatttaagactcaattttgttataatattttcacaaattttgaaatataaaacaaaattttatttcgaaatttctaaaaaacgatattagatattaacaaatatttatatttactatgaaataaattcaaaaatgataaatttaaagtaattatcattatggcattcgtttagagaaggtttcggaaatatctaaacaaaagattgtacatattaatttcgaaatattttgtgttttttttttcttctcaaccggatcttccttgaacaaatccataatatattgcacacagttttcgaaataatgtgaactaattatatattttgcattcaaaacaaattatgcagcaataacatatcatttttatagagtatctcaagttttaattttagtcccaaaaattgaattaattatgattaaacaatgaaaagaaaaatatacaaaatttagctagaatcattaataagtttgttaaaatatatttgtaactttaacagcatacatattaatccgcaaaattcacaacatatattgtaatattgtatggtaattaaaggtaagcaaacaagaatttggaatatgattttaatggaataaaatgaaaatataaattactagacgagatgggaggaaaacatatattaaaaatcaaactaaatacccaactggcatgagttcgggttatgagcactatataaaataaatttgtttacacacatacgttttcaggtacacatactctatttatgacagatatgagaccataatatttttattttacgtatacgtgacaggttatgggacaaagaatttatgacagataccagacggtatatttttatgttccaaaatagttacgcctagctaatatacatgaaataacccaaactaaaatcaaattcatatcctatttaacatatgtaatcaaactgttaggactgtttagattagttaagaaaataaaaatgtaacaccatttaacttttgcaactaaattaatctggatcttaaaatataattatgcattaacgcaactgaattttgttcattactctaactttataatatttatactattacgaagttcactaacacaacaaaatattttatatttttaaaatctatataacgatttctataaaaatatctctacacgtatgtggattcagatgtaatatactaaaatatatatcataaaaagttaaaaacaacaaaataatctatactgaattaaaatttgttagaaattttttaaaatatgaaaccccgcacgtacgtgcgggtcatgatctagtatctatctatgtgagttgagaagaaaaaaatttgggatgagagagagaaaagatataagaataagagatgctatggaaaatgatatcgatgtggagagagagacatgatatgcgctaaaaaaaaatagacatgatgtgcaaattttgatatatatgtaattaattatgtaaacattgtacctcatgtttacttttaatcaatttatttatattgacaaaaaatgattcacaaatcacaatgatggatcttgttgttaaattatttaactaaaaattatattaaagtagattaggaccgtctgatgtgtgggttttaaatttttttaattacattctttgaaaatatatatatatatatatatataatctttaagttagagaagataattatatatatatacatacatatatatatatatatatatatatatatatatatatatatatattcttcaattcaaaaaaaatgttatttatatgttcgttttgctttaacttatttgcaactttatattttaaatttattgtaagatttattacaataaactattacatttaaattaccaatcttcaaatcttttgccatatattcatcattatttttattgtcaaatctcgagaacgtagtttagcaatttcgcgtaaatgattctactacttgagaaactgttttacatgcaaatcatcggtaagcttatttcaatccatttacaaatctactatctacattacaactaaaaaatgtatctatgaacacattaagcctatccatttcaatccaatcatattttactattgaaatatgttttctatcaccacctacaaaatgtatctatgaacacattaatccaattatatgtcttatttttttatgtccaactatatgtctcttcatttgtacttttgcatggtttctttaaccactaaattttttgagttaaagaatattttgaataaaaaattatatcatatagcaataatttatgatgtatttataaaaaattaaaataaataaaaactatttgattagaatgcgtttatgaccaaccaataaactaaaagttgagaaattaaaagaaattaatttgacataactaaaaagaatagaaaactataaacacgataatatatgagtcttagataattcaaagatagaaatataaattaaaataaacaatctaaaaattcaaccattaaattataaatattaggaaaataaatagcatatattgatcttacctactaactataaaagaaaattcaaaaatataaaaaaattattttaaatcaacaaaaaattgaaatatataatgtaactactaactttgaaaatcaaactttatctaataagattataaagtattatatactcataatttaatctaatatttttaggttgaattctcttttttttttgtctttaaagcaaaaaaaaaattatgagtattcctcttggatctttttctttcggtttgttagctgctaaagtttaccgtgacggaggcgccctctatggagacgatggcaagtgttttgggatgcattgctttcaaaccacttttataatatttatactattacgaagttcactaacacaacaaaatattttatatttttaaaatctatataacgatttctataaaaatatctctacacgtatgtggattcagatctaatatactaaaatatatatcataaaaagttaaaaacaacaaaataatctatactgaattaaaatttgttagaaattttttaaaatatgaaaccccgcacgtacgtgcgggtcatgatctagtatctatctatgtgagttgagaagaaaaaaattcgggatgagagagagaaaagatataagaataagagatgctatggaaactaatatcgatgtggagagagagacatgatatgcgctgaaaaaaaatagacatgatgtgcaaattttgatctatatgtaattaattatgtaaacattgtacctcatgtttacttttaatcaatttatttatattgacaaaaaatgattcggaaagcacaatgatggatcttgttgttaaattatttaactaaaaattatattaaagtagattaggaccgtgtgatgtgtgggttttaaatttttttaattacattctttgaaaatatatatatatatatatatatatatatatataatctttaagttagagaagataattatatatatatacatacatatatatatatatatatatatattcttcaattcaaaaaaaatgttatttatatgttcgttttgctttaacttatttgcaactttatattttaaatttattgtaagatttattacaataaactagtacatttaaattaccaatcttcaaatcttttgccatatattcatcattatttttattgtcaaatctcgagaacgtagtttagcaatttcgcgtaaatgattctactacttgaaaaactgttttacatgcaaatcatcggtaagcttatttcaatccatttacaaatctactatctacattacaactaaaaaatgtatctatgaacacattaagcctatccatttcaatccaatcatattttactattgaaatatgttttctatcaccacctacaaaatgtatctatgaacatattaatccaattatatgtcttatttttttatgtccaactatatgtctcttcatttttacttttgcatggtttctttaaccactaaattttttgacttaaagaatattttgaataaaaaattatatcatatagcaataatttatgatgtatttataaaaaattaaaataaataaaaactacttgattagaatgcgtttatgaccaaccaataaactaaaagttgagaaattaaaagaaattaatttgacgtaactaaaaagaatagaaaactataaacacgataatatatgagtcttagataattcaaagatagaaatataaattaaaataaacaatctaaaaattcaaccattaaattataaatattaggaaaataaatagcatatattgatcttacctactaactataaaagaaaattcaaaaatataaaaaaattattttaaatcaacaaaaaattaaaatatataatgtaactactaactttgaaaatcaaactttatctaataagattataaagtattatatactcataatttaatctaatatttttaggttgaattctctttttttttttgtctttaaagcaaaaaaaaaattatgagtattcctcttggatctttttctttcggtttgttagctgctaaagtttaccgtgacggaggcgccctctatggagacgatggcaagtgttttgggatgcattgctttcaaaccacttttataatatttatactattacgaagttcactaacacaacaaaatattttatatttttaaaatctatataacgatttctataaaaatatctctacacgtatgtggattcagatctaatatactaaaatatatatcataaaaagttaaaaacaacaaaataatctatactgaattaaaatttgttagaaattttttaaaatatgaaaccccgcacgtacgtgcgggtcatgatctagtatctaactatgtgagttgagaagaaaaaaattcgggatgagagagagaaaagatataagaataagagatgctatggaaactgatatcgatgtggagagagagacatgatatgcgctgaaaaaaaatagacatgatgtgcaaattttgatctatatgtaattaattatgtaaacattgtacctcatgtttacttttaatcaatttatttatattgacaaaaaatgattcacaaatcacaatgatggatcttgttgttaaattatttaactaaaaattatattaaagtagattaggaccgtgtgatgtgtgggttttaaatttatttaattacattctttgaaaatatatatatatatatatatatatatatatatatataatctttaagttagagaagataattatatatatatatacatatatatatatatatatatattcttcaattcaaaaaaatgttatttatatgttcgttttgctttaacttatttgcaactttatattttaaatttattgtaagatttattacaataaactagtacatttaaattaccaatcttcaaatcttttgccatatattcatcattatttttattgtcaaatctcgagaacgtagtttagcaatttcgcgtaaatgattctactacttgagaaactgttttacatgcaaatcatcggtaagcttatttcaatctatttacaaatctactatctacattacaactaaaaaatgtatctatgaacacattaagcctatccatttcaatccaatcatattttactattgaaatatgttttctatcaccacctacaaaatgtatctatgaacacattaatccaattatatgtcttattttttatgtccaactatatgtctcttcatttttacttttgcatggtttctttaaccactaaattttttgacttaaagaatattttgaataaaaaattatatcatatagcaataatttatgatgtagttataaaaattaaaataaataaaaactacttgattagaatgcgtttatgaccaaccaataaactaaaagttgagaaattaaaagaaattaatttgacataactaaaaagaacagaaaactataaacacgataatatatgagtcttagataattcaaagatagaaatataaattaaaataaacaatctaaaattcaaccattaaattataaatattaggaaaataaatagcatatattgatcttacctactaactataaaagaaaattcaaaaatataaaaaaattattttaaatcaacaaaaaattgaaatatataatgtaactactaactttgaaaatcaaactttatctaataagattataaagtattatatactcataatttaatctaatattattaggttgaattttttttttgtctttaaagcaaaaaaaaattattattgggtcgtgccgaaaacggactgcttccaaatggaccgggccagcccacagactaactcatttacatataggaaaccctagggtttcttctatcctttctttctctaaaagccgccggcgagagagagagcaaaacaaaagattggaaaagatgaagacgattctttcttctgagacgatggatatccccgacagcgttaccatcaaggttcacgctaaagtgatcgaagtcgaaggacctcgcgggaagcttgttcgcgatttcaagcatctcaacctcgatttccagctgatcaaggaccctgagactgggaagaagatgcttaagatcgattcgtggtttggatcacgcaaaaccagcgcctccatcagaaccgctcttagtcacgttgataatcttatctccggtgttaccagaggtttccgatacaagatgaggttcgtgtacgctcattttcccatcaacgcctccattggtggtgatggcaagtccattgagatccgtaatttccttggcgagaagaaggtttggttcttttcttcatcactgatttgattctctcagcttcgtgtagatctgaaatgttggaagatgatgattggtttctgagtttgcgaatactgaacttatttagaaatgtggttattggaataataggtgaggaaggtagag

SEQ ID NO: 5210 - DNA, 1690 bp, Arabidopsis lyrata
  Intron number 1 from transcript 912995 (locus 912995) deri ved from phytozome v7.0 (chr-ID scaffold_1; pos 14483775 t o 14485464)
cttttgcctcttctaaaaagttcccttttaatcaggtgatccaaagatatctacaattataaaaaaatacatcatactattaaattcatttttattctttgtaatgctatttaatgattactgcaatattatgaattagaagcaggaaaaaaacatgtattaccaaccagagtcataaattgtatatgaaactaggatcggacccgcggttcaccgcggggaatattggtttacatacgttgagtttaatattgtgtgtttttagtagagcgaatcgtgtagtatacttataaatattcagaataacgaattgtagagaaaatgttaaattttttataaataaactcatcgtattaattatgatttacaaaatagaattttgtgttttaaaattctaaaattagacgattcataggaattagagcagtcaaaataggtcaaaaaccgcgggtcgagcccaaatcattttactatagggtagatttgggaaaatatattaaacacgcaaataagcgggccacatggattaattcgcagtgggtcataggtttaatcggttttcatccgcggattggtggatcagcccgcatgttagtatttatggataaaattataatttattcaacatgtggtaatttaaaaaaactataatagtatttttatttatttatttattttagtagtattttaaattttggttactttaaaactatttaaacaaaatccacggacaatcccgcaaatccgcatacattcgcgggacgggtttgtatttcatatatgctacccgcggatcgtgcggaccgacaactacaagtcataatattttgtgcctatcgcaaacgggcttaacgggacgaatcaactcgctttgacagctctaatgggaatattatttagtcatacaacaaaatgaagtttggacataggaataatagaatatgtattttatttcttaggtgagagattgaaagatgaaatataatgattaaaaattagttattatttttcatgattcacaaaatttaataaatacttatcatcttgttgaataattctaaaatcatattcaataaatctttataaattgaaaattaaacttctttggtaagctataggtatgaaaataccataatttcgatttaatctaattaaattaaaattagttacatggattttatatctatttaatgtacacgaccaaaataaaaatatctatttaatttataaaacagatggggtattacttatgtgtgataaattttctagaaatctttagaagcaagtaagatatctttcaattaatgataattagctaaaatgagcgaaattaatgataaaaacgttgattgttatcgaattagttacaaaaatatatgaaaaaaactattatacgtaattaatgtataatattgttcggaatatgcttttataattagttgccataagtacaatcagattttatttgatttccataaatatttcatttttcattcgatttttcattattaattcgaatttatattcccaaaaaaattcaaagatccgatttcaaaatttagggtcaattttctgattttaacccgacccatttttatttgtacttctcttttaatagtatagagatgtggtggttgttattgatctttttacaggttccagggtatatagccgctcaagttctcggatc

SEQ ID NO: 5211 - DNA, 2159 bp, Arabidopsis lyrata
  Intron number 2 from transcript 888012 (locus 888012) deri ved from phytozome v7.0 (chr-ID scaffold_136; pos 12145 to 14303 reverse strand)
cgtaaagtcgcaaaagacccgcttgcgaaggttttggatcagtaacactttcatcattccttggtcctctggtgagggagcatgttacagtactactcgatgattggaagaaactcgatgaacaaacaaaggacacaatgtgggaggaaattcatgtaaagtgttttttatcttcaatatttctcattcattactttgtatcactgtcatgtaacctcacatttattataggggaggtttaatttgcaagaggagtggccaaaacatgccgttcttaagcagatgggttgtgtgtggagggcatctaaatctaaacttgtgggccaaattcgagaggcgggaagtcacgcaaagcgattaaggcttaaaccaagcaacatccaatctcttgggaattggaacaattgggttaagagcaagactagtacagagtttaaggtgcactcttgttttatttatcaaatagtctgtgataaatgtattaactgagcagattaaatacatgtatgtctggttgtggaattattttgtaggagaaaagtgagagatacaggaacttgaggagggctcagattccacacaccactagccgcaaagaatttcgactggcacatgatttggttagtatcattctctgtatttatagatttgtattgtgtctttctctgtacttatagatttggttagtgtcttttggttgatttttttatctgtatatatagaataagcatatgttgtatcacttatgttagtactacttgtagaaaaaaaaaagttcagacccaaaaaaggttactcgaagtaaagtatggatagcaggacacactcacaaggatggaagattgtgaagcctgaattcgtagagactattgtaagaacttaccaaattgtactcttgttttcattacaaaagattagacattattggttgatatatatatatatatatatatatatatatatatatatatatatatgtgtgtgtctcaggaacaaataaaaacaatcaatagtcaaatggagtccacagccaatgataacataagtgaagatgctgtcagtcaagttttggggaaagatagacctgggagaattagaggtttgggaagagggattactgcaaccaaactagcattcctacaggtttggtgcaaaatcttgaagcaaaacaagccgaattgcttagccagattctagacctgaaaagtgtagtcaatgacttagctggaaaaagggtaagtgtgctaattttcatatatatgaggccatttgaagaagcacaattaactaacaattctctatcttctggtcagaaacactctgaaactatgggagctcaatctgaggttagtgatgtcagtagaggagttaggtgtcagctgcttgaatggggttcaacagaagatgttattatcggggaaggagaattctgctctgctaatccagcatacaagattggtcgcattccacttggtcccaatgcggcagctgttgttgtcaaatctgtaacagacaaagattcaccattgtggaggcctaccccaaccatgttctcacttggggaagctgtgggactcaaaattccttggcaagctgataaggtgattttggatgacaactacccaaaaagtccaaatagaacttctgattccaaggtaatctttatagactttaattactttattttcacactttggaagctaacttgtagatgctaatatatatgaatcacttaggagacaatatcagatgagtcaattcaaagatgcaaagtttttgattggaattctcatggtgaagttattgctgagggtgttttatgttccactgatcctgcccaaatggtcgacaacattccccttggtaaaaatgctgccattgtgaagattgaccttattgtgaaggctgcgtcttatgtgtggaggccatcagctacagtacttgtgatctctgatgcactcgatcaagaagtcccatggccaattaataagatagaaatcatcactcaaaatgcaggggatgattcagtgaggaaatcgcctggggtaagttttggtgttgttttgatgcatgtgtattgtagttaatgataaatatctgatgaatatgttattgttgtggtagaatacaagtaccaactctggttccagcaaaggagt

SEQ ID NO: 5212 - DNA, 8375 bp, Arabidopsis lyrata
  Intron number 8 from transcript 494121 (locus 494121) deri ved from phytozome v7.0 (chr-ID scaffold_7; pos 23895660 t o 23904034 reverse strand)
ttttaaaatatacatacatacacataaatttgatagtcttttaaagaaaaaaaattatagaatagattgatagtcttctttttttttttttttgtatttcattgagggtttagtatgattttactatataaagcaaggacaatctattaaagataaaagcaatatggtttagatgagattgttgctttctttaactgacgagcgtttttcaagatataaaccgcgatatctccctcttctggacttcctaagtatcgcgaccagttgaaaatttgtagactcgacaacaagcattcaggaacatgactcggttgattccatctaaccatacgataacgcctattatacctatgatcctaagaccacgcagaagaataagattaaaactgtattaggcatcagacaaacaaaagagtaggtttatcaaagaaacttactttcaccacagagatgttcaatacttgtaatttaggagaatccttgaggaacttgcaaaggagattcggaaattttcttttgcacacacacaagttcagatgttcaaggtgtttgaaaacaaaaccatcaccatacacaccctggccacaatattaaaaattattaacagaggattctacaaataagatcgacaatttgtagttgataaatggagactaattacctctgaacatattgttagacgcttgacagatgtgactggtccaatagcattgttgagaatcttgagcttagaggattcaactctgacatatgcttccttcagcttaggcatattcttaatcaaagagtagtgtttccgatgattcaagttcacaagtttcaaaaactttaaagaaggagtatctatctcatacccatctaaaaacaaatcataaggtattaaaattgataaactctgcaaagacgggacgattatagagaactctttcgttttgtcatgctcataaaaatccaccgatagatcttcaagaacaggacaaatagatagaagcttttgaagtccatctacgaatatcaaatctttaagttccaaagtcttcagagagggaaaaaccatagagggaatatctatgagagctatccattggagtttcaaggtcaccagcgatttgcaggtaaacaagctactcggtaataggtaatttttattcttggtataataatcaatatccagctcacgtacatagcgagaaactgcgatttcaatccaccgtttgatattttcgggttcaatatgtgagtacctagttacgtggagacgcaatctttctatgacgggagctctatgtattggcaacttcctgtcgataaaatccataagcccaggcctttggacgcacgtgtaaatgaagtcgagattaggcagccacatccaaagaaactcccatcgtttagacaaaacgcaagtggatacagcaacttctgttggaagaaacgataatatcttcacgagcaagtcatcatgcaatccactgattttgtccatatcaagatactgttactgaacaagaaaacaacagaaagattccaagactcaataagatttctttaagcctagcaaacgaattattgacaagagaaaacacagaacacaacacttaggaacgggacaaaaccctagaaagaaaaaacctcatgtgaacggtttaaacatctagtgggcctgagcgtgggcctggcttcatgtgaattttcttcacttttgattggttttcccgagcccaaagatggtacatggaaagtcgtaggagaggaaccgagtatcacaaatataatggattcgtgtgtgatagagaatataatgtaatctatagttgttgccgggggttttcaagtgttagaccatgtacataggagaacttttaagagtatcataagccaatttattatttttaaatagaccaaacatgttttatgggtctgatccgtatcattccagtgaaactcatgatactgggtatcatgtgacgtggcagggcgtgattggtcgcagaaaatttttttgccgacagaagagaaaaaaaaaaatcatttactctctctcgattttttctctcctctctcacggcaatttgccgatttcttctcagctccggccggtacgacgtagatctgtcgccgtggagaatcgcagtaccaaaccaatctccctgtgagcgacggagctgcttcggttaggaataacagaggaggaagaagcagttgttgttgctgcgattggatctctagttactttagtctcagtttcattcatggaggacaatttgctgcagcttgagaacgatatcaccgatgaaataagcttttccatgaccaaagtaaggcatccttatctcactcgcaaaaaattccattgtttctatgttgagaattctgtaacgtttgtttcttttcttgagccaggtcttgttgttctcgtgtctggaaccacttatagacattgcagaacatcaagcttgtgcttaacgatgatggactgaacttcaagcttctccatcgtccacggtaatgttctgttctttcatccgagaaaaatatgaagggacgtcgtgttatagcttgagaaatacaaggttgttggtttagattcataggattggaatcaagaaatagatttgtttgattgggtttgataagaatgggtttatggctgcaaagtttcttggttttgctgagcgcacacaaggtgtttgataaattgccaaagagaaaaacggattgggtttatgcaaattttagttggctgatggatgagaatcaaatagtgagtaggttttaaggagttgtggaagatattcttcgtcaccatgagacaaattagaggagttaagtgggtaaagaaacccggatttttttttacatctagtcaggtatatatgtgtaatttcgctataggttttgttttgaaaatgaatcttttagacttgaaacgctttctcaagcttatgacttgtggatatagggagaggaactgagaaagcaaattggtgcagctgcttatatcgagtgcagttccaagactcaacaagtaagttccctgactcaagaagtaatgttttggtgagaatgttagaatcttatgatgactttactttggttatgttgtagagagaaacatgtaagatcttccttttattttccactttctccattttcatgcaccacatggatataaccagtttgaaatgcaaacgagtgatttcttgtatgagcttatccaaaagactagaacatgctcatattttagctcatctcttattttctgaatgtactaaagtatgctaaccctctccttttttcccagattccatggcctaagcctcctacaaagtgggacgacttctgtgttctatagtttgaatgtactaatgtttatttggtttgaaattgttcttggttctgtttcttaggtatactgatcagtttatactttatttttgaaaggaaaccaagtttttttggattgtaatattacattttctaatcttatgtttttatatatttatttttgattttgcaaataattttttttttttatgatacttaaaccagtttcaccaatgtaaacaaatttatcaacagtatcataaaaaatctcaaacaataaacaaacattaaaattaatactaaaaaaatgttaatgatactcatagagtatcaactatgtgcatgctcttatgactctaaaggtatagtgagtggagagagagatcaatggtttggaaagattttgttcagatttaggggaactgattggtatagttaactatggtgggaaacttgctgttacgtggaggcaagtggcctgagctacatagccaaaacccggagaattaaatttggtgcgctaagattgcgctagagaagggccatagagatgagatttggagtaagccagaatggcgtgaaactgtgattacggtcccaggtcatattaccgcttaacttgtgactctgagcggacctaagcacattaacatgaaacaatacaatgagacccccactttttctgttattttgttattttggaaaattataataggaccccagaattggttggtccggctcttgtgtacaggcttgtgtagccatttggatttgatgatttgtagaagatggtataaaacaattttgtgaaataatcaagcttcaatgtaattcttctacaacaaaacaaaaacaatgacaaactatatattcttagcaatgtaaaacccattaaaataaataataatggaacatcggttgatattcttattgaattattcaataaaagaacatcggttgccaagagccaatagctcaattagagtggttcttgggatgggaccgtataacatatactggtcccagacctgaaaaaaatgtagaggtctacacccagaacctcttagtccagatttgtaccttagtaggtttttattgttggtgctactttcttctttcccccttaaacatgtcctcgatcttgtatattcttttgcatgatataatgtattttttaaaatatacatacatacacataaatttgatagtcttttgaagacaaagaattatagatatattaatagtatgattttactatataaagcaacgaccacaatctgttaaatataaaagcaacatgatggttcagatgagatttttgttgtctttaagtgacaagcgtttttcaagatataaacctggatatctctctcttctggacttcctaagtatcccgaccaattgaaaatttgtagactcgacaacaagcattcaggaacaggactcggttgattccagctaaccatgccgttacgcttatcaaaaatatgatcctaagaccaagcaaaagaataagattaaaaccgtctttaggagagtccttgagcaaaagggtagtttatcaaagaaactcactttcaccacagagatgttcaatactcgtaatgtaggtgaatccttgagcaactggccaagaagattccacgaatacgttttacacacacataggttcagatgttcaagctggctgaaaacaaaaccatcaccatacacatcctgcccacaatattaaaattattaacagaggtttctacgaataagatcgacaacttgcagttgaaaattggagactagttaccatcgaacatattgttagacgcttgacatatgtgactgatctaattgcactgttgagagtcttgagattagagtatccaacatcgacatatgcttccctaagcttaggcatattcttaatcaaagagtagtgttccagatgactcgggtccacaagtttcaaatactttaaagaaggagtatctatctcatacctatttaaattgtaattactacgtaaaaagagtgataaactcttcaaagacgggatgataatagtgaactctcttaaattgccattgtaagaaaaattcaccgatagatcttcgagaagaggacaattagatagaagcttttgaagagattttccatctactactgacattgtttcaagttccaaagtcttcagagagggaagataaaccatagagggaacatctatgagagccacccatttgagattcaaggtcactagcgatttgcaggtaaacaagctacttggaaataggttttcattcttggaataataatcgattccaagctcacttacattgcgagaaattgcaatttcaatccatcggttgatgtctttaggtttagtatgtgataaccaatttaagtggagacgcaatctttcaatgactggagctctatgtattggcaacttcctgtcgataaactccataagtccaggccttgggacgcgtgtagaaatgaagtcgagattaggcatccacatccaaagaaactcccatcttttagacaaaacgcaagtggatacagcaacatctgttggaagaaacgataatatcttcacgagcaagtcatcatgcaatccactaatgttgtccatatcttacagattctaagttaatgttacagtccaaaagatacttgaatcttgtcttcccctgaaaaagaagagaacacaacaacataagacccaaaaggatccgtcttaatccaagcaaacgaattatcaacaagagaaatcacagccacacccacacacataggaaaaagacaaacccataaatttcaaagctggaatgagaaaaaaaaaaaaaaccctaaattcgattccgctcagaaaacagaagcagaagataaatcagaaccctagaaactaccaatgagttcgattccacttagaaaacagaatcaaaatataaattagaaccctagaaattagcactacatagcatttgcttacagtgtataagaggaagttgaagatcagaagatatcggattcgcagagaatcgtctccatcaaagtttcagaatgacaaagctttcatcgtcgtcactcacactcacaccggttcgtgttttgggccagaatggcttaaacccatagtgggccttggggtgggccagaaactcttttcgacatggggatgaatggatgacaatgattgaagacaaaatagttcatttgtattttatttttgtgatttgtaaatgtgattgttttgattttgattttttttttaatattaggagattctggtttaaagcctttaattcctctgacccgaaaccacatcatgtgatattagtttaattctggttgatttattattaaattatttttcaatattaatataattcattatgactttgcgatttgatatgttttttttaatgatttttttaaatattctctcccacgacatcgcgggggtcttgaatcctagtaactataaatttaaataaaaccaaaattacacaatgcatttttgaagttattcgccaacatatataaagtgtttttttttcataatcatttttaaagtagttctaataaactacataatttgttttctgctttccacagaagagaacggatagtatagctaaaatttggtagacaaatctcattgtgataagagttttcagtagcatgacaatgcaatactcttatgtattctcatgaagattgatgaaagcataataaaagttgatttcagcttaaacggaagaatctagtctttgagctttccgatttatcttagatacacaatgaatggattgaaaaccgaaattcttttctcaaactgaatgaatctttgacattgctcaggtctatagtgttagaaaaaaatcaacagaccattgttcactgttttcttacatccttgagcattggatatcacaatttatatctcgattttacaaccttgtgcttactactaacacccatacaaacttgttagacgaaatatttcaatttccatgaatgtatgatactgtaaatgaatgtctatttgaaagaaagtaaaattataatcaaacaaaataaactattttacatgcttcatagtgagctgagattttgaagggaaattttttttaaaacaactaaaagaattatgaatgagtttgaaaccagaatcagaccaccccttcgaatcaaccatgatttcggagaaagctgaacttgtttcgaatagacagttagacgttgagccgaaattggagattccttatgacgccaaacatttctttctctccagaggctgtgaattccagcttggaaggtgtagcgactgaaagagttgcagagtttcgaacgagaggtatccgtcaataataaggtgtagcgaatgacttggaagcagtcgatcgcatcgagttaaccaacttgaagaattccataagaaaatgtcacaattgctacacaattctttacgagcacatgattatgattatgttattcactgttgaaagattatattaaaatttggacactcgaagaagaaacgaacataactaacggaatgagaccaggacagagccaagtgtttgactcgagacaacaatctgctcatataagaatgtttcagagaatggcttttggaagtcaagattatagttctgacttctttgatcgctcacagtcacatagttctctacccctcggcaaggtaggcaaatgccaagggtccaatattagtttagaaaatttcttaaagaaaaaggtccaaaatgttttttttttaaaaaatactaagaggttttaattttttatttggttttgccataggtctcatcatatattgagacggtatagtagctggggaagtcgtgaccagaccagatttgtaccttagtagtttttattgtttattctactttcttcttttcccttaaacatgtcttcaatatatttgatataatgtattattcttttgcatgatataatgtattttttaaaatatacatacatacacataaatttggtagtcttttgaagaaaaagaattacag

SEQ ID NO: 5213 - DNA, 2404 bp, Arabidopsis lyrata
  Intron number 1 from transcript 480837 (locus 480837) deri ved from phytozome v7.0 (chr-ID scaffold_3; pos 23603172 t o 23605575)
ttgctctccgagtacgtgagaatttagaatcctaaatcaattttatatataaattttttgtagatttgggttttttttttttttttttttttgtattgaatctacatttcattcactttaaattaagcaaaactttgatgatgaataacaaaaataatattctcttactaataaaagggactatttgacacatcatctttttaaacgactaccgtaagttgacacatcatcagaattatccacgtcagcatacctagaaaaaaatctccccattatgctcattcaatccttatttcttcgtaacgatgcaatcgatccaacttcccccactactcccgtacttaaatcctcttccgaaattgcctacaaaagctcaatcgtcgatcaacgaaaaaacttgcaagcagtctctacactctacagtttatctcagcagaaatcgaataaatcaaactaggctttctgagaattcaaaataggatcttattagtgattcctgttaaagatgagactcagactctaagagtgggacaggctatgcaacgatgttgggaagcggagattacatcattttaggctccgaaacttggtctcttcattgagacgtccctgtttgctctggcttgggttcatatcatcagagttattgtgccggggctcacattcttactgctaatttcttcatatttgactagcttaatgaatttgatgtttagtgattctctgagaattaggtatatgtgtaattaaagaagaacaatatgtaaaacttattaggttatgagttgattttttttttactattgagttgagaaattcgaggatttgtatctcaatgacttgatgaatatacagtcattttggtatgcatctatgatattctaggtaatagttagctgcaaattatcagaattagagtgatcgttgatgctgagcataacatgtcttggctttgtttaattgggtatgttgttgtgcagtaaagataatgatctttggataagtgattggttgtgaagatattaccatgtattaggttttaaactcatgctattgtattttagtaactagaatttaacccgtggtacaccgcgtggctatatttttttaaaaaatataatgttattttttaaagtttaactgaagatatatcatattaatttgtatttttaaatgtagatatctatctatgtattatctagtgtatgattactattgtttaggtttcaatttttaaagtatagatacgaaaacatacattttttttaagtaacgatgtatggtggattttaaaattttgaatatttgactccgaagtataccgtgggtcggttttttaataactaaaaattttaagttgtatttgttttgttaatattgtttcttttgttttgtgtttaagattgtataattgtattttgattgttaattttaggatttcatccttaatataccgttattaatatcgacccaaacccgtcattccatataaacccgtctatattatcccattagctaaattattagtgttataaaatccaagaaaataaattattattgtaataaaatccaataattttaggatctcacctgtggtataccgttctttgaatgattttaaatttatattactaatatatattttaaatttatcatataaaatatatgatttcaggtttttgtgtttttattttatttaaataaagcaacggcttaaatgatgacatatatagtttttttcttgtatgtgtatataatttttctatgtgaatattttgattattataaattagtatttttattactatgcaaaatgttaatataaatatttgctataaaagttttttgaagatatatggaaagattgtgtagagatttttaaaaacaaattaggcaagatattgtttggttcatatcttttatttaaattttgtaaaagtaaataataaatgccaatggcattctttgtaaatacattccaactccaggatttatttgctaaaagtcatccaaaaatgtatatatagattggtatcttacaagtataattattaggttatgtgaaatcactcatggttcaccggagaccaaaaaaaaaaaatagatggagaattatcccaactctcatggtaagtaaagtctagcatgattgaatccttttaagggtctcatttgtttaaatattaaatcactatgcatgactgtggcaaataagggacattgctttgtaagcggtatgaaagaaagatagtttttgttggatcaaaaatcctgtcactcaacatgtttttatatatatatatatattattttttttgtagatttgggtttcttttttttttgtattgaatctatttaaattaagcaaaactttgatgatgaataacaaaaataataataatac

SEQ ID NO: 5214 - DNA, 752 bp, Arabidopsis lyrata
  Intron number 1 from transcript 490061 (locus 490061) deri ved from phytozome v7.0 (chr-ID scaffold_6; pos 22189544 t o 22190295)
ttcttcttcatcttcctcttcttgctgaagataaggtattcaatttcttcttatcctatctttctcttatgaatcttgattagtagtttctatggctctggagatgtgtcaacaaggtcaatatctcttgcaagtttggtactggtttcacttgttatctcatgggaaagattctgattatgttagacttttatatctaaaaggatagatctttttggctatttgactttaattttttaagattgtaagtctaatgttctgtcttaacttagcttttataaccatctaatgttttgagattgtaattctaatgttctgtcttaaagatgttctaatgtagcaatcacttagttgattgatgattgtgtagatcttagtttttgaatgaaggagactaattcaattcaagattaggatatggaatatcaggactttagtttctgggtatcggactctgttgattgatgaatgtttagttgaaaaaaggactcatttgttctgtattaacatagcttatgtaattagtttagtcactgattcttggtcttaagatatgcaatatcagtgccttagtttcttggtatcaaactctgttgattcatgaatgtttagttgatgtttcccttttcaaggtgtttttgtctagttgaattgggcaaattatttgttttcagcaaatctatttcacaagcaactttctgagtctgttacttactatttgttctctctctttgtctttgaattgttgcaga

SEQ ID NO: 5215 - DNA, 5115 bp, Arabidopsis lyrata
  Intron number 1 from transcript 313478 (locus 313478) deri ved from phytozome v7.0 (chr-ID scaffold_1; pos 12053478 t o 12058592 reverse strand)
gttgtcgtagtaatagtgtgtacaacccagctgatgatagggtttactagacgaagagtgacctttcagggtatcgattccttggaagctcgggtaaatggtttctcgtggtagattctcaattgaaactctatattatagatgtctttagcgagggtaggatcgatcttccaccactagaatcattgaaaggtagcctttataaaattgagcgagtaggagagaataaagtcaggaatatattattcagtgatttatctcctggggatcctcatactgccgaagatctgagaggtcgtttgtggataggccacaacaaggaagactacgttgttgtgtggcattttgaaatgaacgactttctagggttttgcaagaaaggggatgatcattaccgcgagatcttaacaaggaccgatgttcgcagggagttacgcggtgtaaaagatatggtacttaaaggttacagtctttacgtccttgccatccgtgacttcgttcgacacttggatttgtctggacatggtgaagatggtatcaaggatgtgtccgagaaccataagcttccaatgtggatgccaagtctgagtatggatgaacaagtaagagtcaacatagataagatcacctcatctagtgaaagcattgctgttacaagatcaggtcaggttttggttgtctattcttacgagttaggtaactctcaaagggataggatgttccacctgtacaagagagatcctaaagatcttgacccgaatacctacctaacccggcttcttgaggtacattctctaggtgatgaggccctctttcttgatttgggaaccaccgtgcctgctgaccatacccgtggtattgagcctaactccatctatttcacccgtggtgatcgtatccgtcacaggaatccttcacgcccgacatctgtgtcttcaatcttacaacaaagaccatcaaacaccgccacactctctccaactttaacgtcaaggatgctcaatggtttcttccctcttgattcttgccttcctcatggtttctccctcggccttgctctgtttactgtcatcttataaataaattccgaaatataaaaagttcatagttcacttgtacgttgatgataacataaacttagtgtccgacataagtgtaactattaaggcatttgatgttagagtgtacaacgatgttgttgggatgtcagtttagctttgttaacgttctgactttgattatgttttagtgcacatgtaaaggtcactatcctatcgagtgcataattgccaaaaagctaattaagtggcgtaactatacacacaatgaggagttcattgaccggtcgtatacacatcatcagttcttctttctaattcaactagttgataataataatagcaattctttaaaccgtgcaggaaaaaaaaaaccaacatgagaataaaagtagtaatgtggaaacaaagccgattgtcacactaaacactatgcagtcatgaaacgaacatcgcaaactgtctactttgagtcaatcaaacacaattgaacgtaattctgaaacacagtagcatgtggctttttggtaagaatagtttcctttcaattcaaaagaattccatatcttcttcctaacttcatataccttcttgagaacccatcaacactatcactatttactgatctgagatatgccaatgcaccaatgaagcttgtacaatgagagtatcttttgcaaaattcaacgtgaaaatatcaagagaatcttgaataaccacgagttcaccaatccctcttcgtcttttcagtatttaaaatctttataaaaatatacatagacatttatcaaaatctaaaagagttttgaatcagtttcagaagctaaaggtttcataaaaatgataaccaaatgatccatgatgatgtgttattgggccatagacccgttagaatatttttctaccgctgttattgggcttgggacctatatataacgctttctaaattgggtaaattgcatggcagggcagaagaccaacttttattttcatggtttggcaaagtgagaattagttctcaaattttgacactttagccaaattctgaccattttactcctgccagcgtaatgatgtactgttcactgtacggtttagttatgcggtttagttacgtacactgtttcggttaggcaatatattttcgttttaatttttgcggctgcacagtaaaatagggattaataacattaaaaaacaatgagacatcagtatttaatgcccaaaaagtttagacatgactcatgtcacaattaatgcaaaaggcatcattactttttctaatattagtttatatgtgtgaatagttgtaagagataaacatgatccatcaaacaaacaaattagtctgaacgaatgtgatgctggagaagttttgatcttcttgatttacaaagcttggagccaagacaagcattgatcgtgtaagtaatgaaattggttaagaagttttttgttataacacactagggtcttgattgtgttcgaaatcaacattgtttctataaaaaaaacccagaatatttttatttctaatttttttagttgaaaatgctaaatgaggatagatttatatatataagtgtgtagttgggaattatttttgttttttgtagatataatcatgctttcatttgcatttaatggggttctgctgaatttatgatgcatgtgtgtaatggatattcccgtatttactatggtgggtgagtggataattgaatcagtttcaaaaggtttcatgaaaatgataaccaaaaatgatccatggtgatgtaatattgggccgtagagtcgttagaatatttttcatttgctgttattgggcttggtacctatagatttacacagtacagtatgtgcaacttaacgccttctcattcttttctcaaccgtcctgataatgcagagatcaactacgctcaaacgacgattgagttgtacagatcttgagtctgcaaaggccatgcgttcgactttgattcagcggccaagagccggatcgccattgctgatgctgtctgtagaaaaggatggttgtcgtagtaatagtgtgtacaacccagctgatgatagggtttactagacgaagagtgacctttcagggtatcgattccttggaagctcgggtaagtggtttctcgtggtagattctcaattgaaactctatattatagatgtctttagcgagggtaggatcgatcttccaccactagaatcattgaaaggtagcctttataagattgagcgagtaggagagaataaagtcaggaatatattattcagtgatttatctcctggggatcctcatactgccgaagatctgagaggtcgtttgtgggtaggccacaacaaggaagactacgttgttgtgtggcattttgaaatgaacgagtttctagggttttgcaagaaaggggatgatcattaccgcgagatctcaacaatgaccggtgttgttcgcagggagttacacggtgtaaaagatatggtacttaaaggttacagtctttacatccttgccatccgtgacttcattcgacacttggatttgtcgggacatggtgaagatggtatcaaggatgtgtccgagaaccataagcttccaatgtggatgccaagtctgagtagggatgaacaattaagagtcaacatagataagatcagctcatctagtgaaagcattgctgttacaagatcaggtcaggttttggttgtctgttcttacgagttaggtaactctcaaaggcataggatgttccacgtgtacaagagagatcctaaagatcttgacccgaatacctacttaacccagcttcttgaggtacattctctaggtgatgaggccctctttctcgatttgggaaccaccgtgcctgctgaccatacccgtggtattgagcctaactccatctatttcacccgtggtgatcgtatccgtcacaggaatccttcacgccccgacatctgtgtcttcagttttacaacaaagaccatcaaacgcttccccactctctccaactttaacgtcaaggatgctcagtggtttcttccctcttgaatctcgccttcctcatggtttctccctcggccttgctctgtttattgtcattttgtaaacagatttcaaacaataagaagttaatagttcacttgtactatatatgaaaatacccatgatttatatttcactaataatgttttttgatagtttcaacactaaaagatttttagttttttaattgaaatacaacttactaatttgaaaataaaatttgttaaacaaaaaaagttttctgaatttttctgtttgtatttgtttagcaaaatttattttgtattcagaaatctttgtttgtttttttttttttttttgtcgtctaaatttattattaattgcaaattatgagaactgttacatagacgattctacaactgacaattctttccgacccttattagatctacgacagactacacttccttcttcataatcttgatgaataccttcaatgatccacgacctggcgacacttccttctctgcgtagaatcctggcgaacggatataattttacatcgctggagatctcctgcacacttgcctctattaatctgcaaatttgttaataaattgcaatatctaggactcgaacctcaaacctcttggtgtagaagcattaatcaacccttggtcaaccaataggcaaagggagcttccacgaaatctttgtttgtttgtgttttgtttacatcgtggatggaatatgaaaaagtcattagatttttacatcgtgtaatcaaaccaaaccaaatcaaactaaaccaaatgatcgtgtaatcaaaccaaataataaaaaaatgaaatatttttaaccaaatgatccatgatatattgggccatcgagccgttaacatataatttcttgctgttatcgggcttcgtacatatatatgtggcaacttaacgctttctcaatcttgtcaaaagacgagataaaaaaaacaaaaacgaattcattttttttttcacagacgagataatccccgtcctgaga

SEQ ID NO: 5216 - DNA, 431 bp, Arabidopsis lyrata
  Intron number 1 from transcript 487122 (locus 487122) deri ved from phytozome v7.0 (chr-ID scaffold_6; pos 1007185 to 1007615)
tcaggtcaaacattaatcgatttgtttcgtcggttttagtcataatctgattctctaccaaattttagttcgaatcaatcccgattattggtcttaggtttgattttactcttttatgtagtactgatgtaggttttaggagattcctttacttaataattcatggggatcaattaattattaacaagtggaatctcaatattttctaaaactggaattttgtagaatctctcaatcgaaaaaacaacttttaggggtctcatgagcttgtaacaaagcttttgtggttaggtgggttgaggaatgaagaaagaaacagacttttttgtaattcttgactaggttctgatacagagttatagctacaaaatctagacttttttgaaggtaatgtatgtaacacattggagtacttggttgtttttgaaggg

SEQ ID NO: 5217 - DNA, 5165 bp, Arabidopsis lyrata
  Intron number 1 from transcript 905733 (locus 905733) deri ved from phytozome v7.0 (chr-ID scaffold_3; pos 13033375 t o 13038539)
gctattttcgtgctcgcatgtatatagcagcgaataagtacttactctggatcataattattcttggtaagctctctacactcgttttcgattaatttgttttgcagaactactacgggtcttatgttctgttagagtaaaattcttttagaggtaatggagaaagtgtttaagtatttgagagagagttttagaaaatacaacttttattgctttgattttaacttgaagacaacttcacaacctttttcaacaaatgagagagagggaggaggtatttatagcctccaaactacaaaatatctaaaatattttaatcctaaatctaaagagttcttaacataatatctagattacaatattctaattatctagattattctataagaatatctagattttttatgtttaaggaggtggaagatgattctagaaaatttctagaacattttaaggaggtggtaattatgatatttctagagaaaactttagaacttggattttggcccatcaaatgattattgggtaattgacccaataattaaacttgattcaaaatcaagtttaactttcaacaccccctcttaaacttgattttgctactccaagcaaactcctcatcttgataaaatcttcgcgcttgagaagcttggtgaaaatatcggctacttgatcatgtgtcttcacatactccaattgcacgtccttcttgttaacacactctctaatgtagtgataacgtgtgtcaatgtgtttacttcgatcatggaagaccgggtttttcgccaatgctattgccgacttgttatccacaaagatcgtcgttggttcatcttgtggtaagcttagctcctttatgaggtttcttaaccaaatagcatggcacacacatgaagtagccgctacatattctgcttcacaagtggatagagtgacaattggttgcttcttcgacatccatgtgaaagccgtatctccaatgtagaacacgaaaccacttgtgctttttcggtcatctatgtctccaccccaatcgctatcgctatatccaacaagcttgtaatcattagaagtagaatagtgtaagccatagtttatggtacctttgatgtagcgaataatcctcttggccgccttgaaatgagttgttgttggatgctccatgtaacgactaacaactccgaccgcatataaaatatcgggccttgtgcatgttaagtatctcaagcttccaaccaagctcttaaaggttgttggatccactccttctccttcttcattctttgataatttgattccgcattccattggtgtggtcaccgggtttgagtcatccatcttaaactttttaaatatctccttagcatagccttcttgagtaatgaagattccattgtcttcttgttttacttcaattccgaggtagtaagacatcaatccaatatccgtcatctcgaactccttcgtcatctctttcttgaattcttcgaacatgcttggattgttacccgtgaatatcaagtcatctacatataagcatgcaatcaatatatcgtcattttgaattttgatatagagtgcatgctcatatggacacttgatgaagtctttctccttgaagtacttgtcaattcgagtattccaagctcttggggcttgttttaatccgtaaagcgccttctttagcctcaagactttattttcttctcctttgactatgtagccttgtggttgctcaatgtaaacttcttcttcaaggtcaccatttaagaaggccgacttgacatccatttgatgtatcttcttccacttgttttgagccgctagtgaaatgattagtctaaccatttctagacgagcaacgggagcaaatacctcgtcatagtcgattccggctctttgactataaccttttgccaccaatcttgctttgtatctttccacttcccctttagaatttttctttgctttatacacccacttcacacctatcgccttgtgtccatttggaagtgaagctagctcccatgtatcattctttttaatcgcctttatctcttcatccatgccatttctccaagtcttcctttcaatggcttcttggaagtccatgggttcgcactccgcaaatagacaaaataaagtaagattgtcttgattttcggttacctcgtagagctcttgtagacttctaaaatgaggagtcctctcgcttgagctttcttctccttgagagcttgttggtgaagttggtggtgtagtaggttcttctcttggtggctcttctcttgttagctccgagtcatcttcttcaaagtgtggaaagaagttataatcttcttcatttgatttccaatcccattctccttcttcatcgaaaacgacatttcgactaattattgtcttcttcgtatcgggattatagagcttgtagcctttggagttgttatcataaccaatgaagatatacttctcacttttatcatctagtttacttcgcttctcatccggtacatgagcatgagcaacacttccaaagactcttaaatgagaaacaccaggcttccttccgctccatgcttcttgtggtgtttttcccgagacactttttgttggagatcgatttaatagataaaccgcacacgcgaccgcttccgcccacaactcttttggtagtcttttacttttaagcatgttcctcgccatctcaagaattgttctattctttctttccgctacaccattttgttgaggggatcttggcaccgttagttgtcttcgaatgccgttatcttcacaatattttaaaaactccttggatgtaaactctcctccacggtcggatctcatggctttgattttaagaccactttccttctcaacatgggctttaaactttttgaagttctcgaacacctcggatttttctttcaaaaagtaaacccatgtttttcttgaaaaatcatcaataaagagaaggaagtagttacttttaccaagtgattttggcttgatcggaccacacacatccgtgtgtattagctccaacggtttttgagctcttgtacttgactctttcggaaagctcattttgaattgctttccaagtagacatccttcacacacttgatttggatgattgatgcaaggtagtcctctcaccatttctttcttcgaaagcaactccaatcctccaaaatttagatgcccgaatcgaagatgccaaagccaaggctcctccttgtagcacatcttgagacattgtgtgatgtcattttgaatgttaaggacaaacattctatttttcgacatcggtaccttggtaatgagattacttgcttggtctcttatagaaaggttattatcttttagtcgaatatcataacctttctctaagagttgtccaagattcaagatgtttgtcttcatgctcggaatatagtaaacgttggaaataaattgatgatctccattcttcaatcggatgagaatgtttcctttgccttttacatccatcttcgattcatctcctaaagccacatttcctctcaccgattcatcaagctccgcgaacatacttttgctcccgcacatgtgattacttgcaccactatcaaggtaccacttatgattctcttcatgttcacctttcttgtaactagccattaataacatgtcctcttcttggattttttcttcaacgtagttggccttctcctcgacttttttgttgctaggagctttacattctgaagcataatgtccaaacttcccacaattgtaaaatttgacacttgatttatcatatcttgattttgggcttcctctcccacgacctctcgatgagttttctcctctttggtttgtgttgtcttcatatggcctccaacctcgtccgtttccatatccacgacctcgtcctcgtacttgaccgccacctcgtctttggtaattttggctattttcttctttggtaatccgcattttgaggacttgttcgacgatatcttcgttcttcttcttcttttcttcataagcttgtaatgatccaagaagttgctccattgtcaaagcctctaaatcttttgtttcttcaatgacggtgacaatatgctcaaattttggatccaacgatctaagaactttctccatgattctcacatcatctagcttctctctgtttcttttaaggttattagtaaccgtcaacactcttgagaaataatcggagacgagttcaccttccttcatttgcaatgcttcaaattctcctcttagagtttgaagacgtaccttcttgacttgatcggcacctttgtaagaggttcgaagcttctcccatgcttctttggccgacatagcttcaacgaccttctcgaacgtatcttcatctaatccttgatagattagatagagagctttcttgtctctctttcttgagtctctcaaaccatccttttgagtttgagaaagactactttcattctccggttcaatgaaacctttctcgactatctcccacacgtcatgtgctcctaggatagccttcattcgtagactccaattatcgtagttgctctttgtgagcgttggaacttggaagggaacattgttactcgccatctttaggatcttcaagctctgataccactttgttagagtaaaattcttttagaggtaatggagaaagtgtttaagtatttgagagagagttttagaaaatacaacttttattgttttgattttaacttgaagacaacttcacaatctttttcaacaaatgagagagagggaggaggtatttatagcctccaaactacaaaatatctaaaatattttaattctaaatctagagagttcttaacataatatctagattacaatattctaattatctagattattctataagaatatctagattttttatgtttaaggaggtggaagatgattctagaaaatttctagaacattttaaggaggtggtaattatgatatttctagagaaaactttagaacttggattttggcccatcaaatgattattgggtaattgacccaataattaaacttgattcaaaatcaagtttaactttcaacatgttctttgtttgtctgtcatgtaattagcaaacaccatcagcattttgagcattgtgcgtagc

SEQ ID NO: 5218 - DNA, 16759 bp, Arabidopsis lyrata
  Intron number 2 from transcript 475446 (locus 475446) deri ved from phytozome v7.0 (chr-ID scaffold_2; pos 4725706 to 4742464 reverse strand)
gcagtggggcaaagatgttgcacactcccatcttgcctgttagtgcatgaaactgagcaggatagataggcttcgtcaaagcatcagctaattgatcttcagtagccacatacatggttttaagaaaacctgattcaatcgcctccctcgtcttgtaacaatcaagctccacatgcttagtacgctcatggaatactgaattgtttgcaatgtgcaaagctgcagtgttgtcacaatagagataagctggaggagtgaatggtaccatgaagtcatcaagaagccgtgatagccaaatcatttccttagtgccctgagacatagcacgaaattctgcttctgctgtgctcatagagacggtttcttgcttctttgatttccaagaaactaaagaatctccaataaacatacagtaagcagcaacacaacgtcgagaatcagtacatgaaccccaatctgaatctgtataacctcgcaagtcaaagttaccatctgcaggataaaaaagtccttgacctgcagtacccttcaagtatctcagaaccttatgggctgcattcaaatgtatatcccttggatcatgagaaaattgacatagagtattaactgcataagcaatgtcaggtcttgtaatctgcaaatacatcaatttcccaaccagcttgcgatattgagttgaatctttcagaggaacaccatcttccttgttcagttttacactcgggtccaaaggtatagatgatggtttactaccaagaaaaccagtagtagacaataactccagaatatactttctctgacaaatggagattcccttagcagatcttgcaatttctataccaagaaaatatttagctgctcccaaatctctcaacttgaaataagatttcaactcatcagtgaaccttgccacagcatcatcactattactcactatcatgatgtcatctacatacaccaaaactccaagaaacactccattagcatatttaagaaacagagtatgatctgcattagacttcttaaaacccattcccttcagagtattagagagcttaatgtaccattgcctagatgcttgttttaggccatatatggacttatgtaacctacaaacagcattaggaggcaaaatttctccacttagctcagcataaccttgaggaatcttcatatatatctcctcatccaagtctccattcaagaatgcattagaaatatctagttgatgaactgaccacttcaatttagcagcaagcaacaacatcattctgacagaagtcaacttagcaacaggggaaaaagtttcttcataatccaaaccttcttcttgagtatagcccttagctaccagacgtgacttaaatctctcaatacttccatccgcattatgtttgattgtgaaaacccacttacaaccgatagcctttttatttgggggaagactgcatatactccaggtccgagtcctagtcatagcaccaatctcctctttcatcgcatcacaccatgccttaaaatctttagcttctgaatatctttgtgggataacagcatttgtgatattattaacaaaggcacgaaaaggctcagctatatatgaataagagatataattgttcatagggtataagatattactagtaatagtataacaatgaaaatcctgcatgtgttttgggggtttcttttggcgtttagactttggttcagaaggaaccagagcctgagaagatgacacatcttgaggtggatgtgcatcaggaattgatgtttgctcaagaggcaaatcatcggttagggcaggcaactgtaatagaggaaagaaatctttgatatcatccttgatagtagatgatatgaaaggaaaaatatcctcatgaaaaatgacatgtcttgaaatagaaacagcatgtgtctctatatctaatagcttgtaccctttgtaacctagaggatatcctagaaacacacaggctctagccctaggttcaaatttatgtctatgcttaggagaagtagaactataacacaaacatccaaaagtctttaaagactcataggtaggaggagtgtttttaagcatctcataaggagacttattatctaaaacaggggtaggcaatctatttatcaaaaaaactgctgttaaaacacaatctccccagaattctaaaggtatattggactgaaataacaaggctctagcaacattcaagatttgctgatgctttctctcaaccacggaattctgttcaggagtttcaggacatgaatgatatgcaacaatgccatgttcagcaaacaaatctttaaattttaattcatgtgcattgtctgatctaaccgattttaatttggtctgatattgtgtatgaaccatattaacaaaagtaggaaaaacatgtgaaacatctgatttgttctttaatagataaatccaagtggctctactataatcatcaacaatagtgaggaaatattgaaaaccatctttagtaggaacagagaatggaccccaagtatctatatgaactaaatcaaatgcagcattacacatattctgtctagattgaaaggataaatgcttttgttttgataaatgacaaacatgacaaacatgagaatgttctttatttatcttcttatctttaatattcaacacatcagacaacaaatcgattttagaataagcaggatgacctaatctcttatgccatgtaatagaatcaacaacaacagaagaacaagtagaaaattcaggacacatagaattggtaccttttaaagacacagaatgattattttcattgaaatccagaacataaagattcccaacttgactacctttaccaatcatcaactcctttgtaagttcctgaacaaaacatgcatcagatgtaaaacttacttttgattttaaagtctttgtaagaacactaacactgatcaagttgaatttgaattcaggaataaaaagcacattgtggagagagattgcatcagacagttgaatgaatcctatgcctactatcttaactgtacaatcattgggaagtttaacaaaggtattttctagggacctaaattctaagtaaaggtctctattgtgtgtaacatggtgagtggctcctgaatctattacccaagctctaggagacacagctggttctcgagatatagatgaaacgagcatgtcataataagcattagagtaaagtgccagaaatgtacctgagatctgtgagatcataggtacagagggtgttgcagaagtcgaagcagaagatgtagtcggcagtgatgtggaagatggagtgtgaagcttggtactaagataagaaatcatagtctgaatctgattagtcgagaattcctcacaataatctgtcttctcacttggtgaatcatgcacaggctatgttactgcaagattagtagtaccaatggtctgtgccttcttccactttgaaccaggttgttggtgtcggatcccgcaccagaagtacgagaccaaccaaagattgccacgtagtcaagataataggcccataaagaatgaagcccatcggacccaggagtcgaagggacggtcgaagtggttgtcaccacttcgaccatccgaagtgattacattgcgacatgagttcgatgaagaaggcatgggtaagatggttcaaggatatttgggccagaaaggcgaggcccgcgaagatcagagtcaattcaaattcaaacgttgagcattaaagtcgaagaatcaaaacggacacatttaagagggaataatcttacttaattattcattttaatgacaattctctataaatataaaggccaatggccatgtaagggggatcttcctctgaagagagaaataatatagcaattttcgtatcaatttacaagtttttacgcattcatttttgtccctcaagaattatctttcccacttaacaaaatacttgagtgtgtgaatccgacatccacattttggcgccgtctgtggggagatcaggattcttgagtggtcagatttctttttttctacatttccgagataagcgacaatgtccggaggagacgccgttgagacatcattggccgaaaccctcaaagctatgcagtaaactatgtcggacatatcacaaaagttctcggatgtggagaaggccgtcgatacgttgcaaacatcccaggtatctcttagtcaaaacgtcaataatatacaaactcgtgttcgctctttaagtgcaggaaacccggtgggaacccgaagagggatattcaactcgccaagttccgctgcacgaaatgaaaccagcggacaaacaactcccggtgctactaataatgtagctcagacgtcggaagaagagacgcagctcggggatgaagaacaacttgcagctcagtacgagcaggagaacctcgaccagttcgagaccatgaggaaggttagctaggaattaaaagaaatgaaatcaaaacttcatcaggctacaagttcggagccagacatcaatcgagtcattgaagaagctaggcgaacacctttcatcccgcgaattgcaagtttaaggatcaaagattcccggaagctcaagttggacccttacagcggattggaggatccaaaaagctatcttgcagcctttctgatcgctgcaagaagagtcgaattggatgaagctgatgaggacgcaggctattgcaagctgttttcggagaatctatgtggccaagctctaatgtggttcacccaattagagccgggttcgatcagcaatttcgacgaactatcagccgtgttcttaaagcaatactctatccttatggataaaagcgtttcggatgccgatctttggaacttaacgcaaggatctaatgagtcacttcgagttttcatcaccaaattcaaaggagtgctatcaaaactcccaagaatctcacagcaatcagctttatctgccctacgaaaaggattgcgacatgattcaaggtttaaagaagacttaatacttcataaaccagacacaattcaggatgcactcttccgcgcaaacaattggatggaggtagaagacgaaaaagaaagttttgccaaacggaataaacaagaaaagccggcaatcaccgtccctaccaagaagttcgagcctagagagagcaaaggaccaaggaagtttgggtcgcaacccttcaataattccgtcgggaagcaattccaagggaaaggaagatcaaacacttgggtccgtgatgaaagtctatattgcgacattcataaagtaaccggacatttaaccaaggattgcagcgttcttaaaaagcacctcgcggagctttgggctagtggcgatctttctaaattcgttataaaagattttgtgaaggaataccacgaagcaaaggaaaactccaaagatcaagattccaaaagaccaaggttatccaacgaggaagaaccaaggagttcgaaggggaagatcaatgtgattctaggaggttccagattttgcggagattcaataagttccatcaaaaaacatagacgaaatgtcttactcaaagcaagcttgagcgaagaaattgattttcaaggtgcttcaatatcatttaacgaagaagaaacgcggcatctcgaaagaccgcatgacgatgctctagtcattactcttgatgtcgcaaacttcgaagtatcaaggatccttatagatacaggcagttcggtcgacttgatctttttaagtactctagaaaaaatgggaatcagccgaggagacatagtaggacctccgtctccattagttgcattcacaagcgaatcagccatgtctctcgggacaatcaagctaccggtccttgccaaaaaagtatcgaaaattgtggacttcgtcgtcttcgataagcccgcagcttacaacatcatcctcgggactccctggatttatcgaatgaaagcagttccctctacataccatcaatgtatcaaatttccaacatcaaatggggtggaaacaattcggggagaccaagaagcttcacggacttgttacttagctagccaccgtatgaagattcaatagcaactaacgaagcccgcaaaagaaggactaaaaacaaaatttcctagtgggcagaagaaagaggatgtagtagtcgaagtggtactggaagaagacaagccggaccggaaaattagaattggagcaactttgactggccaaataaaagaagctttgatcgaactcttaagctttgcatggtcagcagcggacatgccgggcataaatccgagtataatttgtcatgaactaaacgtagatccaagcttcaaaccggtgaaacaaaaaagaagaaagcttggagtggagcgggcaaaaatagtaaacgacgaagtggataaacttttgaagatagggtccataagagaagtgcaatacccggagtgggtagcaaacaccgtcgttgtcaagaaaaaaaacgggaaagatagggtttgcatcgattttacagacctgaataaagcatgccctaaagatagtttcccgctcccgcatatagatcgacttgtagagtccaccgctggaaatgagctgttaacgttcatggacgccttctcgggttataatcagataatgatgaaccccgaagatcaagaaaagacttcatttatcacagatagaggaatctactgttacaaggtaatgccttttggtttgaaaaatgcaggagcaacttaccaacgattggtgaacaaaatgtttcacaatcacctcgggaagactatggaagtctacatagatgatatgttggttaaatcattgaagaaagaagatcatgttaaacatttggaggaatgttttgatattctcaataaatatcaaatgaagctgaacccggcgaagtgcacatttggagtcccatccggagaatttcttggctatattgtgacagaaagagggattgaagccaatccaaatcaaattaacgcctttctgaacatgccatctccaagaaacttcaaagaagtacaacggttgactgggcggattgcggctttgaaccgttttatctcgaggtcaacagataagtcgttgcctttctaccaaattctaaaagggaacaaaggattcctttgggatgagaagtgtgaagaagcttttgggcagcttaaggcatacttaaccactccacctatactctccaaaccggaagaggatgaaaaactttacttgtacgtatcagtttcaaaccacgcggttagtggagtcttggttcgggaagaccgtggggagcagaaaccaatttactacgtgagcaagtcaatgacggatccggaaaccaggtacacaatgatggaaaagcttgcacttgcggtggtaacttcggctcggaagctgcgtccatattttcaatcccattcagttgaggtattaactaaccaaccactccgaacaatacttcatagtccaagtcagtccggacgtttggcgaaatgggcggtggaattaagtgagtacgacatagagttcaaaagtcgaatcagtatgaaggctcaggtcttagcagacttccttaccgaactaccaatacctggaacgatagagcaatcggagaaccaaatttggaaattacacgtagacgggtcttcaacaaaacaaggatctggagtgggaatcaagttggaatctcctacatcagaaattctagaacaatcattccgattattattcgatgcttccaataacgaggcagaatacgaagcccttattgccggacttcgactagcacaaggagttggagctaaagaaatattggcctattgcgattcgcaattagtagttaaccaatttaatggagattatgaagccaaagattcaagaatggaagcgtacctcgaagtggtaaaggatttatctaagaatttttcgaaatttgaattaatccgcatacctcggggagagaatacaactacggatgcatttgctgcattggcgtcaacatcagatcccgggttaaagagagttattccagtagaatgcatttcagagcgaagcattcaagacaacaaagaaattctcgtcattacaagatctcgagcagcggcacgtgaccgcggcgaaccagatatcaaaccgccttcaaacaaacgaaggaagtcaaagggatcaaatacatctaacaaggaacccgttgttttagctgaagaagtgattccagaaacgatgttagaaaccgagccattaatcgaggaggatattcttgaaccaaacgaacatcccgaaccagaaccacggatatttcacaaagttgaccaaattccggctaaagactggggggctgattggagggagccaataaagcactacatcatgacaggtgagctcccaaagaataaatggcaggccaggaaaatgaaagtcgttagcgcgaaattttgtctgtcgaaggatacgttatatagacgaggtgtcagtgacccttacctattatgcatttttgggcccgaagtcgaaatcgtcatgagcgaggtgcatgaaggattatgcgggagtcattcatcaggaagagctatggcttttaaagttaaaagaatggggtatttttggcccactatgatcactgattgtgttaagttcgcccaaagatgcaagcgctgtcaactccatgcaccattgatccatcaaccgtcggaattattctcctccatttccgccccatacccgtttatgagatggtcaatggacatcattggaccattacacaaatcaactcgaggtgtacagtaccttttagtccttacggactacttttcaaaatggattgaagctgaggcgtatgttggtatcaaggattcggcggtgaagacctttatttggaaaaacattatatgtcgacatggagttccgtacgaaatagtcactgataatggaccacaattcatttcacacgagttcgacgccttttgtgcggactggggaatcaaagttagttattctactccacgatatccgcaaggaaacggacaagctgaagccgcgaacaagacaatattaagcaatctcaagaaacgcttaagtcatctaaagggaggatggtatgaagaactccaacccgtcctgtgggcctatcgtacaacccctaggcgacctacaggagaaactccattctctctggtttatggcatggaggcggtagtaccagctgaactcaatgtgcccggacttcgtcgaacagaagcaccgttaaatgaggaagaaaattcagcaatgcttaacgattcactagataccataaatgaaaggcgtgatcaagctctaattcggatccagaattaccaacaggcagcagcccggtattacaattcaaaggttaaaagtaggccgttcttcgtgggagattacgtattaaggcgcgtctttgacaacaaaaaagaagaaggtgccggaaaactcggtattaattgggaaggaccttacattattaccgaagtggttcgaaacggtgtttataggttgaaagacctagaagacaatccagtgaagcgaccttggaatgtgatcaacttaaagaagttttatgtttaaagctatatgcattatttttgtacatgaactacggtgtggcttgatcccgagatgggtacgtaggcagctcggaaatgagttcagctattaataaaaatttgttttatttctttatgaaaggaaaaaggttcggctatgcgaacatacaaaaaattggaaatagagcgttatttaaaaaaaaaaaaagagacggaatgtccttcatcgtacacttcggattatggaaatcttgttgatgagcagaacacttcaactccttgaccagcaagatcgaggatcgacatcatgcagtccggaattcgagcaaagtcggaaattccaagctcaatccactctccggggtgagattcaaggatgtgaagatctctcgacactgtagtaagcctgcgttgcatccggttaatcctcttccgaagtcttctcttttccaacataagcttccggtgttgaagctcgagtgcctctatgaacgccgtcgccgttccttgatctctgattgggagatctctgatcaaagcacagggggctcggatctgagatctcgagaagccgcgaagtggaggaggctgcctgtttggctcatttggaacatcttcattcatcattccgattctggagaagtcgggcatagattctgaacagcgtagattgaactccatacctgctaaaataaaaaaggagagtggtgaggagtaaaggggaattgaacctataatttataggaacctcatatccctagcaagctgcggattctatccaaggaatggaatgattcgcggagtgatttatgccctcgaacggatcctgcattaaaagacgtatctccaaaaatatttggaaagaaaggaaagtagcaaatattttcataaataaaaaggggccgaagcccattacgagttttaaaaaaaaaagagaagaagtgaagaagttaaaagaacatttatgggagaggctcaggaacaggctccttcatcaccggtttagtttccgaagtggatgccttgttcgaggcatccacttcggaacgatcccgaacgcgtttccggcagttgctggcctcctcctccaagtcctcttcctcttcactgtcggatggaacggcgcagacgggggcgttcacgggacccgggactcctctggcgcggagatacatccgaagcatcttcgggatctcagcaacggagtcgaagtttcgccactcccattgaaagggatcgctctccaaggcccgtatcttcctttccacccgagcgatgcgagcctcgagcgtctgccttttgagtcccagccgctgcctctcttcacacaagcgacggtgcttgtcggcaacctaacataaaaatgagtgaataagacgaaacaagaagttttcaaatcaaaaactttaatagttaccttgtcaataaaatcgcaagcctctttcttttccttcgaaggaaagtgaaagacggcgtgagggaagagaacgccggccggttcaaagccgtcgccggacaggaagagtgggctgccgggatcaacgggggctactgtttcgttttccattcttaaaatatttctcaagcaagaatctagagtcatgtttaaataaagcttaagaggtaggtgagcctttatttataatgatttagggtttggcttggaaccataaattcattaatggtagcgtgcccaagtggtttaaaccatttttggaaaatcgagaaaaggcaattattgcattaaaagatgagccgttttccttgagaagggaaagacaaccgtcgcattaactataaaagtttctaaggcccaagcccaacaagtttaccgagttgactaaacccgaagtggggaactcgctttaagccgagctcagctctcgcatcctaaagagaaaggtttgatcagcctaaaaatctcgaaagcattgccacaaggccacaaaaggttaaaagcggactttgcaaacccgcatataattttaaccaaaccccctggggtcacaacctagaaaggtttaaaagcctcctcaggcaaatatcttgttcaaaagaaacaataaagccttcttaggccaaaaataagtttggaattaagtcttaaaattaaagggacaatctccaatttaaagtggacacagccactacggagtgatctccacctcggactccgactcagcaaccagagtttcattcacctccttgactggtgcttgatcagatgaagctccctgaccaccctccgcggtacaaccaacctccggagtgacctccggtaccacaggagctacgggcgggacaatgccttccgtctcgcttgaacctggaaataataattccagtcaatcaaaagtacaaggtaagaaaaggtaagcctcaggagccaagcgttacctgcccagtccaaacccgattcacttataggaggtgattcagtaaagaattcctcgaagtcaagcgggttgaaggtcgaagtgggaagagctgccaagcgactccgtttttcagaaagattagttgacagctcagtcctctcttgctcctcagagaaatctgcttcatggatttgatccagcagaatcaggttgctttcatgctctttgatgtccgactctaagtccgacttagccttctcagtttgcatgaagcgaatggccccttggatcaattccatcccgcgtcccttaacctcctttctggccttcgatgccgaccttgccaactcagaatcacgcaacttggctagcgccttgtatttcgcgtcaagctcgataagttggttgttcagggtgtcgacggctgattcggattcatgaagtctaccctgaacaccagaaagttcgtcctggagcttgtaattccggtcgtagtagtcttgcagctccccctttacttgcgccagctcggatgttaacctgtcgaccttatcctccagatcgtgcttggagccagcagaagaattgagttcagtctcaagagctgagaatttcttcttccacatatcaatctccttctcccatccaatgaccaacccttcgtaatgttcgaccatgtcgttaagttcgctatgagcctggcgtcatacatgaacccgggatggcgagtcagttcgtagaatgacaatacaataaaaacaaaaaaaaaaaaaaaaaaaaaaaaagaaggggcgaagaaaacggaactaacccgagatgaatgataagcgtgaagcaaatagcgttcacgaattgcagggcgccatttgttgaagtctggcaagatcgaacccgaacgggtcttgaagcatcggaagacgctgccttttgtctccatagctgcgaagaaggaagaatggtaaaaattggaattttaataaagacaaaaagtttaagcatgtgtaaatcaccaaacctgaaagcgatttgacttgagggacaagagcaggcttcagcctcgaggaagcatctcgagattcagaatctccacttttaggggatgcactccgagcagtctttttgctgacgggctgggaagaagaagacatgtcaacaggacggggaggacccattggttcagtaggaggggaggatcgaggtgaacggtcagtccgaggccttgatttctcccttcgcggagacaagtcatcatgggacgacttgtccctcttcttacgaaccaaattcttaagtggttcgttgctaaaatcatcttggggaggacgggaagaatcacgacgaggagaccgctctctccgaggagaccgctctctccgaggagaacgcttgtcgcggtgctcgcggcgaggtgttaacctgtaagcagcaacagatctggctccctcggagctgttgtcatcaaccagcagggttctgctgtaatcttttctgtcaatggcggtcgcaaggaacgccttgttttcatcacaagcctctgctatcggcttggagagcttcttacgctgggcagcgagggcccgagctgacattccctgagttgggggaggaggcggaagacgatgaagtagattgggaggactcatcctgagtttccggttggcctcgacaaaccggtcgagggtgaaagaattccaaagggtttccccttcaaggattgttttgaagaacttgacaaattcttcggtcgggagagttggagcgatgaaagctgcgaaatgaaacaacgaattcggtcagtaaaaataataataaacaataaaggaatatacgacctagtctctaccaggtttcgcagaccacttcgatgggagtacatcggaaagattcccaatcgaagcgggagttttcttaatcagaaaccaaggatggtgccagttctcatccttgttcgggaggtgcgagatgacgtttctattggcatttggatacgctgagaagtacccagttttctttgatgaactccttacgcttaggagttcattcagctcggggactccaatgacgtagccggcctccgccgcaacggttataatcccgaggatggttcggaggagattgggggttaattgaggtaaagcgatctcgagagccgccaagaatcgaactagggcttcaggaagggggaaggtcaatccgcagcctttgaagtaaatttcgtagacgcaaaaatagccggcacggtggttctcaggagattccgtagggtcagctatttgcgcctccgctataattccaggaggaatttgacaaagccccttcaatcgctcaagggattgaagagtacaggtggatttgtaatgaggaccggcgatgtcgttaggacgagtgcattcgtcgttactagaacgcctctcgtcgtaagacggagattcaggtctttcagaatcagaagacatcgaataaaaatgaaaaattcaagatccggcgaagagagattttttgtgaagaagaaaagagagagtttttgattaaagtacaaaagaaaaagaagagagtaatggtgaaaagaagttacctcaagctaatgatgaaaccgcctcggaagtcgtgtgggaagtgggaaggtttttcccgttttaatagtaattaaacaatatacggtcataatgatgacagatgtcactcagttaaaaaaggctagtgccgaaattaaaggagtgatgagattttcggcgggaaatcagaaagattctcgagcgcaatctttggctatttgagcatttaaagtcctccgaattggaatagcatttcgaagaacttggggggctaattgttggtgtaggatcccgcaccagaagtacgagaccaaccaaagattgccacgtagtcaagataataggcccataaagaatgaagcccatcggacccaggagtcgaagggacggtcgaagtggttgtcaccactttgaccatccgaagtgattacattgcgacatgagttcgatgaagaaggcatgggtaagatggttcaaggatatttgggccagaaaggcgaggcccgcgaagatcagagtcaattcaaattcaaacgttgagcattaaagtcgaagaatcaaaacggacacatttaagagggaataatcttacttaattattcattttaatgacaattctctataaatataaaggccaatggccatgtaagggggatcttcctctgaagagagaaataatatagcaattttcgtatcaatttacaagtttttacgcattcatttttgtccctcaagaattatctttcccacttaacaaaatacttgagtgtgtgaatccgacatccacacaggtggatacccatgcagtttataacacttgtcagccatatgaccaagtttatgacagttagagcacttaggtttctgataagaaccatgagccagattgacttgagattgattaacaggggaagcttggatctggaatgcagcagtaggattagacaaagcagaactcccaacaagacgttggctctcatcttgatccagcatattataaatctcagtcaaacctggacgtggcttcatattcagaatttgacccctaatgtgagcaaaattatcatttaatcccataaggaattggataatacgactagtctcagcctcctccatcaactccttgacatgctcacaattacacttcttcacagtgagaagtctagtgttagctagctgttcccaaagtgtcttcttcttcgtgtaataagtggataaatctaagtttccttgcttcagagtgtgaatggattgttcaagctgatacttccttggaagattgctcactctgaacctcaagaatagatcattccacatttcaaccgcatcctcatagtacaagatgctatcataaatctccttactcactacatttaacaaccaagctttaaccatgctattgcatctactccatatcttgaacattcgatcattaacatcaggcctaggaagagttccatctacaaagctcaacttattctttgcatctaaactcattcgcatagctatcgaccaattgttataattcgatccatcaagagtgtgagaaacaatgttcagacctggatgatctgatgagtgaaggaagaacggactatgcgcgttgtcgtatgcttcaatcggtgcggaatttgactgataacgatcgcgagtagccgtaatcttgagaggcggagtctcatcgacgtcatcggcaactggaaaagaagatccagctcgagtcttcatcggtgagtactccgatgttggagaattactccgattctgcgttttcttcttctgtttcgccatcggaagtgagatcgaagctcaaatgcgtgattgaaagtgaaatcgaagcttcagaaggtgattctgatccgttcaagctcaaatcaacgcaaatctggaatcgattcagtgattaaacggtggaaaacgaagaaaaacgaagaaatcaatgagaaatcgaagagaaatcagagaagcacgagcaaaaaatgctctgataccataataggaaccatgatcgagagaggaaacatggtgaaaaactcaatttctcattaatgatctgattgttctgttacaacaattatagtcaacagactcaactaaaccagaaataaccaaagagattcaccttaattagatgaataaaccagactatacagagcccttaaccaagcctattatatacaagtatagactatagtatggaaactatatacactctaatagaagccagagagaaggtatcctggagagccaaaggg

SEQ ID NO: 5219 - DNA, 1038 bp, Arabidopsis lyrata
  Intron number 1 from transcript 911866 (locus 911866) deri ved from phytozome v7.0 (chr-ID scaffold_1; pos 8676517 to 8677554 reverse strand)
accctagctgccacctcatcatctttaacgtgttttctttaacgtcttcgattcaactttactcagattagtaaaagtattttctaactggttccacatacaaatgactcctccttactcaatcagcactagctagagccaatagaatcggactaccaaagctgattaagaccaaagaatagttggatttgagttttaaacttgtgtgctactagtaaaccactaattgtatattcctagtatagtaaaataataattctgaatggttccacatagacaagactcaagagtcctccttactcaatcagaaaaaagctatagagcaaaaaaagtaaattgtatcacatagacacggctcctatttggaggagagagtatgatggtgacagaaaacaacaaaagacaattctaaatggttccacatagacatcagtcctccttacttaattagaaatgctgaaactctcggtgtcttccatattacttagtatggcaagtttatactactagaagccactttattcgtggttttacatacatgaatctgtaaaagtaaatagcatcacatagacacgttcctggttgttagtgaatggaggagagagtttgtatgatggtgacacaaaacagcaaaagctatatccaaaaatagataaagaagctctcaagcgcgttggggtacttacgttggaagaagttgacaagtaaaggataaagcatagcacagttgaatcatctctcggctataaaaatagagacggggtcacaactcaaaatcacaacaagcacaacagagcaagagattcaaatagcaaaaaaaacttatatattctttcaaaaacaaaaatggggatcgtagcattccaatggggagagggtgagaacatactgacgctgcttcagaacagagagaactggcaatcaaggcaagtttaaaattcattcgacgtcttaggttataatttgtgcatcagacattgttgatgaacctttttttgtatgggtgattaataggtcaataagagcggcggattggga

SEQ ID NO: 5220 - DNA, 20266 bp, Arabidopsis lyrata
  Intron number 2 from transcript 915183 (locus 915183) deri ved from phytozome v7.0 (chr-ID scaffold_9; pos 1417025 to 1437290)
cacctctcatgtaattctaacaggttatgttctacaccattctcttcttctagctatacttagttttctaattaataaaaagatatttgattttgtgcttctcatagaattcttcaaatactttttttgcatgagcactatacatatgacatttttgttttaccttatactattttcatatactttttctggtctttggtttagattttagtgtcttttaatttttcttagcatgagtccttaaatgatgagactgaaacttttcatacaccgattatcttttcgcatcataactcatatattttatattataaagtacaagtcatttggccagttatgttatgacatgtggcaaatttatcaaaaaactaataaatcataaattagtatatcgataaaataaaagtttactggaataaattttagggaaaattactagattaactcaaattatgagtttaattaatagagtgtcttaaaaaatttaggggttaaatgagttatcttcgtgaccataataccctttctctctttgttagaaataaaaaaaagtcaaaattacccttaaataaactataaaaacgtgggcaaaaaatattaggaaaaaaaaattatttgaaaagtctgtaggaaaagttgtgacagatttaatttccatgacaaacttatttgtcgacgatagattttttgcgacagatttttttttcccacctacttacttgaaataggttacgacagatattttatttgtaacagatttttccttcacgacagacttattttatgatgacaccacagacttttgtaattttgacagatttattgtttcagtggcgtcagacttatatttttttaaataaaaatttgtcataatgtagcagatttgttaatgaaaaaataattactagtttcactcattagtgatagcacatttattttatgttatgacagttattttttaaataacaaaaatctggagtgtgatagcagatttattatttaaaaatataaattgctagaatgatatatactcgcaaccgaaatgttatatattatgacagatttttttttattacaatagatttcagataggttataaaaaaatcttttgtatgatgatagttttattgatgaaaatagaattttaatctccataataagataatgacagacgtattcttaatgcgacagacttatttatatacaatggctcatgtgtgcctgtctcttcgttaatatatgattaagtttttatttatttagatatataaacgaaaaaaaaaatagaaattgaataaataaataaataaataaataaataaatatatatatatatatatatagttttttatttcgttttatatttttttcaattttttatttcgttttatatttttattttcgttatatatatatatatatatatatatatatatatatatatatagggaaattgttaaaagtacctcttttggtgtgccccttttcaaaaatgccccttttagatgtccattttcaaaaatgcccctttttaaatctgaatttttttataaagttttattaggtttataaggtacttatggattgtaactactacttgaagactcgatccaagtatttataaggttttataaggtgtttttaaaggttttacaagttattttaaaggatttttaaggtttttcaaaggttttacaagatattttaaaggtttttaaaggtatttaaaatatatttataatgtatttataaagtatttataagattttagatacatagaaatgtagtttgtgtatgttttaataatattacatacatatttgggtaaatcttatatttttaagagcattttttataaagttttaaaaaaggggtatttttgaaaagtggcattgaaaaagtggcatttttgcaaaagcccctatatatattataattgttttaatttatactttttttttttattttgtatttttttcgttttcttttttttcagtttttttttttcattttgtatttttttctaattttctaatttatttaattattatatgttaattagtttattttaataaaattgaaaataaaatgtgtatttggtcttttaacacaaaaattgtattgttctagtaaacctcaatatttgggtgttaatctagtatttttcccaagatttgggtcaaacgatgtaaatttcagtaaagtttaaaggcagtttacaaaaagttaaactttccacgatcactttacactctttaagaaaatcaaaatcaaaattagagcagaagttattccttcctccataatcccacaatctagacagccatgacaatcgccaaaactatatatacgtttcattgatcctttcttttctttacatggatcatcttttgttgatgttggttttttcaaaccaagttaataattaaatcattgggtgcgagacatgttttggaacatgagtgatgtactaaacactgaattccaaagatttctttgttggagccaacaatctccgacgagtttatatgaggcatatgaccactctctggtatactatatttcttttagtctatttattgctatgtaatattttaattgttttgaaatttctatatttcttacacagcgtgtacgtatgtttttaaattataatatctttttgttttatagatagcaccactcagaaacaagcaaccttgatggatagatgagaaagcaacaaagtagaagacgtgagcaaagaaagcaccagaggtaaaacgttaaattaaagagactgaaaatactgaaaaaattggaatttagtagaagacgaaataatagaacatggagacacattgagtctatgttgaatcaacttcactgtggtaaaacttttgtggctaagaccttgaatattaaccttttttttaatagtctttgaatacatgtagtatttttattttcttacagccttagcctctgtatatatattctctgaaatgatattgaagtctacgcttgattctatcaagtctaggcttgattataaatttttggaagactattaattttgtgttcattcaaatacagttctctcactatatcaaatgacaatactaaatcagcaaataatacatgaaacatggttaatctatgtttacataaatatagatattgtaatataatgttgttttccggtgctggcaccaggtgtaatactagtatgacacaatccaatttcaaaataattaattgtaatacaaataaaaataaaaatatttcattatctaatctatagaaaaaaaatcagttaaaattaaatataaaaataaacaatctcagctatatatcaattatgatcagagatgtttttagtatcaaaatcatgaactcaatagagcattttcaaggcaaatataaaattaatgtcaataaagtaaagaaagagattcaagattcttgatcaagacgtgacgagtaaaataatgatgcaaaagagttgaaggaatacgaattgaaaaaaatatgtttttataagtgtaattcattctcatagttttaaaagaaaaatcaaataattagtaaattcaatagtgttgtaaaccacatggactccataaccgtggcccatgtccatgttctagaaggcctatgtctagcttctaaaagactcgcccaaccgaccaaggccaaagacggtttatgttaattttagtgggcttaatgtttcctagtccaattgggatttgtctcccctattgtgtatatatttaagttgtaacctcattcattaataaataagaatacacgagattgataacacgttatcagcacgacttgctcttaacgatccctaaccctaattcaaaaaatccttcacacaaaacctaagtctgcctcgctcataagcttacgatcggatcaataggtgctcgcgattcctccaagctcccaacgttcgtgatcaagttcgaaaaccgaggtctttagctcccggttcatatccgtataaccccataaggtgaaaggtaaaatccgaaaccctaaaacctaaaaaccaacatcgaacttgaacctaaagaaatcgcaaccctaaaaatcggatattgtttgaatcaaagtgtttgctattgcttgctttgctcgcttgttcttaggagagttattgattcaaaacctaaatcgtattgttgaaagaaacttaaatcgaatcgaaaccctaaaattcgaagttaataaatccgattgattgaggttgcttagattgtttagattgattgtttctatgattggttgcatgcataaattgttagaaataaaaccctcatatcgcatgaaccctagaaacccaaaccctagagaaagctcaatcctaaataaaacagaaaaacctaaataaaaaagaaaaatcctaaatcctattgaaaataggaaattctaaaaaaaccctaaatcctaattaaattaggaaattcctaaaacctattcaagataggaaaaccttaagaaatagaaaaatttctaaatcctaatcaaaaaggaaatcttaaaaatcttaaaccctaagtgaaataggaaaaccctaatcctaagcaaaagaggaaatttaatccaaaaaaaaaaaaggaaaagtcaaatccctaagtaaaatcgattcatggttcggtcttaaataccgcatgacattaaagattacatgatttttacttaaacctctttgcttgtagatgtcgaattacaacttgtattttactgccctaaatctcttaggagataattatttgaaatgggcaatggatactaagattatcctaaagtcaaaaggacttggtgaatgtatcacatatggcaataatgccaagagagaaagatagatacaaggcaattttagccaccatcttattgagagtctcagaatctaggactataagtctgtggatgagtctattgctagttgaacaaaataatgacttactgaagggaaaaagtaaattaagacctcatagattaaccccattacttgatgccaataaggccgtagaggataagaaaaaaattccaaagaatctaaccacgtccagaatgatagaccacacggccgtggccgtggtggatggaaaggacgtggccgttgccactataattcatccggccgtgggaaccactataaccatggttgtgagcccaattttggccgtggtcgaaggcgaggacgctgtggtatttccaaaccacaacactcgaccaaataagtgtgtcatagatatggaatggggaaccattgggctaagatatgtaggacttccaaacatcattgtaacctctatcaagagagtgtgaaaggaagaatcctaaagcccatttggtatatataaagatggtgaaaataattttgaacatgatcaagatgatctaatggagtataaaacttctgattgcctaaaagaatcaagttggtaaatctgatttcgacatcaaaacctttgtgtgttctttgccgttttatgtgttcattaattgttatttccttgaatttattttatattactttatgtttaaaacatgattcttgtccatataagaaatgactaaggacaagaagatacttgtggttgatagtggatcaagccacatgatcttaaaagataagagatattttctaaatctcattttgaaaaatgccaatattagcactatagcgggtatagcaagtcttattgagggctatggccaagcccatgttctattaccaaatggcacacatcttgaactaagcgatgccttgtattcacccatctcaaaaaggagcttattgagttttaaagatataagattgaatggtttccatattgaaacaaaaggtgaagggaacaaagaattcctaaatataattgagatcaccaaaggacataaggaagtcctagagactttacccgcattatccactagtctctactatgctaaaatcgatatgatcgaagctaatatggcaatgaacaaagatttcatcgagaaattcactttatgacatgaccggcttggccatccgggtcatagtatgatgcgtaaactaataactaattcaaaggggcacaccctaagagagaaaagagttatccctaagaatctcacgtgtgaagcatgttcacaagggaaactcattataaggccatcaccggcaaaagttaataaagaaaccttaaactttctggaaaggatacaaggggatatatgtggaccaatacacccaccatgtgggacatttagatatttcatggtcctcattgatgcatcgacaagatggtcgcatgtgtgcttattatcctctagaaaccaagcgtttgctaggttgttggaccagattataagactgagagcccatttttcagattttccgcttaagactatatgtctagataatgccagtgaattcacgtcccaagcgtttaatgactactgtatgtccatggggtaagtgtggaacatcccgtggcacatgtacatacacagaatggattagcggaatccttcattaaatgaattcaattgatagctcgaccattactcatgaggtcggagcttccagtagccgcttggggatacgctgttttacatgcatcagagcttatacgcataaggccatctagtgaacataaatattcaccatcccaattactcacgggtcatgagccagacatatcccatctaaagattttcgggtgtgccgtacatgtaccgattgctccaccacatagaacaaagatgggacctcaaaggaggatgggaatatatgttggatttgattctcccaccattactaagtatctagagccaactacgggtgatctatttaaggctagatatgcggattgtcattttaatgaatccgaatttcctactttaggtggagagacgaacaagctggtcgaagaaatatcatggaatcaaacgtccttaaattggcaagatcctcggactctggcatgtgaatcagaggtccataagataataaatttgcaaaagctagctaatgaattgccggattcctttgttgacccaaagaaagttacaaaatcgtacataccagcttgtaatgcaccaatacgtattgatgtccaaaagggaatcaatgaagttgctaccgagtctaacgcacgtaagaaacgtggtagaccaataggttccaaagataaaaatcctcacaaatcaaagaaaggtgcaataggaaacgaggttaaggaaaccatggccgcggcagaccctaaggaaccgaatagagagatttgggacgccaatcctcatggtcctgaagggatagataataatgagatctcaataaaatatttgcatatcatgtcaatataataatgagataataatgagatctcaatgagataaaactagtaggacacaagtgggtctttgtgagaaagagaaatgagaataatgaaatcgtgagacataaggcacggcttgtagcacaaggattctcacaaagaccggggatagattatgaagaaacatactcccatgtggtggatgcaacgacttttagattcttaataagtctggcaataagagaaaatcttgatttgcggttagtggatgttgtgaccgcttatctatatggtccactggataatgaaatatatatgagattaccagagggtattgagctcaaagataaagataagaaagggtctcgagaccaatattgcataaggctgaacaaatcgctttatggactgaaacaaagtgggcgcatgtggtacaatagattaagtgagtacctagtcaaagaaggctataagaatgatcccatcagtccatgtatcttcataaagaagtttgcaaacaaaggatttgtgataatagcagtatatttggatgatttgaacatccttggaacctctgaggaaatcacccaaacagtcgaatatctaaagaaagaattcgagataaaagacctaggcaagacaaaattttgtttgggattgcaacttgagtacgtgaataatggaatccttgtgcatcaaaaggcatataccgaaaaagtactcaagagattcaatatggaccaggcccacccattgagcagcccaatggtggtgagaagcctcagattggatagtgatctattcggtctaaagaaggacgagaaagaagttctcggtcctgaagtgccatacctcatcagtgccataggagctttaatgtacttggctagccacactagaccagacatttgttttgccgtgaacctcctatcgagagttagctcatgtctgacccaaaggcactggaacggaattaaacatcttttacgttatttacaaggaactgttgatttgggtctattctatactaaccataacaaaaaaggtttagttggttttgctgatgcaggttatcaatcagatccgcataatggtaagtcacaaacaggttatgtgtttacacacggtggaaccgcgattttgtggcgttcaatgaagcaaaccatctcagccacttcatccaatcacgcggagatcttggcaatacatgaggccagccgtgagtgtgtgtggttgaggtcgatgactcaacacatacgatctaattgtggcatggacgatgagaagggaccaacggtcatgtacgaggacaatgcgaccagcatcgctcagctcaaagaaggttacatcaagggagatcggacgaagcacatcctacctaagttcttcttcacacatgatctacaaaaggatggagaagttcaagtggtgcaggtccgatccagtgacaattcagccgacctattcactaaggcattaccaacatcgacattgaggaagctaacgcatcaaattggaatgcggagacttaaggactttcaaggatgaccaaaacagggggagtaatacgtgttgtactctttttccttcaccatggttttgtcccaatgggttttcctggtaaggttttgatagagagcagaagctaaataacggacgagaacacaagatctctaagagaagtcggattcacgaacggatcttgcttagaacgtcaaaacttgacgaagaagcaatagagataaggtcgagatcgattccagggaacgatatcgacggggttttgcaagtcctccttgcagggcttgaacactagctcttagggttgagagtcctcctctctaggctttacacaaagctctcttaaaactagtttattcaataatcaaaagctaatttacaagtgagtctcacggctctttaaataagaaacataaaacgaaaaccctaatctaatataaaacgatgtcgatataatatgggtttaaaacccatgaacctaaggcccatttacattatttaaacaaagtcgctgaattggtgatcaatgatgtgaagatacgctgtatcaggtctctccgggtcagaaagattcgaccccgaatctgaaatctgtaaagaaatcctttggctaccaattcataatactttcgtttaagaatttcatgtagtctctttttacacctcacgggcaacttgttagaaatttcttcataaagatccttcgttaaaacaatcgtggcttccaagcttccctgaacacgtgtgaccaagagatcttcttgttccatggatattctcatcgcctcataggtcttttctttcaacccaattgttgcagacgtcaaatgaaaaggaatagttgtatcctttaaagataagttccatacgtcaccatgacttatcccagaagctccgtgtcgaattaattttgttgaagacgccgatgcttgtcgatattcatcatgaggaagaaaacaatcttttgagaacataatccatgaaaagtcacctggttcaaacaccaagtcacgtctcctaacgtgtaatgctttgtacgttgaggtccaagtcaaacgcaactgagccaaacatgacaatatattcatgaacgctttgtgtgtcatcttcgtatgagcattacatgctgacttcatatccaagctgatcttatgtagtggaatacgaacagctccggcttgtttgaaaacctcaccatgtaactcaactgaggacgaaaatatgatcgtagtgatcaatacgctagaacaaactggaaagagaaacaaaataatcacccaagctggtgtggacgtcacaactacgaagttctggcggagtaaaattagtatctccgatacaccatctataataagccgaacaccgaaagaacccactaaaagaagaatgtgaccatttttacttttagtataatcctcaaacagttcgtcaatgtcgatcttagtgtgattcaacatgtaattctcccacctaaaacatgtagtgattttgtaggataaccccaatgatgtgatacgcatatctccatttctccatagagcagctccacatagaaacaaaatggaagggtaaagcaacgtcagcactggtgtaaataagtgtagaagaaacacacaaattttttgaacccacaacggccacaaaataatatagttctgattgcccactaagacacatgtcatgaaaactggagagggagacaccaaacgcccaaaaactgggaaaaaccaagtagaatattgcgcattgagaaattccaatgagaacccagcgcaagagacgacactactcatgatggcatcccacttgatttctatcatgttcttccttctgtccacaaaaaggttgtcacgaggaaaaatatcaattaattggtggtttttcgaatgcgagaccacctgtattgcaccaaaaattagcacatcgtcgaggaaactcttgacagtatgccgattaaaaagaaccaaatgcaattgccttgtctgactattaatcctttcttggcatgaattgtcacaaaaccagttccaaatcctcctcagaaccattgactcttcacttcgtaaagaattatctctagcatgcgattggagacaagaatgcaaaaatttctcttgactagctgccatggcgttcaccattttgtcaaagctagtgacacactcaacataacaacgtagaatagagcttagttgtcctttttcccccacattgttataaccagaaaatgacttctctaacatacactctcgtgacaagagcatcataaatatgttattttcaaaaaatagattcaccatattcctcttgattgtatccaaggctccaatggtaaagaaaaaatcaacatggtttatgatatttacgtcttcgccggagacgtcgcgttgaggacaagatggagtttgccgtatgttttcttgttcaaaaccccaatccaaaaactctgttgttgacttgcacatgttgatttcatcttctttatgatttctctcgtaactcacctggaaatcttctcttatcaatccccaatgaccaaaagatacaagaatttttgatttctcaagcactttaacttcaattaacactctgtcttctccgtgagaatcatcatcacaaagattaatattctcagtataaatataagaaactagagaatcaccgatcttgttgtggagatctacctcagtgtgaacaaacaaaatcttgcttcgaccatgatctggaggtcccctattagttgtccgatgacgatttgtaagagaatagagtaatcgtgctttcccttattcatgtatgaatcttcgtccttctcgcaaaagttgaagacttgagtttgttagtgcggatgaggtaagataaattgcggaaagtaaacgagacaagaaatttgttaacgaggttcggtttttcctactcctcgggaccaagtccagatttcgatttcactagaacaagaaagcaaattacaaccaattcgcaaacgcgtaaaccaagcccaaccctcttgatttaccgctcccttctataacgtgaaaccttaaggataatctctacccttaactaaactttccttgagtctagatttaatcaggataacctaaccctaagctaaactcctcttgagcctagacttcaaaacaaaccacttgatcacacaagcacaaacccgcaaaactaagttgcacacaatctcaccgaaagctctcaaagatttcttctttacgcctcagctctcttgcctctccaagacgtcctcagctcctccttatattgccaaaataatttcctaatcaccataggagaagatttccaatttctataagaaaaagtaaattttcttttatacttttcctttttctcatcaaactccactttcatcaagtcttccaaatctctttaagtcctttttcctttgtgattcatcctccaaacacgctctaagcatatcttctcaaaccttctagaaaccgacactcacacaaaaacagtcgcatcttgacttacttcttcaatcattcaacaactccatcagacaaaatcttgtattacttcttgactcattcaacaacttcattagactgcagctacatcttcattctccccctttttgactatgtttgtgaactcaacagttctaactgcaaaacaacatcacaaaacatatcatcattctccccctgaatgagtcacaacatggtcaaaactacttggaaaattctccccgctttgcaatacgaggttgatagcctagtacaccacctccatagaaatcatctttcctaacccaaatcttcctgcgccttaagccttcatgactggattctcgaatgaatctgaaacaattcctcttaatgtgcccttgaactccacaatgataacatgtaggaccatgaaatctcacatcataagcattctccattcgatttctctccctcaacaatctgaaacaccttggcctaatatgtccaacaacaccacaatgatggcaaacaggtcgaaaaacttgtcgaggtgcactccgcagttccttaacttttgctgaatcagactctgtatcagttctcgtatcagatacagcctttgcattaattgcagtccctactgcagaatctgtgtcagtgcctgaagcagacgtgattttaccaccataaacgtacaccggatccgatttggaaagacttcctttaaatccaaggccacacttatctgtcttgcctatattcagaatatgatccaacttctttgtgccattactaagcatccttaaattcttttgagtttcttcaagtagtactttagcttgtgatgcttcttcttctttctctaccgcatatttttgtgcttaaatgactttagcctctaacttgagtttctccttagttaacattgaattctctttaactattttaagccaatgctcatataaggctttgtaattctcatgaaactcttcatcactgatactttcatcgtcatcactttgatcattgacacttccaattgcagatcctgttgcagatgctgatgcagaccctgatgcagatgctgatgtagaccttgatccagactttgctgcagaactagactcaaaagttgtaaacgccacaaaattcttcaattcttcaccatcatctgagtcaatttcagaatcactcatgataaatctcttcttcttttgcttcagcaaattcgcacatcctaaacgcacatgtccaaaacctttgcactcaaaacattgtttgccctttgacgaattgtccaactcttctctttttccattagccctaaaaccatgaagagatctgtttccctcattccatgagaaccgcttcttgaatggcaaactcaatatctccatcaatcttgatatcaaactctgttttacttcctgaacgatctcctgaacgatttcctcacccttgatctacccgaaacaagactaaatctctatcgagaacccgctctaataccaattgttagtgcggatgaggtaagataaattgcggaagtaaacgagataagaaatttgttaacgaggttcggtttttcctactccccgggaccaagtccagatttcgatttcactagaataagaaagcaaattacaaccaattcgcaaacgtgtaaaccaaacccaaccctcttgatttaccgctcccttctataacgtgaaaccttaaggataatctctacccttgtagttttaatgtcttctaccgagtagtcaaattttggtacaacaaagctggtgtttttatcttgaagctgatcatcatgctcgtcacgatctgcaacatcaccttcatcgtccatgtcgttggtgttgattagatcatcgtcacaatctgtgacgttcatgatgcgaagtcacctctgacatcaaattttgaatcgccatagaagaggggttgtgaagtagataatttatcaccataaatatcatcgactgccacctcaacaaattggtttacgaactcaccctcgtcaattccatggacggacttagcgacgaagtcgttgacttgtacatgacaatctcaatctgcaaatctcgcaccatgttttaatttgtggaagtgactatatagagtacgatcataattacgaggtaaataggttgtgcatagcttctgcttcaatttatcccatgatttaataggactcttgccagtttgcttgcgtgttgtcttcacttgatgccaccatgatgctgcttgtccttgaaatttcttaaccactagcgaaaccaattgatcctctgtaacgctttgaaactccaaaatttcttcaacatccacgagccaatctaagaacaaatcactagaaattccaccgtggaacttgggaatatccaccttaaaattggcctcccatgttgtgtttttaggagccatcgttgcaagggaatcaaaccaccaggaacgagatgaatctgataccaactaatagagagcagaagctaaataatggacgagaacacaagatctctaagagaagtcggattcacgaacggatcttgcttagaacgtcaaaacttgacgaagaagcaatagagatagggtcgagatcggtttcagggaacgatatcgacggggttttgcaagtcctccttgcagggcttgaacacaagctcttagggttgagagtcctcctctctaggctttacacaaagctctcttaaaactagtttattcaataatcaaaagctaatttacaagtgagtctcacggctctttaaataagaaacataaaacgaaaaccctaatctaatataaaacgatatcgatataatatgggtttaaaacccatgaacctaaggcccatttacatgatttaaacaaagtcgctgaattggtgatcaatgatttgaagatatgctgcatcaggttttaatgaggcatcagagaaagaacagtctactcttcctctagggcaggtgaatgagggagacgaagatgccacagagaagggtatcgatcttataaatggaaagaaaggagactctgaggaaaaggaaaaggaagagggttggataacaccaaaatctggtcgtagtccagggaaaaaaacagaggaactgaaatatggagaagtctctatcctatcaaacccatactcagtgctggaagtagatgatgaaatggaaggtgaaaaacaggtagaggagacgatcatggttaacgaagtcactaaggtgggagatgtgactatggtgaacactctagacctggctacaaaagaagataagacagtggacctagcaggaaaatcagaaacattggttaaggatcgagcttcaagagcggagctgaccctgcgaccatccttacctcgaggatcaaaaacagcccacaaaacgataccaaatctttctactcaatcagttagggacccccctagagatcagagcaggaaggttacccacaaaaaaaattaaatgtcaagtttcttttggaatgtgcgcggcctaaatcgatcaacaaaacattccgttataaagaagtgggtagaggaaggaaaatttcagtatggttgtttattggaaacaagagtaaaggaagggaaggttccaagggtgggagagaacatattcaaagattggtcgttgttgacgaactatgagcatcatcgtttaggccgtatatgggttgtatggagaggaaatgttatgttaacccctttctacaaaagcagtcaaatgattatgtgttctgtcaaactagaagaacaagaggaggaatttttttgctcatttatctatgcatcgaattttatggaagagaggaaggagctatgggctgatttagaaaaccatcatgactcaccgatagttcatactagaccgtggatcattatgggagattttaatgaaactttggagatggtggagcattcacgggcataaccaatactatcaaaagggatgcgcgatttcagagcaatggtgaaccattgtcagctcacggatttgacctaccatggtccacttttcacatggtgtaacaggtgagaaaacgatctgatcatgaagaaactggatagggttttagtgaatgacaaatggatgcaatctttctcacagtcctatagcatttttgaagctggtggctgctcggaccacctacggtgcagaatcagactgaatactgatactactacaggaatctctagacgaccattcaagtttgttaatgctatagctgagatggatgagtttaaaccgttggttaaaaactattgggaggaaacagatatgatcttcttatctacatcatctctgtatcgtttttctaagaaacttaaattgctgaaatcggcaatcagaagattatccaaagaaaagatgggcaacttaacaaagaggactaaagaggcgttggaggatttatgtaagaagcaggagaaaaatttacatagtccatctactcaaacaatggaagaggagaaagaagcatattttaaatgggataaagtggccattctagaggaaaaattcctaaaacagagatcgaagctgcattggctggatgtaggagacaaaaataataagacgtttcacagagcagcagctacaagagaggcattgaattcaataagagaggtcattacacaggatgggagagttatcaatagcagagagggaataaaaacagaggcggaatctttttttaaagattttttacaaaccattccagcaggttatgaggggatgtcagtggaaaatctagaagaactacttctgtttcgttgttcagaagatgatagccggctgctcacaagggctgtaacaggggaagagataaagaaagttctgttctctatgccaaatgataaatcaccgggaccggatgggtacacaacggaattttataaggcagcatgggaaactattggaggcgagttcacgatagcgattcagtctttctttgccaaaggttttttaccaaaagggatcaatacaaccattttagctctcattccaaagaagagggatgcaaaagagatgagagactataggcctatttcatgttgcaacgtcctatataaagtaatatcgaagataatcgcaaataggctgaagaggatattacctaaatttatatcggggaaccaatcggcgtttgtgaaagacagactcctcattaaaaatattcttttggcaacagaactggttaaagattaccacaagagcaacgtcacaactcgttgtgcaatgaagataaatattttgaaagctttcgactctctccaatggtcatttctcatcaacgtcttaactgctatgaacttcccatgtgaattcattctctggatttcaaaatgcataactacagcgtctttcacgatccaggttaatggagagttagcatggttttttagaagcgcaagagggcttcgacagggatgcgcgctttctccatacttgtttgtcattagtatggaggtgctctcgaagatgcttgataaggctgctggtgcacaacagtttggttttcatccgagatgtaaaaatcttggcttaacgcacctctgtttcgctgatgatcttatgattctcacagacggcaaagttcgctcggttgatggtatagttgagattatgaatcagtttgcaagacgatcagggttgacaatcaacatggaaaaaacgactctctacactgcaggtgtttcagaccaaaaccgacaaatgatggtcagtcgctacccgtttggattgggccaactccaagttaggtatcttggtctcccactagtcacaaaacggctcacaacaagtgacctctctccattacttgaccagattcgtaagcgtataggtacgtggaccgccttatttctctcctttgcgggacgactaaatctaattagctctgttctatggagcacgacaagtttctggatgagtgcttttcgactactaagtgcatgcctcaaagaaataaacaacatctgctctgcgtttctatggttaaggcctgacttaaattcgaaaaaagcaaaggtatcgtgggatgaagtttgtaaaccgaagcaggagggaggacttgggctgcggtctttgaaagaagcgaatgaggtcagtcttttaaaactgatatggaggattgcctccaatggtgattctctgtgggttaaatggtcaagaatgaatctgctcaagcaagagtcgttctggtctctgaagcttaactcaagtttgggttcttggatgtggaagaaattgctgaaatatagagataaagaaaagccattctgtaaggtagaagcaaagaatggagctcggacgtcgttctggtttgataactggtcgggaatgggcactttgatggaaaaaacgggtcagagagggatgatagacttgggtataaggcggacaatcacagttgcagaggcttggagccaaagaagaagaagaaaccatcgtgtagaaatgttgaatgacattgaggtggtattacttcagaaatatcaaagccggaatctagaacaagaagatacagtcttatggcgaggtaaaggagatgtctttaaggcaagctttagcactaaagacacctggaatcatatccgcacaaactcaaatcaggtggcatggtataaaggagtatggttcagtcattcaacacctaaaaattcgttttgcgcttggcttgctatgcgtaatcgcctctcaactggtgatagaatgcagaagtggaacaatggctcagcagtgaagtgcacattctgctccgtacctatagagactcgggatcatctttttttctcgtgtagctatggctctgaagtttggactgcaattgctaagaacgtttttcaaactcgtttctcaacagattggacaacaatagtggactgcatatcagagaatcaaactgatcacatcaagagcttcttgactaaatacgtctttcagctcacgttgtacacgatatggaaagaaagaaatgctcgacgccatggagaggctcgacgtacgacgtccaatctcatctgttggatagacaagcaggtccgtaatcagctctcagtcattcgctcaaccggagaccgccggtacgagaaaggtttacaagtctggtttgcttcccggcaataggaaacctcctcaaccataattcagattaatagcttactcttgatctttgttttcatttttcagacttaatcaacaaaagctgatgtaaaacgttattttttcttttgaatataatttaacattttattcaaaaaaaaaatagataattgttgattatgaatagacaaaagggaagcgttaggcctgggcaaaatacccggaaccgaatacccgaaccgaaaaacccgaacaatacccgaaccgaacccgaacccgatttttaaaaatacccgaatgggtcctaaccgcctacccgaaaaaaacccgaaccgaatccaatacccgaatgtacccgaatacaaatatacacctcaaaatattagttatttttatatttataatacccgaaatacctaaaattacaatcataaatccgaatatattaggtattttagatatttttggttatatttaggtaaagagtaaccaatgtattttcgagaaatcaggtatttttcggttagatttgggtatatatgagttaaaaacccaaacccgaaaatattccgggtatttttggttattttcgggtattttacttttttattaaaatacccgaaccgacccgaacccgaaccgaacccgaaccgaatttttagaatacccgaatgggtcttgaccccctacccgaatagacccgatacccgaaaaaaaagaaccgaacccgaacgggtacccgaatgcccaagcctaggaagcgtcctttaagtaggggtttttttttttttttaataattaactagggttttgacttggccgtgatacagaagaaacaaaa

SEQ ID NO: 5221 - DNA, 618 bp, Arabidopsis lyrata
  Intron number 1 from transcript 912350 (locus 912350) deri ved from phytozome v7.0 (chr-ID scaffold_1; pos 11083372 t o 11083989)
gcggtagaggtaaggctttctctgagagtcgaagaaacatgttgtttttcatggaaaaattggttctcattgcttcctcttgtgtgcgatgtgatgaatctctgttctctgttgctttttacctcttgattcttcaatttagcgtcgttgatgaatctgtagctccgttttgtttatctcttctccgatatctcttagcttagttttgttagcttagttttggcttctctaatcgtgatctcgtagcttcgtcttgtttccgatttgaaaaattggttctcgtagcttcgattttgatgaatctgtagctccgttttgtttatctcttctccgttatctcttagcttagttttgttagcttagttttggcttctctaatcgtgatctcgtagcttcgtcttgtttccgatttgaaaaattggttctcgtagcttcgattttgatgaatctgtagctccgttttgttatctcttagcttatttttgttagcttagttttgttagcctagttttggcttctctaatcgtgatctgaagagtggatcgaaatttttcaggattgtgattttgtttcatttttgcaggctctctttaaaaagattttcagctgctgctttgg

SEQ ID NO: 5222 - DNA, 2039 bp, Arabidopsis lyrata
  Intron number 1 from transcript 926061 (locus 926061) deri ved from phytozome v7.0 (chr-ID scaffold_2; pos 12791336 t o 12793374 reverse strand)
ggcctccacctccagtgactcagcctcaccataatgtaagttatctcttttggtgttttgaccttactaatcatgttatggtctgttagttagatatatttctatgtaagagcatctccattgtctcaggagagtttcttaaaactgaaatattaatgattaattttttaaaaatattggaccacatgaaatataacatgtaagctgaagagtctctcattagcaccatactagtattgtttctcaaacagagatgttgctttttctctttcattatttttctttattttctaatattttaatctttagatataactttagagaccactaatggaggtagcctaaaggtatttaaaaaaaaaattaagtcctgaaaattggtgctaaaattttgccaaataaaacaattgattctgatttgtattatacacatcaaaaaacaaaattatataaacagattaaagaggtggtgataaaagggagttggttttttgtgccctaagttctaacactctttcgtagagagaaggggattatggatttatgagccaagtccggaactcctatcgttttaagaaaataatattatataaaatcaagggctatattaattgatatgcatggaggattgcaaaattaaaaatctatccatacttatttttttattagttcactttcctctgatttaattaataccaaaactaccttttgttagaattaaatgctaacaaaaataataacaagataaataatttagtgttaacagtaaaaataacattgttcatttgttatcggaaacactatctatcatcggaatcaataaggaaacaatgatttttgtagttatctatttgattaacaatgtaaatcaaattgtatcgcgataaataaaaactaaaacactgttcggccaacatcaaaaatactattcatcacgagataaaataaaaagataatgattttgctgattatttatttgattaacaatataaatcagattgtatcgctataacttttcaagttatatgataaatttatatttatcatgttaaattatttattatctgattgatatcaattaacttatatattgacatgtttatttatttcaacaatttatttattaccgttaacttatgcattagcatcgttaacttatgcattagcatatttatttatcgttataacttgtttatcacggttaacttatgtgttatcgtggacgtaaaaaacaataaaatttcattcttctcgggtatcctcctctgtcgtcattcttccaaatttttttcttctttcattgtcacctgcaactccaacccatgttcacctgcaaatttcctttatcttcgtcctctccatcttcactttaaattacaaaactataattttcatcccaaaattcttcaaattaaaagtttaatccatctaaactcatgtaagttctctctatttttatgaatcgtttggtgataattgtgtgttacatataaaaacaatgaattttattaaccaaatggagaattggatataaaatctgtttgaaaaaaatggaagtgacgatgaagaaagaagatgatttggaaagagaaggatttggaagagagacaaataatcaagtgtttagaaaaagggtaaaatggtaaaaacattattctctctcttgctcacttaattaataaaaaagcatgcatacagacttaattctttggtcttctgagcatagatactgatatttgcctaaaatcaaaagtaatgtgtaataaaccgttagtgagacttttcctagagtataggcaaaggaaaccatagcttagagcatcaggccacttgggttttgaagctaaattttaggaaaaaggttgtgctttttgttctataataacaataaacttaaattaaaaaaaaataacaataaactatagtacaaaagaagcaccaattttatagaaccttttgagacgttctttgccaattgtcatcctatcagtttaatatgtatgttttcaattttcttaatgatcattttgcaggggaag

SEQ ID NO: 5223 - DNA, 25067 bp, Arabidopsis lyrata
  Intron number 2 from transcript 937643 (locus 937643) deri ved from phytozome v7.0 (chr-ID scaffold_5; pos 13988079 t o 14013145 reverse strand)
atcaatcattcagttcttcaaatcgaaaaagaaaggttagtatcgacttacatttgtacttccaaaagagtttagaagatgaactatgtcaaaattagggggtgtcaaaataagccgtcagctcagctcgctttcttatgagcgagaactcgattttttaaagctcgtttaagaaatgagttatatgattgaatttaatgtagattaattgcgggatatatgagcgaggtaaatataatgtagattaccttataactttataaggtaaatataagtaatatagaaataatccttttttagaagaaaaaatagaaattatcctaattaaaaattgtttaaattttcttatataaggtcattatctctctcacaaatcaaatcacaagtcaaaaacttcattgatctcaaactagggattcgactctctcactttgcatctatcctaattttcatctcaaagtaactgagtaagttatatatgtctcaaattatttgttttttgttttttgttatctaagttatgacttttgaattacatttcccataaaagatgacaatttttttttttcaaacaacaagatttaattgggtgcaccgaaaaataaaatgtagtagttgatttgttatcgagaatataacccaagtttggttaactaggtgattgcccgcgcgcatgcgcgggaagaatgctgtataaatggtaaaatcatgtgaaataagggattgtttaggtgttacttggtagtgtaagaaaaatatggtaaattgtttaggatttagtgtgataaaattatggaaaatgatgaaatttaaaaaattcaataatattataaatgctaaaaaataataataaatcatcttttaaaatcattcaccaacaaaataagaaatcaacgaacatcatcactccatggcattctccttccgtgtgatgatcggtacttggtcattttcaggattcctgacatccgattaagaacaccataaacagtgaatgtccagtcgccaactttagagttttgattgtaaacggaaaaaaaaaatacttaccaacaaagcatctcgtcggtaatactgagatccggattcaacataatcctcgtacttccggtaacattggtacatctccacctatgttcctgtgatagctctaatttcacaaacttgataatacatatcactgtgttacgtgaacgatgcttccataagtcatagaactcgactgcaaggtcacccgttaaacgacactctagatggatacacctaattttaagatttgaagaagtcataagacattatattctggtttaaatctttaaaagaatagtgacttactcagtatcacgtaaaccaaagcacagctcaaaatatcctccttgagaatgttccacggaaggaacaaaaaccaactctctcacgttgagaattttgccaataacatctatgaaacacacacatgaataatacagtcagaacatgaatcgcaaataaactccaaaagcacaaataaattcataaattaggcttactaacgcaaatattcgggttaacaataccactcaatatactcacaaactcagttagattgaaataggttctactggagcacatattaatactttgcactaaagtgtccgaacgaaacacaatcttgaatctatgcggtactggtctcaagatgctgttaacccgggatacatcaaaaaatttaatgctcacccactcatcgattatcaatcttgaaaaataattatcaattaattcatcacgaacaacggcttaaatttgggtgaactgcaaatgaaatgttaaagaaaaaaacaattcaatttaatatcgaaaacatgtatagaaggtaagttattaaaatactaacatgctcgtcacccaaaatcatattgagctctctacccgagtcacgcgaaatagaccaacaattcaaatcttcaccaaaacagaccactcacccatgttagggttaagagacgcaatatgaaaataaccaccatcacatgaatcagaggtaaaaggtatcattgtagaacccatatcaaaagattactcggctaaacaatccaatgaggtataaacgcgcgatacgtatatgtagacctaacgattatttggaaagaacataacaatggaaaatatatattaaaaactaaatcagaaaattaacaaaaacgaatattgattaaacgatatagaatttatccataagattaataaattaagtttagaaaaaaaaaaactaaatctcaacagttaaactgaaatatatactaacgaaatttaaggataaaaatatatcactctattatcaacaccatagtaataatatatatacaaatggtgtaagttatcgtgcataaacggtaaaatcatgagagataaaagaatattataaatggtaagaaaataagatgccaatcataaaaaaaaaaacaaaaaacaaaaatttcaaggcaataagaaaacaacgaacgtcatcattttatagcattctctttgcatgtgacgataggtacttcgtcgttttcaggattcctgacacccggtttataacatcagaatcagttaacgttccgtcgaaaattttagagttttgattgtggacgacaaaaaaaataaaaaagtaattaccaacaaagcatctcattggtaatactgagatccggattcaacataattatcaaaaactcatcaatcaacaaatgatttctacatttatcaaaagctctttcattagactccagaaaatcgttattttactcatgtttttttgttatctttgttatagccaaactcatcttcagtaaatgatttatacgcttatcaagaattctttcatcagacttcagattaccatcaactttgctccttttgttttttttttctaattatagttatagccaaaatcataaatcagaaagtgattattatgtttaataacaattctttcatatggctccaaaaaaccgtcaattttgctcatttttttgttatcatggttatagccaaacacataaatcaacaaataatttctacatttatcaagaactctttcagtaggttatagaaaagtatctattttgttcttttttattgttacaattgttatagccagaagaaaaccgtcaattttttttttttgttatcatggctattgccacaaactcatcaattagcaaatgatttctctgcgaatcaataactttaacatcaggctgcaaaaaatcttcgattttgatcatttttcgttataaaagtcatactaaaactttttaatcagcaaattatttttacgtttaccaaaagctctttcattagactgcagaaaaccgtcaatttttttttttttttgttatcatggtaatagccaaactcatcatctgcaaaagatttatacgtttatcaaaagctttttcatgaacctgcagaaaactatcacttttgctcattttttttttatcattgttgtaaccaaacccatcaatcaacaaatgatatctaggtttatcaagatgtcattcatcggactacagaaagttgtcgatttgtctctcttgttttttattatggttatagccaaaagcatcaatgaacaaatcatttttatatttaccaagagctctttcattacgttacaaaaaacatcaatttcgctccttttttttgttatcatgattatagccaaagtcatcaatcagcaaattatttttacatttattgaaaactctttcatcaggacgtaaaaaatcgttatttttctcctgttttttggttatcattgttatagccaaactcatcaatcggcaaataatttctacatttatcaatagctctttcatcaggccgtagaaaactgtctattttgctctcttttattgttatcattgttataaccaaactcatcaatcagcaaataatttatacgtttaccaaaacctcttacattagacagtagaaaaccgtcaattttgctcatattttttttatggctatagcaaaaccatcaaccagcaaatttctaagttaatcaatagctctttcgttaggctgcagaaaactttcatgcttttttttttaatcatggatatagccaaaatcatcatcaataaatgatttctacgtttatcaagagttttttcatgagctcgcataaaactgtcaattttgctcattttttttgttatcatttttatagccaaactcatcaatcaacatatgatttgtacattaatcaagatatcattaatcggacttcagaaggccggttaattttatctctcttgcttgtaatcatgattatagctaaactcattaatgagcaaataatttttacgtttatcaagacctcttacattacgttacaaaaaaccgtcactttgttcctttttttttttttttatcatggttagccaaactcatcaatcagcaaaaaatttctacatttattaagatctctttgatcggattgcagaaaccatcaattatgcccatttttccgttataatggttataacaaagctctttaatctgcaaacgatttctacgtttaccaagagctctttcattagactacagaaaactgtctatttttttttttgttatcatggtaatagccaaactcatcatctgcaaaagatttatacatttatcaaaagctttttcatgaacctggagaaaactgtcacttttgctcatttttttctttatcattgttgtaaccaaactcatcaatcaacaaatgatatctacgtttatcaagatctcttccatcgactatagaaagtcgtcaattttgtctctcttgtttttttttattatggttatagccaaactcatcaatgaacaaataattattacgtttaccaagagctctttcattacgttgaaaaaaacgtctattttgctatcttttttttgttatcatggttatagcaaaagtcatcaatcagcaaattatttctacatttatttaaagctatttcatcaggacataaaaaatcgttatttttctcctgtttttttgattatcaatgttatagctaaactcatcaatcgacaaacaatttctacgtttatcaagagctttttcatgaagcttaagaaaaccgtcaattttgctcatcttgttatttttaatcatgattatagccaaacacatatatcggaaaataatttttatgcttatcaacatttcttcatgaggctgaaagaaaccgtcaattttgttctcttatttagttatcatggttatagtcagactcatcaatcggcaaatgatttctaaatttatcaataactctttcataaggctgtagataactgtctattttgctctcttttattgtaatcattgttataaccaaactcatcaatcagcaaataatttatacgtttaccaaaacctcttacattagacagtagaaaaccgtcaattttgctccaatttttttttatggctatagccaaaccatcaaccagcaaacttctaagttaatcaatagctcttttgttaggctgcagaaaacttttgagtttgctaatttaccgttataatggttattgtaaaactcttcaatcagccaataatttttaggtttatcgagagctctttcatcagactgtcaaatatcgtcaaccttgctcttttttttttgttaaaatggttatagctaaactcttcaatcatcaaatgatttttacgattatcaaagatctctttcatcagactgcgaaaagccgttaattttgctttttttttaatcatggatatagccaaaatcatcatcaataaatgacttctacgtttatcaagagttttttcatgagctcgcataaaactgtcaattttgctcattttttttgttatcatttttatagccaaactcatcaatcaacatatgatttgtacgttaatcaagatatcattaatcggacttcagaaggcctgttaattttatctctcttgtttgtaatcatggttatagctaaactcattaatgagcaaataatttttacgtttatcaagacctctttcattacgttacaaaaaaccatcactttgttcctttttttttattatcatggttagccaaactcatcaatcagcaaaaaatttctacatttattaagatctctttgatcggattgaagaaaccatcaattatgcccatttttccgttataatggttataacaaagctctttaatctgcaaacgatttctacgtttaccaagagctctttcattagactacagaaaactgtctatttttttttgttatcatggtaatagccaaactcatcatctgcaaaagatttatacatttatcaaaagctttttcatgaacctggagaaaactgtcacttttgctcatttttttctttatcattgttgtaaccaaactcatcaatcaacaaatgatatctacgtttatcaagatctcttccatcgactatagaaagtcgtcaattttgtctctcttgttttttttttattatggttatagccaaactcatcaatgaacaaataattattacgtttaccaagagctctttcattacgttgaaaaaacgtctattttgctaacttttttttgttatcatggttatagcaaaagtcatctatcagcaaattatttctacatttattgaaagctctttcatcaggacataaaaaatcgttatttttctcatgtttttttggttatcaatgttatagctaaactcatcaatcaacaaacaatttctacgtttatcaagagctttttcatgaagcttaagaaaaccgtcaattttgctcatcttgttatttttaatcatgattatagccaaacacatatatcgaaaaataatttttatgcttatcaacatttcttcatgaggctgaaagaaaccgtcaattttgttctcttatttagttatcattgttatagtcagactcatcaatcggcaaatgatttctatatttatcaataactctttcataaagctgtagaaaactgtctattttgctctcttttattgttatcattgttataaccaaactcatcaatcagcaaataatttatacgtttacccaaacctcttacattagacagtagaaaaccgtcaattttgctccaattttttttgatggctatagccaaaccatcaaccagaaaacttttaagttaatcaatagcttttttgttaggctgcagaaaacttttgagtttgctaatttaccgttataatggttattgtaaaactcttcaatcagccaataatttttacgtttatcgagagctctttcatcagactgtcaaatatcgtcaactttgctctttttttgttaaaatggttatagctaaactcttcaatcatcaaatgatttttacgattatcaaagatctctttcatcagactgcgaaaagccgttaattttgcttttttttaatcatggatatagccaaaatcatcatcaataaatgatttctacgtttatcaagagtttttcatgagctcgcataaaactgtcaattttgctcattttttttgttatcattatatagccaaactcataaatcaacatatgatttgtacgttaatcaagatatcattaatcggacttcagaaggccggttaattttatctctcttgtttgtaatcatggttatagctaaactcattaatgagcaaataatttttacgtttatcaagacctctttcattacgttacaaaaaaccgtcactttgttccttttttttttattatcatggttagccaaactcatcaatcagcaaaaaaaatttatatttattaagatctctttgatcggattgcagaaaccatcaattatgcccatttttccgttataatggttataacaaagctctttaatctgcaaacgatttctacgtttatcaagagctctttcattagactacagaaaactgtctattttttttttttgttatcatggtaatagccaaattcatcatctgcaaaagatttatacatttatcaaaagctttttcatgaacctcgagaaaactgtcacttttgctcatttttttcattattattgttgtaaccaaattcatcaatcaacaaatgatatctacgtttatcaagatctctttcatcgactacagaaagtcgtcaattttgtctctcttgtttttttttattatggttatagccaaactcatcaatgaacaaataattattacgtttaccaagagctcattcattacgttgcaaaaaacgtcaatttcgctatttttttgttatcattgttatagtcaaactcatcaattagcaaattatttctacatttatcgaaagctctttcatcaggacgcagaaattcgttattttctcctgtttaattgcttatcattgttatagccaaactcatcaatcaacacacgatttctacgtttatcaagagctttttcatgaagttgaaaaaaacagtcaactttgctcatcttgttctttttaatcatgattatagccaaacacataaatcagaaaataatttctacttttatcaacatttcttcatgaggctgaaataaaccgtcaattatattcttttattttgttatcattgttatagtcaaactaatcaatcgacaaatgatttctacatttatcaatatctatttcatcaggctgcagaaaactgtctattttgctcacttttattgttatcattgtaaccaaactcatcaatcagcaaatgatttatacgtttaccaaaacctcttatattagacagtagaaaatcgtcaactttgctcctattttttttttttgtatggctacagcgaaactcatcaatcagtaaatttctaagttaatcaagagctctttcgttaggctgcagaaaaccttctattttgttcatttaccgttataatggttattgcaaaactcttcaatcagtcaatgatttttacatttatcgagatctctttcatcagactgctaaaaatcgtcaactttgctcttttgctgttagaatggttatagctaaactcttctttcggtaaatgatttttatgtttatcaaagatctctttcatcaaactgcggaaagctgtcagttttgcttttttttttttttgttatcatggatatagccaaactcatcatcaacaaatgatttctacgtttagcaagagctttttcatgagcctgcaaaaaactgtcaattttgctcatttttttttatcattgttatccttttttttttttttttttttttgtcaaactgttatcattgttatccaaacttatcaatcagcatatgatttctatgttacgttaatcaagatatcattaatcggattgcataaagacgtaaattttatctctcttgtttgtaatcattgttatagccaaattcattaatgagcaaataatttttacgtttatcaagacctctttcattacgttgcaaaaaacagtcacttttgctccttttttattatcatggttatagccaaactcatcattcaacaaattatttctacgtgtattaagatctttttcaccggattgcagaaaccatcaattatgcccctttttccgttataatggttatagcaaaactctttaatctgcaaacgatttctacgtttatcaagagctctttcattagactgcagaaaaccgtcaatttttttttttgttatcatattaatagccaaacttatcatctgcaaaagatttatacatttatcataaactttttcaggaacctgcagaaaattgtcacttttgctcatttttttctttatcattgttgtagccaaattcagcaatcaacaaatgatatctacgtttatcaagatctctttcatcgactaaagaaaatcgtcaatgttgtctctcttgttttatttttaatggttacagccaaactcattaatgaacagataatttttacgtttaccaagagctttttcattacgttgaaaaaatgtcaatttcgctctcttttttttgttaccatggttataaccaaactcatcaatcagcaaaatatttctacacttatcgaaagctctttcatcatgacgcagaaattcgttatttttctcctgttttttcgttaacattgttatagtcaaactcatcaatcaacaaacgatttctacgtttatcaagagctttttcatgaagttgaagaaaaccgtcaactttgctcatcttattctttataatcatgattatagccaaacacatatatcagaaaataatttctacgtttatcaatatttcttcatgagactgaaagaaaccgtcaattttgtttattttattttgttattattattatagaaaaactcatcaatcagcaaacactttctgcatttatcaatagctctttcatcagactgcagaaaactgtcgattttgctctcttttattgttatcattgttataaccaaactcgttatcattgttataaccaaactcatcaatcaacaaatgatttctacgtttctcaaaacctctttctttaggcagcagaaaactgtctattttgctcttttttttatcaatgttatagccaaactcatcaatcagtaaatgttttatacgtttatcaagagctatttcattagacagcagaaaactgtcaattttactcttctttttttgttatcatgtctattgccaaactcatcaatcatcaaatgatttctatgttaatcaagagctctttcattaggctgcagaaaatcttcaatttggagagataagagaatgttataaatggtaaaaataagatgataatcattaaaaaaatacaaaaaaaaatttccaagacaataagaaaacaacgaacgtcatcattcctccatagcattctctttgcgtgtgacgataggtacttcgtcgttttcaggattcgtgacacccggtttataacatcataatcagttaacgttccgtcaaaaattttagagtttcgattatagacgacaaaaaaaaaaagtaactaccaacaaagcatctcgtcggtaatactgagatctatattcaacataattatcaaaaactatacatttatcaaaaactctttcatcaggctgcagaaaatcgctattttactcattttttgttatctttgttatagccaaactcatcttcagtaaatgatttatacgcttgcttatcaagagctctttcatcagacttcagaaaacagtcaactttgctcctcttgtttttttttctaattatggttatagccaaaatcataaatcagaaagtgattattatgtttattaacaattttttcatgaggctgcaaaaaatcgtcaattttgctcattcttttgttatcaagttatagccaaactcataattcagcaaatgatttctacgtttaccaagagctcttttattaggctatagaaaactgtcaattttgctctcttttaagggtatcattgttatagccaaactcatcaatcagcaaaggttttctacttttattaagagctctttcattagacagcagaaaaccctcaaaattctttttttttgttatcatggctattgccaaactcatcaattagcaaataatttctctgcgaatcaagagccctttcatcaggctgcaaaaaatcttcacttttgctcatttttcgttataatgatcatgctaaaacttttcaatcagcaaattatttttacgtttatcaagtgctctttcattagactggagaaaaccgtcagtttttttttttgttttgttatcatggtaatagctaaactcatcatctacaaaagatttatacgtttatcaaaagctttttcttgaacctgtaataaactgtcactttagcttattttttctttatcatttttgtagccaaactcatcaatcaacaaatgatatctatgtttatcaagatctctttcatcggactacagaaagtcgccaattttgtctctcttgtttttttttattatggttatagcaaaactcatcaatgaacaaatcatttttacgtttaccaagagctctttcattacgtagcaaaaacgtacatttcgctccttttttttgttatcatggttataggcaaactcatcaatcagcaaattatttctgcatgaggatgtagaaaatcgttatttttctcctgtttgttggttatcattgttatagccaaactcatcaatcaacaaacgatttctacgtttatcaagagctttttcatgaagttgaagaaaaccatcaactttgctcatcatgttctttttaatcaatgattatagccaaacacatatatcaaaaaataatttctacatttatcaacatttcttcatgaggctgaaagaatccgtcaattttgttcttttattttgttatcattgttatagtcaaactcatcaatatcggcaaataatttctacatttatcaatagctctttcttcatcctggagaaaactgtctattttgctctattttattgttatcattgttataaccaaactcttcaatcagcaaatgatttatacgtttactaaaacctcttacattagacagtagaaaaccgtcaattttgctcctatttttttttatggctatagccaaactcatcaatcaacaaatttctaagttaatcaagagctctttcgttaggctgcagaaaaccttcaatttgctcatttaccattataatggttattgcaaaactcttcaatcagccaatgatttttacgattatcgagagctctttcatcagactgccaaaaatcgtcaactttgctcttttttgttagaatgggtatagttaaactctccaatcggcaaatgatttctacgttaatcaaagacctctttcatcagactgcgaaaagacgttaattttgctttttctttttttttttgttatcttggatatacccaaactaatcatcaacaaatggtttctacgtttatcaagagatttttcatgagccttcagaaaactgtcacttttgctcattttttccgttatcattgttatagccaaactcaacaatcaacatatgatttctacgttaatcaagatatcattaatcagactgcagattgccatcaattttatctctcttgtttgtaatcatggttatagccaacctcatcatgagcaaataatttttacgtttatcaagagctctttcattacactgtagaaaaccgtcacttttgctcatttttctttgttatcatggttatagccaaactcatcaatcatcaaatgatttctacgtttatcaatttctctttcatcgaactgcagaaagcgtcaattttgcccctttttttgttataatggttatagcaaaactctgtaatcggcaaacgatttctacgtttatcaagagctctttcatcagactgtagaaaatcatcaatttggctctcttttttccatcgtggttataaccaaactcatcattagcaaatgatttctatgtttatcaagaactttttcatgagcctgcagaaaaccgtcaattttgcttctttttcgttatcattgttatagccaaactcatcaatcagcaaatgatttatacgtttatcaagatctctttcatcagacagtagaaagccgtcaattttggctctcttgttttgttatcatggttataggcaaacttatcaatgaacaaataatttttacgtttatcaagaactctttcatcaccttgcaaaaaaaggtcaattttgctcctttttttgttatcatggttatagccaaactcatcaatcagcaaactatttctacatttatcaaaagctctttcattaggctgcagaaaatcgctattttgctcatgttttgtgttatcattgttacagccaaacttatgttcaacaaataatttctacgcttatcaagaactctttcatcagactcccgaaaactatcaactttgcttctcttgttttgttatcatgttgatcaggttttataaaattattttgtcattcagtgagaaattaataataaaattatgtaacttctgtagggtgaaggttttttttataaagtaactaaactatattgtagttatcaaataattttactattaattttaaaataaaatatacattatggaccaaccattataaataactattatatatcagaatttaattgatcagttttgaatcactaatgatcttgactcattttctattccgtataccaataatattcactcattttctattctgtataccaataatattcttaattcttcttcttcatcttcattggtctcaagatcgtcctccacgttcaaatatgaagtaagtattcaacatcagcggtatttcccttgtttgtacaagtaaaaccactaacggactaagaaattgaggttaacatataaacaaaggcatgcatgactacaaactaaacgaaaaaaatttagataaaaccaatgcatgatcaccgtagcattggtgaagcgacctcagggtaacaacaacaataaatgagtgcatgtatcagattcaaacattcgcgttcccttaatgctatctcctctctttcttttaccggtatgtaagagtcttccatctgttccttctcattcctctatagatacaatcataacttttgtgttctctatcacctgcaaaagaaagatttcaagatactaaaggatgtagaacatgttcttttcatcctcatctccagctacgtgctcaagtaacgttgttaacatttcatatcatcaccatcttcttctttctcttccgattagggttttcgatgccattttgacctttcctataacatacatgctctccactgcgaccaatgtcgtatctccttctattgcaacaacgtattgctttactatataattcaccatggctgattccggttgatgataacacaaagacagagcaaaaatcatatcagaaacatgactctcaattaaaccgaaaaatcctaacaaatcaatacttatatatatatatatatataaaaagtttgggtttagtacttgttttaaattttaattaaaaataatattgcttacaaaacaaatatctacaaacactaaatcaagcacacacacaaacaatctaatcgtgtacttacaattgtttttttttataagtttgtagatggagtgatgaagaatatcgtgatcataggaaacatgaatcatattgaactaattcacttctccaaaagcagcttgatcacactccacaatataagaaaaaaaaagaaacttacaaaataaactcacgttatgtagaactcatattccaaaataattcaaaacaaagctaaaaagtgatctaaattaaattacatacatgcggcatgagcagtgttaataatacgaatcaactcttagttctggcaacatctcttactaataaaaggtgttcattgaggcctctcaatatatccacatcagcacaatcaaaagcattttagaggaagccacgtaagcggagattttgcaagatgccacatcactcttaaaaaccacttacaattatccacatctcattgacacatagtatataataggtcactcaagagactcccctcgcccaaacttcagcttttggaattccccctaagccacccaatcaaaattcatcgcacttattacttctcaaatgttgatgaatttggcgtggtcatcaacatcattggatcactctagagaagttcactctacgaaagtgtaattaatagtagatacaaattcgtggaagagaccagcatcatcctccgaaatcatgaatccgccaacatttaccttgctcagttcctcgattgctcgcacgcagcaccctggaagcgaattgccgaagccgactacccaagataacccttagattagaaaaactgaagcgtaaaaacctcagttcacgctttagaggtatttttgctctactaacataaagatccatccctctatgtatattttgtttctatacgtgtgattagatgatgtgtgtatgtgtaggacaaaacttcaacgcactgtgatgaacaaaaataaaatactttcacttggatttgatagtattatatatggctttcatcgtaagttttggaatcaatttcaatgaaaattaaaatgtgtaatgaaataatgttcctttaaaaaacatttagcatgtggttttcctcaaaaagtttcaatggtttttttataaataataagaatgacccatttacatacactttcatattactgagatttaaattttttcttacatgcttgcagtttatttcaatatgaccatatatcaagtttgtcaaggctttaaaattcatgaggtcaaaattttgtcttccctactccgctcttgtcgttatgtcgaagcgaatgtgttggatacgttcagttcaagctttgagataattaggtcaaatttgttcaaacaaactaaaataattaggttgaaagtaattgaaaatttggctgctaaaattccgaaagtgattttaaatttaagccgctgataaaatgggaaagaaaagttttagcttttacatataaagtgaaaaataaactaatcaaaacatttaaagggaatttgaatattgacttcttaacacgatcaaagtcaatgatgtagtatcacacaagaaccatcgttctttacttgctaatccattgcttggttatttaaaaataatgatatttttgttatttttcttcaagatttcataacattagaaaccaagttatcaaattacacatattcaaatccttaacaacataactaaagaagataaatttgaaaagcttttggaatttctccaaaattaaaactactattagaaaaggtacatttcatactattatgaagagatcattttcctttaagattattagagactatatagaagagaaaaaaaatatatataagtaataataagaaacaaaaaataaatttcaatttgtaaatataaattagaatgaatagattaatagtatcatataggttatatttattaaaatgctaaatacaatatcatatgactttttaatgtataactaaaattgaatttaaacttaagttaattaatctaaaaatgtcaattattaacgcccggattttcctctagtgatcactaaatttaataaaactgaaacaatttaaaagcaaagagaaagttatatgaacaatttttaaaaatatctaattaaatactactatagagagcaaatctttaattaatcatataagtgtctatatgtatataataaacacataattttaaaatagtatgtgggatgaaaatcacatgtcaatatatttaagaataaaagaactttgtgtctttttttattttcatccttttctgaaactacccttacagattttaattttttaattttaattcaaaacaaaaatatatttcaaattataaaatacatggtggaaaaattataatcataatataattatttaaatattagtaccttgacggattatatccttgattcataagacattatcttcaatatttacgaattttaactttcttaattaaacaatttcgagataaaaatattcacatcattatttaaaaattttaaagtctttatcaaatttgtacaattttatccttattttctcgcaaaataaaatcgaagtcaaaatttatagagattgaccaaatcgaagtcacctttgttctttttagaccgcctttatcgatgaatccaatgtcgatacctaacctaaatccatcctcgccgtaaggaaaaagcaaaggatactgtagagggaggtaggatgggtgcagctcacttatacgctgaaaccctccagaattagcctgaagcactacatcacgcggtttaggatttatatctcccacgataagcccagcaacctcgtcagtcgtaggtatattttggactctaccgtcactatctcgatgatttttcaaaatcaacttaaagccgctggtatcttcacattgtgctaatctatctctagctgatctaaacgcgatgacgtgtgggttgttagcatctaacatatccttcaaagtcttaacgatactcttctttatttgcttacccggtcctttctcgctaaaacaattaaaaacaacaaaaaacggaaattaattcgtggacataatataaaaaatatattacaataaacaactcaccccataacacccatcctattcgagacttcgtttacggtatcatgaatatagagctgcgagaaagcaggacttttggaagggccaggcaaaagttcaccgatgcgatgataattttgaccctgcatgcgaaacacatacggtgcattcccatggttcacggaattatcaatttgaccaccaagcgacgtgaatgagaacatcatattgtatgctctaattaaagcacggaaatttttgcttctctcatccttgccatacaacatcgacataagcaccggtggaggattttttagtttaggcagctccactttacccttcatgcaacacgtagaaaatataggcctatttttagctccacgtttgttaatatgctcgccaaaccacatataagcaccgcaattttgacaggtataaaacggatctccatcatcaaaataacctgacacaagaagcactcatgtacacaataatatcaattatattttttaaaaaattataaaaaaaacaaccatagtaagtaccgttttctgttaatccaggtttcacatttatgatcggtatggatccaaacccttcctgttccataatacactcatcggcgttatcgagatgttcaacaaaatcataatccattgcattatcgtcgtctgtttggtcctccctatcaccatgatcagaatccgaatcggttgcgaggaaatgcacgtaatcatcttcgtaaatcggcaacaccaacccttatatataacatttttttatttgttaatcacacgtacaatttcgagaataaaaacttaatataaaaggctatcgtaccggtttctggtggtcttgtcctcgcttttatccgtcttgatttaagtattgctacacggcgcgctctcgcacgacaacaaacatccttaggaggtcgtgaattcaataacgcacgtaattcatcagatatcatgttttcatatgccgcgataacacgtgttcgattaatcgactccatgcctagaaattatgaatatatattaatcacaacggaaaatataatatgtcactacaacttaattacgcgtgtgtgggcgtttttattaatcaaattaataaatcatgtgagataagggattgtttaggtgctagtgtaagaaaatatggtgaattgtttaggttttagtgtaataaaatatggtaaatgttgaaattaaaaaattcaataaaattataaatgctaagaaaataataataaatcatcttctaaacaaaattgcaagaaaataagaaatcaacgaacatcatcactccatggcattctccttgcgtgtgatgataggtacttggtcgttttcaggattcctgacatccaatttagaacaccataaacagtaaatgttcagtcgccaactttagagttttgattgtaaacggggaaaaaacaaaaaatacttaccaacaaagcatttcgtcggtaatactgagattcggattcaacataatcctcgtacatcctgaaacgttggtacatctccacctacgttcctgtgatagctctaatttcacaaacctgataatacatatcactgtgttacgtgaacgacgcttccataagtcatagaactcgactgcaaggtcacctgtcaaactatactctagatggatacacctaattttaagatttgaagaagtcgtaagactttatattctggtttaaatctttaaaaaatagtgacttactcagtatcacgtaaaccaaagtacaactcaaaatatcctccgtgagaatgttccacggaaggaacaaaaaccaactctctcacgttgacaactttgccaacaacatctatgaaacacacacatgaataatacagtcagaacatgaatcgtaaataaactccaaaagcacaaataaatacataaattaggcttaccaacgcaaatattcgggttaacaataccactcaatatactcacaaactcagttagattgaaataggttctactggagcacatattaatactttgcactaatgtgtccaaacgaaacacaatcttgaatctatgcggtactggtctcaagatgctgttaacccgtgatacatcaaaatttttaatgctcacccactcatcgactatcaatcttgaaaaataattatcaattaattcatcacgaacaacggcttgaatttgggtgaactgcaaattaaatgttaaagaaaaaatcaattcaatttaatatcgaaaacatgtatagaaggtaagttattaaaaaactaacatgcttgtcacccaaaatcatattgagctctctatccgagccacgcgaaacagaccaacaattcaaaatcttcaccgaaacagaccactcacccatgttagggttaagagacgcaatatcaaaataaccagcatcacatgaatcagaggtaaaaggtatcattgtagaacccataccaaaagattacttggctaaacaatccaatgagaaataaatgcgcgatacgtatatgtagacctaacgattatttggaaagaaaggcaagcatactatgaatagttttacccaagaaggccatgattgtgccagattgagacattaggacaattgcgagcaaaatgaccaggtcgcttgctgcacgtattactttggctgcaagagagaattaaatgtagcaacaaagaagcaaattagtttagcctaatccacaattaaagaactccttagtatatatgaaatacccttttgatgagaatttatcaaatttgagactttaagaagagaaatgagaaaactaaaacttagaagtgaatctcctcgataaggatcattacggtaagcaaaacgatcactacgaatcttcctgcccactggattcctgctccctctctctatactcagtactgtttctttcttagtatcatgaagtacattaaaattctgctgctcaacatttccgaaaatagacatcccattagaacttcccatagtcatcaactggtaaactcctccttcaataccttatatgcagtctcctcgagctaaatgatgatcgtgcttgagtcaataatcattcattcggttccatcttcgtcgtttctagccatggatatattcggtagtgatgttggtgggcggaattgaaggaagaaccattgaaaccacatgtcgagattgatgcatctttcaattcaccaatcaaaactaaaacaatcaaaccctaaagtctcctctcacgattgtaagaaaaaattaaggtgattgaattgtttaagagcccaatttctatttaacaatttcatcaagatagacatacctctgcaatctcgacatcgatttcgttttttagagaactctatttttcccgagcttcaaaagatattcaatgtgttttagaaaccaaattaatgttagggtttctaacagccaaaaaggaaggcatataaataatttttaataaaatacaaatatatataattagattagagactaccttcttgtagtcatctaaccaaaaaaaaactcataaaataagagatattaatatacaagaaactacatgtttatattggatcgatgtaaacctagcaataatatatcaaatatctcatataaataagtacaccacaaaattatctatacgaagcccaatccaaaattatctgtttctttgctaatgtctttgccgtgagtaaatgattggttttctgaatctcaagtctctgtctaaagactggtaatgtttaatctgtgggttatttttgtctaaagactgaaacaacacatcgaacatgatccatgtctagagatttccaagccgtgggtaccaagaaggatcaatgttcgaatcactctcagtctaaagacaacgtttaaagtcatgggtaccattatccttcaaccaaacatgacccaatccgatcttttgtcttaaggattggttttttcgaatctcaagtctctatctaaagacatatgatgttttaagccgtgggtaccattttccttccaccaaaacataagccaatccgatcttttgtcttaaggattggttttttcgaatctcaagtctctatctaaagacatatgatgttttaagccgtgggtaccattttccttccaccaaaacataagccaatccaatcttttctcttaaggattgttttttttccgaatctcaagtctttgtctaaagacttatggtgtttaaagccgtgggtaactgtttctttgtctaaaaactgaaaaaccaaaccgaacatgatcaatgtctagagattttcaagtcgtggggactaatgttttgagccgtggataccattttccttctaccaaacataagccaatctcagtctctggtctaaagactggtgatgtttaagccgtgggtactgtttcgttgtctaaagactgaaagaacaaaacgaacatgatccatgtctagagattttcaagccgtgggtaccatgaaggatcaatgttcgaatcagcctcagtctaaagactaatgttagaagccgtgggtaccattttccttccaccaaacataacccaatccaatcttttgtctaaagaattggtttttccgaatctcggtctctgtctaaagaccgatgatgttttaagcaatgggtaacttgatctttgaccagtaaactgaaaccaatcccaagtacatatgtcgaaataataagccgtggataaaggatcggttttcagtctcaagtcaaaatttcccataagccatgggtccaaactcgacgggacaatgtgccaaagaaagattctaacaaaacactaataattgagtgtctgcctatgatctctcttgggttcgaaagaaaaacaaaataagaaagaaatcaaacaaaacagaaaaacacaagcaataaaccacaactgatcgcaacaatttcatgcttatcaaattatgcaaagcactacaaaaacaaaaaaaaaaaatacgaatcaaacccccttaaacaaaatcaattaaaaccaaaaaaaaaaaaagaagaaagaacttgtaattcacaggaaaaaaaactttgaaacacgaattgttcggttgtgcaaatatcaaagccgcatagaataacttactctgtttcacgtgcatcttagttgaaatttagatattgcaaaagatttatcaaaataatatcgaacaaaaacaatagattagaattgattaaatagcgtaccttaaccatcgcatgggaggtcacaaactgacacggagttggtgtcaccagtgacgatacatcgtcgatggattgctaagagtcaaggaaacctaattgaaagagaggaagttaatcgatataaaacaaaaaaaattagggtttctttatgtttgtccgccgagaagagtttaatatatgccgatttttaaacaattgattgtcccatctacgaagcacctcatcaaacacgttattactttgaatccaaaataaaataaaatataaaaacataaaaagcagagatcaaaacatgagcatgactactaattatacttggaaaaaaaaacttatctcctcattcattgaatttcggtatttctatcacccatacgtggtggatttcttctcacacacatcacgaactcccatgattcaggatcaaaactcccatgcccagtaaacctaaaacaaattacaaaataattaatcacgaaatcattagcaagcgtgagatatagtacaaaaactaaaaacctagggtaacgaatgtgaatgctaatgttatgaccaagactctatatttatagttgaaaatctagggtttaccatcataattatctacaaaattttacttttaaaaaatagaaatattctcgaaacaaatattcgcaatataatatacaaattcattaaagctaaatttaacttttttaattagaaactaaatcaaaaaactaacaaaaacgaatattaactactaagatatagaattatccaaaaaattaacaaataaatttaagctaagattccataatccttaaagtcgagacattatgacattcgtatccccaacgattacactatattaaaaaaaaaattaagggtaattaagactaatcatctcaaaacacgattagacttatacacccctaacaattaagaacaaaaaatttcgaaatcgagggtgtttaggacattagtatagagatcaacacacgattagacttatatacccctaattacgaagaagaagaaatttcgagaagaacaattcattaagggtgtttaggacaaatcattccaacttttaaccacaggcctccaatgccctaactttcaatatggtgcgtttctacttctcaaataattattgtagagatgtcgattacattttactttctcgttattaatcaatgaaatgaaatagtttgtggaaaatcttgtgtataattcatgaagattggtattttatacaagtagagaatcgtaactagataaagatattagataaagactagggtagattacttcattatctaaatctaattataggagttatctcaataataaacgtgttgaagatgaaagaattaaaagagacttagatttacgaagctacataactttttccttggaaattaagaacacagtacaagatttgtcttttggttagccaataaaattatagtcttttggtttttcccgtacaaaagaagagtgtcacatcaatttgtcttttggttagccaataaaattatagtcttttggtttttcccgtacaaaagaagagtgtcacatcatcgttatacttaattcccaagttttaccttccccacgaaggttccttcttctctttaaattcctcactctctgtctgtcgtttcacattttgcagagagaaaccaaaaccaaaccagtaagagaaacaat

SEQ ID NO: 5224 - DNA, 671 bp, Arabidopsis lyrata
  Intron number 1 from transcript 326030 (locus 326030) deri ved from phytozome v7.0 (chr-ID scaffold_6; pos 6449699 to 6450369 reverse strand)
cttttatcgctgcttctcagagaaggtaaacaaaagcttttacaagttcatttatctcaccacacatatttttggaaaaacactcaaaatccaacttttgcccaatctttcatcttctgaatgaaaacccttgtcgtataatatccaattttggatgaaaccgtgttaatttgtttgttgttatgtgataatgatgatgattgtagtagctgcttagaattgcaatgtgatttctgagccaagagggtttgatttgtatatttttttcatcctcaatttgctgaaaatctgaaaatgacaagactttaagagtttctttgtgatttgtagtttgaaaggatagattttggtctcactctccaatggaatcacttttcttctaagttctcactatgtgaaagtaatggtttcctgaaattctgtatttgattcttgaaatattcaggtattgaatcattcttgatcttgattatggattctgtaaatcttagctttgtaatgagagagactggtataggcatagtctcagaatgttcattgcggctgctgatatcttcaagaaatgttcttgggtgttgtatgtcgattgttgaatgacattagacttgttcttgaatctataacttagcagcatcgtatgtttctaacacaacttttgcagatctcttgga

SEQ ID NO: 5225 - DNA, 11536 bp, Arabidopsis lyrata
  Intron number 2 from transcript 477824 (locus 477824) deri ved from phytozome v7.0 (chr-ID scaffold_3; pos 1998884 to 2010419 reverse strand)
acctatttcggcttttccgagtttgctcggagtgttcgaggcgggctcgagacatcgtgaggtgcgacgcgcggtgatcggcttatcctgtattggcctgacaactttttgggagtgcgggttcgtccccggcttacgctacccaatttatcgaggctttgcgagtacggagctcggctttcagacccttaagtgtaggttttttccaagacttttttacttgttttggcagacttaagtaagggtgtgcgttctcgttcgaacgtgttcgatcgaattgcctggccagggtatcgatgtatagttcggttcggttgtatttcaacattagatggaaatacaaaattttgttaatataatagctgcgccctgcaagcagggctgcctacgtaccccctgatcggagggatcaagccgttcgtagttcacattacatagagaggcatcggtaaggccgagctaccttttttttttttttttttttttttttttatatataaaaagagagcgaggtcgtcagtagtagtatcgcttgaggtgcatggagttccaagctcgtgggacctcagtgccgctcatggtgaggagttcgtagtcgccggggcgaactatttttgagacttggtacggcccttcccagtttgctcctagtttgccggcgttgagttcagctgtattttcgaagaccttcctgagtacaaggtcgccgacgtcgaagtggcggttgtgtactttcttgttgtagtatcgggcggcggcgagctggtagttctgaattcggcatagtgcggtgttgcgcatttcctcaagttcgtcgagtttgtcaagcatcatctggtcgttgaggtcgggacggactgtcatcatagaacggcgcagactcgagtatccgacctcggctggggccattgcttccatgccgtaggctagcgcgaatggtgtttgcgtggtggcgctgcggggcgtagttcggtacgcccaaagtactccgtctagctcgtctgcccaagctccctttttgtcgtcgaggcgttttttgaggctggcaagaatagttttgttggtcgcttcggcttgcccgttgccttgcgggtatctcggtgtggacttgtttagacgaattttccagttcgcacagaaattctcaaatgtcagtgagataaattgcgagccattatcggtgatgatttcgtatggaaggccgtgtcggcatattatatatttccaaacgaagttctggacatccttggctcgtattgccgcgtacgattcggcttccacccatttagtaaagtaatctgtcatgaccaggatgaaccgtttttgcctggaggctggtagcgggccgacgatgtccatagcccacctcatgaatggatatggtgccgcaccgaccttgagtagctcggttggtcgatgaatcgagggcgcgtgtctctgacattggtcgcacttagccgcgaagtccttacagtccgatatcatagtcggccaatagaaaccttgctttttgatttgtagtgcgagagctcgtccgccggagtggttgccgccggcccccatgtgtgtttccttcattatttctgtgatatcttcgccgtgtaggcagttcagccatgctccggttgcgctgagctttaggaggcgattttccaaggtagtgtattttgcggctttgatgcgtaatcgacgtgctgcccacctatccgttgggaccgttccatcggtgaggaaatcgcgtatttcgacccgccagtctgttgagtcggctgcgtccggatcgtgattgattccgacgaagttgacagtatcgattgcttcgatgcttggtcgatctacgctttccaccgggataatacgtcgaagatcggggtccgacgtagaagctaatgcggcgagagcgtcagccggcgcgttatctcctcgcgggattttggttagttcgaagtgtgtaaactgcgaggatagtttcttgacgaccctgaggtatgcctccatagtgtcgtttttggcttcgtattcgccgtcaaattgatttgcgacgagctgtgagtcaacgtatgcttggactcgtttgatcttcattcctagggcgagacgtagaccggcaatgagtgcttcgtattcggagacattatttgttgccgtgaaacgcagacgaaacgattgctcaattatttccccggttggtgagaccagtcgtatgccgacgccagagccatgcgatgacgaggacccgtcggcgtacagcgtccagacgccgttctgagggtcgccaggctcggggtccccgcttaggttttttggaatgagcggtagttcaataaggatgtcggctaaaacttgcgacttcattgctggtcgggtcctgaagtccatatcgtattcgctgagctcgattgcccatttagccattctcccagactggctcggactgtgtagggcggttcgtagtggttggtcggtgagaacggcgattgtgtgggattgaaagtagggacgtaatttcctcgcagatgttacgaccgctagcgcagctttttccattgtgggatagcgtgtctcggcttcgataagggatttgctgacataaaagatcggcttctggtcgcctcggtcatttttaacaagcacaccgctcacggccgagctggataccgcgatgtagagaaataacgtttcgccgttttctggcttagcgagaaccgggggcgtcgtgaggtactgtttgagttcgttgaaagcattttcgctcgcttcatcccatgcaaacttgtcctttctttttaagaggttatagaagggtaagcacttgtccgtcgatctggcgatgaagcggttgagtgcggcgatccgtcctgttaatcgctgcacctcgcgtgcattttttggagaaggcagatcgaggattgcgcgaatttgctttgggttggcttcgatccccctttgtgtgaccatgtaccctaggaactcgccggatgttacgccgaacgtgcatttcgcggggtttaacttcatattgtattcgttcagtacgtcgaagcattggctaaggtgtcggacatggtcggctgctactagagattttaccagcatgtcgtctatgtaaacttcgatggttcgtccgagatgatcggcgaacatcttatttaccaaacgttggtacgtcgcgccggcgtttttgaggccgaatggcatcaccttgtagcaataggttcctcggtctgtgatgaacgaggtcttttccctatcatccctgtgcatgaggatttgattgtatcccgagaatgcatccatgaaggacagaagttcgttcccggcggtcgcttcgactatcctgtcgatgtgggggagcgggtagctgtcttttgggcacgccttattgaggtcggtaaagtctacacaaacgcgccatttgccgttcttcttcttcaccacgaccgggttcgctagccattccggatattttacctcggttatcgagccagccttcaatagcttatcaacttcgtcatttacggccctggctcgctccggtcccaactttcgccttttctgctttaccggtttataggttgagtcgacgttaagctcgtgcgtaacgatcatagggtcgatgcctatcatgtcgtctacgctccaggcgaacgtcttagaattcttttttaggaacgcgatgagtggctctttaaccgatggtactatctcggccccaattgcgatgcatcttgtcttatccgtctcgtcaatattcacttgttctgttctgctcagttgaggctcttcgagggacttttttagggtcgggacggtcgacgatgttggcatcgttaattgctataacttcttagcgacgcggttcttgtgttcgatgagaaaacatgttcttgcgatctgttgattccctctcaaggtgaacactccgttgtgcgtcgggaacttgatgcactggtggtacgtggatgggatcgcctgcatttgatgcatccagggtgttcccaaaatgacgttgtaaactgcgggcttgtcaactacgacgaacttgacccacgagatcgttcctccgacgaatacgggcagcttgatcgtcccgattgtcattacgaagtcaccatcgaatccagccaacgggcgcgatacgggttttatttgtcgatcgctgacattcattatagccaaacgtccttgaagatgaggtcgaccgagcttccagtatcgatgagcactctagttactcggctatcgccgatgatgagttcgacgacgagagggtcgttatgcggtgtatcgacgccctccaggtcggattgggtgaacgatatgggttcgtcgtcgggcgtagttggtggtgcgctcgaggacggccacacttccttcatttcagcttttttgcgatgttgtttaattgaccgaactgaatcgttgcagttttgcagcccgcccattatcattcggacctgtctgacgaccaccggagcttcggctggtgcctttccaatttgattttcttggatccgcggacggagacgcttgtgattcttcgggtgaaagcggtttgctgagtttcctcgagcacacggtcgagttctggagccgaactagtggcacgatgaattttcgagctcatttccaggacagcgcgtcttagttcggcgatctccgtatctcgcggattgatgctgcccatggtttggacgggctgagctacctggggacgtccggggagtgctggagtgtaggccgtgtttgcactccgacccgtttgcaaacggttgatctcgtccatggagaacgcttgagccgcggctagagatgcgaaccgagcatctgttcgtgcgtcctgtcgacctagatggtcgaggatgttctggagcagtcggtttggctcggcgggagttgttgccgcagcgtgccgttctgcatggttttcttcgaggttcgttggacgtcgtctgctgggagaggttggttcgccttcctcctgatgtgccgggggcgtttcgttccttgctgcctctgctggcccctcgggcgtctgaggtagcgacgcgggaatagctaccgaggtatgggcagccttcctagtcggaagtactcctaacgggatcggcgtcaccgtctctcctcccgtggaggatgcgttgtcgtctcggacacccatgctggtaccctggtttcggtcggttgccatcgtgttgtcgcgggctcgttttgttgactggagaaatctctgagctatccccctacctggcgcgccaactgttgatgcacgaatcacacaagtacgaaatagggtttctctagggaagtaaaaagaatctcctaaaacaattcgagccgagagttaaaatagcgttaggcgagccgagattggtgacgtcggattgaggaatccgggtcgttgattaggccgaactgtaggttattttccgagttgaacaaagcttgaggtcgctttccttttccaaactgagatcggttttcgcctcctagccgagctcttcgtgtcctagccgagctcttcgtgtccttgccgtgtcagcgtgattttcgatggatgtgacaggactagtcgtcctgcctttatacctctgcggagtagggcgcaccctgacaggttttaccggttttacccttgcgtctggtgacgtggcagacccgtagggcggcgaggtcgtctgggccttgatacctttgggtttaaggcctgcctcgttgatgggcttcctttggattgggccttatatttctaaagcccaatctctccctcaacaggtgtcacgtgccatgctaaatctggcgaggtgatttcacttagccttagtcacgttcctctcaacaactctgtgaaaccaaatagtggtcttttcaaacttcaacatctttataacctaaccctttgtaattgtagtctctatggagatattccttcttcattaggaaatctttttggtctcacacttcttgacctttcgtataattatttcgttggtcaagttccaccttctataggaaacctttctcatcttacaattcttgacctttgggataataagttagtaggtcaacttccagcttcaataggaaacctaacccaactagaatacatgatcctttcacacaacaaattcaatggcaatattccttttacatttgccaatttaacaaaattgttcgttatcagcctttataataattccttggaaacgcttccacttgacatgagtgggttccaaaacttggactattttaatgctggtgcaaactcattttccgggtctttgcctaaatctttgttcacaattccttcattacgatgggctaatttggagggtaacatgttcaaaggacctatagagtttaggaatatgtctgcatcatctactactaggcttcaatatctattccttgctcaaaacaagtttgatggcccaatccctgaatctctatctcaatatctcaatctcgtagagttagatcttagtttcaacaatctacatgggtctttccctgcgttcttgttcacgattccttcgttacaatgggtcaacttagagggaaaccagctcaagggacctgtagactttggaaatatgtctgcatcttctagtctcaagtttctaaaccttgctcaaaacgaattcaatggctcgatacccgaatctgtatctcagtatcacaacctcgaagagctacatcttagtttcaacaatttcattgggacaatcccaagatctttatcaaagttagccaaacttgaatatttttgtcttgaagacaataatatggtaggcgaagtaccaagttggctatggagattgacgatggtgacactttctaacaattctttcaacagttttgaagaatcatcaggagttcttgatattgaaacacaagtccaatggttggatcttagttcaaattcatttcaaggaccatttcctcgttggatctgcaagcttagatcgttggagatcttaattatgtccaataatcgcttctacggctcaattcctccatgtttaagcaatgccacggtttctctcacagatttacttctacgtaacaacagtttcagtggaactcttcctgatatatttgtcaatgctacaaagttactatcacttgacgttagtcgcaaccatttggatggagtattaccaaaatctttgatccattgcaaagctatgcaacttttgaatgtgagaagcaacaaaatcaaggacaagtttccatcatggttgggatctttgccgtcattacatgtcctcatcctccgatcaaatgagttctatgcgacgttgtatcaacctcatgcatccattgggtttcagagtttacgagtcattgatgtctcacataatgacttgacaggaacgttaccgtcattctatttttctagttggcgtgaaatgagcaaactaacaggagaagatggaaactttagactttctgatgttccatacatgggaaaagttttgaatgctactgctttctttgttgattcaatggaaattgtgaacaaaggagtagagacggagtttaagcggatcaacgaagagaacaaaatcataaattttgctggaaacagattttctggaaatatacctgaatccattggattgttgaaagagttacgtcatctcaacttgtcaagtaatgaattcagtggcaatatcccacaatcattggcgaatttgacaaagcttgaggcgttagacttatctcagaatcagttgtctggtcaaattcctcaaggtcttggtagcctctcatttatgtcgaccatgaacttctcttacaactttcttgaaggtccagtgcctaaaagcacacagtttcaaggtcaaaactgttcttcattcatggaaaaccccaagctcaatggtctcgacgaaatatgtagagaaaatcgtgtaccaaaccctacaccacaagaatcaaaggatttgtcggaaccggaagaacaagtgattaactggatagcggcgggaatagcttatggacctggtgtcttctgtggattggtaattggacatatattcctttcacacaaacacgagtggtggttcatggaaacgtttcgtcggaaaaagcccaaagtagtcaccagaaatgcttgtccttctaagcattaatttgtgacgtatatgttgttgactagcgtgtattgtttgttacaacagctacgtattttctctattaattaatagttttgtaatcaatcttggctcgaaaatgcattaagaaacttcttcctactcatatcttaaaagatgtttgaattctaaaccccttggttatcaagaatttggtgattttagttttatcatttgtctctttcgtctaaaccctcacgcgtctatacgtgttaattttgtatctgagtttccttaatttgggctttaataagatttgtaatcacgtaaaatatgtctttttgggctttatgtactttccacaatatttttaaatgaaagttggccgaaaaaaaaaaaaaaaaagtcttcttcgtgaaactttctaagtcaaacaaaaatttcaaaggaaattctcttgcttcttgcacacgtcactcttggccgtcctttaccatcacaaatttgtttagagcacttccatcggacaatttttggggtgtcttcaaattttagaaaaataataaaaaaagaaaattggcaatttatttgatgaacatgagagatacggtgtcatactgtgtctgtggggagacatttttgctggttttagacaccgtacatggcaagatgttaaaatagtattaattttataataatttatacttaagatatagttaatgagtatcacgaatgtggatgctcttagagcatctccaatagtgagagtccctcatgggctctcaccaattgtttaaacatattttttttgaaatttttagatgagaacttgtgtttttttttaaaaaattttcttagtccaatggtagtttctctagtggattcttagaaatttttttttttgaaaatattttgattttgatgtaatttgatgtttggttttgatgtaatttgatgaattaggaaaaaataattggagtcattggtgtttggtgtaattggtgtttcaatagttcataatcacatcaaaaacttgtcaaatgcaaatgaaagattcatgatctacacatattttgatttgagtgtcttgtctcctacttagcctatacaagacagatttggtgtcttctacatcaaaaacacattcaaaataaagcacgttcaaatttcatagcatagacaatatagagattgaatgaatcaatgaagcagcgcgagagggtttcagcaaaatggaaccttgccagtgatgatgcttgctcaaacacattcaagaaactcaataaaagagttgacaaatatccaaataacaacaacaacatattaaagctgaacatgatgatgcttgctcaaatctcgtatcaccaccactactccaatctagttgttccatcttgaatctcactctttcgatagtgttgaattgaggtcacaaatcaatacacagcagaaacacaagctaggatcaaaagacatggtaaaggatgagacaaagcacaaacactactctattgctttactttctattacataattacattccatgaactaatcatcacagataagagtttttagttcttgtatccaaacattcattgtttttcataaagtttaagttcaatgtatttctctatcgaaccaggcagaatcatcgatgtcactgtcttcttcagcaataacaaacattcaatgtatttctcctaacttcgtctatgagtgattgcctcatttaggcatttcaacaaacacgttatgtgcagcaaccaaaagctcacgtcaatggcaaaatcagctcttggaaaccaaatgagattcatattacaacaatttcagacgcaaactatatactaaacaacacaacagatcccgaaatttccagaaaagagaagaacttctttaaataaccttaagcaatggagacaccagcttcttcaagagtcttcttagcttattcagcttcatctttagtcacaccttctttaaacttcttgggtaatccttcaattagctcactagcttccttcgacgccaagctagtcaaagccctaacagctttaatcacagcaatacgagaactacttggaacttcattgataaccaataaccacatcgaattcggtttgttcctccactacagccgccgcgccaccgtcggccggagcgtccgtggagatgatgatactggtgaaaaaaaccctccgattgcttccgatttgagagatttcgcttccgatttcacaatcgcattgaaagaggcgacgaagaaaagaaacacgggaatagttttttctctttcatacaaaacccttcaaccaaccacaccgcaacacgtcagaggctctcagtttctccatcgccacgtatgcgtctctcttcagctccaaaatctctcctaagagaaacgattctcttgatattaaagctttctgatttttttttttttacaataattcagagagactttcataagagctctatttttctcccattggagatgctcttaggatgctcaagataaaaaatgggaatttggaaaagtgagggggtttaaatgtaattataactaattatgcacattatataactttttaaaatagtacgagggttattttgcaattatcactagttatgcatattatacaactttttaaaatagtacgagggttattttgcaattttcactagttattcacatttatccgtaatcactcggctcaagaagcttctcctcctgtgtgattctccttcaatcgccggcgatgattcctctaactctttcgtcgccgtctctgaatcggctcgttttattcacctcacgttactctcactctccatttctccacagtttcaatttgctccctctgatccaccggaaatttaaaccccaatttggcgtaaggtgtcacgctagtagcagcagctcttcctccttcaccgcaaagtcttccaaagagattcgtaaagctcaaaccaaagtagttgtcgacgagaagcttaccgcgatcaggcggctgttttcggatccgggtgttggaatcgatgcttatatcataccttcacaagatgcacatcaggttctcttttttaaacctcttcttacatgtattagcttgtgattacaaattgaataagaagctttagtagattctaaactcagattacaaattgtgtttttgaattcatgaaattagcaatgagtcaatattggtctaagtgggcaagtttgactatagaaaggagtaggtaggtgatggacaagtctacctatagaaaggataagtctactagagggcttcacaaattgagttttgttttctatttactttcctctctaaagagagacacacagaaggaaaaaaactaaataatgattccaggtccatcgaattgcttttctggtattgttaccttttatttcttcctcttgggttcccttg

SEQ ID NO: 5226 - DNA, 1780 bp, Arabidopsis lyrata
  Intron number 3 from transcript 920210 (locus 920210) deri ved from phytozome v7.0 (chr-ID scaffold_1; pos 5581208 to 5582987)
tccgttattcaacgggtatatttgagaagtatacggtactaaaaccacaaccattgatcttagcttgatcggttcttccctaggatttatacataaaagtaaattgttttgtttaataattttccattgcatgaactttcgagacaacaagtggacaggagtgtaatgtcatcaaaagtcaaatcaaacactgtgaggaacatattagacaacgttggcttctttcgcagctgctcaacgttgtctctcccgatggtcccaacactctcttcttctttttttgtcaacattcaaacgttgtttaaaataaataaaaatgtttaaccttaatcatctttctagatctttaaatgcctaaaattcaccttaatcagtcagcaatccgtcacgttaatgattttgaaaggaagacttttgttttgtttcggttagttttgtttgtttagtattttaatcacaagataactctaatttcccattagagttgtgttaattgtgttgattatgatttggcgttccaattctgatattatttttatgttgtaaatcttaaactgttacgttattgttctatcttcctatgtgagaaaaaagtaaaatgttttaaaattttgacatggataataatataattgtaaatctataataattatattatcattttatttatatttttcaaaaagaaatatatttatcttaatagatttaatatgataatgtcaaatatagttataaatctaaaagagttatgttattatcccatccttttatgagaaaaaagcagatattctcttaaacttttaaattaacgtggataataataaataaatgataattttactaatatgataatgattcggttttaatcttaccaaaaaacaaataatgattctgttttaaaaatatataaattttctttgtttagttgtagatattgtcatataaaaaattcttagatcctccactgccttaattttatgtaaataccttgcttgatatttaattttgatttgatatcataactaatccttgctttttttttcggcactaaccattgaattttttatactgccatttaattcttgcataaaaaataataattaatagtagtgtttattatgaatgcaggtttgttttccataaaaactagattggatttatggaagcacgtcattgtttccagtgcgaggaagcaaatgtcgtatcactgctgttgtggctctttagtactttcgtttctgtttatggctttgcttcggttgtatggttagtcatcaatcattgatcttctcattgtttgaatattgttgcataggaaaaatcttccttttttatgaatctttcaaaagttgggtccatgatattctcagtgattgattatgtttattgaatatttgtgtgcttcctctgctgatattctaattcatgctttattcgtcgtctttgatacactctgattaaccattgtgcacctctagagtctaatttgcaatattaatgcaagtctctttaacttacggattatgaagagcatcctaagatcgtttaatttgattcaggctttatgtggctaatgtttggtcttggatgtgaattagtctatcatgtttcttggaaggtaggaaggaatcttgatgtttaccaaaatccaatgtgctcttttgtagctcagtttgaaatatgtactaattattgtagagggaacccgaaacaaagagaccatatgtatgattttatatgcgaagagaagctccgaatttgaaatcgtctccactccggt

SEQ ID NO: 5227 - DNA, 2515 bp, Arabidopsis lyrata
  Intron number 9 from transcript 477947 (locus 477947) deri ved from phytozome v7.0 (chr-ID scaffold_3; pos 2648182 to 2650696 reverse strand)
attttttttaatataagtttctataaaaaattgtgttgtgtactttaaccaaagaaaaaatatgttatgtaatcgatgatagtactagtttagtggaaaataaattggttaaagtacataacacaatttcattggtcggcttgatttgtaattggtcttcatctttcagtttcctgaaggtggtttttcccctgtgatcatagaatatttctcatatttcaaagatcattaactaatttcgaattagccaagatttatcatatttacaagagtaaaactgtttaatgtacattttaaataaactagagaggagcaaaataaatggcacgaaaaaaaaaagaacaaaaaaggtctcacacagtcgtacaccacctgtttgtgatatatacatattattttattagtcaaagatagcaaataaattcaacattctgggaaatcgtctgatcaatagctattactcctattagtctattttcttacgcaacaactagattttaacccgcagtacaccgcgagatgatttaattttaaagttagtataaaaatattttgtaaattgtatctccttataacatatttatttatattatagtttacaattgttattaagtaacgatatgccacgagtccacgagataattattaataaactgaggatttaacccgtattaaagcggtatataaatattgattcaaattcgtccgccatataaatcatttccgaaatataacccgttccgtaatttcttaacccgtcatgtgatttgtattaaaaaaaataaggattaaatccgtattgaagcggcggattaatgatattttaatctttttattattgttgattcaaaaactcatcccgccaaaaaactcatttattttattaatgttcttattaatgatatgatactgaatcactgtctaaatattttaatcgatgtagaacgttgaacacacattttcgtcaattggataatatatgtctgtttttaaaattttgaatcacagtatatgcagaaaaaaaattgatttttttttactttatgtattatatgatgattcaaaacagttaaaaacaaatcaaacaaagatgataggagaatcataattataaatcttaatcaaatcttctaaaaatctaaattattaaatatggaatatccggtgtatgagttgggttaaatataacccgacccaacaaatttttgtgaaggaatttttaaaatagatcggatatccgatatacccgaaagcttttttacccatccgtcacaaaaaatgctgcgattataatagtatagatgatgataacattttttcagttttaaatatataatgattttaacaaaaatatacataatgataatattgtcctcagagtaatcattttcattggaaatctttttttttcttttcagttttctaacggtcaaataaaaagaaagatattgaaaattaaataaaaagaaagataggttgctagtatatagtactatatagtgtagtttaaacgtttaaataatattttgattggtttaattattcttttattgttaatatttgttggtattatttaaaggttgtttttttttatgaagatatttaaaggttgtttggttgttatatactttatggtcactggctcacttgtatttaagaaaaacgagaagttgttacggaccggtggccggtgcatcttcgttcgtctcacactatactttttctcctagttagctaggtgttgaaggaagtccgtggccgttcctcaattttataatatgcaggcctacaatgatttcaaaatatatagtgcaactttcaaatcgttttctgcagtaatttactggaacaaatatggatatgcattaatgtaatttgcagtaatgtaatttctattcacctcattattcgttttttcttctgtccaaatattagcattcaattcgtggatatgcatatttttgttgtacgtatgagttctctatggatatatgtaaagcttaattttcttcacaaagctttcaagagtaaaaacgtctttttttgctttccacaaatgcccaaaagaagttccttttttcaaagtttcatagcacaaaatgcccatctcaacaataaacccttttagatgactgtgatagatgcaaatctttttttgttttctttttttctttattaggaatttaggatgcaagtctttattagtgagacgctataacttaaggaatatttttgtgactaacgattacctaattcgtattcttacaatctcaagatagctgcatggttaacgttggatatgctatatcttcttcatttttcttcttttttttacatcatttggatatgctttatccaaaatgtataacgttttttccgtaatgccgtcgaatattgtgtatcataggggattttttgtagacgttgacatttcagtagggacctcaagagaatacaggagaaggaaacaaaataaggaatgtttttgattcattgtccattgacgagaaaactt

SEQ ID NO: 5228 - DNA, 1135 bp, Arabidopsis lyrata
  Intron number 2 from transcript 893698 (locus 893698) deri ved from phytozome v7.0 (chr-ID scaffold_6; pos 7373197 to 7374331 reverse strand)
gccaagcttatttcctggtaactaaacttaattcacctttttattattaatatatatacactattaacaaagtgctcatgaatatttttataaatgatttccagaactttttttttgtttttgacaatcagaactatttaaattttgtttgttttgtaatcatccgacgacgatttaaccataattttttaccaaaaaaacataattcatatttgtaaccaaagatatatatatatatatatatatgtatatatagtttctatagattagtatgcaaaagtgtgtagaaatggctatagaaattaacctcaagaacctatctcactctgtaactacttactctgattcaaaatataagatgttttacctaaaagcatatactttaagaaattatattttgtttttaaaaaactatcatttaatatttaagttaagaaaattcaaccaatgatataaaagattgcagaatataaaaagccataaaatatcaaatctatttaaagttgcatagaaatttgtaaaacatcttatatttaaaaaaaaacaaatttttaaaacatcttatattttaaaatagagggaatataatataaaatatttaaatatttctacagaaaatataataaaatataatcaatttgattattgtcggtttatgtaataaatgaatatcaatgttttagaaactaatatctgtaactgaagtcttgtgatttaagtatttaactaagctttacggatttgatgtcagctcatatatgtgacctttttggtttggtcaaaattttctttttataaacatgttatttatttttttatttctaaaaataaagaatatagctaagaacacaagaaccaataaatcccactttttgagtaattttgtgaaatgttgagtatttttttattgagttcattggcagaagagaccttgggaatttatattctcccttggtcaaatgaatagacggtgtcaacattttctaggaatataaaatgatgttaaccatttctcgttagggttttcagtattgtcattaattagtcaattagcgctattataattaaaatgctctaattattcccaagttttaaatttgttttcattttgtcatcgacaggtaccgagacagac

SEQ ID NO: 5229 - DNA, 943 bp, Arabidopsis lyrata
  Intron number 1 from transcript 912607 (locus 912607) deri ved from phytozome v7.0 (chr-ID scaffold_1; pos 12190092 t o 12191034)
gcaagcttatcgctccctcatctccgcttccagaggtttatattctctcattcttagccctcttttctgttttatctcttccgttcgatttagttttaccgattggatgattgagaatctgccattgtcctggagttgtggagttcaaattttgcttttgattgagttttgtggttttagatttctctgtatgagaaagaatacttcttagttggctactcttaactgaattaagtgaagattagggttacaattcattagctctagcattatgacttctctgccacaaatgtgaattctagagtccggtattgttgttccttagtacgctgcactaaattgtgtatttgtagttaggatatcacagaattcattgttcttagagtctcctggctggaattagatttctcaaccattctcagacgtgataaagccatgtataagctggttggagcatctgtttcttgcccatgtcacactgtgtcagctttcatgagttccttccatttaatattaccctccatagattccttatgtatgtagatgccaaaaagtatcagtatctagagtttatttatttatttctcaatacttgagaaaagcctgctcttgtggggttcacaatctgtagttccattcatgtgttaggtggggatggtgtgtagttatatgggaatcattctacgagaggaaatctagtgcaacagattaaagttgcaaaactttaattctaaaggtagaatttgtagttgacctccggaattttcagcttgtgtgaaactcatacacagtttaaactaagaattctaatctctggacacctcctagagtcattttgtgtaaaagaatagaagccttagattgaagtttgttggagtaatgatttagttagttgcttatacttgcaggttgtactagcgtaaagcgccttgtggctgatctc

SEQ ID NO: 5230 - DNA, 6224 bp, Arabidopsis lyrata
  Intron number 1 from transcript 907520 (locus 907520) deri ved from phytozome v7.0 (chr-ID scaffold_2; pos 3791475 to 3797698 reverse strand)
gtagtgggttctagggtttgttcctattggagtgtatatgtgtatattaatgtattggtttagtagctagattagatccggttaagtaaaccgagattgagcaattgtatataaacctcttggaaagattcttcctaatcttaatgagaaaattatcttcatattaacttttctctcaacgtttctcttccgctaacatggtatcagagccttcaagctcagatctctattgatttcgatctgatttcttcgttttctttgcgctagatccatcctctacaatggtgaaagctgtcatagctcggaaatccgctcgatcgaagtctggaacaagttcttcagctcggaaagtgtcacgatctaccggtgttgctgaatctcctccgatctctcctccagctactagatctcgtagttctggagcatcgcgagcaaatgcatcatcggacttctcaaatccatcgcactctccgttctttcttcacagcgccgatcatccaggtttgactctcgttgcttttcgtttagatggcacaaactatgatgattgggaagctgctatgcgtattgcgttagattcaaaaggaaaattaggattcattgatggttccttaactcgtcctgctgaatctgataaaaattttagcatctggtctagatgtaacagtatgattaagtcatggcttttgaattcggtatcatcggagatctatcggagcattttacgtatgaaagatgcttctgatatttggtgtgatcttcacagtcgttttcatatgagtaatttgccaagaactttcaatcttactcaagagatacaagacttgcgccaaggagccatgtctttgtcagagtactacaccaaactgaagaccttatggggaaatctggaaagcacagaagaaccagatgatccgtgtgtttgtggcaaggctactagtctgcaattgaaggcagagagggctaagattgttaagtttttggcaggacttaatgattcttattctatcatacggagacaaatcatcatgaagaaggttctccctacattggctgaagtctataacaaactcgaccaagatgatagtcaaaagggtttctccaatgtagttgctccacctgctgcttttcaagtatctgctattgagtcttctggtcaggatcccactgtgtgttatgtgcaaagtggaccaaacaaaggaagacctatttattccttttgtaacagggtgggacatatagcttaggtgatgctataagaagcatggatttcctcctggattcacacctaagggaaagacacctgataagaatgttaaaccccgtcccattgctgctcaggttactttggcttcaccttctcctgattctgagaataacagtctagatgcagtcattggtaatcttagtaaggattagattcaacagttcatcgctctgtttagttctcagcttcaacctcagtcaagttttggttctcctgcagctagtacatctcagactgataacactggtatctcgttttcctcttctacatattgtttcattggtatattgacagtatccagaaatactatttcccctaagacatgggttatagattctggagcaatacatcatgtctcacatgatagaagcttgtttcttactctggatactgctattgttagctgtgtaaacttgcctacaggacctactgttaaaattagtggtgtaggaaccattaggatcaacaaacacattttgctccagaatgtgttatttatcccggaattcaggctaaatctcatcagtattagttctctcactactgatcttggtttccgagtggtgtttgatccctattcttgtgaaatttaggatcttaccaaggagttgaccattggaaagggtagaagagtggaaaatctatatgttttggatattaaggagacagagatttcagtgaatgcagtggtggatgttagtatgtggcacaagagactggggcatccttcattcagcagattggatgttatttctgagtctttaggcactactagacataagaataagggtttagcttactgccatatttgtcatttggctaagcagaagaagttatcttatcattctcagaataatatttgtaatacaaacttggagttattacatattgacatctggggaccatttttagttgaatctattgatggatatcgatattttttaactatagtggatgatctttcaagagcaacctgggtatatttgctgaggaacaagtcagaggttcttacagtttttccagcttttatcactcttgttgagaatcagtttaatctcaaagttaaatcagttaggtcagacaacgcacctgaattgaacttcacaagttactatcaagataaaggtatacagtccttccattcctgtccagagacacctgaacagaactcagtagttgagaggaagcatcaacatatcttgaatgtagctcgtgctctcatgtttcaatctcaagtttctctgcctttctggggtgactgtatcttgaccgcagtatttcttattaacagaactccatctcaagttctatctaataagactccttttgaagttcttacagggaaagcacctgcatatgatcaattaaggacttttggttgtctttgttatggatcaacatctcctaaacagagaactaagttccaagaaagatctaaagcttgtgtgttcttgggttaccctgcaggctacaaaggatataggttgatggacttggagagcaataaaattttcatttccagaaacgtcatatttcatgaagatgtgtttcctctggcaaaagataagaagtctgatcactctttggatttctttacatcaatgtcctaaggtaagctcactataccatcacaaatttctccatcttctatctctccatcacaaatttctccattaaaacactccaccactagagccaagaaaactccggcttatctcaaagattttcattgttactcacttaactctgatgttcaatatcccatttcatcaactctttcttattctaaactttcaccttctcatctcatatatatcaacaacatcacaaaaattcctattccccatacttattctgaggcacaggaatccaaagagtggtgtgatgcagttgatgcagagattggtgcgatggaatctactgatacttgggaagttacaacattgcctccgggaaagaaacctgtaggttgtaagtgggttttcacagtgaaattcttggcagatggtagtcttgagaggtataaggctcgcttggttgcaaaggggtatacacagagagaaggagttgattttacagaaactttttcaccagttgctaagatggctactatcaagttgttactcaaggtgtctgcttccaagaaatggtcattaacacaacttgatatctctaatgcttttctcaatggtgaattagaggaggaaatttttatgaagcttcctgaggggtatgcaaaacgcaaaggtatttgtttacctcctaatgctgtttgtaagcttaagaaatcaatctatgggcttaaacaggcatctaggcaatggtttaagaagttttccagttcattattgcatatgggatttgttaaaggccatggggatcatactttgtttgtgaagagttgtggttcagattttctagtagtattggtttatgttgatgatattgtcattgcaagtacctctgaagctttggctggttcattaacacaaaatttgaagcaacagtttaaactaagggatctaggagagttgaaatattttttggggttggagatagcccgaaattcagatggtatttcactttgtcagcgtaagtatgcattggagttattgactgctattggtatgcttgcgtgtaagccatcctctgttccaatgatccctaatgttaagttgctgaagactgatggggatttattgggtgataaagaagaatacagacgtattgttggtaagctgatgtacttgacaatcactagacctgatattacatacgcagtgaataagctttgtcagtttacatctgctcctcaaactgctcatctcgcggcagtttacaaagttctccagtacataaaggggactgtaggtcagggtttgttttactctgcttctcctgaccttactttgaagggttttgctgactctgattgggcatcatgtcctgatagtagacgctccactactggtttctccatgtttgttggggattctctgatttcttggcgttctaagaagcaacccattgtttctaggtcctctgctaaggctgagtatcgagcattggcattggcaacttgtgagatcatttggctgcatcgtcttcttcaagatttacaagttaagtctcctgcagctcctattcttttctctgatagtacttgctgcaatctacattgctactaatccagtcttccacgaaagaacgaagcacattgagattgattatcacactgtacgtgaaagactggatgatggttctttaaagctacttcatgttagaacaaaggatcaagtggctgatatcctcaccaagcctttgtttcctcattcatttgaacgtctcaaatccaagatgcacattctcaacattttccaatgcacatcttgagggggcatattggagtgtatatgtgtatattaatgtattggtttagtagctagattagatccggttaagtaaaccgagattgagcaattgtatataaacctcttggaaagattcttcctaatcttaatgagaaaattatcttcataataacttttctctcaacgtttctcttccgctaacagttccttgagattcgatctccaaggaatccgcaacgatgatgacttcgttgatccatctattgaaggactgcaaaaatccggtttgaaaataaggaataaagtgtttaagaaaaattacggtaacggacttcaccagaaaattgaccgaagccacattgtcgaaattgtagttccgacattgataaattgatgagagtaaagaacacaaaagtgttgtggaagaattataatagactctcataagaataattgcataaaatacattctcttatatagagatgagatttcctaatctaagataaatataaatgtaaataatatatttagagataatggtaaatatcataaactaagatattaacaaatatcatgatcttctggatccttctcgatatttatgattttcttatttttgtgcttttcatctcgaccgtcgatctcggtcgatctccagttccctcaataccctccggcaagctcatacgtggtaacacatgtgagattggacaaatcttcaaaataacggcttttatacctggccgtcgggtcatcatcgacgtttatacccgatcgaagggttcaaagcggctacaatacccagccgttaggtcatcgacgtttatacccgatcgtagggttcaaagcggctacaaaacccagccgttcggtcatcgacgtttatacccgatcgtagggttcaagtaatagaaaataacacccgcgattgcgagattcagatgtagctcgcgatgacgagactaaaaaaaaaagccaactcacgagggcgagtagtttaatcaaaaggagaagttaaactcgcgagggcgagaaaacatcattgttcccgaaacaaatttttttttttttttttttttctttgcggaagctaacgtaacggatccaaaatccacagaaaggatcttggctctgataccatgataaattgatgagaataaagaacacaaaagtgttgtggaagaattataatagcctctcataagaataattgtataaaatacattctcttatatagagatgagatttcctaatctaagataaatataaatgtaaataatatatttagagataatggtaaatatcataaactaagatattaacaaatatcatgatcttctggatccttctcgatctttatgatttccttattcttgtgcttttcatctcgaccgtcgatctcggtcgatctccggttccgaaagaagcaaatatttgaacttaaccaagttgaaatatatgatgtctttcactgtgacggattattgctatgcgttaccaaggaccgctggagactcgtggtatggaacccgtatttggggcaaatcagatggattcaagccagaaaacaattcagctcatgtgac

SEQ ID NO: 5231 - DNA, 26751 bp, Arabidopsis lyrata
  Intron number 3 from transcript 481864 (locus 481864) deri ved from phytozome v7.0 (chr-ID scaffold_4; pos 13580292 t o 13607042 reverse strand)
tgtttatatccaaagattctttcaatctttgatcttgtgaaactctcgtgctctgttcttctctgtcccttttgacaccagagaaacagagttttatagtgatcaacggttttcacatacgtttgcaaccgtacgtttaatataataaccgtttgtacaaaaggtgcgatggttggtgaataaccgtcgatgtacgtacactaactgtcgatgtacgtacacttaaatatccaacattcgtgaataaccgacgatgtacatacacttaagtatcacgtacacttaaatatccaacattcctcccccatttaagtgtaatctttgattcacaaaattaacaacacataaaccaaactcatgcataaatgtaaatgtcgtgacgacgattgaatttacatcttagtgatattacacattccaaatgcccgagaattaggatgtcctacggattgaatccttcaactcattttgagcacatgaagataatacacacacgaattcactcactactctaactgtttatccttgacactattataagccatgtgtccttatccattcatgagagtatacaaagccaagtccgagcttattgaagcggctacacttcacacccatataggtagattttttaatcttgcatctgcaaaatgcaatttttcaaaagatctatttagaagaaaacttcaacctaaccttttcttgcagatctaagcacttactttgggatgatataaactagtgcttcaatctctaagtgtgggctttccgcattgaattcagcctctaacgttgtattagaggggaattgggtatcccaccattagagatttcaaatggactttaatcccatccctttagccgacttgatcaccaagtctctagctaatccttttgtcaagtgatccgctagattttgttcaaaccgaataaatcctatagtaatcaccccatgagtgatcagctcacgtatcccgctatgtcttaagcctaggtgtcgcgacttaccgttatacacttggctataggccttagccaaagtagcttgactatcgcaatggatagaaatgggtgacaccggtttcggccacaatggaatctcggagactaggtgtcttaaccattccgcctctccccctgcagccgctaatgctacaaattccgattccatagtagaatttgtaatacaagtctgtttctttgatgcccatgaaatggcacctcccccgagtaggaacacccaaccacttgtagaagaatgattatcctcgttgttgttccaacttgcatccgaatatccttctaagaccgaaggaaatccaaaatatgataaaccatagtttatggttcctttcaagtacttgagcacccgccttatagcttgccaatgatgagtactaggattactagtgtatctactcaactttcctaccgcaaaagctatatccggtctagtgctagtcatgacatacattaagcaaccaattactcgtgagtactcgagttgtgataccgcttgtcccgtattaggcataagcttcacgctcgcatccatgggagtgctcacgggagaacaattttcataattgaactttttaagcaccttctcaatgtaatgtgattgagttaaagatattcctttgttctcacgcttgattcgaattccaagaatcacctccgcctcccccatgtctttcatggcaaaatttgatgacaagaactcttttgtaagttctacttgtctaaggttggtgccaaagatcaacatgtcatcaacatataaacaaatgatcactccattaccggaatcatcaaatttgctatataaacacttgtccgactgatttaattcaaacccatttgacaagacagcctcgtcaaacctttgatgccactgtttaggtgcttgctttagaccatacaatgactttaccaacttacacaccttatgttcattaccaggcataacaaacccttcgggttgtttcatatacacctcttcttccaagacgccatttaagaatgccgtcttgacatccatttggtggatcacaaggttatgaatggatgctaaaccaattaataaccttatagaggagatcctaacaaccggagcatatgtatcgaaataatcaatgccttccttttgtctaaaaccttgaacaaccaaccgagctttaaacttgtcgatcgttccatcgacttttatcttcttcttgaagatccatttgcaggctaaaggcttgcaaccgggtgggagatccgttaagaaccacgtattatttcccatgatggaatccatttcatcatttacggcttctttccaaaaaataacgtcattagacatcatagcctcactaaaagttctaggttcatcatcaatatgataacaatatgagtattggaaaccagtctcatctcttgtcccttcaactaagtaaagttgaaaatcgggaccgaaagatttttcgattctccctcgtttactcttacgaagcgtaggtgactcgttaggaggaacgaacgtgtcgtctccttcctttgttccacttgaactaggaactaaatccttttgtctaggtatcgtcgagaaacgattctcatcaaatattgcatctcttgactcaattacggtgtgaaccgctatagaatcattaggttctatgacataaaacctatatgccttggaatgcaatgcataaccaataaagatgcaatcaatacctctttctcccaaagtcttaatctttggttggggtaatctaacgatcgccctacagccccaaactcgaagatagttcaaatttggtttctttttgtaccaaagttcatatggggtaatcttgttccttttgttaggaactctatttaataaatagcaagccgttaacatggcttcaccccaaaatccgtcacttaatcccgagtaagatagcatggaattaaccatttcttttagaactctatttttcctctcgaatacaccattttgttgtggcgtatacggagccgtagtctcgtgtattatacccacggactgaaaatatgtaggatcataatactctccacctctatcggtgcgcaacttcttaaccaagtcactatgttgtaattcaacctcggttttataaaccttgaatttttctaaggcctcatctttagcatgcaataaatacacataacaaaacctagaataatcatcaatgaacgtgatgaaatatttcttgtttcctaaagatgatgtagcatgtatgtcacataaatcactatgaataagttcaagcacctttgaatttctttcaatgcttttaaaaggttgtctaattatcttagtcaacatgcatgttctacacttctctatattcacgtcaaaagtaggaattaatccttctttagacatttcaatcattcctttataatgcacgtggcctaatcttgcatgccataaagaagtatcatttttgctagaacatgccatgtaaatagaattgacaactttattaatattaagcataaacatgccattacagaaatatccaaatccaacaaagacaccacacttagataagacatacttatccgactcatacacttgtttaaatccacacttatttaaaacactaccggagactaggtttttcctaattccgggtacatgaattacatcattaagatcaagagttttcccggaactaaattctagcaccacttttccacgacctaggataggagcggttgactcgttgcccatatagagtacggatccatcttgaaccggctcatacgtcttgaaccagccacgatcctggcaaacatgtattgttgcacccgagtcaatccaccatgccacctcatcatcctgcacataaaatacctcagctatttttgatacataatacacttttgagtgtaaatcaaaaacagaattctgaccttgatgagaggacgggtcttgatccttagacccttgcccaaaacgcttttgttgcattttattcttatcctttgctgcccgacaatcacgtttgaagtgacccggcttgttacaaatccaacaaacgctcttgaatcgtttgttagatccatcattggtgttgttagtaaaggggcgtttcttccccttgttcttcatcttagaactcccactctccttcatcatattgattgaagaagtttcagcctccttatctttgggttttccaccctcttgcacccttagagattcctctatgcgcaaatggctaccaagttgtacaagagacaactcttcctttttgtgttttaacatgcgcctaaaacctttccatgaaggcggcaacttgtcgatgatgcacgacaccgaaatggattcatccatgttcatgttgtgttgagcgaattggcctaggatgcgaagcaattcattgtattgctccattaccggcttgaatcggacatcttgtaattattaaaatcactcacgaggaacttcttactagaagcatcctcagccatgtacttcgattccaacgcatcccatagttcctttgcggattcgacattttggtaaacatcaaagagagaatcagacataccgttgagaatgtggccacgacatatgtagtcatcgttttcccacttaagttgcttccttgtctcctccacggactcgttttcaccattgttggtgtcggatcccgcaccagaagtacgagaccaaccaaagattgccacgtagtcaagcgggtggcccataaaagatgaagcccattgggcccatgaaccgaggggacggtcgaagtggttgtcaccacttcgagagtccgaagtgactgcactgagatgtgagttcggtgtagaagacgcgggtaggtcggttcaaggacacttgagccaaaaaggcgaggcccatgaaaatcagagtcaactcaaattcaaacgttgagcattaaagtcgaagaatcaaaactgacacatttaagaaggaataattgtacttaattatccattttaatgtcgcttatatatctatgtataaatatagaggccaatggccatgtaaagggcatcttcctctgaagagagaaataatatagcaattctcgtatcaatttacaagttcttacgtattcatttttgtccctcaagaataatctttcccacttaacaaaatacttgagtgtgtgaatccgacatccacattttggcgccgcctgtggggaatatcaggattcttgagtggtcagatttcttcttttctacattcccgagataagcgacaatgtccggaggagacgccgttgagacatcattggccgaaaccctcaaagctatgcagcaaaccatgtcggacatatcacaaaaattttcggatgtggagaaggccgtcgatacgttgcaaacatcccaggtatctcttagtcaaaacgtcaataatatacaaactcgtgttcgctctttaagtgcaggaaacccagtgggaacccggagagggatattcaactcgccaagttccgctgcacgaaatgaaaccagcggacaaacaactcccggtgctacaaataatgtagctcagacgtcggaagaagagacgcagctcggggatgaagaacaacttgcagctcagtacgagcaggagaacctcgaccagttcgagaccatgaagaaggttagccaggaattaaaagaaatgaaatcaaaatttcatcaggctacaagttcggagccagacatcaatcgagtcattgaagaagcaaggcgaaccccttttatcccgcgaattgcaagtttgaggatcaaagattcccggaagctcaagttggacccttacagcggattggaggatccaaaaagctatcttgcagcctttctgattgctgcaggaagagtcgagttggatgaagctgatgaggacgcaggctattgcaagctgttttcggagaatctatatggccaagctctaatgtggttcacccaattagagccgggttcgatcagcaatttcgacgaactgtcagccgtgttcttaaagcaatactctatccttatggataaaagcgtttcggatgccgatctttggaacttaacgcaaggatctaatgagtcacttcgagttttcatcaccaaattcaaaggggtgctatcaaaactcccaagaatctcacagcaatcagctttatctgccctacgaaaaggattgcgacatgattcaaggtttaaagaagacttaatacttcataaaccagatacaattcaggatgcactcttccgtgcaaacaattggatggaggtagaagacgaaaaagaaagttttgccaaacggaataaacaagaaaagccggcagtcaccgtccctaccaagaagttcgagcctagagagagcaaaggaccaaggaagtttgggtcgcaacccttcaacaattccgtcgggaagcaattccaagggaaaggaagatcaaacacttgggtccgtgatgaaagtctatattgcgacattcataaagtaaccggacatttaaccaaggattgcagcattcttaaaaagcacctcgcagagctttgggctagtggtgatctttctaaattcgatataaaagattttgtgaaggaataccacgaagcaaaggaaaactccaaagatcaagattccaaaagaccaaggttatccaacgaggaagaaccaagaagttcgaaggggaggatcaatgtgattctaggaggttccagattttgcggagattcaataagttccatcaaaaaacatagacgaaatgtcttactcaaagcaagcttgagtgaagaaattgattttcaaggtgcttcaatatcatttaacgaagaagaaacgcggcatctcgaaagaccgcatgacgatgctctagtcattactcttgacgtcgcaaacttcgaagtatcaaggatccttatagatacaggcagttcggtcgacttgatctttttaagtactctagaaaaaatgggaatcagccgaggagacatagtaggacccccatctccgttagttgcattcacaagcgagtcagccatgtctctcggaacaatcaagctaccggtccttgccaagaaggtatcgaagatcgtggacttcgttgtcttcgataagcccgctgcttacaacatcatcctcgggactccctggatttatcggatgaaagcagtcccctctacatattatcaatgtatcaaatttccaacatcaaatggggtggaaacaattcggggagatcaagaagcttcacggacttgttacttagctagccaccgtgtgaagattcaatagcaattaacgaagcccgcaaaagaaggactaaaaacaaaatttcctagtgggcagaagaaagaggatgtagtagtcgaagtggtactggaagaagacaagccggaccggaaaattagaattggagcaactttgactggccaaataaaagaagctttgatcgaactcttaaggaaaaacaaagcatcatttgcatggtcagcagcggacatgccgggcataaatccgagtataatttgtcatgaactaaacgtacactacaagaaatatgggcattgatagcaccagaggatagctcattttcgctcgggcaaaaatagtaaacgacgaagtggataaactcttgaagatagggtccataagagaagtgcaatatccggagtgggtagcaaacactgtcgttgtcaagaaaaagaatgggaaagatagggtttgcatcgactttacagacctaaataaagcatgtcccaaagatagtttcccgctcccgcatatagatcgacttgtagagtccaccgctggaaatgagctgttaacgttcatggacgccttctcgggttataatcagataatgatgaaccccgacgatcaagaaaagacgtcatttatcacagatagaggtatctactgttacaaggtaatgccttttggtttgaaaaatgcaggagcgacttaccaacggttggtgaacaaaatgtttcacaatcacctcgggaagactatggaagtctacatagatgatatgttggttaaatcgttgaagaaagaggatcatgttaaacatttggaggaatgttttgatattctcaataaatatcaaatgaagctgaacccggcgaagtgcacatttggagtcccatccggggaattccttggttacatcgtgacagaaagagggattgaagccaatccaaatcaaattaacgcctttctaaacatgccatctccgaaaaacttcaaagaagtacaacggttgactgggcggattgcggccttgaatcgttttatctcgaggtcaacagataagtcgttgcctttctaccaaattctaaaagggaacaaaggattcctttgggatgagaagtgtgaagaagcttttgggcagcttaaggcatacttaaccactccacctatactgtccaaaccggaagtggatgaaaaactctacttgtacgtttcagtttcaaaccacgcggttagtggagtcttggttcgggaagaccgtggggagcagaaaccaatttactacgtgagcaagtcaatgacggatccggaaaccagatacacaatgatggaaaaacttgcactcgcggtggtaacttcggctcggaagctgcgtccatattttcagtcccatccggttgaggtattaactaaccaaccactcagaacaatacttcatagtccaagtcaatccggacgtttggcgaaatgggcggtggaattaagcgagtacgacatagagtttaaaagccggatcagtatgaaggctcaggtcttagcagacttcctgaccgaactaccaatacctggaacgatagatcaaccggagaaccaaacttggaaattacacgtagatgggtcttcaacaaagcaaggatccggagtgggaattaggttggaatctccgacatcagaaattctagaacaatcattccgattgttattcaatgcctccaacaacgaggcagaatacgaagcccttattgccggacttcgactagcaccaggagttggagctaaggaaatattggcttattgcgattcgcaattagtagttaaccaatttaatggagactatgaagccaaagattcaagaatggaagcttacctcgaagtggtgaaggatctatctaaaaatttctcgaaattcgagttaatccgcatacctcggggagagaatacaactgcagatgcacttgtcgctttggcgtcaacatcagatcctgagttaaagagagttattccagtagagtgcatctcggagcgaagcattcaagacagcaaggaaaccctcgtcgttacaaggtctcgagcagcggcacgcgaccgtggcgaaccagagatcgaaccgccacccaacaaacgcaggaagtcaaaaggatcaaatacatctaacaaggaacccgttgtcttagctgaagaaatgattccagaaacgatgttagaaaccgagccattactcgaggaaaatattcttgaaccacacgaacatcccgaaccagagccgcggatatttcacaaagttgatcaaattccggctaaagactggggggctgactggagggagccaataaagcaatacatcatgacaggtgagctcccaaagaataaatggcaggccaggaaaatgaaagtcgttagcgcgaaattttgtctgtcgaaggatgcgttatatagacgaggtgtcagtgacctttacctattatgcatttttgggcccgaagttgaaatcgtcatgagcgaagtgcatgaaggattatgtgggagtcattcatcaggaagagctatggcttttaaagttaaaagaatggggtatttttggcccactatgatcacagattgtgttaagttcgcccaaagatgcaagcgctgccaactccatgcaccattgatccatcaaccgtcggaattattctcctccatttccgccccatacccgtttatgagatggtcaatggacatcattgggccattgcacaaatcaactcgaggtgtacagtaccttttagtccttacggactactttttaaaatggattgaagttgaggcgtatgttggtatcaaggattcggcggtgaagacctttatttggaaaaacattatatgtcgacatggagttccatacgaaatagtcactgataacgggccacaattcatttcacacgagtttgatgccttttgtgcggactggggaatcaaagttagttattctactccacgatatccgcaagggaacggacaagccgaagccgcgaacaagacgatattaagcaatctcaagaaacgcttaagtcatctaaagggaggatggtatgaagaactccaacccgtcctgtgggcttatcgtacaacccctaggcgacctacaggagaaactccattctctttggtttatggcatggaagcggtagtaccagctgaactcaatgtgcccggacttcgtcgaacagaagcaccgttaaatgaggaaaaaaattcagcaatgcttaacgattcactggataccataaatgaaaggcgtgatcaagctctaattcggatccagaattaccaacaggcagcagcccggtattacaattctaaagttaaaagtaggccgttcttcgtgggagattacgtattaagacgcgtctttgacaataaaaaagaagaaggtgctggaaaacttggtattaattgggagggaccttacattattaccgaggtggttcgaaacggcgtttataggttaaaagacctagaagacaatccagtcaagcgaccttggaatgtgatcaacttaaagaagttttatgtttagaagctacatgcattgtttatgtacatgaactacgatttggcttgatcccgaaatgggtacgtaggcagctcgaaaacgagttcagctattaataaagtttttgttttatttctttattaaaggaagaaggttcggctatgcgaacatacaagaaattggaaataaagcgtttattcaaaaaaaaaaggcgaagtgtccctcatcgtacacttcgaactacgaaatcctcgttgacgagcagaacacttcaattccttgacccgcaagatcgaggattgacatcatgcagtccggaattcgagcaaagtcagagattccaagctcaatccattctccggggtgagattcaaggatgtgaagatttcttgacaccgtagtaagcctgcgttgcatccggttaatcctcttccgaagtctcctcttttccgacataagcttccggtgttgaagctcgagtgcctctatgaacgccgtcgctgttccttggtctctgattgagagatccctgatcaaagcacatggggctcggatctgagatcttaagaagccgcgaggtggaggaggctgcctgtttggctcattcggaacatcttcgctcatcattccgattctggagaagtcaggcatagattctgaacagcgaagattgaactccatacctgctaaaataaaaagagtggtgaggagtaaagggaaattgagactataatttatagtaacgtcatatccttagtgagctgcagattctatcctaggaatggagtgattcgcggagaagattaatccctaaaaccgatcctgcattaaaaatcgtatcaccaagaatattttaaggaaagttgcaagtgtttccataaataaaagggggccgaagcccattacgagttttttcaaaaaaaaaaaaaaaaaaaaaaaaaagaagagagcagaattagggaacatttaaggaaggggctcaggaacaggctccttcatcgccggtttaacttccgaagtggacgccttgtccttggagttcacttcggaacgatcccgaatgcgtttccgacagttgctggcctcctcctccaaatcttcttcctcactatcagatggaacggggaagaccggggcgttcacaggacccggaacccccttagcacggaggtacatccgaagcatcctcgggatctcagcaacggagtcgaaattccgccattcccactgaaagggatcactttccaaagccctgatcttcctctccacccgagaaatacgagcctcgagtgtctgccttttgaggcccagccgttgcctctcttcacacaagcgacggtgcttgtcggcaacctagcataaagatgaatgaataagatgaaacaaagagtttttaatcaaaaaacttcaaatacttaccctgtcaatgaagtcgcaagcctcttttttatcctttgaaggaaagtgaaagacggcatgagggaagagaacgccggccggctcaaagccgtcgccggacaagaagagtgggctgccgggatcaacgggggctactgtttcgctttccattcttaaaatatttctcaagtgagactctagagtcatgtttaataaagcctagaggtaggtaagcctttatttataatgatttagggtttgtcttggaaccataaattcattaatggtagcgtctcccagtgggttaaaccatttttggaaaatcgagaaaatgcaattattgcattaaaagacgagccgttttctttaagaagggaaagagcaaccgtcgcattaactgcaaaagtttctaaggcccaagcctaacaagtttaccgagttgactaaacccgaagtggggaactcgcgttaagccgagctcagctctcgcattctaaagagaaaggtctgatcagcctataaaaatctcgaaagcattgccacaaggccacaaaaggttaaaaacggactttgcaaacccgcatataattttaaccaaacccccttgggtcacaacctagaaaggtttaaaagcctcctcaggcaaatatcttgttcaaaagaaaataaagcctccttaggcaaaaataaattcgagattaagtcttaaaataaaaagggacaatccccaatttaaagtggacacagccactacggagcgatctccacctcgggctcctactcagcaaccagagtttcattcacctccttgactggtgcttgatcagatgaagctccctgaccaccctccgcgggacaaccaacctccggagtaacctccgataccacaggagctacgggcgggacaatgccctccgtctcacttgaacctggaaataataattccagtcaatcagaggtacaaggtaagaaaaggtaagccttaggagccaagcgttacctgcccagtctaaacccgattcacttattggaggtgattcagtaaagaatgcctcgaagtcaagcgggttgaaggccgaagtgggaagagctgccaagcgactccgtttttcagaaaggttagtcgacagctcggtcctttcttgctcttcggagaaatctgcttcatggatttgatccagcagaatcaggttactttcgtgctccttgatgtctgactccaagtccgacctagccttctcagtctgcatgaatcggatggccccttggatcaactccatcccgcgtcccttgacctcttttctggcttttgatgccgacctcgccaactcggaatcacgcaatttggcgatcgccttgtactttgcgttgagctcgatgagttggttgttcagggaatcagcgtttgattcggactcttgaagcctaccttgaataccagaaaactcttcctggagcttgaagttctggtcgtactgaccctgcagctccccctttacctgcgcaagctcggatgttaaattgtcgactttgtcctccagctcgtgcttggagccggcagaagaactgacttcggcctcaagagcagagagtttctttttccacatgtcaatctccttctcccgtccaaggaccagcccttcgtaatgttcgatcatgtcgttaaattcgctatgagcctggcgtcatacatgaacccgggatgacgagtcagttcgcagaatggcaatacaataaaaaaaataataataaaagaaaacggaactaacccgagatgagtgatgcgcgtgaagcaaataacgttcacgaatcgcagggggccatttgtcgaagtctggcaagatcgagcccgaccgggtcttgaagcatcggaagacgctgccctctttctccatagctgtggagaaggaagagttgtaaaaaattggaattttaataaagacaaaaagtttaaagtacgtgtaaatcaccaaacctgaaagcgatttaacttgagggacaagagcaggcttcagcctcgagggagcatctcgagattcagaatccccctttttcggagacgcgctccgggcagtcattccactatccggctgggaagaggaggacatgtcaaccggtcgtggaggacccattggttcagaaggaggggatgaccgaggtgagcggtcagtccgggcccttgacttttccctctgcgaggaaggatctctgcgagaggacttgtctctcttccggcgaaccaagttcttaattggctcgttactaaaatcatctcagggaggacgaggtgaatcacggcgaggagattgatccctccgaggagaacgtgagtcgcggcgatcgcgacggggagttagtctgaaggaagcaacagatcgggctccctcggtactgccatcatcgaccagcaaggtcctactatagtccttcttgtctatagaagtcgcgagaaactttttcttctcctcgcaagcctcagccatcggcttggaaagcaacttacgcttggccgcaagggcccgagatgacattccctgagttgagggagggggaggaatttggtgaagatgaccaggcggactcatcctgagtctgtggttagcctctatgaatcgttcgagagtgaaggaattccaaagggtttccccttcaagaattattttgaagaattcgatgaactcttcagatgggagattggaagcgatgaaagctgcgaaatgaaacaacgatgttagttaataaagataaagaaacaaccgggaaagatacgggcgacctaatctctaccaggtttcgccgaccacttcgaagggaggaaatctgcaagatttccaatcgaagcgggagttttcttaatcaagaaccaaggatgatgccaattttcatccttgtttggaagatgcgaaatgatgttcctgttggcgttaggatatgctgagaaataccccgttttcttcgacgagcttctcacgcttagaagctcatttaattcggcaactccgataacgtaaccggcctccgccgcgattgttataatgccgagaatagtacgaagaagattgggggttaattgaggaagagcgatttcaagggccgctaggtataaaattagggcttcgggaagaggaaaggtcaacccgcaacctttgaaataaatctcatacacacagaagtaaccatcgcgatggttctctggagattctgtgggggaagctatttgtgcttccgccataatttccggcggaatccggcaaagctctctcaatcgctcgagggattgaagagtacaaatggacctatagtgcggaccggcaatatcaccagggcgggtgcactcgtcgttactagaacgcctctcgtcgaaagacggagactcgggtctatcggaatcagaattcattgggaagaaagaaaaattcaagatccggtgaagaggggttttggtgaaggaacgaagagagaggttttgattaaagtacaaaagtaaaagaagagagtaatggtgaaaagaagttacctcaagctaatgatgaaaccgccttggaagtcgtgtgggaagtgggaaggtttttcccgttttaatagtaattaatcaatatacggtcataatgatgacagatgtcactcggttaaaaatggttagtgccgaaattaaaggagtgatgagattttcggcgggaaatcagaaagattctcgagcgcaatctttggccacttgagcatttaaagtcctccgaattggaatagcacttcgaagaacttggggggctaattgttggtgtcggatcccgcaccagaagtacgagaccaaccaaagattgccacgtagtcaagcgggtggcccataaaagatgaagcccattggacccatgaaccgaggggacggtcgaagtggttgtcaccacttcgagagtccgaagtgactgcactgagatgtgagttcggtgtagaagacgcgggtaggtcggttcaaggacacttgggccaaaaaggcgaggcccatgaaaatcagagtcaactcaaattcaaacgttgagcattaaagtcgaagaatcaaaactgacacatttaagaaggaataattgtacttaattatccattttaatgtcgcttatatatctatgtataaatatagaggccaatggccatgtaaagggcatcttcctctaaagagagaaataatatagcaattctcgtatcaatttacaagttcttacgtattcatttttgtccctcaagaataatctttcccacttaacaaaatacttgagtgtgtgaatccgacatccacaaccattctccgacacggtgggcattggcatacttagaacgtgaaccacattgagcgttgtgaggagaaagtgcatcttcttttgccatcttctaaaatcaactccttcaaacttatccaatttgccaaactttgatgtcatctcacgcacagaaacattagccattgttcactaaatactctttaagattgttgtggatacaggctttgtaactccgggacgtaacgaatgtgaacttggataatgattgaatcgcgcacgtgagcactttccttaaagagtatttcgacccttctcaagccttgggttacacgaaatcccttgtaggataagacaatcaaagttctctcttgttctagactaagatacaagagaaacaaatagagatttgtgttttgtttatgtgtttatcaccaaagattctttcaatctttgatcttgtgaaactctcgtgctctgttcttctctgtcccttttgacaccagagaaacagagttttatagtgatcaacggttttcacatacgtttgcaaccgtacgtttaatataataaccgtttgtacaaaaggtgcgatggttggtgaataaccgtcgatgtacgtacactaactgtcgatgtacgtacacttaaatatccaaaatacgtgaataaccgacgatgtacatacacttaagtatcacgtacacttaaatatccaacatcaagttacgggggatatttggaagtacggtaaaatattttgttaaggcaaatattcgtatatccattaaggcgaatactaaatatactgaacatatgtaccttcaaaatattttcaatcaaatagccattaaattttagatatgatggaaaagtgtcacaatacagtatatcttatatactaaaataaggtttccaaaattgtggcattctctttttttgacatgtgtgtctttgtatttcttttcccatattaaaaaacactaatatctattttaattggattttaagtatatcattatattaaaaataatatacacatttttcaatattttttctttcttttattttgcatcatttaaagtaataaattatgttttagtggttctaagcgagaacttatgggattcattagtgatcgtttaaaggcacgccttagtggctggtacgaaaagactttatctctaggaggtaaggaggtactgctcaaatcagttgcgatggctcttccggtatatgcgatgtcatgttttagattaacgaaatatcagtgtcagcaaatcacaagtgcaatggcccaattttggtggaacgaaactgaagacaagaataaaatgcattgggtttcatgggagaagatgtgtaaatcaaaagcacagggtggtttgggtttccgggacattggtcggtttaatcaagccttattagcgaaacaagcatggaggttattggattcacccacttctctggtttcacgagtctataaagccaagtactttgctaacaaaccctttttagaagcaaagattggttatcgcccttcatatgcttggcatagcattatgtttggccgtgagctgctagagcgaggtttaatgaagtccattggtgatgggaaggatacaagtatatgggtagataaatggatagcggatgttttcccaagaagacccattaataaacagttgatgatggacctgaatttaaaagtctcttcgcttattacatcacaaggagattggaacatccaactcttgaatgagttttttcctcctggtgatgtaattaagatcagatcattcccgccagaaacaaggttaagagacaaacatgtgtgggcttatacgaaggatggttcatatacggtgaagagtgggaactgggtgttaacaagagaagcggagatgatggagataaccccgggaaacattcaagagatcaataaaatcaaggatcaggtatgggaactgagcacagctccaaagatacgtttgtttttatggcgggccctatcaggggcacttgcggttgcagactgtctacgacaacatggtttgcaagtggctcagctttgtccactttgtcaaagagaagatgaaactatttcccatgttctgtttcggtgtgatttggcatcacgggtttggtctttgtccactttaccattgccggatcagggtttctctacatcagccacaggtaatatcgattatgttttacgtctcatgaggagaggagaagtgccggtgaatcttagagctgtgatcccgtggctcctatgggaaatttggaagtcgcgtaactcaacattatacgcagccaaagtgaatgatcctcatattatcattgccacggctttagaggaaatggaagaatggactacacttaaccacaatactaatcttgaaaccgcagaggaggctagccgtggaggtagacaggttttaaggtggttgaagcctcctttagggattttaaaatgcaacattcatgcttcttgggtaagtgttacggctcactgtggggggtgcttgaattttaaggaaccacataggcaatgctctatttcatgctagagatgcttttcttccaagaatgaacagactctctgcagaactacactgcctactgtggtgtcttcgcagtcttcatgatcttcatattaacaactgcgaaatctggtcggattgtaacgcggcagtgatggcattggagaatcctttggaatggccgaagtatcgttcccagctcgataaaatcttacaagcaatacgggtgatgggggaggtaagctttcacctctcttcaccgaaagccaatactttggccagggatattgcttgtagtgtcacgaaggagggacggtttacatcgtatcttgcgctaggaggtccatcttggctccacgaccggattgagagagaacgcatagcttcagcatgaggttctcttgtaatcttctttgctctgttttttaatgccttctttctcctttggtttattatgtcctatgtttcgattgactctgttttatattattatatgaaagacgttaaaaaaaaaaagtaataaattaataacccattttaaaaaaatcaaataaactaataccaagccacatttttgtatttttcatatgttttattttctaaaataaaaattgaaaccataaaaatgtataatattgcattcctcattttgacatgtgtcttttttgtcaaaccaaaatacactaatatcaatgttcatcagatttatattcatagaaaaattatgaatcaaagatctagaagttctcgctatacaaccagcttcaagattacatataagtgatataatttatttattttataaaaagtttttaaattaaagcatgaaaacgagaaaattttaaaagagagaaaggtgaaaaatcaactaaggataaactaaattcgtcgagaagatttggagaaagcggatcaatcctttggagattataccacagagacgtgctcagcacaatctgttacaaaatcctagcagttcaacatttttaagtggatgttcttcatattctagaatagcgcttccatcttcatagtacttactttttagataatttgaaataagtaaaaatctcatgaacattgacaaagtgatcaagctaatttgaaatctatataataataacaatccgaataaatgtcttttgcagttatgaacagttgtgttcttttatcgcaatctttcgttaatttttatattaaaaataaattaaaatttttatggttgtgtttttttgtagaaagttgtaatcctaataaatgttttctatagttgtgtctttttatcgtaactcttcataaaccgttgcaaccgtttagttaggcatgtcaatcgggctagcccggccaggtccggcccgaagtccgcaaaacccgcatgtgtttgagcccggcccggcccggcccggcccgtaaaaattcatagcctacattttgaagcccggcccggcccttacagagctacagagcttttacaggcttttctttcgagaaaaataaactcttctaatttataatatctcttgaaaaaaaaaatctatgtataaaacgagtgaaacgaaacttaaataacccactaaagtgaatctagttttaaaaaagtttaaaatcaaataaataatctaaataaattgtttaaaactaggtttagagtttttaattctattaaaaaaatctttaaacaaatctcttaattaaacaataatatttacaaaaaaaagttaaaatctctttttaagggcttttcgggccggtccgagcccggccgggctaagccgtaaaaaccctttagcccaacgggcttagcccgaaaggcctgatttttttctggacatatatttttaagtccgggtccgctatttttcaggactgggccgggccagcccgcgggcttcggccctaattgacatgtctacgtttagttgaaccattgcaactattagtttattttatgaacacttgcaacttttggtttattttatgaattgctataacatttaattatctaccgtcgcgtctcttagtgcaatttttcataaattattattattaattttgaaatgcattgaacagttgtgtttttttatcgcaatttttcgttaattttttttaactaaatataaacggttgcaaccgtttagttgaactattgcaacatttagtttatttcaaaaacaattataacttttgatttattatataaattgttataatatttaattattttcagtcacggttctcggtgagagagaatgacaatattaacaaccgagattatctttcttcttcttagagcatgattataggtgggttcttagtatttgctcttagcaatatttaaataatttatttgtaaaagtgattgttaagagataatatttttgagttaagatttttgtgtgattaatggtaggctcttaacatgtggttcttaaaaaaaaaaaattaatataaaacaaaaattcataattatagaaaatttaataattgttacaaattaaaaaaattataacatacatgagatacaatttataacatacataacataaagcataaatgttttaaacttaatttctggaatattttgtccatatatgctcgaccaaatcattcttcaattgttgatgcatacctcgatcacgaactcgagctctattggtcatcattccgaagaaatttgaaggcatatctgtagaatatgtgaaatccacccgtgaacttcctgcagattccgcttgttcgaattcggtcgtatcaaacagagtatacccatctcgttcgtcttctactatcatattgtgaagtattatacatgctcgcataatatttcctatttttaccttatcccaaagaagagccggatttttgacaatggcaaatcgagcttgcaaaactccaaaagcacgctcgacatctttacggcaagcttcttgatgggttgcaaataaagatgctttctcagtttatggaagtgaaatagattggataaaggtagcccatttaggataaatgccatccgtgagatagtaacccaaattatactcgttcccgttgactgtataattcactgctggtgctcgcccttttaagatgtcatcaaaaaccggagagcgatctagaatattgatatcgtttaaagtacctggcggtccaaaaaacgcatgccatatccaaagatcttgggaagctacagcctctaaaacgatcgttggtgttccagaggcacgtgtatattgtcctttccaagaggtagggcaattcttccactcccaatgcatacaatcaatgcttcccatcatcccgggaaatcctcgaatctctccaataacgagtagccgttgaagatcttctgcagtgggttgtcgtaagtattcatctccaaagcaataaataattccgtcaacaaaatgttccatgcacttcatcgaagtggttgcaccaatccgcaggtattcgtcaaccgcatcagccgctaaaccatatgcaagcatacgaattgctgctgtacacttctgtagtgtagataaaccgtttcttcctgtagcatctcttttttgttgaaagaatggaattgtggagaggcgatcaacaacacgcatgaataatggcttattcattctaaaacggcgtctgaatagattaggagggaaagttggattttctgcgaaataatcgttccataactggatgtgtccttcttctcgatttctttcaatatggactcgttttttcctcggttttgcagcttgctgacgatcaccgtaagaatccaaagaattatccaacgcttgctggaaagcattggataaagcattagataattcttcgtccaacgcttcttcgaaattgtaattggaagatgaagccattttgtatgtataatttttaggaagaaaaagatttgggtttagaacaagatattgaagtgaaaagaaatagaagatggtatttgcttatggaataaattatggtttagaattggttttagataagtaattggttttggttcaacgatttggatttcttttgttgtgagtttgtaagaaaaagtagactgaggagaagagataattcatagcaacatgaaacttgtgatatttatagtcaaagttctcaaataatacatggttacaaagcatttgtgacttgtggtacaaatcaatttattacttgtggttacaaagaagtgaacaaaaacgcttggtccgtgaccaaagagagagtatcaagtggtccaaaagcttgctggaaacttgtggttacaaagaagtcttgtggtgtccaagtacagattcagacttgtcctcttcttctcctttcacgtgaacctgcacataattcataccaagttattgcaaaaaccagaagttaaaagacatgaaagaaatcgaaacataaacaaaaagatacaaagccaaattgaaacataaagacataaaacaaattgaaacataaacttcatttagcaaacataaaccagaaatacaaccacaatttcaaattgaaacataaacataaagacagaaatccaagcaagaaattaaaagcatagacataaatataaagacagaaatacatgagagacattcaaagcaaaatattcctaattaacttgttctttagttcttcctcaatttcagatagaggatctgatttagataaaagagaatcaagcaacttcgagttggtaagttcctttctaaaggcatgttcttgctgcttcaaagcaaactctttttgccttatctcccataaagcctgaatcctttctacagcctgcccttcttcttctacaagtggcgcagttgtggcaggctttttgagttttgccttggctgccttaacaccagcaggacgagattgagatgcttgagactcattatgggcttgggaagcttcagaatctacctttcttcttttattcttgtcagtggatttagtggactgctcttgacaccacttctgctcattcctcaacgctctccatgcatgctccaagttgaacttattgtcgtagtcagcctcaaatatctgatgcgcaagcttaatgagatcgtcatcattcataccacttgacacctgtcctgctgcagcttggaaagaacccacaaacttacaaacttgctcatttatctttgcccacctttgtttaaagtgggttggctctctctttttctcaccagatatattgggacttgctgcataatatgctgcaatcctcttccagaatgctactcctctttgctcattgccaacaatggcatctttacttgtattaagccacgctgatattaagactaaatcttcttgacttgtccacttgttcctctttcttggtgtggatttagctttggcgcttccaccttgagttgtagcttctgtcgcttctgtccattgggtgctgtaggcagggagatcagattcaccaagtcggatacttggtgatgctgactcacaagcattggggtttaggcttcctctttcttgttgacttgttaacatctccatgaagccagcagagttagtatatggattcatctccaagagtttcagagagtttacaaagggaattaaagaaaatgaaagatgagagaatgaaagagaatgaaagagaatgggagaataaaagaagaatccgagagaatgaaagagaatgggagagaaagagagactttatgtgttagtgtttgtttacagttgtgggtaacaatcaatgatacacttacttctaaaccctaatggaagccaaacaagcattgatcaattaaaaactgatgtagacaatctaattcaacatcaaaactgacagaaagcaaacaattaaaaactcttttaagatgcatttatcactaaattgacacaaccaaaacactcaagtctcacctaatattaactacaaaaataatcaatgttctaaatcaaattcaagatagcttctatgaagtataatcactacacaaagcatttatctgatgtagacattctaattcaatttcaggtagacaaatagcaaacaattaaagacactctaaaagcatttatcacaaactgacacaaccaacaacactcaagtctcacctaatcttaatgaagactaatcaatatgcagcagctaacaaaagctcaattatcttaacagtttctggaatattaatcatcatcacaaatgatccaacaaagtcttaatccaaacaatcatccacacatcaaaaacagagtattacctgacattcatgttgaagaacatgacacaactgcactgcttctttaaaccaagtgcttccatgaactccactgcttctttaaactgacattcatgttgaagaacctacaatattaagcatatacaatcaacttttatagtctgagaacatgcttccaattgacaatgacttaaacattacagaatatagattaatcatgcttctaattagacagcatctgattcatacacttaacaaaaaataacactatttctcaaaatccagaaacccttatttaacaaatccaaagaacactacttagaaattacttatacaacaacaacactgactcaatcatgcttccaattagccaaatattagtgttaacaacgaaaaacatattttccccaaatcccgaaaccctaatttcaaaaatctgaagaaccctaatttgaaaactcttttaatacatcacacacacactcaaacatgcttctaataaggcaaacaatagacttaacaacgaaaaaccgattatccccaaatcccaaaaccctaatttgttaatccgaagaaccctaatttgttaatacgcaaaatacatcaattcagacaccaaatgagacatgcataccttgaataatatagacctgaagcagagattccgatttcgaatcgaaaatcggagatcatgtgaacttctctccgatttctaaaccccacctcgccgaatacatcaaccgaacacaccgtcgccaccggagtcggtagagatgatgggccgacggaagaacgacggccggagtggaggaatctccgatatcaaacgatttccggaaatcatcgggatttctccgatttctccgttttcgcgagagagagagagagagagagagagagagagagagagagagagagagagagagagagagaaaacggaaaaaaaataaaaacgcgtgtggtttttttcatttaaatatttctcggcttgcccattcacaagacgccacgtggctgtctcttaacccaactttcgttccttagctaaggaacgtttgttactgataaagcagaaaattgattaaatgtaatcaatttattcctaagattttgctaagattttgctaacatactccctataatcatgcccttagactcttgtcaccattcttctcaactcctttcctttttctcatgtcaaataaaattcagattacgaattagataaaaacacaattgcccccaattcaatcaattatggtaagagtgaatctctctcaccggtacaggaactaaactttgttggtagactcaagtacttgacactaccgacataagcatagccatcgatatgtgtggtcagtgtcagctcatatatgagggcgggcggtacgacggcaagaggaccaatcccatattctaatacgtaaagggctcatttttaaaaatattttttataaaagtattaaaaaattagattacaacataaaaataaaatttataaggacctataaaatttattatttattttttagtattaataattaattttttaata

SEQ ID NO: 5232 - DNA, 5455 bp, Arabidopsis lyrata
  Intron number 1 from transcript 314223 (locus 314223) deri ved from phytozome v7.0 (chr-ID scaffold_1; pos 24050491 t o 24055945 reverse strand)
tagtcgtgggtaaaaaaacccggcccagcccgaacccgagttgagcccgtccacgaaaagcccgaactcaaaaaatccgatgggtttcgggttcttatgggtaaacccgaataaaaaccgaacgagtgtgggtaacctgtgggtacccgaatttatattatcctttttttcttctttatttggatttataaatagtagataaagaacccgcgctctgccgcgggatattttttgtaaattagctttgttttaatataattacaagtatgattggtagaagtttgaaatgattctaggattgagtgttgtatctttactcaaattttagtagtttttattttattattttattatatatgcatacattaataaatacatgttatatattacttttataaaataaatataccgtatagtcaatttttgtatttgtttttttttataatgtttataacgttttacaagatctgatttctttttatatgtatataattttcagcgactattatatttcaagaaccttactttcttttcattaacattatacatggtacacaaccataatttgaatcacacttaaaatatttaacatagacataaaattattcttttaacttttaaatcacaatgatttgttaaaataacttataatttagtttataccatagttttaatataaaagtattcttctaattatgttattggattttgtagattttttactctttttcgttaccaagagaagaaccctcaatcaaggaaacactattttactattatttataacgcatttacaccgtataaacgtagataaaaaaagtacaaatatttgtcactgttatttttttaattcttttttattagatatactcaattaatattattattttgtttatagtgtgtgactataatttacaaaaatgaaatatctataaatgattttgaaccaaatcaaaccaaaaacccgaatagacaagcttatttaaatttatatatttgtattatctagtgatttaacaatccttacaattaggaatatgaactgttcgtccaagtaagatattttataaattttgtccatgttaataaaagctgatgtgtattaattattttaatttgattgattgtactttttaaataaaatatcatgttctactaaaacaaaaagtaataaaagtgattgtatacatcttgtgattagtggtttaattaaggatatagttattaaactaaattctagtagcacaaaatcaaaattttggtgattatatcaaaacaaattatgtgtaaactgaatcagaatatgttgattgttgagttatatagtaaaaactttatattataaatgtctttaatataaatatgttatgtaaaaataactatagatataaagtttatatttagatatttgatcaattccattaaataataagcattcttttgttgatgtgtcaacataagttgatgtgtattcattttatttataatttgatttttttatattttaacaaattagaaatccatgtatcattattaaaaaataaaaaataaatatgtgtattatatattttaatttgattggtgttttttaaaaatgatgtatttttttttataaatagctgatgtggcaagttgtaaagctgatgtggcatgctgaaagctgaattgtattaatttttatgttttaattggataccatttttaatgatgtgtcagtcccacaatagcttaaaaagatgatgtgtcattgctggagaaactcttagtagttttattgtattgattgatttgtaatttatatgtatttgtattttttctttttaatttattaattataatacaaacttcctattaactttattatataacatttgaaattgtagctgaattgaatttagtaatcattatcaattaattagataaacattcaataatttttaagaattgattctaggtacttgaatttgaaattgtagctgaattcaattgcttcactttgtgttgcttctccatgagtttcatcctcttcattcattgccatatactcattctcagcatccaaagctgccatagtttctcttgattgcgaatccatcctaaaataaaggaatccagtttggttactatctttaactcagccacaaagcgagtttggtaacacgtaaacattgctagaaatttcaaacataaacgtaactacttgtaatgattgataccatgaaataattattgataaattgcagttctgtctactacgtttgcttctacaaaatacacacaaaataaatgcatcaaaggctccttaaaagcttgtctactagataatgttctcagaggaatttcgtcaaacaccttacaggcaaaaacattattctgtataaacttcaattcaagaggcttactctactacccattttataaagctactaaatttccaaaattgaatttgaaatgagaacaaataacagcgaagaaacgaggaaatcaaacaattcacggcagaaaaacaattcaaatttccagttcaagtttttataagtcagtcattattgataaattgcaaaatataaacacaccatggaacaccacaagtcacggaattacaagaaccaaatctcaaacataaaccaaacccatggaagtagtaatcacaccacaagtcacggagttacaagattagcaaacacaaatcatatgacttaagaagacgaagctttacaaaacatcaaaaaagtcaatttacccgaaaaatctccttaacttcacaaaccctcttcgagcagatccctaaatccaaagcccatcaactccaaactgaagaaagatacaaaaaaatcgtaacttaagcttgttaacgtaaaaacagagaaagagatggtaaaagaacttccgattattattacgataaatggattacaacgttcatgataaacgcggcaccacttctcacctgcaagactccgtgaaggaaatccggcaaaacgatgaggaacaacccagaaacttctagaaagttacagagaacaagttttttgcataataaaactgtgagctaacatttgctcttataatgcctaaaagtaacgacgttaacaacgacttccgtcacagagaatcttttagcctccagctcaccactccgcacgtgcctccgacttcacacgtgtgttgttgaccttctagaaagctatatcaaagctcccctcttcgaagaaccttgaccacaaggttcaaaggttggaaacttcttctgcaaatcaaagaggaactcccaagttgcttcctcctctgtttcattagtccaatgaaccaaaaccattgtagctgcccacccctgtctcttaaccattttgcgatccaagattgctactggttctttgagtaacacatcggagacaatggatggtagctgagatgatgtgtgcacttaccaactactgctttaagttgagagacgtgaaaaacagggtgaataagagaacctgttggaagcagtagcttgtaagcgaccttaccacaccgatctatcactttatatggcccataatactttggagcaagtttctgattgggacgcatgactacagaaccttgtctgtagggttggagcttgagaaaaactgaatcaccaatatcaaaactcctttctgtccgatgtagatctgcagcctgcttcatacgatgttgcgccctcaacaaatggaacttgagaataaggatcatctgctcacgctcttccaaactccgggcaaccactgctactttagattcgcctggtaagtatggaaggtgaatgggaggagcctgaccataaactgcttcaaaaggagtcatgtgagtagaggtgtgaaaattagtattgtaccagaattccgcaagagccaaccaattactccagagatgaggtctatcactgcacatgcaccttaaataagtttccaagcaacggttcactacttcagtttgcccatcgctttgagggtgataagctgtagacattttcaaatcaactccttggagagtaaatagctcagtccaaaaattgctcaagaaaaccgtatccctgtcactcactattgatcttggacacccatggagtttaaaaacattgtcaaggaatgcctgagccacagagacagccgtatacggatgtgaaagaccaatgaaatgggctactttagtcagcctgtcaaccaccaccagaataaccgatttacccgaagaaagaggaagaccgtcaatgaaatccatggagagatcagtccatatagcttcaggaatagggagaggttgtaatagaccaggataagctgaagtgtcatacttacattgttgacagacactgcagcttctgatgtagtgttgaatatccacagccatacctttccaataaaagaggctcttaactctgtgaaaagtggcatctctacccgaatgacctccagtaccagaacaatgcatccattgtaaaattttgtttctcagttgtatatcttgaggcactacaatcttactcttcctccttaaaatagattgtacccaagaataatgtttcttagctttaggatctttctctaaatcctcaatcaccttttgcaactcacagtctgtagcataatgagcttgaatgtcttttaagagatcacactctaagacaaacatagccatatgcaacacctcgctcccatctacacgggacaaagcatcagctgcgatattttctttgccttggcgatattgtatttcgtaatcgaattcaagcagcttaggtaaccattgctgttgaataggagtattcaatcgctgctccaacatatatttgaggctgcgctggtctgttttaatgataaagtgatgtggcaataagtaatgacgccatttctgcactgcaaagaccaccgcaagcagttctttctcataaatggaaagattcaattgcttccctttcaagtgacggctgatataggcaataggatggccttcttgcatcagtactgccccaataccctgagtacaagcatcagtctccacaagaaatggtttatcaaatagaggtaaggccaaaacaggtgcttcacacaaagctttctttagtaagttgaaagactccagagcttcatgagaccacataaatgcctccttctttgttaaaagtgttaaaggtcttgctatggtgccaaagtttttaacaaacctcctgtagtaacctgctaaacccaagaaacctctgagttattgttttaatgtagtaggaataggccattctgctactgcagtaaccttagtagggtctgtagatactcctcctgcttcaatataatgacccaaatactccactctagatatggcaaatgcacatttgctttccttagcatataaactatactctctcattttctgaaacacatgagccaaatgtttaatgtgttcttccattgtagggctgtaaatcaat

SEQ ID NO: 5233 - DNA, 515 bp, Arabidopsis lyrata
  Intron number 2 from transcript 492777 (locus 492777) deri ved from phytozome v7.0 (chr-ID scaffold_7; pos 9474559 to 9475073)
ttcaccagtcctcaagaactcaatctcattgttgcgtatggaactactccctcttctttttcttttctttcttccctttgttgtctatcttttgtgtgtagatgttaatttggggtttagggtttttagggaagctagttttctcatcggttggtttataatagtttactctcattgcatctgcttttgagagctgagttttgggtttgtatgatttctctgggattctctgatctggtggatggttgtttataagggaaatgtacacaatcgatttaccagttgatctatcagtgactgctctggatttgatttcatgttaaagaaggcacgctattgcttttgatgacataaagttccttcattcagtggaatttaagttttgtttgcatacagttctgtggtttctcgttttctgtttaccatctagttatgtggttcatttgctgttagttgacaacaatgttgaacccttttcaggaaatccactcgaatcgagatccatctgctttctc

SEQ ID NO: 5234 - DNA, 1896 bp, Arabidopsis lyrata
  Intron number 2 from transcript 470491 (locus 470491) deri ved from phytozome v7.0 (chr-ID scaffold_1; pos 1720384 to 1722279)
ttaggctttttcagtttggcattgaaggcaataaggtaagcacctttcttctcctctctatccccctctctgttcatcaagtctctgtttttaattgttctgccttgttctgtaattctaaaacttactaggatagttcactaggggaattatctggattggaaaatcaaatcttgcagtgtgttcctgacttagacaacgagatttggttgcatttatggagttctaagcatcagaaagagggtcccttaactaatggactttcgaaaactttggtatactatttctggaatatatcaaagttcattcaatatgaggggtttgatttgttgcctaattgttcttaaaatcctgtctcattgttgtttacttgagattactaaaactgtttgtgtgttttctttctcttgaatttgatccttcatgggcactttgttccaagccatattttattattatgagtttaccagaaaaaagaacacatctttctttaatgttttgcctctttctgtttctcttgacctccactgatttggtcccactctttgtttttctgccccttcagcaactattaccacttggtctttatagtctctatttataaaattagataatggactacgtcaaaatatttgctgagctgcttgttgcaagtgttgtcaatgatccactactcaaaagcttactttctgttgatattgttttcttggttcatgtttattgagtgtgcactttttttatacagatatgatatcttatgaaatcatacatcagcaaaagcgtttcttgattgtgtacaagtaaaccgttttttatggtaaaaacttgttcaaagcgtgttgaccgtgaaagtgtccatattagctgtaaggtttgaaatctagaaaaggttaggaattgcgtattaagtcggttaatgttttttaacacgtacctttagttcctttctttgtctatgttttagtggcccatgtgtgggcaaacgttggtaatggaataaccaaaaactttcaccatagagtcttgaacttattaccttcatgagttatgaagatattggatgtgtttcgtcccatatttttcactaataagaagccaaaccattttgctttccggaagagattggtatgaatcaaatttgagttgatctagaatctgatcatcgaaaagtggggttgaaagtaaatatgcttgctctggtatgcagtagctatcattctctccccacagaattcacctttccctgtagattctactcctaggatagttgattctttatgtggggagtcgtttagatacttactaccatagtttccttgttttgcttttacactaaagtggctttctcttcttggtgtagtgattttattggaatgattggaaattattccccattcacattgttagatctcattgactttggtttttgcttctcgactcagattctttatgcttagtgtgacaactttgatcttgataggaaaacttcatcgttgatattcttggcttgctaagctttttttcttctcatagattcgtctttcaatgggactttgtgtttattccgtgttgttgttgttgtgtgtggagataactttttgatataaaaagtaaagaatctttctctcagtacgcaaccagtaaaaggtatcacattaaacatgcttcataacttgtagactttgtcctgttaatgaacctttacatggttgtcttgtctctctcgacgttgcttgtgcatgaaccttgcttagtagattgccttatcctatcctaatctgctaaatttagtagtgtgatcgatcttttgacatatgatattataattctaaaaaatatatctttttcttcttattttcaggagccatttgtgaatattcctgaccgtaaaatccg

SEQ ID NO: 5235 - DNA, 1527 bp, Arabidopsis lyrata
  Intron number 1 from transcript 329468 (locus 329468) deri ved from phytozome v7.0 (chr-ID scaffold_7; pos 9341381 to 9342907)
ttcaaggtaatttactagttttcttttgatcttatcggtttaattgtgaaaaaatagtgttatgaaatataaaatggagtaatagtctggtccatatgattattgattaatataatgtaagttaatactttagataagtttattgtactgcaaaaaaaaagaagtttattgtaatatccccagattgagaattctgttacatatatactgttggtaaatgaacaaaataaaatatatatcgaccaacatttcatataagtcaaatataatatctagacaagtcaattttttttttgtcacggatctagacaagtctgttttgcaagtaaatcagtggagaatgaattatgagtcgatagtgtcaatatatacacgtcacatatgcgtaaaagaaattattgtaagaagagattttcttaattaaaaaaaatcaagaaaatataggataatatttaactcaataccggcttagattagagcttctcttcctctaggactgggatttatacagcaacactaatcctatttacgaatccaaacctgattcttttctaacaaaatgtaaaataacaaaaataattattttaatttattttgtcatttgcttgtctataaaatatcaaatttagataagtattctttaataaaatttaaatttgggataattctacaaatcataaatagaaaaatgaaatgaatattaatattttaataatgtataattttagttaccgacttcccatattatattagttcctatatttgtgaaccacacatagtttttgctgattcaatttcgtcgcagctatcatttcgtaatattcttaattagtaaaaatattatgaacaattaaattattctaaagcttaacgaccgatcctgttaatatattgttggcatggattctcctgtctttttccccataattttaatcaaaacatgtaattagtgttttttgaatgtatttattacaattatactctctctgttcttttataagtgatgttttaggagaatgcacatagattaagaaatcatttaatttttgtttatttctaaactaaaacatcatttattatctaatcaaccaataaaaaacaatctacagaatataaatcgtcaaaaccaataataaagtaattaattttgcattgaaaattgaaaacatcatctatttaagaacaaaattagaagtttaaaacatcacttataaaagaacggagagagtatatagtaaaacctctataaattaatttccttaatccctttacggtgtcgtttgtgttgtcccctcgttctctataagttatatatcaacgtcctttcagttttgattgatccgtgctttttcttatttctcaaagagttcataaaatggatcactcgaaaactttaaaacactaattataactaatcgctaaagacatatatatactaatcactaatgagtaatgacagtgttgataaaaatgtctcattttattttaaatttgttgcgttatggttggctatataaaataatagga

SEQ ID NO: 5236 - DNA, 634 bp, Arabidopsis lyrata
  Intron number 1 from transcript 473269 (locus 473269) deri ved from phytozome v7.0 (chr-ID scaffold_1; pos 13577862 t o 13578495)
atcgatcctggatcttcttcctcttccaccctcaagtaatttcttctttttgtaaaaattcgccactaattttgggaacttcattttcgtgtgatgttagcataatcttgtctgtgtactgattacgcttctaaattgttttgaggatgttgacattttcgttgatgatgattgtgtgtttactgatcagtagaaatgggatgcaatttggttcgtttctatgattttaggctgctaggttgtttacatttttcatttcgtagttcccttgtgaacggatagttctgctgtaggattatccaaaaatttgatgctgaaagtgacgttagcttaataagatttgcattacaattttgtatcatttaaatttgcttcaatcaccagttgtggctgaagttggtcacattcgtaaatggattgcataagtcaacaagatcattttttttttggttgctttcttactgctcctaagagaatcaacttctagtttaaagaatcatatgggcgcaggaatattctacactttaccttggcaaaaattgaaatgtttcagtcttttgtaccttttttcatcatgagtgtctcacatttgtaggtttttgacaggaacataaaagtagttgcaccaggagac

SEQ ID NO: 5237 - DNA, 2576 bp, Arabidopsis lyrata
  Intron number 1 from transcript 482863 (locus 482863) deri ved from phytozome v7.0 (chr-ID scaffold_4; pos 18716890 t o 18719465)
cttcatcatccatcactacacacatctcctcttgcaaaccaacaaaaaaccctaactaagagatcaatatggctggagtgatgaagttggcatgcttggtcttggcctgcatgattgtggccggtccaatgacagcgaacgcggctctgagttgtggcaccgttaacagcaacttggcagggtgcattggctacttgacccaaggtgcagcccttacccaagggtgttgtaatggcgttactaacctaagaaacatggctcgtacaaccccagaccgtcagcaagcttgccgttgccttcaatctgccgctagagctgttggccctggtctcaacactggccgtgcagctggacttcctagcgcatgcaaagtcaatattccttacaaaatcagcaccagcactaactgcaacacgtatgttaatctctcactcttaagtatatattataaagaatttttttgttgttaaatattggaaacttatattgacggtgttatgttaatttgtatgtgaatgcagcgtgaggtgatgagcgacagtcaaatgaagctactagcggatgtttcgaatactatataatcgatgagataataatactaaataaaatgttcgaatggctgtttttagagttttatatttcctgtttttttctatcgtggcgtttctattatgttgtcgtctgtactctgtactatgttcgcaaacaacgttatatgaatttcagtttcaatttaagttattctatactcttattaacgcttactttagtttaatcgatatgacaaaaatgattaatttgcaataccgttggggagtatcaagtataacaacattttgtatttatttgtgatatcgggaatctcaaaaccaaagtccacactaattttttgactagacataaagtcagatactaatactatagttgaaatgtacattcgaaaaaatgactttccgatccaaatgtaagttatttacattatttgttattataataaaaacaataaaatgtctaagggtctaaatggtaaccaaagaatctgactgaatccggctgaattgttgaatttggctgaatttttagtgatttttaactgaatctggctgaatttttacattttcaaatggtacctgctgaatttagctgaatttttttgtgcttttcagcagaatctgtcgaaataattaagactttaactgaaatatcatcaaataattacgaatattaatagaataactaaggaaaaatatctaaataaaataaataaaattatctaatagtctaattaactcttataccaataaataaatactagaattaatatctttttagcaaaattgagttgttcttccagatctaatttttgaactattaaaaagatataattaattaatagaaagctttgtcaaagttttattgaaaaattaatttaaaaataaacatgataatatagtatagattatcttattgattttttattgttttctagcggtttaaatccttaatatgattaggaatttaggatgattaacaattttttttagtttgatattttaaatattattctagcataagtatgagttatttttgcaaaaatttggaaaattatatttaagtatctaaaatttattaaaattatctatagatatctgaacataaatatgtctcttgtctattctggtaatgattttatgtgtatgaatgattcatatatcgtatttgtatgatctaacttattttaaaatatatatttgatgtgtaatttttaatagccataaatattttaattcgagttgtgaatcgctataatccaaatttttatctgaaatgaacatactatgtatctgttgatgttggaaaaactgttgaatctggctgaattcagctgaatttaattagttttatgcaaatggtaactgcggaattgctgaatttggctgaatctgactgaatatttttttcttgttaccatttacactctaagttttaaatcttatatcattatatccaaacaatttttcacaatttttttaatcctcttctgttcatacaatcgaacacaatttttgaaacaaattaacctttgcaatacgacatcggatagaaactaattccctatcaattgggaagtgacatataattttacaacaggaaataaagtaggagtttctccaagtttgtattttccgaataaagtattctccaagtttgcaatatttactggtgaatgataaccgtttaagaccaagcatgacaacttaactaaagttactgtcacactctacaaatacgttaatgaaatgtattttagtagaattatcacttttcatacgataaagttaaattaacatgtcaaaacaaaatcgaggagtggtcctatacatagttaggaattaggaacctcaacattaaatgagtacaacaaccaactactctccttccctctataatctatcgcattcacaccacataacaaatactttcctactctatataaacacacactcccctaactctcttcatcatccatcactcacacacatctcctcttgcaaaccaacataaaacactaacta

SEQ ID NO: 5238 - DNA, 1795 bp, Arabidopsis lyrata
  Intron number 5 from transcript 495022 (locus 495022) deri ved from phytozome v7.0 (chr-ID scaffold_8; pos 13270908 t o 13272702 reverse strand)
tgcatactcaactgtgctcattgaaatacaggcaagtagtcactattaatgtcctactgatatttttgtaagcatgttgagggttgacttaatgatagtaggagttagggagacagcaataagagagagccccaaaaaattgaattgtgtgccgtttggtcgcaaagtaaacgtcactgcatggacctacccattaaagacatataattacttttgagaggagccagagtctataaagaagcttattcaatttgaaatcatttcgatattgaaaacaatttaaacaatttaagagttcaccacaagtcaaaagtcaagactcatgtctcatgttttttcaactcttttaataaactcctatttttgtagacatcatatatttctttgaataatcgatattaattcttttgtttgcacaaaagaaaggatatgaattatatttaatcgattctaatgatttaaaatttaaccaaaaacatttttgaaatatttaagaattattttctggcataaattattatataattaaattcaagagacttatggaattcttgatgtaaccaaggatgtctggaattctcttggaactggagaagtcttaattcattattaatattatcctaaacaatgacaattcctatgttcctattaatccaagttttaaaatttttacacatattaaaaaatatattaatttgactataaatgcatcatttttaacaattttttagagccaatagtattcaattattttttgaagtttacaattcatcatcattaactgataaaaatacatagaaatttaaaaatatattatttatgtttcaaaatataggatatttacctgtttcaatgcaaattttaattatttgatatttttgactatttatattatgcagttttttgtaattggttgatttttttaaaataaaatattaatgatagttttaaagagaaaaattaataaccctctattatatatatactagataaggcccgcctaaataggcgggtgtaatatataaatatatatttttatcgatgatatttgaattttgaataataaatagtaactcatacacttttcctaatatttattgatttagtatttttttttgttttaaacaaaaattaaatcttacaccttccattttgctatacattttaactatttatttcatcttaataaactgaattttaattctacacactattttgtattggtgatatttaaatcctaaatagtaaccgacacactttttatatatttaacttagtatttttttaaaaagaaaattcagtcttacatatttcattttgcaatataaattaactatctatagcatcataataaacttgattttaagtcttcatagttcatcttaatggataaactgctaataataattttatatcaaaatcgtatgtatatcatatcaaatctatatcttagttaatattaaatataattaacaaataacaaaaaatttaattaaaaatagaaatccacaaaaattatggaaaacatgacattgtttaaaatatattttttctatataacgtaatctcataagttagttttacctcatggcaaactaattttaaatgagttataattaataattaaatcattaaaaatatatattaacattctcattaagtaatcgaaaattcaatcatataagccatttttccaaatattttgtgtttataattatgactatatgcgttaaaatttttaaaataaactataactatagccacactaatattcttatcaaatattcaaatattc

SEQ ID NO: 5239 - DNA, 18787 bp, Arabidopsis lyrata
  Intron number 11 from transcript 487688 (locus 487688) der ived from phytozome v7.0 (chr-ID scaffold_6; pos 3351077 t o 3369863)
ctgcatcgcctttctgtcttccgaggtgaatacaaatccatcttcgcctttttgtcatcaaaacttcttatacggaatttttttatatgtgtttatgttattgtttagcctgtaatggagccagtgtgatggccctcattcttatgaactaacacaaagcaaacttcgcaggaggttgatggtaaggactcggatctcaaggatgagggccctgtggaatgggtatcctactggaaaccaaatgtcacaattaacctagtcgacgactttactcggtaagttagttagtactgataactgatagatgaataatggatttattatggttcactcttaacatttaatttcgtaagacgtttgctaattgttttcgatttccgtacagctatccacagcatggtgtaccaccaaacattgatccttgtatccttttattttatgatcttcctatgattatctgagtttttgacaactctctatacacatctttctctaacaatcaaagtcactagcatgtgtatatcatcttctatgccaattttacattagttggattaaacttgtttgaaaattcaaaattctcaagggccaaacgtgagtttctgggttcttggaagtagtgccacatctccttacttcatatttgtgcataaatgcacagagaacctatgcttcctaattctttttgcttttctgttaatctttggaatgggaatatatgatgatttcactttgccatgctaaaggtgtgatggtccatctctgctctttcctttacttaactttattggcagacttactggtggaacctagtacagtaaactactaccctacagttttcttcaatgagttttggctgctaagggacaagttgattttaatcaatgagacggtctcagagctgccacttaatctggaagtaagccccataagcatgaaaaagtggcagctgtttcagcagattgatcagtctttccagattcaccgtagctatggaagcatgcttgatggtgaatctgacgaactaaaggtaattctggtcctttatgcccagttagcttcattgtcatattatatactaggatgtgcatctaacgactcaaactagggatccctaacgtagtatagagatgtgattaattgctttctgtaaatcgaagctgcggtgatcatgtttttgatggtgtataatttacttgcagagggtgtttttggaaggaaatccctatctgttgggcgtcacaatgtttgtttcgatgcttcattctgtatttgacttccttgcattcaaaaatggtaaagaccagaaagaacatctactttcctaaaatgcctcttgaaattagctatttagttacccgtgacattccctgcagatatccagttttagaacaagaacaaatctatggaaggactgtctgcgaagtctgtcgtactgaactttatctgtcagtttatcatcttcctctacctgcttgacaacgacacttcgtggatgatactggctagctctggagttggtgtctgcatcgagttctggaaaatagggaaagccatgcggattgaggtaccatctgatatgacacaatctgatcactgagtcaagtatttttgtgcatgtgtaacatcattcaaaaatcagtgatatgttcatctgatgtttcttgctttgcatttaatccgtggcaaacatttaaacttcccaggttgatcgaagtgggatgattccaagattgaggttccacgaccgtgaatcctatgcaagcaacaagaccaaggagtatgacgacatcgccattaaattcttatcctatgtgctcctcctccttgttgtgggtttctccatatattcacttgcctatgaacgccacaagagctggtactcatggatcctatcttcactaacgagctgcgtctacatgtttggtaaaaatccttcaaaagtatcttaggccagctcaaaactctcttgtggttgactcaattgagtcgaaatcaatgtgttttgtgtttccacaggtttcataatgatgtgtcctcaattgttcatcaactataagctgaagtcagtagcacatttaccatggaggcaaatgacatataagttcctcaacacaatcatcgacgatctctttgcttttgtcatcaaaatgccaatgctgcatcgcctttctgtcttccgagatggtgaatacaaatccatcttccctgagtttattgatgcatgtctgtaggatagttttggaattcacaaaaattgatgatgatctaattttggtgttgttgttgttgcagatgtgatattcttaatatacttgtaccagagatgggtttatcctgtggacaaaagacgtgtcaacgagtttggttttggaggtggggatgagtctgtggatacaaagaagatctctgaccaaaaagatgacaagaaaacaaactaattagctttgtgcttttgttctttcaaacaatttttgagttgtttttggttctgctttaggaagttttgctaatgcggctatttgtatccaaatggaatttcgttttagggtaattttaaaaaatgtgttaaaaagaatatcacttggttatacttttgttttgtttatataacttactattagatctcagtgttttcctagacactctttttctggtaccagatttagagggttctaggagagtaatatatttgatgtaagttgatgatttgctagatttaccaaatttcatactaatctctatactttccattactcaccaacggatcatcgaattggcaatattttggagaagtcgaatctccatgtccttgtgatctctcctgactcctctcttcaactctcaaaagcgtgataagcagaaaacaaagaggccacatcaattaccaagtgcactgttacgcggtcataaaacactagtaacagccttctcttatgatcttgttgttgatcccaaaactgctaggataatccacctcaacatacaaaataatggaatagtcatcgaatacaagtttttcatatcacagacttcacaaaatatgaaaaacaggtttgaacaacatttatgatgtttttttttccctaactgatgatcaatcatccttcaaatttgtttttaaaactagttggtaattaaaaaaaaaagaagattatttctaggctaaaaaggtagaagaaaactacactgcttcgaaaacttaaaaaacattatcttcaaaaaaatatgatattaaattgttgttatgaaaataatttcaatcacataaataagagattttactcttttcaaatcaaagaatgttcatcacttcatatgctttaaagtcatgaatcacattagtcattaagctactaggcctacatgagggaggctttcttagaccatcattaacagtgagttcttaactttagctcttaacattgtttaagattaaaattttggtttttgtaagttaagagtcaaatcttaccttcttaacactcccaaaagctcttagctaagagtcaaatcttagcattttaatatgtattgatttatttttcaaagtttaattctaagataataagctaagaaccatctaagataccaccaataattagccctgagacggatccggatatccggcatttttgggcatttttgagatatccggatccggatccagtgcgggcggatctctaatttttttatccggatccggttataccggatttccgaccgtcggatacccgcttgaaaaattaaaatccagcggatatccggatccggatccttacgttattaaaacaattaaactgattgggccaactaatgggcaactcaactgtgttgtaagcccaattcagttaaaaattctgtaggttttagtggctatttataacacttgcagaggacaaaatgagtttacgtaaccgatgtcaaaaagcaaagagaaaatactaaagtcccacatcgagaagctatgaaaagtagcattcccccacgctgttatatatatgagtttgtaagccttcgttattttctgtcatactccctctgtttcataaagagtgtcgttttaaggttttatttttgtttcacaaagagtgtcgttttaggttttcaatgcaaaatttaatgttttttttatgttttatgactattagtattctgcagattgtattactattgggcagattatgtttaggtatatagttaatgatgtttttgtttagaaaaaataaaaaatttaatgttttcttaatctgtgtgcaaaactctaaaatgacactcttcgttattttccttcatatttgttttcagatattaaattatggaatgaaaataaatatatttaaatgatatttctatgtaacggatatttatccggatcacaaagatattgatatccggatctgttttaagcggatccatgattttattatccggatctgcttggtccggatatcctattttccggagcggatcccgaatcggatctcggataatagtgccagccctaccaataatggtgctcttcgacggctacgaacttcaaacggaaatcgatatgggaccatgtgtttgaaggaaatcctcaaattactatattgcattctacaaaacacctatattaacgaaaatgccactcacttacccctttgcattatttttttgacaaacaaagaaaaagataattgcattaaatcacttaatctttttcacactcctaattcgagtattggtggcctatgtctatgtgacaataaattctggtaatcttcaagaagaatgtcccctctttccttttttttgtagtatagtataacagtattttcctgactctgcctttaataatcttagatagtgtttttgttatttattttcatttttggttcaataaatctaaaactgaaattcataattatcttagacatttaaaacagttttttttttttttttttgacactcatattcctaaatattgatcatcaatcttccagtttttaactaaaataagaaaacgttttttaatttatccttccaaacaataaaacttacttatcttttggagtataattttagttaatatgtcaatttggcaattcacctgtctcatttacataactaattattgccccatttgtggaacacaatgggcagttccgtaatatcccaccatacgagaaatttgtccgccaaaaagatcaattatatgttttgtaaaaaagtcaaatatctctctctctctctactctactctactcgtgactgagcaagagaaaacagagagcataagaaaccaattcagccgatttgttttttctattttctaatcatttactcctacaaaagaagacatgttcatacctttatagtgttatctaaactcttttggggtcttgcataagaaaccagttttcaaggttcatgcctggccgaatccgatgtagtagtagtcatcaccacagatgttctcaagaactgtcttcatctcttcaaatgtttcgtatgcaggcaaatggagaatgtaaaaacatgtgttagatgaaggatattcggagtcagcagctttcaaaatcttaaatttctttggtaatcctctaaatcctccatgtggtaaaaattctatggatgcccaaaatcttagtaaattccgctggcttggttctgtcattccctccactatattccagaaccaaccaatttctctatccgtagcttcgaatcccgagtcataggtggtatgagccttccactcttccattatgattccggttacatccccaccaaacataagatcaaaatcctctggcaacaagcttcggaagaatgatgtatgaggtgtagaaccaagaagcatatcactgaatccttttgcaaaaaaagatacttgttcggagatgctcttcacaaacttatgcctgacatatagatccgtatattcatttacgttctcccttgtaaccactattgaattaccagcttgacagagctcctctgagaagacattatcccctctcttgacgtcgatttcgaaagtcaaaccatctccaattttagtcggatcttctaacatgtcattaagactcttgtacaagattggttctgtctccttgatatcctccaaaccaatttccattccagctagctgtaaaaagaagatacgatcaaagaatacattcagctggatctcatgcatcaatgccacacccatcacacgaccggcaaattcgaacatggtattcaccatgaatcctgcatagataagggtagacttaggcacgagatactccaaaacccacagcttctaatagcacaatgcatacctggatttggggaaaatcttctagcatgttcagtatatggaacatagaatggaggaggaggtttaacatcacatctgaatatctcttcggacaaaagtagtaaaaattctcgagtaacaccgtcacctatgcctggctcaaggtcaaactctacagaaatcccatgttggagtgactccgggcttgcagccattatttgcaaggatgattccactaatagattggaccgaggtatcttgatatccttcctcatcaggccatgacccaaaataggcaacattagcattgccaaatgtctcctagcttcaaagttagttaagtcctttaactcatttaaccattggtgatcatcacctctatttgcaaatctcgtaataagggtgcataatgcagccttcctagactttagaacactcatgagttcatctttagcaaattcccggatgctgctcgatagggcattaatagcttttagagaaaagagatactcggggcaaaacgctgattcatcctcattcaaagatgatccgatagctatcacgagttccttaaagattgcatcgtaactcatatctgcagcaatgttagagtgaagaacaaacgctatctccataagaaatgatatggtagcccttttaacgaacaaccgcatgccctcgcaagggaaggtgtctacccaatctaacatggaagtgaagacagtccaacaagaccaatgaagtttcttatcagggcggactttcttaagcattctacacagttcatatatcattggtataatctgcttgtgtgcagtacaaggcagatctctgcactttgttaagaacttgcgaatggagtgtttggcaaatacttcatcattttcaatgggggaagaatatagcataacaagagcagagggaactgaagatgctgagaaattttgcagatattcaactgctgcatcttcactgtgccaaggtatcacgtcaaagaacatatcgagcttttcactgatttcagaatggccaatttggcctctgtacacattgaccactgtctcaaagaatgaatcaacggcgggccagtttgagtactgggtaccaaccagatagaccagtgcgttctgttcaatggagtaatccccgagacattggtcggtctgtagctgtctaccaccatatactaatcggtgctccgtcactggaatctcctttttagtcgtgattctattgacggtattattcacactatcgtctataaatgcttcgacccggagaatatctccatttggtataatcctaacgaagaactccactctggcggaatcagaagaaccttccagaggcaactcccatgatgatggcatcttctagttgaagaaattgaaacccaaagtctacctagaagaaactgaaaaccgaaggtccgcttcttgctctcgtcggaagtcgcccgttggtctactcaagaaatgcgaagccgtggaagaaaccctatgagaaattgaatcatgaagaaaaaggggaacgcttgaaaagttattgactgggttgacccggatccagatgaagatcgggcggagcacctgaagtctggagcattcgatttcggattccggttcgtttttatctcatgtttggttatagcggttatctaatcctcgtttagttttgcaaacaataatgtactacgtattcgattaattcataagcatagtttaaatgctacattctattaccggccctcttttaaaaatctcgtatatgttgtcaagaaattaattcggaacaatataaattcgatttacaaaacctaaaccgattaggaaaccaaacaaaaccggttatcgttcttctaaacgaccatctcctgttaattgtgcactataacaccgacaggaatttcaaacaagataatactcaatatttttgaaaagaattgcttactaactagagtttttgaaaatatcaaccgtatcaaataacgaaatgtacaaatattaataagaacattaataagaattgcttacaaatattagtagtcaactagtcatacatataatagacaaaaaaggaaaaatatcaccttttctttgaactgacaaaaagaacaccaacaacaaaaatcacttaaaaaataatttactgtgatatttgaaaaaggaaaaattatcatattatatcagaatatttttgtattaaagtaaaaaaaaaaaaaaaaaaaaaacaccattgggatgttgatccacatttaacttaactttgttttagatattttagtttcggatctaaaatataaaagtaacctgaatgcatttaaagttcagattggtatgttttaaagtttgatgtatcaggataagcatatattctggttctgttaaaccaaactctcaattatcttatttccggtttagttactctattccagtaaaccaagtctaagtgtgtttagatcgagtatatgtaggcctttggccatctttgagaaacttaatcaatcaaaaacacaaattatcttcttcaatctcctttatttctttcgatcatcatcatcttccatttacaccaaatcttagatcttcgaggtgatccttcaccttctgggctttgatttgcccttatctcgtgctctcggtgagtgctgattcgggatttatcataccgttacatttgaatttagaactgaaccaaatataaatagttttaacatttaaattcaggaatcaactttaaatttagtttagtctgtttgaacaggtagattagatttaccaagaaagtaatgcgatgggcctaatgtggtattttggcagtaaatcaattacagaaatcattagtaattcgattttgtaaaaattgagaaatgttacattgccccaaaaaaatgaatttttttttttttttttttggaattttgaatagagatgaagagctaagtaaataatgaaaggaaaaatcattgtcagctacacgaactatacgccaacacatcaccacacatgcagactattttaatgtttcgctaactacacgaactattggtattacatacggacatccccgaactatcatcggttatgtgtgcaacatcataaccatcatttccaaataatataaatgtcttgttaactacacgaaatatttctttttttgtcaactacacgaagtattttcatcaattttttttttaaactaataagttaaataaaactatataatatatcaatgtaaattatatatgtacattataactagtctaactttaaaattttaatgtaataaagactaaactagttccataaaaaatatatgtgttcattaaaaatttgttaattaacttaaacctataatgaacatgtataatttaattaagtgacacttttaaaaatttagttaaattaatttcatataaaacatatgtgtgcattaaaaattagttaattaatttaacttaaaattataagggatactgcatatgtagaatttaaactttaaaagttataatgcatatatataattaacaatagtgtattatttacttttagttattttttcattttgtaatttagtttttaaaaaatgatgaaaatatttcgtgtagttaacaatacatttatattatctggaaatgatggttatggtatatataatttacattgatatattatatagttttatttaacttatagtgatgtataatttaactaagtgactattttaaattttcaacaatttaatataataaatattaaattagttaaattaatttaacttaaaagtaaaatgcattaaaagttataatatatatatatatatataatttataatagtgtaatatttactttttagttattttttattttttaattactttttttaaaaaaaaaatttgatggaaaaatacttagtgtagttaacaagacatttatattatctgaaaatgatggttatggtgttgcacacataaccgatgattgttcggggatgtccgtatgtaataccaatagttcgtgtagttagcgagacattaaaatagtctgcatgtgtggtgttggcgtataattcgtataggtcacgatgatttttccataataaaacagcttcctttctttcattcatatctctctcctctcttcttcgccattagaggagagaaaacacactctgaaatataagttaactcatccaacaaatccattttttatcttcttcgtaaaggcaacaacgacgtttactgcaagatactcttcttcattctgcattctttcttttccaatcaatttcatcccctaaacttggtttctgagctgagattggctttctgggttttgctggtatgctatagtttcttcacctcttctctaattgggttgttccccatttgttattactgatctttgcgagatttcagattgaaattgctgttgagatctcaaggtgcctttgcactagctggaatttttcgaggtttttgtctgttcgtgagtagaagaatttggatggtcgccgatgtaagggtttcgtttccgccatgaacaccaagcgcgcctacaagctccgtatcctttttgttgtttatatacaccaattttctctgatttcttctttagggtttgtttgtgaaaatcattgattgactccagtgtcatgcttgatctgctccttttagctcgagatctgtatgcacttcttagctttgtgttttgcgctttgtgaagtaatttatgacttttcggtatctgtgcgcctccaaattttaagactttttagtcaatttcttctttgactagagtctcatctcagagtattgtttagccttgacttgtgtgattcaaaaagaggaatttgtggcacattctgctgctgttaattgtcttaagattgggaggaagtcctcaagggttctcgtaacaggcggggaagatcacaaggtcaatctgtgggctattggtaaccccaacgccatcctggttagttctcacctgtccctccatttattctattgtggaatgcctctggtaggatatgagctagttttaggggaactgcgacacacttttaggtatattgtagtcgagcgggatggatgattttctgtctgagtgtctacttgtggggttttatggtcagagtttgtatgggcactcgagtggggttgattcagtaacgtttgatgcttcggaaggcttactagcagcaggggctgctagtggtacaattaaactttgggatctggaggaggcaaagggtaagtttaatagttctatgattatctaaatacttttctcattttctgttagtcagctacacccggctcttatttttacccttttggtgagtgttttgcttctggttctctagacaccaatctcaagatatgggatataagaaagaagggctgcatccatacttacaagggtcacactcgaggggtcaatgtactcagattcactccagatggtcgttggactgtatctggaggaaaagattatgttgtcaaggtttgtagctgcctttttttttttcctttctcagtatgtattggggaggaaaactggggagtcaacttaatagaattcaattcattgaacctaagccctaatttttccctttgcaggatttcatcaaaaacctcctctcttctgcatcagagaaaagtatggcttcggattcaactgctgccattgagaaaattaagcagattgttgtcatcaacccgagattacatccacgattgcctttaaggtttgatgctgtcgcattagctctacacaatagttaatagatttagcttatatcccctgcgtttatgtcacagtaagttggaatatgctgtgtcgcaagcaattgagaccgttgttcctgagtttgtcaagatgtccgtaaggcatgcactccagaaaaccaaagctcatgttttgatggttagtctatctcacttgatgttttggtttctgctactatctagtctattgtgcatctggtaactcacatgggttttcttttcctccattttttttaggcttatcccttaggaacggatgaccttctgagaaataatgcagcacatatgatggccacttctttagctcaaagatatgccaatgatttttgctatgtatgtctggccttaatttaaccatgtactaagtttatggtaaaaatatcttgtctttggattaaccgacctaaattatgtctgtctcttttaaggaacctttacgtggatggatgtttagctttctccatggttcatttcagcagccaggcattccatatgaaactcggtgcagaattgtggactctatcatcagtgacaaccttgaatctatttgcggcggcatccaagaaattgccagaacagaggtttgtttcggtttctaagtcctatttggattttgggtgttgcgacatattatatatgtgatatggcaggtagtgcgtgatattgaagctcatgttaggtcatggattcattcaaacattgctgaggagaagatcatggccataaaggataatttcaaggcaaacatttctgtgagtgagatgaaggttctactcgattcgcattttgggtttgtgggagacaaatatgaagctttgttggaggctattttcagtggggtggagaaaggctttgcaaaggttcttgaggagaagaagagctatttacgttccgtcatggaaccgatgtccgaaggttttcttcttcaagctatagagaattatttcaagaaaagaagctcggtttcattcgaggaagaactgccaatggtgtttgagtgtcttgttaatgatcttagtcttgtggagcgtgatgatttaaactcgcacattaaaaacttgaagtatgaaactgaagccactacttcaatttggcaatctgtgaagaatctgcttgagagaagacgtcagggtgttactgttcaaggtagattcacatggattggttgaccatggccagaattagtctaaacttgaatctgaatacattgaatatttattttgcttctgttttctttctaaatgtggttccatgtattcaaaaagatttcgttttcttgcattaagcagtcaatcttttattttgcgttccgcccaaaacaccacactttcaatttcattttcgcagcttctgcttcgttttcgtcggctagacctttacggttgcttcattctcagttttttgatccgggtttgagtccgattcgttctgctgcactgctctaatcactgcctatgcgaagctagggagcatcgtgttgtgcgcgcagagtgttcgacaaaatgtctaactgagatgtacccgtgtggaatgcaatgatcacgggttaccaaagacgaggtgatatgaaggcggcgatggagttgtttgactcaatgccttgtaagaacgtaacctcgtggaccaccgtcatttctgggttttctcagaacgggaattactctgaagctttaacgatgtttttgtgtatggagaaagacaaatccgtgaaaccaaaccatattactctagttagtgttctccccgcttgtgcgaatctaggggaattggagattggccgaagattagtagaaggctatgctagagagaacgggttctttgataacatttacgtgcgtaatgctacaatagagatgtactcaaagtgtggaatggttgatgtagcgaaatgaaattgggaaccagagaaatttgtgctcatggaactccatcatcactggttttcaaacttttgatgagattttatgactagaaagaaaaaaagaaatcgtggatattaattaccatacaaaaccggggataactaattatcaaagttccggtatacacttatctaaacccatatgtttccctacccggtctaaaatatgtacgggtcgggctatggacttcctattttattcgttgggcccaaggcccttactatcgatagatacttatagtttttttttttttgtgtgttggacggagcaactgcatcgtcgcccctgtccgatttcttctcctcccatggcgatttggagtttcgagtaagctttctttgtgattttggcctttaatttcttctatagatgaaatctatttgagatttgatccgggtttttttcagtttgcctagtttaaccgatggagatgtttttaatattcccggagaaacacctaggatgataacagatatggtaatttaattcgttggtttctttctgtgcttagtgtatatactctctctagtctcatatatgaatctgacagttgcttccgggctttggagacgataccgatatggaatctgtgaacaatttgaccacaagtgcggagggtgttttagccgtagcttctaccacttattccttgaaagtactggtcgacttcttgacatcccccgaggtggatatacctgtaagagctatggacttaggaactatcaccccagtggagatcaggaaggcctttaaaatcagtgatgggaaacggcagttttccactatcttggcgtttggagtggacgtgacacatgaggcgtctcgtctggcagcacgattgcaagtcaaagtaatccgtggcagtgtgcttgaaaccctgtgccaacaattcaaagagcatatcagacggctgggagaggagactgaaatggatgatgaagcaatcttcccatgcgtcctccgcatcttacccaactgtgtgtttaacaaggacgacccagttgtcctcggagttgtagttgttcatggttacattaaggttccctaccgtattatctattaactattcaaacatgcatctgttgaacagctcatttcttttttggtttcaggtcggatatcccatttgcaatctgcgaagtggttgcctggaaataggacgtattgcatggattgaaaaggaccaccgatccgtcaacgctgctaggttaggcgacacggtgatgatcaaggtaggtttgagattatctcaaaacaataatactatagctagctttatcttagtattatataattggctttcgtttgctattacacagattgtcgcatcaaacccagaagaacgaggacttagctttggaagccattttgacattagtgatgatatccttgtcagtcacgtttctaggaaatctattaatgtgctcaaatctcgttacagggtaggtctagctagatctcccaccttgataacaaaatacctctttttaatccttgtatcccaattgctaactgaaattaatttaatttctgcaggaccgagtatccaggagggacgcggtcgtcttgtgttacctcaagtgcgttttcagtatcgaataatccatggggtcaagttacctgctttgtgcaagtctatctatctgatgttataaattactaggttatgagctcagtttcaacaaaaatattaaacatctaatgttgttcgtttatctctgtttccatgcttttggcctctgtttcaaagacttgttgttcatatatatcatcaacttcttttctaaccgaagaaagaagagaacaaaatatcatactggaaaccaaatgtcacaattaacaggaggttgatggtaaggactctgtggaatgggtatcaaactggaaaccaaatgtcacaattaacctagtcactcggtacgttagttagtactggtaattggtaccggtatggcatgcttgcttttcttttggtttcactcttaacaatgaatttcataagaagtttgctgattgttttcgagttccatacagctatccacagcatggtgtaccaccaaacattgctccttgtatccgtttatttctaaggatgatgtgcctattataatttgagtttttgacaattctctatgcacatctttctctaacaattgaagccactggcatgtgtgtcatcttccatgccatttttaacattagttggtttaaactagtttgaaagttcaaaattctcaaggactaaaacgtgagtttctgtgttcttggaagtggtgccacatctctttacatcatatttttgtataagatgcacaatatgcttcttctttttattttcttgctttgctgttaatcgttggattggtgattggtgaatatacgaggacttcacttgtatccgctaaacaggatgaatcttttcactatttcagccgttgcaacttacttgccaaagcgaaaagcagataagaagaagagtttgttgggaaatcccaaagactctgatgaatccaaagttgaagttgaggtatgtctctacagaaacttctgatacggaatttttttatatgtgtttatgttaatgtttagcctgtgatggcactcattctcatgaactaaccacaaagcaaacttcgcaggaggttgatggtaaggactcggatctcaaggatgagggccatgtggaatgggtatcctactggaaaccaaatgtcacaaataacctagtcgatgactttactcggtaagttagttagtactgataattgatagatgaataatggatttatggcatccttgcttttcttttgggttcactcttaacattgaatttcgtaagacgtttggtaattgttttcgatttccgtacagctatccacagcatggtgtaccaccaaacattgatccttgtatccttttatttgatgatcttcctatgattatttgagtttttgacaactctctatacacatctttctctaataatcaaaggcactagcatgtatatcatcttccatgccaattttacattggttggattaaacttgtttgaaaattcaaaattctcaaggaccaaacgtgagtttctgggttcttggaagtagtgccacatctccttacttcgtatatgtgcataaatgcacaaagaacctataattcctttttctttttgcttttctgttaatctttggaatgggaatctatgatgatttcactttgccatgctaaaggtgtgatggtccatatctatctgctctttcctttacttaactttactggcagacttactggtggaacctagtatagtaaactactaccctacagtttttttcaatgagttttggctgctaagggacaagttgattttaatcaatgagacggtctcagagctgccacttaatctggaagtaagccccataagcatgacaaagtggcagctgtttcagcagattgatcagtctttccagattcaccgtagctatggaagcatgcttgatggtgaatctgacgaactaaaggtaattctggtcctttatggccagttagcttcattgtcatattatatactaggatgtgcatctaacgactcttaactaggaatcccgaacgtagtatagagatgtgattaattgttttctgttaatcgacgctgcggtgatcatgtttctgatggtgtataatttacttgcagagggtgtttttggaaggaaatccctatctgttgggcgtcacaatgttgtttcgatgcttcattctgtatttgacttccttgcattcaaaaatggtaaagacctcaacgaacatctactttcctaaaatgcctcttgaaattagctattgaattacccgtgacattccctgcagatatccagttttggaacaagaacaaatctatggaaggactgtctgcgaagtctgtcgtactgaattttatctgtcagtttatcatcttcctctacctgcttgacaacgacacttcgtggatgatactggctagctctggagttggtgtctgcatcgagttctggaaaatagggaaagccatgcggattgaggtaccatctgatatgacacaatctgatcactgagtcaagtatttttgtgcatgtgtaacatcattcaaaaatcagtgacatgttcatctggtgttttttgctttgcatttaatccgtggcaaacatttaaacttcccaggttgatcgagtgggatgattccaagattgaggttccacgaccgtgaatcctatgcaatcaacaagaccaaggagtatgacgacatcgccattaaattcttatcctatgcgctcctcctccttgttgtgggtttctccatatattcacttgcctatgaacgccacaagagctggtactcatggatcctatcttcactaacgagctgcgtctacatgtttggtaaaaatccttcaaaagtatcttagaccagctcaaaactctcttgtggttgattcaattgagtcgaaatcaatgtgttttgtgtttccacaggtttcataatgatgtgtcctcaattgttcatcaactataagctgaagtcagtagcacatttaccatggaggcaaatgacatataagttcctcaacacaatcatcgacgatctctttgcttttgtcatcaaaatgccaatgctgcatcgcctttctgtcttccgagatggtgaatacaaatccatcttccctgagtttattgatacatgtctgtaggatagttttggaattcacaaaaattgatgatgatctaattttggtgttgttgttgttgcag

SEQ ID NO: 5240 - DNA, 8556 bp, Arabidopsis lyrata
  Intron number 4 from transcript 887940 (locus 887940) deri ved from phytozome v7.0 (chr-ID scaffold_265; pos 1601 to 10156)
gacccatcaaagatattttgtcagaacaaaatctgtaaatgcaagagctactaagttttgaattagttcacgatgtaactctgaatttctcaaaaactctttcgattaatagaaaatatgtttacaaggtttctcctttaacactattttctattctcactaagtcttgttctttaatcacagaccgattaagaacaataactctccttaaaacccttagctctctttaagcctctagttctctatttctctcaaactaagacttaatagctaggaattctctctagtgattgtgctaagctttctgcaagccttagcactcctacttatactaaataggttgagaccatacaacaggtcgatttccaattctaaaactaattggaatggacaatttcctttttctttatggaataggaaattgtcctttgtcttcatgttttccttttcttcttgtaaaaggaaactcttcagtcttctagaatcttctctaagcttctagtcttcacttcaaaccgccaaaacaagattctgcatatttccttaatcttgttcatgttgctctgttctctagagttacttcttgtcttagttcaggtactccttcagaggctgcatcttcaatctccccctttttaatcttgtgtctctcaagcacctgtatttgaaatcttcttacttttgtagacatttttcatcacaagcaatcacagactttaaccaatcgaagttattaaaaattttagcaatttcgtccaacaaagactaactccccctgaaatgacaaagtctgaaaacaagtaacaaagtctggagttcaaacaaaaagaacaaataactactcccccacaacacatgaacttccccagaatcacagccatactcctttctccccctgcttgagagctcaaggttaaaaaccaaacttcctacagtcttttggacaaaggatgactgagaacaagttgttgaatcactccattcatcttggaaatagcctgagctgtgtctaacaaagccataaacattccctctctatcatcctcatcagggtgtggcaggcggatgcttccaatgtccacaacagtatatccttgatactctggattaaactgtgaagaaggatatacattttgaggagctgttcttgaagtatttggctgagtgctagcttttgctttgcccttcattctttcagtgtaagcttgaccagttctgacatcctttttgtagaacttaggagtcacaaacttttctccagaatagattgtcacttctttttgacttatgagcatcccatatatgattcggggaaacaccaaccatctttcatccttgttctgaacaagtgacatcacttgattaaagatcatcttaccaatatcaattctgattccatgaaagatcttgtagatgagctgagctctctcaactgaaacataatctggattagaagaaggaatccaattctgagcagtgattcgtagaagagctccaattcgaggagaaaaattcttgaatactaaatcatcccaaccagtcttctcatcttcacttagcagttctgcaagttgttcttttccaatcgaatcagcatcactatctgccttaagttcctctttggttaaaactttaaaaccaagatatttattgattttctttggtgaaaactcatagacatgccctctgacaaacacactgaccttctcagcattttcttcagacttttcacaaggaagatttgcataaaattcagacactacttcccgcacataacttccaagatttgttactgtagattccaatctcgcattcttgatcaaggttaagtaaccccaggaatcctctttttctaaatcaatcaggcgttcctcaatcaagtttctatttttaaacaaatcataccttgcttgagcttgagaagatgagaatagcttagatcgaaagtttttcttggattgatttttctctgaagcagaagccttgaaggatttgttcttcttggaacttggttcagcaatcttctgtttcttctttggaggagctagacctagctgtttgaatactcttttcttacgagcttccttctccttttgattcttctggaattgttcttcaacagtcaactcggttggttcaatctcaatatcagaagtatgaattgctttgtcccttactactctttcagcattttcttcctctttgtcagacaattctggatctgcatgtggaaaaactcgattttcctcttctaaaatcacagtatcctcagttgattttgatttctcagccgaaatttggtcagatccgataatgtcttcatcgatttgagacactcgtcgacttgattccttgatttcaccacggagatcctcagatttttcaacttcttcttctggcacagtgtctgttgacacatcctctgtaggtttgactctatcgatttgttcagaaagtacctcagtttctccatcaagcttctttgattcttcctcaggttttctgatttcctcagactcgttgcttttattttcttcattagctgttgcaaatgagtcatcttcatcaccataaggaacaagagaaagaggcgctgcaatagattcgtcaatcagttgcggattagcttcaactccatcagaacgatcttctgccgttgttcttcttccaccgattggacctctgcgagtggctttcaccattgttgcggtttgagagttttttttttcaaggattttcttgcttcttcttatcttagggttttcggaaatttttcgtttctcttgttttgttccccgagaatctcttcaccaagatttgagaaaatcttgttatgattgcatatcctcttttttttaaaattcaaaaactcgatttttgccaaaaacaaaccggcataaaccattcttggagcttctaatgtgataaaccgaacctgaaatattgaattgaaccgaatcttcataccatatcagctctcatgatctttgactgagtcagatcatagttcacatactccaagtgaatttcttaatgtgacgaacctgttgaagtccaatgcctttgtaaaaatatctgctagctgaatctctgtcccaacatgatcaatctgaaccttcttttcttcaaccaattctcgaataaagtgatgtctcacatcaatatgtttagttcttgaatgttgaaccggatttttagagatatctatagcactctgattatcacagtagacttgaagaactccagcgtcgattccataatctgctaacatttgcttcatccaaagtaactgagtgcaacaacttcccatggcaatatactcagattctgcggtggatattgacacagagttttgcttcttactcaaccacgcaattagattgtttccaagaaagaaacatcctccacttgtactctttctgtcattcacatttcctgcataatcagcatcacagtaaccaaccagattttgatttgagtttcttgaataccaaataccaagatctgcagttcctttgacgtacttcaggattctcttcacagcttcaagatgagactgtttaggctttgcttgatatctagcacaaactccaacactcagacataaatcaggcctactagcagttagatataagagacttccaatcattcctctgtaagttttgacgtctacatctgttccattttcatctcttgataatttcaatgaggtactcataggagttttagcttctttgcatttatccatttgaaacttcttcaagatcttcttagcataagtactctgtgagatgtagattccttcatccgattgaactatctgcaatcccaagaaatacttcaattcacctaccaaactcatttcaaactcttttgtcatgttttctataaactgatccaccaacttctgagaagtactcccgaaaataatatcatcaacataaatctgcaccatcatgatctctttgttttcttcaagaataaacaaagttttatcaacacttcctctgttgtagcctttctcaagcagaaagttagtcagcctttcataccatgctctaggtgcttgtttgagtccatatagagccttctttagcttgaaaacatactcaggtttcatcatatcttcaaatcctttaggttgctcaacatatacttcttcttgtagtataccatttagaaaagcacttttaacatccatttgatgaaccgtgaagttaagaatacaagccattcccaagaaaagtctgattgattcaagtcttgctacaggtgcaaacgtttcttcaaagtcaacaccttcgatttgattatacccttgtgctaccaatcttgctttatttctgacaactactcctttttcatcactcttgttcttaaaaatccatttggttcctataatatttgtatccgcaggtcgtttaaccaattcccaaacttcatttcttttgaactgttctagctcttcctgcatagcaatgatccagaaattatcttcaagtgcttcaacatgattttttggttcaacggttgaaacaaagcattgaaactgcaaagtttcccattctgcaaaattacttgtcatctttttgaaatcaagctttacacctctggttttcatcggatcttggagatctccaatgatgtctgatgatgaatgatttttgtgtacctgaattttctgagcttctttgtgactatcttcttgttctatcgatgaaccatccactttttctttaacctctttattggttatctcatccagttctgtgtcactttcttcaagttcttcactaacctttgacacataatgatcatcaaatacaacattaactgattccataatagcacacgttcttttgttgtagattctgaatgctgtactagtctctgagtaacccagaaacatgccttcatcacttctggaatcaaattttccaaggtagtctttgtcattcagtatatagcatctgcatccaaacacgtgaaagtagctcagattcggagtctttcctttccataactcatatggagtcttcatcgaatctcttctcacatagaccctattgacgatatagcatgatgtgtttattgcttctgcccaaaacctctgtggaacctgatttccatgcatcattgctctagccatctcttgaagagttctattcttcctttctacaaccccattttgttgaggtgttcttggagctgaaaactgatgtgcaattccatgcttttcacaaaaatctttcatggattcattttgaaattctccaccatgatcacttcttattcttttaatacctcctctctcattgataagctgaagagcccatattctgaaactatctgctgcgtctgacttctctcgaatgaatctcacccatgtatatctagaaaaatcgtctaccaatacaaacacatacttcttcccagctatgctttcaattggcattggccccattaaatccatatgaaccaaatcaagtgctgacttagtctgaacatctggaactttcttgtgctgcactttgacttgtttcccttgattacatggaccacacatcatcttatcttcatctttaagcttaggaactcctcggataatttctttgtcaaccaaagtagtcagatttcttgtattcatgtgacctagacgttgatgccatagattaaggttgtctcgtgcagagaaacagttggttgtacggttttcccacatgtaacaattgtttcctgttctcttacctcctagaacaatgtcaccagtttcatcaaatgctttacaatcttctttagtgaaagtaacttctagaccttcgtcacacaactgacttacactaataagattagcctttagtccacgaacaagatagacattcatcagctgaggtagctctacatcactagtttttcctttaccttgtatgtctccatgacctccatcaccaaaagtcactttacctcctttgattttcttgatgtcttgtaagtaatcttttgtgcctgtcatatggcgtgaacacccactatcaaagtaccaaggactctttttctcgcattcctctgtgactaacgccatgttgcatctaaaaccaagtcctgctctacttcctgtatctctttctgcagttcttctgactagagttggatatagatcaattttctttacccagatttgatgtttatatccattccatgtaaacttcctttgatacctgagttttcccactttctcccagtacttataacaatgaatctttatgtgcccaatctttccacagaaatagcatccaatgcctttgaaaacactttttcttgattcatcttgtgcatgatgagatattcctccagacacaaacttggtttgacctgtgcttgtttctccatgaccagtgtaccctagtcctttgtttgttttttccgtccttccatagcttagaatctgatctagttgttttgttccagcaaacatgtgaatcttccgatgttgttgattaagttctgtttgtagtcctgcagatatcttcctttcagcgatcagttctttctccaaattatcagctttagcagacaagcttagtttttctttcatcaaactcaaactttctttgctaatcttcttttcatcttctagttgattctgtaatagttcaacaagtgattcgagacgtatcttttcttttagcaaatcttgattttctgtaccaagtttaatcaaagtttctctcacctctttgtaactttcaacaaaattcacttgttgttcctcatctgattcagagtcagtttcttcttcaccttcaacaaactcagtaatgcctatcaatgctacataatttaagatatcttcttcctcactctcttcctcagattcttcttcaataccaatcattgatttttcttttcgactactgatacagtcatcttgagcatgtcccattcctttgcatgttgtgcatttagtttctcttttcttgactgttggacattcacgaataaagtgtccataccctttacattcatgacattgcatgtcagctttctttgatggtttggtatcgtcagtattctttttgaaagatccaaacttcttctgtccttgtccttgttctgctcttttcaacaaccgatcaaaccttcgaactaacagactcaatgaatcttcttcttctgcttgagatttgctttcacaagatgtcaacgccaacccttttggtttcttagttcctcctaattcaagctcatgagcctgaagcatccctacaacttcagcaaaactgagagtatcagtattatttgacactgttagagctgttttgtacgccataaatcttgaaggtagacatcttagaaatttcttgaccaacttcttgtctttatacttcttcccaagcgttaaagcttcttgcgccaatgaacttagtttagagctaaaatcagagattgaatcttgctcatccatcttcagattctcgaatcttgaagctatcaaatcttttcttgaagtctgaaccttaatcgttccctcatagtgtatttgcagaatatcccaagcttccttagcagtttcacagccctgaattaagtcaaattgtttccttccaacactgcagtgaatagctgtgagagctctagcattgaatttagactttttcttctcatcttcagtccagtctgactcgggtttggctgtgaagcttccatcttcattcttaatttgtggttctttccattcttccaagacagctttccaagctaacacatctatccctcttatcacagatttgatttttgacttccaaaaaccatagttacaatcgtctagaacaacctttgcgtttttaagcagttcttgatagctctccatcttttccacaagacctcacctgtatgtaatcttcacaagcgaccgctctgataccaattgtaaatgcaagagctactaagttttgaattagttcacgatgtaactctgaatttctcaaaaactctttcgattaatagaaaatatgtttacaaggtttctcctttaacactattttctattctcactaagtcttgttctttaatcacagaccgattaagaacaataactctccttaaaacccttagctctctttaagcctctagttctctatttctctcaaactaagacttaatagctaggaattctctctagtgattgtgctaagctttctgcaagccttagcactcctacttatactaaataggttgagaccatacaacaggtcgatttccaattctaaaactaattggaatggacaatttcctttttctttatggaataggaaattgtcctttgtcttcatgttttccttttcttcttgtaaaaggaaactcttcagtcttctagaatcttctctaagcttctagtcttcacttcaaaccgccaaaacaagattctgcatatttccttaatcttgttcatgttgctctgttctctagagttacttcttgtcttagttcaggtactccttcagaggctgcatcttcaaaatcctcccaaatatagagacaccaccattacggagt

SEQ ID NO: 5241 - DNA, 676 bp, Arabidopsis lyrata
  Intron number 10 from transcript 477706 (locus 477706) der ived from phytozome v7.0 (chr-ID scaffold_3; pos 1537289 t o 1537964 reverse strand)
agtatcactccactgatacttgtgatactcagtatcgtgtgatgtggcagaatgtcattggaccgtgaatgtttttttttttgtttttttttttaaattaaaagtctctgaatggctttgtttgatcatggccgttaatatctctgaacggcttcgatcgtagggctctgcaatcaactatctcaaacaataatgacgagaacaccaataacaagatcagaaataccacaaacacggacaaacaacatctttgaacaaacatctacaaacatctcaaacaatatctctgaacggttttgatcgtagggcttttcaatcttttactatttatatataagatggacaaaataattacaagttcaatgagtttctgcaattacctgcttcgaccacaagatatgttttgcttaaagtatattctacgtttttatggattgtaatattatcttttgtaatcttatgtttttatatatttttattttcgattttgcaaataagtttttttttaattaatgatactgataccagtctcaccactggaaacagatttattatcagtatcataaaaaatctcaaacaataaacaaacattaaaactaatactaaaaaattgtttatgatacgtatcaactatgtgcatgctcttacatctttttagctccattaacgaccaagt

SEQ ID NO: 5242 - DNA, 19643 bp, Arabidopsis lyrata
  Intron number 2 from transcript 907505 (locus 907505) deri ved from phytozome v7.0 (chr-ID scaffold_2; pos 3680655 to 3700297)
atagcatttcctaagaacgacacaactggtaagcattttcttaaccgactatttataaatgctatattataaaactacactatgttttacacaatttattttcacataatttcctcacctatagttgtgttgcagaaaaaaaaaaaaagaataaagaaggaaaaatgagtttcgtattaagcttcctgctttgcgagaaatattaacaattaaaaaaagttactaaattaacccaaattctgagtttaattattagagtgtctaaaaaaaactgaaaattacccagattgactcaaatttagagattaataactagattgacaccctagttttgtagtttactagactaacacaaattttgggtaaaatgaccaaaaacccaattcaattttattaggctttaaaaaaaatcaaacaatataacatttaaattagaattacaaaacccaaacaaaaaaaaaaaaaaaacaactagccctaaattacgactgcctttcacgtttttttctcagcctcattgattaaaactcagtcactttcgcgactccgacgaagacttacgatttgtcattcttaaaatatgtagtccatcatggaaagtctgtcatcaaatagatatataaaatctgtcataatatgaataaaaattaaaatctgtcattgcttaaaacatatctgtcatcactatatgaagtcattccagcaatttttttttcatcactaaatctgtcgtaatgtgacagttttttttgaactaatcctaaatctgtcgtaatgtgaataaaatctgtcatcacagaaatatttcatttgcgattgtatgtcaatctagcaattttttttttgtatgacaaatctgctatcactcgacagtttttttgtttaaaaaataaaaactgtcataacattaaaaaaatctgttatcactactaagtcattctagtaattatttttccaaaaacaaatctgtcacgtgatgacagatatttttataaaaataaaatgtctgaggccactataaacataaatctgccactaattttaataaatctgtcaaagtgatgaaagtctgtggtgtcataaaaaaataagtctgtagtggagtaaaaaactacaacaaaataaatatctgtcataacttgttaaattaagtctgtgagagataaaaaatctgtcacagaaaatctgtcgttgataaataagtctgccattgaaaataaacctgtcataacgaatccagcagacttttaaaaaaccaaaaaaatttcctaagtttttttctcacgtttttcaaaaaaatttgagggcaaatttgacttttttttttcctaacaaagagagaaagggtattatcgttatgaaaataacccatctaaccctctaattttatgagacattctagtaattaaagtcattatttgggtcaatctagtaactttccctaaaaaaaattggaggttaaataagttatattcatgaccataatatcttttctctctttgttagaaaaaatagaagtcaaaattacccttaaatatattaaaaacgttggaaaaaaaaattatttaaaaagtctgttgggttagttgttacaggtttattttccactacagacatattttttgcgacaaattttttttcccacaaacttgcttgaaataagttacgatatatatttaatttgtagcacatttttttcccacgacagacttattttatgatgataccacgaactttcgtaattttgaaagatttattaaatgtgtagcagatttattattttcgttgtgtcagacttatatttttcgataaaaatctgccgtaatgtaacagattttttaatgaaaaataattattagtttgacttattagtgataatagatttattttctattatgacaaaaaaattttataacaaaaatctggagtgtgttagcagatttgttatataaaaataaattgctagaatgacatatactcgtaaccgaaatgttttatgtcatgacagatttttttatattatgatagatttcagctaggttataaaagaatctgtcgtatgatgacagttttgttaatgaaaatagaattttaatatgcataataaggtaacgacatacatattcttaccacgacagacttatttatattagatggctcatgtgaggctgtctcttcgttaatatatgattagattaattcttttatcgttatatatatatatatatatatatatatatatatatatatatatatatattttcgatttatatttttttcgttttgtatattttttcgttttatatttttttctttttttcattttttcgttttatatatttttttcctttttgtattttttttctaattttctatttaatttagttattgtatgttatttattttattttaataaaattaaaaataaaatgggtatttggtcttttaacaaaaaattgtgttattctagtaaaccataatatttgggtgttactctagttatttttgtttagagttgtatcaaactatgtaaatttcagtaaaaaaataaacatatagaagctcatgaaaaaaaattaagaaacgtttgaatagaatgatattgaacaaagctgtacggcccagatcagccatcaattgtatgaaaaaagaaagaaagaagaacttcatatatattctcacaaactcaaacaaagccacaaaatcaattgtatgaaaaaaaaaaaagaagaagaatttcatatacaacacatatttgtattctcacaaactcaaacaaagccacaaaatcaattattattaaaaattaaaataaaattgataaatgttggacacttacgaatgatatatagcatttcctaagaaggaaacaacaactggtaagaatttttttaaccgactatttataaatgctatattataaaactacactatgttttactcaaattattctcacaaacttccctcatctataggttttgcaaaacaaaacaaaaaaaaagtaaaaagggaaaaatgagtttcgagaaatattaacaataagaaaaaggcaagaggaagagagagctcgtgaaaaattaagaaatgtttatattgaatgatttaacaaaactttacgaccagtggcggagctagaattttcttttaccggggtcaaaatataaaaatcattttttaataaaatagatgtgattttttttcaaattatattgcatataagtatataacttatgttttataattaaataataatttttggtatttctagaaaagtttggttgtataaaacatgataattgatatacataaaagacaattataaatgggaaaaaagaatagataaaagcaaaaataataaaagtatagtggaataaaagtaattatatagatttatagtaatcaaagaaaatgctattgaagtaaatgaaaacacttattcacaaaattaaaaataaacttatatataattattagtggttataattcatatcattttgcaatattaaaaaaagttatgtattaaagggtcaaaagattggttttcacaatgggcattggggtcaatttataggatttttcttaaatatctacatacttgtttaaatttgccataatattagttgaattttaaaaattcaccggggtcagttgacccccatggttgtatgctgcctccgcccatgtttacgactcagttgtatttaacaaaaaaagaagaagaagacatgcacatacaacacataacatatatgtattctcacaaaatttcatcttctaatccaaatttctagtacaatttaatttttaattaatacaaattactaatttaaaataaagtttataaactactccctccgtcccacaaagatagatattttagatatttcacattttattaagaaataatgtataatgacaattttaaccttttaacattttaacatattttaaagagtatattatttattgttgtttaataaaggtaaaatagttaaactgttttaaatttgacattggaaacacaaaacttttatctttgtgagacaaattttttttctacaaaatctatctttgtgtgacggagagagtatattcagaaataatttttttattaatctttatgttaaatattttaaaacaatatttagtcaacttcatttaattactataactgtttgtttagcaaacgacatttttcaacctcaactatttgctagcgggttttcccaacccaaactatgatccccagtcgatttcaacccaaacccaaaaataattcaaaatcaaaacctgaactaatgcaaatgagccgatttcaacacgacgcgaaacggtgttagttcgaaagttaacggttgctcaaccttgggtaattctctctctacagcattcagcaaactctgaaaatataatcaaataaccttgagaaccattaacttccgaactaatactttctaatacactttttggatccaaaataccaatagttttagattaacatgtgtttaactattaatgcctagaaaagctatttaatttgaagttaactatattactaatcattaaagcataattaataaaataaatgatactcaaattatatataatttagaaatagctttcaaaattcaaacaaaacatgatttcgtgaccacatgaattttagtgtaacaaacttgagcgataccaaacacctagttcttggagctcttgatcccggaaaattcaacaaaaccccaaaagtttcaaaattatcacttatcacaactttataaaggacatctagaaatttgtgtatgtgttcctaaatcactttgtatacttttcctacacttctaataaccttccatgaagattgtcaaatttttggaattttaagattttagtggtgaatttggaaaacataacaaaaaaaaataatttctttttggaaattgaccttaattatttgaggggggaaatatatatatatatatatatatatatatataccaaaggatttcaaaaattgaaagaacccaaccactaaaaatcacttgaatcattgatccaatcaaaatttgcgagatttttctttccatatcctcaattaagtaaatcgttttctactataatatcataactctctaaaccctttaacttaaagaagcatctacaaaatctcaaacacgtcttaaaattaaagatccaacgctaattgatatttgactgcataatgttgtgcaggatatataattgataaagatatggtagagatggctaaggagatgatcaaacattgtggaggactaccattggctgtcaaagtgttaggagggttgttagctgctcaacacacaccacgtcagtggaaaatgatatctgagaatattaaatctcacatagttggaggtgggattagttcctatgatgacgatagcagttcggttaatcatgttctgtctttgagctttgaaggattgcctagttatttgaagcactgcttactctacctagcctcttttccagaagatcataaaatagaattagagagattgtcttatgtctgggctgcagaaggaataacaaatcctaggcattacgagggagcttccattcgagatgttgcggatctctacatagaagagttagtgaagagaaatctggttatttctgaaagaaacatgttgacttcgagatttggaatttgtcagttgcatgacttgatgagagagatttgtttgttaaaagccagggaagagagctttataaagattgatagtgatccagccaacagctcaagcgtttactctcaagcttctagcagatcacgtagactcgttgtgtattgtacaattccttttatttatggagagagggagatgaagaattccaaacttagatctctcttgtttattccagttgggtatgattggattatgatgagatcaaacttcatggagttaccattgttgagggttttagatctcagatgggctaaatttgagggagggaagttaccctctagcattggaaagctcatccacttgaagtatttgagtttagagtggacaggtgtaactcatctaccttcatctttgcggaacctgaagtcgctgctctatcttaatctaaatatacgttctcatctgactgacgtgcccaatgtctttaaagagatgctagaactgagatacctctggttaccatcacaaacaactagtaggacaaagttggaattgggtaatctactcaaattggagacgttggagaatttctcaacagagtatagcagtgcgacggatcttcaccgtatgacaaggctaaggagtctccatatcttaatcagaggcgaggggtggcgtatggaaactctatcttcaactctaagtaaattgggacactatacaatctccctggaattccgttcatctcaaacacccgatgttacctgatgtgcaacattttccttctcatcttacaaccatatctctacaatattgtcgtttggaggaggatccgatgccaattctggagacactgctacaattgaaagtggtttttttatggcagaacgcttatgttgggaggagaatggtttgctccaccggcgggtttcctcaactacaggagctttcaatacagggactaaaggaatgggaagagtggaaagtagaagaaggctccatgccccttcttcattctctctctattcgttcgtgttataagctaaaggagcttccagatgggctgagatttatcacttcattgaaggaattgagaatcgacacaaatgaaagagaatttcagaagagggtttctaaaggaggagaagattactataaaatccaacacattcctcttattcgatgtgactacaaaaacgcgaggtaatagaatattattttcccagtccaataatctgagaaacaatttcataaagagaaaacgaatgacgatggctcgacttcattttttgatgcaaaacaaatttgattatgtactttcatgaaatttaaccagttattattctctctttgtttttcagagcgattgatatcttctccgttggattgtgaggctatatatatccttataataaaataataatctcttttgcattgtgttgatatgtgtttggttccggaaaaacggtctatttccccacgagaagtatgacatcataatagatagagcccaaactttaaccccgatctatatgtctctaaaatgatacttctcgatctatatattcccgaatcgatagtttaaatcttatatctccctaaaataatagttctcatctaattatccatagctattggttttgttcggtttaatgtctgctaaaccaatttacaaaaataataaaccggattaaacctaatccaaacccgattacaattgattctctaataacccgactataaaccgattctctaataaacccgatttcaaacccttttcggtgaatgatcatcatcttcgtcatcctacatcagagatgaaacagataatctcgttttaccaatcttcctccaatgattaaaatctctttctgattttagacccatcattttctactctctccattatgaaacaaaatcaattgttggtgttcttcaacctcacaggttcacagtacccaaaatcgagaccaatgactatccaattccacagcggagcaattccacggcggagccaccaccaccgacgttcgtcgtcgtcatcccaacacatgacttgatgaaacaaaataatcggagctgaagcagatccctaatctgagacgaacttcttcgtcttcctcttcgcttcaacaacagtgtctaattttacttatacttgtgctttaaacttttctgagtcctcttttaattttgtcattgattcttcatcttcttcctctgagtttgttttttttctccgatccctttgagtgaaatcaaggataattagattgagatttttgccattgattaatatgagatcgtttgttattacttgaattgttcttgaacttgttcgattgtttgtcttgatttctcattttgcctaatgaatctaaaataaatatgttccattgttgttacttctccaatgtttccgtcattgttgtacccattgggaaagagatcaacttgcaaaactgagaaagaggtcaaattgagaaatgggtaacaaatttggagatcatggatgcgtacctagtggctagattagagtaaaccgatggccccgaagagcacattgacgttaaagaagaagagaatgtttgctagcttcggtgattcaaacaccatgaatgaatagaagagaactcttaatcggaggctggagagtaattacggagaaaggtgaggtagaaaaattgttatgatctcatccccatccaaatcgtgaagccattaaaatggtttggtgaagaagaagaagaaattgggtgacaaatggtcgggtttttgaaatgggtcgggttttaattttggttatattgaatttgtgtggttttctatcgggtttagtttgtaaaccgattaaatccagttttgtggggttttagctctagaactattgattcggagacattaagcaatagaactttcaatttgggggggaaatagggataaaacttttattttatggacatataaaccgggtttaaagtttgggctctatctgttatgattactataaaatccaacacattcctcttattcgatatgactggccacaaaaaccagaagacaacgaggtaatagaatattattttcccagtccaataatctgagaaacaatttcataaagagaaaacaaatgacgatggctaaacttcattttttgatgcaaaacaaatttgattatgtactttcatgaaatttaactagttattattctctctttgtttttcagagcgattgatatcttctccgttggactgtgaggctatatatatacttataataaaataataatctcttttgcattgtgttgatatgtgtttggttcctaatcaaactatcggctactgttccactaccatactaaaaacaaaaatgcaggttgtaggttctgttttttttttccgaattatcatggtatttgtcccgtaagccattgttacaagttacttggtctgctttctgttgtgtttatccaatatttttttttttgaaattacacgtgatcaattgtttatataatgtttaattcggtttaagatttgaaaaatcgaactaacggcttagacgaattcatacgcaatttgaacaacttgaactggattaatggatagtagaagaaagatcaatgccacttcttgagactctggttattgggtaatgccaaaagttaaaaaggattttcctgatacattacttccatgagaaaactaagaactgaatttacgaagaggaaatggacagacaaattgtctaaaataggagaagattactacaaagtcctacacatttcttatgttttatttctctagtgtagatgaagaatgagagatttgagaaacaacaaattaccatgtaaattcactacaagaaaacagggtttttccgactgcagaagaagtcgttaaatgtttgtttacgactacgttacaactaaaacatatagtcgtaaaacgagagtcacttaagtttatagtcgtaaatatagtcgttaattaacaactacactacgactaatatgaatagtcgtaactgtattcgtaacgtagtcgttaaatgttaaaactacgctacgactagtttacgattaaaaatgatgtacataagagtgtttggtgaagttgcaatgactactttgcgacaatttgccggactaatttaacgactattaaacgactatatttattggcaaaataattatttggtatttcgttttttccggttgtaatttgttttgtatctcaatttgaaaccaagattctctaaagcaaacaaacaagacaaaaaagaaaccaaatcaaacttaaataacatctcagatagatatgggtcttaacataaaccatgaaaccaaaaaggtttcaaataaatagaaaagagaacacctaagtagcaaatacaacagacaagtattttaaaagatcagacaagttcttgagaacagacaagttcttgatagggaaaagtttaggaaagatatgaaaaggaaagtgataacctaagaagcagatggagttgttgctggaagaccgattgagagaaaggctctgtggttgttggagcagaatgtgtctccatgaagtccagaaaggccggatcacttgctcgcatgtacttctttaacaaggacaagtgctcgagcttgtcctcttgctcagccgcgccacagctcagaaatgctctgcttcacgggtaacaacagcagtatcacgtcgttcattgtcaaccctagcattaagagcaacctagatgaaggatctaacaataagaaacctagatcatcatcatctaactatcaaattatcctaatctagcataaaccatgatcaaacaaaaagactaaatactaaacatggtggaaagagaaaagagaaatgcataaacataaagataaaagatagagatgaagaatccttcactaaagtggcatgaattgttgaagttcaatccaaaacatcaagaagagattttggatctaaatccaactttagagaataaaacttaggttataagatgtctaaatattgcttatatacaaaataggatcgaaccgggtcgatccgagataaaccgggtcaaacccaaaagcttctacagatgcatcagtcgattgctccctcgactgcctctcatgtgcggcctgttctcgttccaatcgatcagtaaatcaaccaacaggtcgattgaaatgttcggtggctcctcctttgttctttttcgcgccagagtgatatatgtccactaaaaccaccataactcttgcatcgtagctatgattggccttaaatcacatccattggaaagctaactcagtttcctataagtttcataaatagctccgaagctaaatctcaataaaagatctttatatgagtcgatctttgaaggatttcggactggttctgaatgtcatttctcttctttgcatccaaatgtgtgtcctccattatttttacatgaaatagctcaaaagacacacaaaacacaccaaaatacacaaaaagacactataggacttctaaatgcatgaagactcacttggacactaaatgcaacaaaacacaatgaaaatactaatgaaacacagtaaaattgaacttaacaacgataagaaagcagtaaatatagagtatatcatagaatcataatcttttccattttggttgtatatacattttgaaacaaattgcaaatttacatatgttaagaaggaagtggcatcaagaatcgtcttaaaggactttcttgtattatagttgaccacatgatcatttgtattttagtggaccacatggaaaatgcttcagatatgagaggtataaattagtaagaggaactccaaggtgatacgagatatgtagagttttggggtgcaacaaatgatttgtccatgacggcggatattcacatcctctacaagaaagacaaaggggatgtgaaattcgcgtcctcttcaagaatgacaaagggagatcatctctcagagatgcaaaaaacgtttctcagcaatagtgaaaatcatcttgtgggattgaaggagaatgttaagaaattggttggctatttggtgaaggaagatagcattctagaggtttctataactaggatggaagcttttggtaaaactactcacgctagacaagtttttaatcacgataaggtaaaaaaaacgatttcgttggatttgtgtttcacagctgtttacaagaaaacatatgtgggtgtggcaaaccatcttggagaggcttagtccaaaacatgatgaacatagagaggtagagatgactgagggcgagctccagggaaaactcttcgggttattggagactggcaagtctttcgcgaattcccagttttcttgtagtagaaagaacaggactgggaccaaatcaagtatggtggatggaggggtcttggccgagaggttcattttcattttcaaaacatttcttaagcaaaagaggccatttttatttaataatgttaggtaaggggccaaaaatattatttttgagagtccattttcgtttttcttattaaaaattaaagaataaagcccatttttacagccttaggcattttttaatttcctcggccataggcatttttacagccttaggcatgatcctacggaattttttttgtaatcaaaccatatcttaggtccaaacagagaatggttattacttgataatgttgtacaggatataaggttgatcaagctatgatcttgcttggaacgttgaatcgtgacgtttaagcaatatattttgagaatcttcttttcaaggcttaaaagctttttagtaaaactcaattccaaatctaagatgttgtacaaaaccctacagacatcataatataaagaagcaaagaggtttgaacatagggaaaaatccaaaaaaaactttcatttatttactttttggaagtttaacaccccaacattttcgattggaaatgtaatacacatcctagtaaaagcatgcagtttaatttataaagctaaatattattatttttacacccgcaatttcataacaaattttttttacaattttacctttactcatttctattaattattaacatatatataatatatgttaaaaataatatagtaacaattaaataaacacaaaaaaatgttatctttcttgacagaatatgaatccgacttcatgtatgtctcaagcttagtaatggaggaaaatcggcctttttcaaccttaactatttactggcgggtttttccaacctaaactatgacccccagttgatttcaacccaaactcaaaaatatttcaaaatcgaaacctgaactaatgtaaatgagccgatttcaacacaacgcgaaacagtgttagttcggaagtttacggttctcaaggttatttgattttattttcagggtttgctgaatactgtagagagagaattacccaaggttgagcaaccgttaacttctaaactaacaccgtttcgcgtcgtgttgaaatcggctcatttgcattagttcatgtttcgattttaaattatttttaggtttgggttgaaatcaacttagggtcatagtttgggttggaaaaacccgccagcaaatagtttttttttttttttttttttgataaaccctatcggctatccggtcggccccggtaggaacgcaccgaggtgctacatagtggactgcctatcccgagtttggaatgccttccgactaagtgccaggggtagtcaggccgcctgcatttctggctaccaggtaaaccaattgggccaaggtccaactgacagacttcccaaacaaatgtgtttttgtttccagagagaatcgaactcaggtttgggagtttcaccctttcccaaaacttcctctgccactagaccacggatgcttggggccagcaaatagttgaggttgaaaaataccgttttcccgtaatagagccgcaaaaaggtttggatcgtttggttacaattcctctggattcgggttatcggccctcaaattatcatatatttgcatttggtggctgaaaatttgaatttgaaatttggattatatttttgtaatggacgaagaaaacaaaatcatatcagattatgtcaagaaatttatatatttatctttattttttaaaataaatatatatggagaagaaatggaaacaatatttctatatattttatttattaattattattattatatatatatatattaataattaatacagatgaataaggctagaattagaatttttttttttgttatgagattacgggtctacaaataacattatttaatttaatggatattaaattatacgcttttattagtatgtgtattattttttaaaacaaaaagtttcggatatcatacgtctaaaaataaataaataggattattttggacaattttccgaaaaaataatattagcttgaaaatttgggctttcagaatttaaatgtatgactttttgataatatatctagttatactgaaaagaagcaagcccaataaagtgttgattgcttctatccttttttcgaaagactaaagaccttcgaaaaccagtgggacaagataatgttatattgttgttctatagaaatgggtaactggtaaaatgggtaaagtaattatattattgtttatatttaactagatatggatccgtgcacgggttaccgttcaaaattgtcatttttaatttttatttttgtaagtttaactaaagttatataaaaatatgttttaatttaggaaatatagtattttaattatttgttaaatatagattaatcatgcatattgtgcaatataaaatactatttatagttttgtttattatatattacagaatgtatattattgaattttaataaattatctacatccatcgtaagagtgcataacactttctaatttcaatgtgggcaagatgaaaacaaaattgtgacaatatgagaaagtctatatccacatcatgtaactttacttgataatatgagaaatcctcaaaacaaaaaagacaaattcataagaaattagggaatatgcactaaataacctaagactaaaagagaattacgaaaataatattaattaaacaatgtctatttgctataagatttttgtcatttttttgcccatattactcatgagttctttgttgtctcttttttctttattctcgccggcgagaagtctcaaatctctctttttctctcattagatttctcttatttttgctcgatctcctctttctttttctttctctccctctcattggattttttcaccaccatattttttttctttttccatatcactatttttctccttcgtcggacatcaccactgagtctcactactccgacccaccaggccaccaccacaactgaatctcacaactatcacaatcatcataaccatcaatacaaaatctcgctaattcccatccaccaccttcatcaatatttactgtcaccaccaccaagcttgaaccaccgtcatcaacatcaataccacagttaccgcatcttcctctctttccccaactgctcttatttctccactttctttatctcctctgacatcgtgtggagcttcttcgacaacaactctattctatgtccatcgccgttcataattcttaatttgcctccatcgccatatattcttaatttgtctatctatttatttgtttatttcattttttttttttgacatctttgtatcgacaaggcccgatccataaccaattcctactacgcggggtaacgcgacttagtggagtcgaactccggtggggaagtcggagtcaaatggacttaaccacttgactaaaggcacatccccatctatttgtttatttcatagaggtgagcatttagaatcatttttcttctaggattaacaattgattataaatttctttaattaccatactatacaataagattgtataatttcataaatcttttttaattttaaggaaaaagtaatctttttcttttaaaattagtagttttaaattagaattagtaaataattttttaatttctatttttatttaataagaaatatctatttccttataattatcttctttactatctcctaccaaaaaaaataattatcttctttacttttttaaaaattatttttttataagatatatatgtatagttgcattattaatttttttcttaagtttctatttttatttcataagctacatctagtttccttatatttatcttctttagattcttagaattgtttaatataagatatatacgtataattttcttataatttttttctaaactaattttttttaggttttacacgttgataaatttgacatgtgtgtatagtttctttatatatttttttaaataaataaaaagaaatttttgtttaacaaatatcaaaatctaaaatcgataaatttgatcatatgagttactaattttgaaaatcatactcgacttttatttgcgggtattgaaaatttgatagctgggtaaaagtcaagtcataactcataagtacgaagcgcgtaaaaagtaatcgtgtccagccttttttttttttttttttaatttgtcaatactaagatttaacggagattacggatcaaataattaaagaatgattaaagcaccggagttgacggcttgaaggcagagtggcgagatagtttattggtcttttttatttattgacccaagtttctaaagtgcactgcacaaggtcctattaatattattactttcccggtcttactttaatttaaatatcttcaacttggcttattggctaccgggtccaaacttactcccatataataataagttgagacctcataactaaagaacaaagaaaaatcatctttcttcttgcaaaggacaacgagaaaataagtgcttcaacaggtgaggtgagtcagtttgtttgttattgaatgtactctgctttcgaagtttctttcttttctgattgcagaaagtttttcttctgtatttgttttgatcaaatcgagtctactctttaaattagattttttttatttctttttaaaacatgcaaaattattagatcatgttttaggaaacttgaatcgtcgattcatttttttttgtttgtcaacatatactaagattcttcaaatgggtttcttttgatctaagagtaccccaaaaaaaaaaaaaagagtacaataccacttttgtacgttatattctgaagggttgacttttctaaactaccccaataatttttacccaaactatttactcctacattgtttgcctcatcataatgcaacacaaactttcaaaatcttcaaaatcctacaaaaacaggattaaattttggttttcgtataattggccataaatggcgtttaacaaaccgcgtttaaatggattcgagtctaactcaaaaaccggacataacaaacaaaacctgatatgtgtttggtgtttgattattgattaaatatgactttatcgttggtcattgttgttgagtgtgtcaactgcctttgttctaaattttcgtcttctgcgaaagagcttgttttgtaattgtgatgccaattataaatactaatactaatgtcgtcgtttccgcgttggttaataataaccttgtgtgaatcgattgaaacgatgatatgtgactcttgcttatttctctgattgctgttacacatagatatttatgatcccaaagttctaaattattggtgtagtctagaaatggtttatgatggaaaatcccaaaattacagagatacaagtaagaggaaaaaaccatctatttcatttagagggttgcttactaataaaagcacgcaatccaaaaatctcaaaaagctttcatttatttatttttggacgtttaacactctaactttttcgaatggaaatataatacacataataataaaagcatgtaatctaatatgtaaagctaaatatatattattatttacacacccgcaatttcatcacaaaaaatttacaattttacctttactcatttctattagtaattcctttccttactaacgtttcctctaaaacaggacaattatggttgacgcaattgtatctttcggtgttgaaaagctttgggaactcgtgagcgaaaattatgagcgatttcagggagttgaagagcaaatcactgagctaaagagtgatatgaagatgttaatgtcctttttgagtgatgcggatgcaaggaaacaaacaactgcacttgcaagaaactgcgtagacgaggtaaaagaaatcacttatgatgctgaggatataattgaagcctatcttctaaagagagaacgaagtaaaagcagtggcatcaagaatcacatgagtagtcttgcttgcattcaaagtggtcataggaagactgccttagaaatcacaagcattagtacgagaatctccaaagtaatccaggttatgcagactttaggcatacaatcaaacattattgaaggtgggtatttgcaggctctacaggatagaaaaagggagatgcgtcatacatttcctattgaatctgaaaccaatcttgttggtttggagaaaaatgttgagaaattggttgaggaattggtgggaaacgatagcagtcttggcgtatccataactggcttaggtggtcttggcaaaaccacccttgcacggcaagtttttaatcatgataaggtaaaaggtcattttgatggacttgcgtgggtgtgtgtatcgcaagagtttacacggaagcatgtgtgggagaccatcttgaagaatcttagtcatggagattacgttgctgacatgaaggaagacaaactacagcagagtcttagtcctgcagatgaagtttctgataggaacatatcacaaaggaagaagatttctgatatgaatgaagacgaacttcaggagaaactcattcaattgttggaaacaaaaaaggctttgatcgtctttgatgacgtatggaaaagtacagactgggacacaataaagcgaatgtttccagagagaaaaggtgacatcttaagctagattttctttttctatatttttccccctttaaaggaagataatccaaagggccacaaattgctcataaacacttatgttgcttaattgcagctggttggaaggtgctgcttacttctcgcaataatgatgtacatccacaatgtgtcacctttaaaccagaaggcctaactcttgatgaatgttggaaacttttacaaatgatagcatttcctaagaacggcacaactggtaagctttacataaaccgaccatatatatatacataaaatcatactattttatttaagaaaatgctaacatagtataaaccaactttgtccgaaaaaaaaaaagtataaaccaacaagtaaagcaatagaaatttacagagccattaaaagaacactaaagtaaattcagcgagatcaagcaaacaaaggtaaaaagactataaacataatcaaccacagatgagccaatatttaaagtagtggatcacgagtaacacaattgactagttaattagattaacaactggattatgatgctaaggcattattcataaaactcaatcctaggatatgaaacactcgagcaaagtcaatccacttccatgacaccaactacttcgttaatcacttagttaaactaagctcatattttcaaattagacagtcaccaagcataaattacaaattctttttatcaaaacatgaagatattttgatgattctaaattatttcaaaaagtgaaagaaccaagctcactaaatcactagaatctttcaatcaatacttaagaaagccatctacgatatctcaaacacgtctagtttcactatatcttaaaattgaagatcctacgctaattgatatttgactgcgtaatgttgtgtaggatatataattgataaagat

SEQ ID NO: 5243 - DNA, 1720 bp, Arabidopsis lyrata
  Intron number 2 from transcript 496649 (locus 496649) deri ved from phytozome v7.0 (chr-ID scaffold_8; pos 21477879 t o 21479598 reverse strand)
tggcctagcactctggttcaagtgtcactgtttcggtgagttttctacgtaatcacaaggaattatactaatttataccatttaaagctacataatatgcgggagaaagcaactttgggttttcttttattaattttagtttttaaccttaaaatcccaaagtaaaaacattttatttctatcattgcatgtcgaataataataatatgggcatgcttatccatatctcttttcccaaaaaacatcccaaaggcatactataaaactgtactatcgtattcaaagatttagttgttcgagttttgactccatttgcggatgcacactctgactttcctctattattttctttttgtcaaagaattattttccaattttcacaccattttgttttgcttatttcaaccctcattgagttgctttagatttatacatcacctacgtatatgatggttttcagatcaaaaaagagattttctcgataggtcaatccgtcaatatatatatatatatagaacataaattacccactaaaatatattgaacactagccaaaattatggtccacgcttgtgggctatcctttgatcgatcatgaccacttcttacttcttacttcttatacttcttacttcttacttcttatccattcatttatacaagattgaccaaaaggcataacatacatggcaacgctaacatgtactccctctgttcctataagagtgatgttttgaattctatacattaattaagaaaaagtcatttttataattttttattgttttattactagtttaataatattaatctcacttctctcctttttctattggtcaccaataaaaatagtaatgatgctattacaaaacatcaatctttgtggaacaaaaaaaaaaaacccgaaacatcaaatatctaggaacagagggaatataatatatcgtaaatattttcgtagaaaatgtaagaacatatgcagtctttcaccaaagtttcttatagaaaagaaaattaatgaaataatataaactattatttaattataagagtttcttaaaaaatggtaaaatctctcaagtgagagaatttgagagattttttctacttttttgagaaattcttataattaaataatatttttattattttattattttcttttatctgagagactttagactacaacttcacatgctttaatgaatccacgtgagtcaagctgtagacatggcgggctttttgcgtctacgtgagtatgaacttaattcatccactcgtggtccactaattatttaacaccatcacatttcataatcatgacaaaggaaaacgtatatatatatgttatttaaaaaacaaatcatttcagatgttacacacgttatcgatcgtcgtaattaagtttttgattcattgatttttcgtcgacaattgagtttttgaatttataataacaataaatgggagttaattgtttaatatatctgtggttgtagttgagggttgcactggtgggtctatgcgtgtttactataatactattcaacatataacttagaaaatttgagatgttgacacaaaactttatatctaattatactgatgacgaaataattacgtgtatattgtaataagtctaattaaaattgattcgaaatctcgaaatcataagaataaataatggatatttttgtttcaatttcatgtagggcattgc

SEQ ID NO: 5244 - DNA, 1780 bp, Arabidopsis lyrata
  Intron number 3 from transcript 918729 (locus 918729) deri ved from phytozome v7.0 (chr-ID scaffold_1; pos 25592 to 2 7371)
tccgttattcaacgggtatatttgagaagtatacggtactaaaaccacaaccattgatcttagcttgatcggttcttccctaggatttatacataaaagtaaattgttttgtttaataattttccattgcatgaactttcgagacaacaagtggacaggagtgtaatgtcatcaaaagtcaaatcaaatactgtgaggaacatattagacaacgttggcttctttcgcagctgctcaacgttgtctctcccgatggtcccaacactctcttcttctttttttgtcaacattcaaacgttgtttaaaataaataaaaatgtttaaccttaatcatctttctagatctttaaatgcctaaaattcaccttaatcagtcagcaatccgtcacgttaatgattttgaaaggaagacttttgttttgtttcggttagttttgtttgtttagtattttaatcacaagataactctaatttcccattagagttgtgttaattgtgttgattatgatttggcgttccaattctgatattatttttatgttgtaaatcttaaactgttacgttattgttctatcttcctatgtgagaaaaaagtaaaatgttttaaaattttgacatggataataatataattgtaaatctataataattatattatcattttatttatatttttcaaaaagaaatatatttatcttaatagatttaatatgataatgtcaaatatagttataaatctaaaagagttatgttattatcccatccttttatgagaaaaaagcagatattctcttaaacttttaaattaacgtggataataataaataaataataattttactaatatgataatgattcggttttaatcttaccaaaaaacaaataatgattctgttttaaaaatatataaattttctttgtttagttgtagatattgtcatataaaaaattcttagatcctccactgccttaattttatgtaaataccttgcttgatatttaattttgatttgatatcataactaatccttgctttttttttcggcactaaccattgaattttttatactgccatttaattcttgcataaaaaataataattaatagtagtgtttattatgaatgcaggtttgttttccataaaaactagattggatttatggaagcacgtcattgtttccagtgcgaggaaacaaatgtcgtatcactgctgttgtggctctttagtactttcgtttctgtttatggctttgcttcggttgtatggttagtcatcaatcattgatcttctcattgtttgaatattgttgcataggaaaaatcttccttttttatgaatctttcaaaagttgggtccatgatattctcagtgattgattatgtttattgaatatttgtgtgcttcctctgctgatattctaattcatgctttattcgtcgtctttgatacactctgattaaccattgtgcacctctagagtctaatttgcaatattaatgcaagtctctttaacttacggattatgaagagcatcctaagatcgtttaatttgattcaggctttatgtggctaatgtttggtcttggatgtgaattagtctatcatgtttcttggaaggtaggaaggaatcttgatgtttaccaaaatccaatgtgctcttttgtagctcagtttgaaatatgtactaattattgtagagggaacccgaaacaaagagaccatatgtatgattttatatgcgaagagaagctccgaatttgaaatcgtctccactccggt

SEQ ID NO: 5245 - DNA, 2911 bp, Arabidopsis lyrata
  Intron number 1 from transcript 323672 (locus 323672) deri ved from phytozome v7.0 (chr-ID scaffold_5; pos 15520739 t o 15523649)
cttacggactacagactgcgactagaagaattggtgttaattaaattagattatgcattcaagatatgactagagccgcacggatgttaagagaggtcatttgcaatttatatgataaaatcaaatttgatatatgatcaaatcaaatttaaaaactaaagtaaaaaaattatcaaatttactttaagttcaaaatttgcactttagtttttaaatttgatttttaaaaatctcatagactttccatcaaatttaaaaaaatgtacgttttttaattttaccaaatacgaaaacttatttttttccacgaactatatttcaccaattctaaaaaatacattttttacctattacaattctgactttttgcttcaaaacatagatatctaaaattttcgataatcttattacggtggtgccctagatcttctcgttcacatctatatatacatttttggatgacttttagcaaataaatcctagggttgagcagtatttacaaagaatgccattggcatttattattaattttacaaaatttaaataaaagatattaaccaaacaatatcttgcctaatttgtttctaaaaatatttacacaatctttctatatatcttcaaaaaaatttatagcaaatatttatattaacattttgcatagcaataaaaatactattttataataatcaaaatattcacatagaaaaatcaaatacacatacaggaaaagaactatatctatcatcatttaagccgttgttttatttaaataaaaaaacacaaaaaacttgaaatcatatactttatatgataaatttaaaatatatattagtagtataaatttaaaatcgttcaaataacggtatactacgggtgagatcctaaaattattagattttataacaataataatttattttcttggattttataatactaataatttagctaacgagataatatagacgggtttatatgggatgacgggtttgggtcgatattaataaataacggtatatcacggatgaaatcctaaaattaacaatcaaaatacaattatacaatcttaaacacaaaacaaaagaaacaatattaacaaaacaaatccaacttaaatttaaaattttcagttataaaaaaccagacccacggtatactgcagagtaaaatattcaaaagtttaaaatccaccatacatcgttacttaaaaaaaatgtatgttttcgtatttatacttcaaaaattgataaatagatatctacattttaaaatacaaattaatatgatatattttcagttagtcttttaaaaaataacattacattttttaaagtaatatagccccgcggtataccgcgggttaaattctagttatttttattctctaataaattagtaagggtgaggagatttaggaattcaaaaaccagaattgctctacggaagaagtgtagcgcatgagatcaataaaaattagctaagtttaataaatttatgtaactaaaaaagtagagagaaagaaacaataactcacctcgaaattaaaagaagatgtatcttcacattttttattccctttatcatattaacgggattactagaattgatatcctcatcatgaagaaatctttcatcccattccggatttaccaccatatgaagattgagtttaacttcattaaaaaatatgcatatatataacaaataatgtatatgatcgtttataattcaagtatgaaaatatgctttccaaataatgaaaagggagaaaattctacaaattaattattgattttgcctttttccaatgacatttgtaaaaactgccattttaccttagaatatttatatttgttatttttcaagatttaggaattatgtttgggtttattaagttctaaattttgtaagatgttttagggtttattatttatttcaaaaaaaattctcaaatgtgaagtttttcaaaatagcaaaaagagcataatccacaaagccattaagcaaatgacattttcaaaagattttggtgaaaaagagcaaaatcaacaattatcccaaaaaagaaatttggcaaattactttttttttggccattgagtttacaattttgtctaacagagagtttgaagaagatcaattcatgatcctcttaaccgctatgcgactgatcatgattccagcacatatacatggaaaaacaagtttctataggaaaagaaattttagcaaataaaacatgaaattgcctttggattctagaaaatacttgaatgggtcttagaaataagtattatcagataatgtccgaaccgaaccaaaacttggattagtacctaaaaaatgtgaagctaagtaaacctttaactcttttttacatagcttcgagtatttaaacctttaagttttttttggataatttgaacttaaaaaaaaataatttaagattcgaaccgaacccgaaaagaagaatataatccaaaccgagagaaacccgaatcaaacctgaccaagatattataaataattaaatacccaaacgagacctatgaagctagatcctaaaaccgggaaaaccgaaccggcagtcaagttcacatgtcggaaaagtaagtttatctttttgtttttggcagtaagttcatacgaaaaggaaatttgggttctataaaatattagggtgtgtaacacaaatcgagttaacaaatcacacaattcgagatcatgtttccaagggcagtgaagaacaaaaccccagcgccggtgcaaatcacggctgagcagcttctaagggaagctcgacaaagagaagacactcagatcctgctggtccctaagcagaaaatcactgattccgatgaactttccgactacagactccgacgtcggaaggagtttgaggacaagatcc

SEQ ID NO: 5246 - DNA, 4827 bp, Arabidopsis lyrata
  Intron number 2 from transcript 905868 (locus 905868) deri ved from phytozome v7.0 (chr-ID scaffold_3; pos 13904331 t o 13909157)
aaatcaatattcaggaaaactctccaaaataagaggttattgttatctatatatatatgctttactgctttatggtttatggtagttttatgcttccgtgttgagttatggtttataataaagttattttcacgtaaaacaatattttgagttttgttctcatgttttggcaaagtgagattgacctttcagagaatagcaaattgagctatttgagaccaaattacccttagagaacaactattcttgtttggttacgtttcttaactcttctacaaccaaactacatgaaagaaaaaatgattatatattttttttacttaaacatataaaattttttagaaaatcagaatttaaagaaaaaaaaatgaaataatccgagtacaaaggcgagatgctctttatactaaaatcaaaggaaattttattttaaatctgaaaatttgtagtgaaataattgattttgcttcattatcaagtagagagattagagttaatagattaagagatttctggcgagttggagaaatgataaaaatggtgaaaaagtaagtgttctttcgacggaatcgacttaatcaccggacaattaaacaaaactcaaactctttagtttttcgaacttaagatatgctagatgtacaatatttacatgtaagaaacattcaaaatgtataaaaaaaacaaaattctgagataactgttgaaaacagctacaaaattagggatgcagaggttgaagacgactgccaaattacaattatacccttcattaaaaattttcagtgtacgtacatgcaatttatagtgtacgtatcattgattatgttgacatgtaaatatgttagattatcgtatctccaatttgcgtctttggcgagtagaacataatgtcaatttactttcatgcgatcgattttagtacccgaatcacaagtcttacgaaaccgttttcaaagatctatttttttttcaaaatttgcagagaggcggaacagagtatcgtctctcctgcaaggagtaatcttaatcgaatcttcgttaaaaacttgatgcctaacctaaatcaggataaatcgttttcaaaattttgatttcaagtatatctttcgtatgatcatatcatttcagaattctcttttttcttcaatagcaaacccagattctgcaaaattttcaagaaattgattttttgtactaggtgtgctttcttctttagttttttttgttaacgtacgcaatttgtgacttagacaaaaagtaaaccatagttatatattttgtccctctgaatttcttctatgtacgtgtacacaattttttgtgtacgcaatattgattttataaacgtgtacgcaatatttattgatgtaataaattaatattctacgatagtcctactggagatgaagacattgttatttgcaaaaaaataagtgtttctaaacatactcacaacttacaatgtctctcatgtcatactaatttatacttctgtttcatcaagtcagacattgactaaatcatcgaattcttccaaaaatgatgtcttcccttttggttatgactcacaaatggttgaatgtcataattctctccaaaattatcgatgatttttcaatctcgtacacattcattagtatacgtacacgattcttttaattaactgaattttcatattagctccacggtaaatagagtgtcaccaacatctctgacatgtcatattccatatttctcaacaaaaattcagtccatctattttaatgtaatttttgctactacctttactatcgtttttaatcgtcatcttcaacaccctcttcgtcatccccaatctctttctgttcatcctctttatcgtcctcgacttcttcttcctcatctacttcctcatctacttcctcaacaacatttgatacctcaaatatgggttttgttgtgttttcatctctaacccaaggttagtttcatcaacaaggtcccacataatgtacataatattcacactttgcttatcggattggacaaaatgacataaaaatgtttacacttagatccctactatgaataaaaaaaaatattcgcattggtgttgtttagaagggaacctatcaacacaagaggatcaagtacttggtatattacaataaaattatatgtggttctgttgaagagaattatggtccttttaggaatttttgtaatgtttggtatctacgatagtgcatacggcgagttagccaaatattatgtatttagtacgatatatatgatatttttttgttttgatgttgtttctatttaattgttattttgaaattttttagtaagcgttatgttatacgatattatttgttgataattaataagattttaaacttaacctatagacgtacacgataatattgagatacacgtatacgtgtacgacctctccaaacagttacatcctaaaaatgcctaaatcacataagtcttatactatgtgcgtacacaaaaatatttattgaagcgttcatggtacaacattaatttaattttttgacatcaaaattaagttatttgtatgactgtatttttttcatgtgttgttcatacatgatttgaatgttttgtttttatggtcaaaaaatatttgaaacgtaaatatacaaattatttagatatttacgtacatatatacacacgcattactacacaaacacattactacagtgtacgtacacattactaccgtgtacgtatatattattaccgttacgcacatatgtgtatatgatattgctaatcgtgaatagtcttcgatgataataaataaaatattatttaaaatataaataaaaatatgaaaatggatcttaaacgatagaaaaatcgaattttaactaaatgtataaaaataataaatatttataaaatggaagagcgaatcatctactgacaagtgtttaagattttcaaaccacacacggctctgtgtcactttaaaacatactattcctcaatatttttctttagttgtgaggtttatttctactgcttctcgtatttgacatataattttataaattgcgtaacagagctggagttttgtgagtctcattagagtatcatagttggtttcacttatttattgaaaacatattattaatatttttttaattgagttcgtagaaaacttgtatgaaattggtaagatatttttggtagaaatatgtccttatttgagttttttctatttacgtgtatgtagtttacggtatacaaagtattgattataaaatgaatatgtacttctgttagattatgtactattgtggagacggtatacgtaatagttatagagtttctattttagtttttcgacttcaaaatacgcaataaactagatttacaaaatcaataaataaattaaatgtaaaaaaacaaaagattataagaaaattgtgaacaatggccataaaattaaagttgctgaagaagaaaccaggttaaagatgagtacaaaattagaatgatgcctttgagtatatggacgtgtacgtctttcacaatatgtaccattgttgaggcaacgtacgtgtaatatttacaaattcttaaattgcaacattggttaattcaacaatcgtacgttgatttaggtaaaacagatcttccaatactaaattgcacacaattaccattcatacgatgtaattttgaaacattctgaattcttgacaacttgagctgtcaaatgccatggacaagtatcatcaacgcaaaccatctccaattttgtaggacatgacctaggttgcttgtagcaaaagcattgtttgattgcgagataagacattgtttgttgtatgacttttctgttcttaaaaacacttcacactaaaaacctcgcataatgtacgtacaaattccgtgtacgtcatgtttttcttaacacgtacacagcgaccaaagatgccttcctctggttcaaattttcattcttcttctttgcatctccactcacccaccgtagtaaatacgggaatatccattaccaacctgcatcataaattcagcagaaccccattaaatgcaactcaaaacatgattatatctacaaaaaacaaaaagaatttccaagtacacacttttaaacatatatatatatcctcatttagcattttcaacaaacaaaattagaaaaaaaaatttatgggtttttatataaaaaacaatgttgatttcgaacacaatcaagatcctactgtgtaataacaaaaaacttcttaaccaacttgattacttacacgatcaatgcttgtcttggctccaaactttgtaaatcaacaagatcaaaacttctccagcatcacattcattgagactaatttgtttgtttgatggttcatgcttatctcttacaatttttcaaacgtataaactaatattacaacaagtaatgatgagttttgcattaattgtgacaagagtcatgtctcaactttttgggcattaaatactgatatctctttattttttaatgttattactcccctttttcactgtacagccgcacaaaagattaaataaaaatattatcttagcctaaccggaatagtgtacctaactgaaccgcataattgaaccgtacatggaacagtacgtcgttacactggaatgggtaaaatggtcagaatttggctaaattgtcaaaacatgagaaccaattctcactttgccaaaccatgaaaataaaagttggtcttctgccctggcctgcaatttacccataataatattgcagagactcagcactggtttgatcagaaggctcctaac

SEQ ID NO: 5247 - DNA, 938 bp, Arabidopsis lyrata
  Intron number 2 from transcript 903655 (locus 903655) deri ved from phytozome v7.0 (chr-ID scaffold_3; pos 3191408 to 3192345 reverse strand)
cttcgtgaccaccacgaccatcaattatattacaggtaagcaaaacacatctctttctttttaaaatccagctttctttatttgacttattatttaaagtcaatcttgaattaatccattatttgactggttaatcaccgtataattaatatatcaccactagtttgttattagccttctcacaacataatatatttaaatttcattcaaaacaaattaaacacatggcgaatgcgatgataacgatttaggaactggttcaagattgtacattattctttgttggagtcattttcacattataccgaccctgacttattattataccaggtcttgcccaactactactactagtctactattatctctcatatagtttccaaaacactaatttccaatatataattgtttttattcggccaataaacgacgatattatttattcttactatagttatgctctcattttgaaaacgaaagaatttacacacattatgatttatgagattattcattatcggactctctacaagtctagtgatgtagcttggagtagtaattaagttttagtctatttttgtaccaaattgcaattcaacaatatttcaggtaataaagacaaaatgaaatgatgtacaagtttttgtttttattatctcatcattttctattttggttatttgatgattgtgacttgtgagatgcagtgaaaaacacatataactttttcaatgagtaaacttcaacagtagaagtttagtgtttaaaatttttcgagataaacaaggagggtataaaactagataaagaactattgtggagccacaaaatgagtttgtgttaagagtctaaaaatctgaatgttcttcttgactaatttatgttttatttttccattaaaaggttcgcaaagtgtggttaaaggttcaccacactct

SEQ ID NO: 5248 - DNA, 342 bp, Arabidopsis lyrata
  Intron number 4 from transcript 488348 (locus 488348) deri ved from phytozome v7.0 (chr-ID scaffold_6; pos 6117041 to 6117382)
cctttggcgaatttgaggtagttttcactttctcgatttttctcatgattgaggattttgatgttttcaggtttttatttggtgattttggacctgtaggctgtagtttgttctccgcttgggtagaaaatgcctcttggttagacttagctctaatttgtgatttcaattttatttttagatgttttcctgggtaatttttaccaagttggtggtatctgtctctgtggattctctataggttattctcttctttttttccccttttaattgtgatctcatggacccattgttaccactgtattagattatacattttggggataaggtcatacttgaaga

SEQ ID NO: 5249 - DNA, 17573 bp, Arabidopsis lyrata
  Intron number 1 from transcript 914090 (locus 914090) deri ved from phytozome v7.0 (chr-ID scaffold_1; pos 25917897 t o 25935469 reverse strand)
gcttcggattcaccggaaacgagacttctcaagtctctttcggcggaggaaaccaaaacgacgccgaattgctcttctcacgaccctctttctctcccgcttgttggagtaagcttgaagttaacttaaaccggaagcaactaaaccgagttatggtttagagaggataatatcaaatatattaggagttatctaatatatatgtaatcctagttgttggtgtcggatcccgcaccagaagtacgagaccaaccaaagattgccacgtagtcaagataatggcccataaagaatgaagtccattggacccaggagtcaaaggaacggtcgaagtggctgtcaccacttcgagaatccgaagtgattacattgcgacatgagttcgatgaagaaggcatgggtaagatggttcaaggatatttgggccgaataggcgaggcccacgaagatcagagtcaactcaaattcaaacgttgagcattaaagtcaaagaatcaaaacggacacatttaagaaggaataattgtgcttaattactcattttaatgtcgtttctctatgtataaatatagaggccaatggccatgtaaaggggacccttcctctcaagagagaaatattatagcaattttcgtaacaattcacaagtttttatacattcatttttgtctctcaagaataatctttcccacttaataaaatacttgagtgtgtgaatccaacatccacattttggcgccgtctgtggggagaattaggttcttgagtggtcagattttttctttatcacacttccgagataagcaacaatatccggaggagacgccgctgagacatcattggccgaaaccctcaaagctatgcagcaaaccatgtcggacatatcacaaaagttctcggatgtggaaaaggccgtcgatacgttgcaaacatcccaggtatctcttagtcaaaacgtcaatactatacaaactcgtgttcgctctctaagtgcaggaaacccggtgggaatccgaagagggatattcaactcgccaagttccgctgcacgaaatgaaaccagcggacaaacaactcctggtgctactaataacgtggctaagacgttggaagaagagacacagctcggagatgaagaacaacttgcagcccaatacgggcaggagaacctcgaccagtttgagaccatgaggaaggttagccaagaattaaaagaaatgaaatcaaaatttcatcaagctacaagttcggagccagacatcaatcgagtcattgaagaggctaggcgaacacctttcatctcgcgaattgcaagtttgaggatcaaagactcccggaaactcaagttggacccttacagcggattggaggatccaaaaagctatctcgcagcttttctgatcgctgctggaagagtcgagttggatgaagctgatgaggacgcaggctactgcaagcttttttcggagaatctatgtggccaagctctaatgtggtttacccaattagagccgggttcgatcagcaatttcgacgaactatcagccgtattcttaaagcaatactccatccttatggataaaagcgtttcggatgccgatctttggaacttatcgcaaggatctaatgagtcacttcgagtttttatcaccaaattcaaaggagtgctatcaaagctcccaagaatttcgcagcaatcagctttatctgccctacgaaaaggattgcgacatgattcaaggtttaaagaagacttaatacttcataaaccagacacaattcaggatgcactattccgcgcaaataactggatggaggtagaggacgaaaaagaaagttttgccaaaaggaataaacaagaaaagccggcaatcaccgtccctaccaagaagttcgagtctagggaaagcaaaggaccaaggaaatttgggtcgcaacccttcaacagtaccgtcggaaagcaattccaagggaaaggaagatcaaacacttgggtccgtgatgaaagtctatattgcgatattcataaagtaaccgggcatttaaccaaggattgcagcgttcttaaaaagtacctcgcagagctttgggccagtggagatctttccaaattcaatataaaatattttgtgaaggaataccacgaagcgaaggaaaactccaaagaccaagattccaaaagaccaagattatccaacgaggaagaaccaaggagttcgaagggtaagatcaatgtgattctaggaggttccaagttttgcggagattctataagttccatcaagaaacatagacgaaatatcctactcaaagcaaacttaagcgaagaagtcgattttcaaggtacatcaatatcatttaatgaagaagaaacgcggtacctcgaaaggccgcatgatgatgctctagtcattacccttgacgtggctaacttcgaagtatcaagaatccttatagataccgacagttcggtcgatttgatctttttaagtactttagaaagaatgggaatcagccgaggagatatagtaggacccccatctccattagttgtgttcacaagcgagtcagtcatgtctctcggaacaatcaagctaccggtccttgccaagaaggtatcgaagatcgtggacttcgttgtcttcgataaacccgcagcttacaatatcatccttgggacaccctggatttatcgaatgaaagcagtcccttctacataccatcaatgtatcaaatttccaacatcaaatggggtggaaacaattcagggagatcaagaagcttcacggacatgttacctagctagccaccgtatgaagattcaatagcaactaacgaagcccgtaaaagagggactaagaacaaaatttcctagcgggcagaagaaagatgatgtagtaatcgaagtggtgttggaagaagacaagccggaccggaaaatttgaattggagcaactctgtctggccaaataaaagaagctttgatcgaacttttaaagagaaacaaaacatcgtttgcatggtcagcagcagacatgccgggtatagatccaagtataatttgtcatgagctaaatgtagatccgagcttcaagccggtgaaacagaaaagaagaaagctcggagtagaacgagccaaaatagtaaatgacgaagtagataaacttttgaagataggatccataagagaagtgcaatacccagaatggatagcaaacactgtcgtcgtcaaaaagaaaaacgggaaagatagggtttgcatcgatttcacagacctaaataaagcatgtcccaaagatagtttcccgctcccacatatagatcgacttgtagagtccactgctgggaacgagttattaacattcatggatgccttctcgggtaataatcaaataatgatgaaccccgaagatcaagaaaagacgtcattcattacagatagaggtatctattgttacaaggtaatgccttttggtttgaaaaatgcaggagcaacttaccaacggttagttaacaagatgttccataatcatctcgggatcacaatggaagtctacatagatgatatgttggttaagtcgttaaagaaagaggatcacattaagcatttagaggaatgttttgatattctcaataaatatcaaatgaaactgaatccggcgaagtgcacatttggagtcccatccggagaatttcttggttatatcgtgacagaaagaggaatcgaagccaatccaaatcaaatcaacgcctttctgaacatgccctctccaagaaacttcaaagaagtgcaacggttgactgggagaattgcggctctgaatcgttttatctcgaggtcaacagataagtcgttgcctttctaccaaattttaaaagggaacaaaggattcctttgggacgagaagtgtgaagaagcttttgggcagcttaaagcatacttaaccactccgcctatattgtccaagccggaggtggatgaaaaactttatctatacgtgtcggtttcgaaccacgcggttagtggagtcttggttcgggaagaccgtggggagcagaaaccaattcactacgtgagcaagtcaatgacggacccagaaaccagatacacaatgatggaaaaactcgcactcgcagtggtgatatcggctcgaaagctacgcccgtactttcaatcccatccggttgaggtattaaccaaccagccactccgaacaatacttcatagtccaagccagtccggacgattggcgaaatgggcggtggaattaagcgagtacgacatagagttcaaaagccggatcagtatgaaggctcaggtcttagcagatttcctgaccgaactaccaatacctggaacgataagacaaccggagaaccaaacttggaagttacacgtagatgggtcttcaacaaaacaaggatccggagtgggaatcaagttggagtctccgacgtcagaaattctagaacaatcattccggttgttattcaatgcctccaacaacgaggcagaatacgaagccctgattgccggacttcgattagcacaaggagttggagctaaggaaatattagcttattgcgattcgcaactggtagttaaccaatttaatggagactatgaagccaaagactcaagaatggaagcgtacctcgaagtggtgaaggatttatctaaaaatttctcgaaattcgaactaatccgcatacctcggggagagaatacaactgcagacgcacttgcagcattagcatcaacatcagatcctgagttgaaaagagttatttcagtggaatgcatttcggagcgaagcattcaagacagcaaagaaaccctcgtcgttacaaggtctcaagcagcggcacgcgaccgtggcgaaccagagatcaaaccgccacccaacaagcggaggaagtcaaggggatcaaatacatctaacaaggaacccgttgccccagctgaagatgtaattccagaaacaatattagaaaccgaaccgttaatcgaggaggatgttcttgaaccaacgaacatcccgagccagagccacgagtatttcgcaaggttgaccaaattccggctaaagactggggggctgactggagggagccaataaagcactacatcatgacaggtgagctcccaaagaataaatggcaggccaggaaaatgaaagtcgttagcgcgaaattttgtctgtcaaaggatgcgttatatagacgaggtatcagtgacccttacctattatgcatttttgggcccgaagttgaaatcgtcatgagcgaagtgcatgaaggattatgtgggagtcattcatcaggaagagctatggcttttaaagttaagagaatgggatatttttggcccactatgatcactgattgtgttaagttcgcccaaagatgcaagcgctgtcaactccatgcaccattgatccatcaaccgtcggaattattctcctccatttccgccccatacccgtttatgagatggtcaatggacatcattggaccattacacaaatcaactcgaggtgtacagtaccttttagtccttacggactacttttcaaaatggattgaagctgaggcgtatgttggtatcaaggattcggcggtgaagacctttatttggaaaaacattatatgtcgacatggagttccgtacgaaatagtcactgataatggaccacaattcatttcacacgagttcgatgccttttgtgcggactggggaatcaaagttagttattctactccacgatatccgcaaggaaacggacaagctgaagccgcgaacaagacaatattaagcaatctcaagaaacgcttaagtcatctaaagggaggatggtatgaagaactccaacccgtcctgtgggcctatcgtacaacccctaggcgacctacaggagaaactccattctctttggtttatggcatggaggcggtagtaccagctgaactcaatgtgcccggacttcgtcgaacagaagcaccgttaaatgaggaagaaaattcagcaatgcttaacgattcactagataccataaatgaaaggcgtgatcaagctctaattcggatccagaattaccaacaggcagcagcccggtattacaattcaaaggttaaaagtaggctgttcttcgtgggagattacgtattaaggcgcgtttttgacaacaaaaaagaagaaggtgccggaaaactcggtattaattgggaaggaccttacattattaccgaagtggttcgaaacggtgtttataggttgaaagacctagaagacaatccagtgaagcgaccttggaatgtgatcaacttaaagaagttttatgtttaaagctatatgcattatttttgtacatgaactacggtgtggcttgatcccgagatgggtacgtaggcagctcggaaatgagttcagctattaataaaaatttgttttatttctttattaaaagaaaaaggttcgattgtgcgaacaagtgaagcaaataaaggttcggctatgcgaacatacaaaagattggaaatagagcgttatttaaaagacggaatgtccttcatcgtacacttcggattatggaaatcttgttgatgagcagaacacttcaactccttgaccagcaagatcgaggatcagcatcatgcagtccggaattcgagcaaagtcagaaattccaagctcaatccactctccggggtgagattcaaggatgtgaagatctcttgacactgtagtaagcctgcgttgcatccggttaatcctcttccgaagtctcctcttttccgacataagcttccggtgttgaagctcgagtgcatctatgaacgccgtcgccgttccttgatctctgattaggagatccctgatcaaagcacagggggctcggatctgagatctcaagaagccgcgaagtggaggaggctgcctgtttggctcatttggaacatcttcattcatcattccgattctggagaagtcgggcatagattctgaacagcgtagattgaactccatacctgctaaaataaaaaaaaggagagtggtgaggagtaaaggggaattgaatctataatttataggaaccccatatccctagcaagttgcggattctatccaaggaatggaatgattcgcggagagatttatgccctcgaacggatcctgcattaaaagatgcatctccaagaatatttggaaagaaaggaaagtagcaaatatttccataaataaaaaggggccgaagcccattacgagttttaaaaaaaaaaaaaagagaagaagtgaagaagataaaagaacatttatgggagaggctcaggaacaggctccttcatcgccggtttagtttccgaagtggacgccttgttcgtggcatccacttcggaacgatcccgaacgcgtttccggcagttgctggcctcctcctccaagtcctcttcctcttcactgtcggatggaacggggcagacaggggcgttcacgggacccgggactcctctggcgcggagatacatccgaagcatcttcgggatctcagcaacggagtcgaagttccgccactcccattgaaagggatcgctctccaaggcccgtatcttcctttccacccgagcgatgcgagcctcgagcgtctgccttttgagtcccagccgctgcctctcttcacataagcgacggtgcttgtcggcaacctaacataaaaatgagtgaataagacgaaacaagaagtttttaaatcaaaaactttaatagttaccttgtcaataaaatcgcaagcctctttcttctccttcgaaggaaagtgaaagacggcgtgagggaagagaacgccggccggttcaaagccgtcgccggacaagaagagtgggctgccgggatcaacgggggctactgtttcgttttccattcttaaaatatttctcaagcaagattctagagtcatgtttaaataaagcttaagaggtaggtgagcctttatttataatgatttagggtttgtcttggaaccataaatccattaatgatagcgtgcccaagtggtttaaaccatttttggaaaatcgagaaaaggcaattattgcattaaaagacgagccgttttccttgagaagggaaagagcaaccgtcgcattaactacaaaagtttctaaggcccaagcccaacaagtttaccgagttgactaaacccgaagtggggaactcgctttaagccgagctcagctctcgcatcctaaagagaaaggtctgatcagcctaaaaatctcgaaagcattgccacaaggccacaaaaggttaaaagcggactttgcaaacccgcatataattttaaccaaaccccctggggtcacaacctagaaaggtttaaaagcctcctcagacaaatatcttgttcaaaagaaacaataaagccttcttaggccaaaaataagtttggaattaagtcttaaaattaaagggacaatccccaatttaaagtggacacagccactacggagtgatctccacctcggactccggctcagcaatcagagtttcattcacctccttgactggtgcttgatcagatgaagctccctgaccaccctccgcggtacaaccaacctccggagtgacctccggtatcacaggagctacgggcgggacaatgccttccgtctcgcttgaacctggaaataataattccagtcaatcaaaggtacaaggtaagaaaaggtaagcctccggagccaagcgttacctgcccagtccaaacccgattcacttataggaggtgattcagtaaagaatttctcgaagtcaagcgggttgaaggtcgaagtgggaagagctgccaagcgactccgtttttcagaaagattagttgacagctcagtcctctcttgctcctcagagaaatctgcttcatggatttgatccagcagaatcaggttgctttcatgctctttgatgtctgactctaagtccgacctagccttctcagtttgcatgaagcgaatggccccttggatcaactccatcccgcgtcccttaacctcctttctggccttcgatgtcgaccttgccaactcagaatcacgcaacttggctagcgccttgtatttcgcgtcaagctcgataagttggttgttcagggtgtcggcggttgattcggattcatgaagtctaccctgaacaccagaaagttcgtcctggagcttgtaattccggtcgtagtagtcttgcagctccccctttacttgcgccagctcggatgttaacctgtcgaccttatcctccagatcgtgcttggagccagcagaagaattgagttcagtctcaagagctgagaatttcttcttccacatatcaatttccttctcccgtccaatgaccaacccttcgtaatgttcgatcatgtcgttaagttcgctatgagcctggcatcatacatgaacccgggatggcgattcagttcgcggaatggcaatacaataaaaacaaaaaaaaaagggggaagaaaacggaactaacccgagatgaatgataagcgtgaagcaaatagcgttcacgaattgcagggcgccatttgttgaaatctggcaagatcgaacccgaacgggtcttgaagcatcggaagacgctgccttctgtctccatagctgcgaagaaggaagaattgtaaaaattggaattttaataaagacaaaaagtttaagcatgtatagatcaccaaacctgaaagcgatttgtcttgagggacaagagcaggcttcagcctcgaggaagcatctcgagattcagaatctccacttttaggggatgcactccgagcagtcttttcgctgacgggctgggaagaagaaaacatgtcaacaggacggggaggacccattggttcagtaggaggggaggatcgaggtgaacggtcagtccgggcccttgatttctcccttcgcggagacaagtcatcacgggacgacttgtccctcttcttacgaaccaaattcttaagtggttcgttgctaaaatcgtctcggggaggacgaggagaatcacgacgaggagaccgctctctccgaggagaacgttcgtcgcggcgctcgcggcgaggtgttaacctaaaagcagcaacggatcttgctccctcggagctgttgtcatcgaccagcagggtcctactgtaatcttttttgtcaatggcggtcgcaaggaacgccttgttttcatcacaagcctctgctatcggcttggagagcttcttacgctgggcagcgagggcccgagctgacattccctgagttgagggaggaggcggaagacgatgaagtagattgggaggactcatcctgagtttccggttggcctcgacaaaccggtcgagggtgaaagaattccaaagggtttccccttcaaggattgttttgaagaacttgacaaattcttcggtcgggagagttgaagcgatgaaagctgcgaaatgaaacaacgaattcggtcagtaaaaaataataataaacaataaaggaatatacgacctagtctctaccaggtttcgcagaccacttcgatgggagtatatcggaaagattcccaatcgaagcgggagttttcttaatcagaaaccaaggatggtgccagttctcatccttgttcgggaggtgcgagatgacgtttctattggcatttggatacgctgagaagtacccagttttctttgatgaactccttacgcttaggagttcattcagctcggggactccaatgacgtagccggcctccgccgcaacggttataatcctgaggatggttcggaggagattgggggttaattgaggtaaagcgatctcgagagccgccaagaatcgaactagggcttcaggaagggggaaggtcaatccgcagcccttgaagtaaatttcgtaaacgcaaaagtagccggcacggtggttctcaggagattccgtagggtcggctatttgcgcctccgctataattccaggaggaatttgacaaagccccttcaatcgctcaagggattgaagagtacaggtggatttgtaatgaggaccggcgatgtcgttaggacgagtgcattcgtcattactagaacgcctctcgtcgtaagacggagattcaggtctttcagaatcagaagtcatcgaataaaaatgaaaaattcaaggtccggcgaagagaggttttttttgtgaagaagagaagagagagtttttgattaaagtacaaaagtaaaagaagagagtaatggtgaaaagaagttacctcaagctaatgatgaaaccgcctcggaagtcgtgtgggaagtgggaaggtttttcccgttttaatagtaattaaacaatatacggtcataatgatgacagatgtcactcagttaaaaaaggctagtgccgaaattaaaggagtgatgagattttcggcgggaaatcagaaagattctcgagcgcaatctttggctatttgagcatttaaagtcctccgaattggaatagcacttcgaagaacttggggggctaattgttggtgtcggatcccgcaccagaagtacgagaccaaccaaagattgccacgtagtcaagataatggcccataaagaatgaagtccattggacccaggagtcaaaggaacggtcgaagtggctgtcaccacttcgagaatccgaagtgattacattgcgacatgagttcgatgaagaaggcatgggtaagatggttcaaggatatttgggccgaataggcgaggcccacgaagatcagagtcaactcaaattcaaacgttgagcattaaagtcaaagaatcaaaacggacacatttaagaaggaataattgtgcttaattactcattttaatgtcgtttctctatgtataaatatagaggccaatggccatgtaaaggggacccttcctctcaagagagaaatattatagcaattttcgtaacaattcacaagtttttatacattcatttttgtctctcaagaataatctttcccacttaataaaatacttgagtgtgtgaatccaacatccacactagtgagattaggatttgagagattagcataaatagagaggtcgagtcatgacctaattgtgtgagagttgtgtggttttaagagagaacaagagcttaagttttgagttagtttcttaagcataataaagtgagttttactttgttgatcttgtagtcttattcatacaaatctctattctatatttggtataagagcagagcgtgtaagatccgtgagacatcatgagtgaaattacggatggatcaaacacggctttggcgacggtgaaagacggaggaagctcatcatccatcaagtgtcatatgctcaccgctactaattacacagtatgggccatgaggatgagaatcctacttcgtgttcacaaggtgtgggatatcgttgagaattcatcggaggacgaagagaagaacgacatagccatggcgttgttgtttcaatcaattcccgaatcacttgtcttacaagttggaaagtcggatactgctaagaaggtttgggaatctataaaatcaaaacacttgggcgcagaaagagttaaggaagcaaggctgcaaaccttaatggcagaattcgatcgtttgaagatgaaagacaccgagacaattgatgactttgcaagcaagttatccgaaatctcttcaaagtcagcatcattgggagaaaccattgaagaaagtaagcttgtaaagaaatttctcaagagttttcctcgcaaaagatacattcaaatcgtggcttcacttgaacaagtactagacctcaagaaaataagcttcgaagagattacagggagacttaaagtctatgaggagcgtgtcactgaagaagaggaagctcaaaatgaacaaggcaagatgatgtatgctaatatggagtcaaatgcctctcagcctactcgtgaatttggaggagaatatagaaccagaggacgtggaggaagattctttaatagaggaagaggacgaggccggtataatggaacaagagatacctcaaaagtaacgtgctatagatgtgataagcttggtcactttgcatctgattgcccggaccgtttgcttaagctgcaagaaacacaagaaaacgatacaaagagcacagtggacgcagatgagttaatgatgcacgaggtagcgtatctaaatgaagataaggtcctacctagcaagtatgaaacaaattctggagaatacaatgtgtggtaccttgacaatggcgctagtaaccatatgaccggagataagcgttatttttcaactatggataagactatcaccggaaaagtaaggtttggtgacgattctcgaatagatatcaaaggaaaaggtaccatagaatttatcgacagaaacggagagctaaggaagatggttgatgtctactttattcccgaacttaaaagtaacatcattagtcttggtcaggcaacagaatcgggttgtgatgtgaggatgaaaggagagagtctaacaatgcatgaccaagacgggaagctacttgtgaaaacattgagatcaagaaatcgcctctacaaagtaagtatgggaatcaaggagacaatgtgtttatatacaacaactcaagttgattcaataagatggcatgcaaggctaggtcatatcaatcatgaaacaatgaagacaatgataaaaagggaacttgtaatgggaatctcacttggtaactttgagaaggaaatatgtggctcgtgcttacttgggaagcaaacaaggaaagtttttcctcaagttacaatgtatcgtgccactaaaccacttgagttgatccacagggatctatgtggtccaatcacaccaagcacggtggcgggtaacaagtatgtttttgtgcttatcgatgactactccagatatatgtggacggtgctgttaaaggagaagagtgaggctttcgagaagtttaagagatttaaggctgtagtagagcaagaaacaggggaaaaggtacaaaccttcaggacagataggggaggtgaatttgtttctttagagttcaatgatttttgtgtagtttcgggcataagaagacatctcacagctctatacactccacaacaaaacggagttgttgaaaggcgcaatagaactctcatggaaatgactcagagcatcctaaagcacatgagggttccaaatcgtttttggggagaagctgtgaggcactccacgtatcttttaaacagaatagctacacgatctctaaaggacaagacaccatacgagatgctacgacaaaaggtcccgaatgttaatcatctcagagttttcgggtgtgttggatatgcgaaaacagaggcgtcacatttgaagaaactggatgataggtcacgtgtgttggtccatttaggtacggagcctggatcgaaagcatacaggttgtatgatccgaagaatagaaaagcagtggtgagtcgcgacgtgatctttgatgaaacaaagggctggaattggaacaaaaacgatacggagaatgataacacgagagagcttagaatcgagtttggtattttcgggaatcatggtatactagaaacagagcatataaaagaaacagaggtgccagaagctgttgaaaccaacaccggaatagaagagaatgagtccacaggacacgaaaccggcggagagtcctcagagaatgaaagcaacgacgatagtgagaaacaaaaccaagctgctgcgggaagaatagtaactaagttaggaagagtagtgacaaagcctaagtacctacaagactatgtgttgatgagtgaagcagaaggagagaggctgctaatggctttaaatgatgagccatgggatttttcagaagcaagagagtcaaaagagtggttggctgcgtgcaaagatgagattcattcaattgagaagaacaaaacttggaatcttgttgaactaccacaagaaataaagcctataggactaaaatgggtctttaaactcaagaaaaattctgatggtagcataagcaagcacaaggccagactcgttgcaaagggatatgtgcagcgacatggaattgattttgaggatgtatttgctccagtagcacggattgagacaattcgtcttctcttgagccttgcagcgtctagtggatgggaaatacatcatctcgatgttaaaactgcgtttcttcatggagaattaaaggaaacagtttatgtgatgcaaccagaaggttttgtggtaaaaggacatgagaacaaagtttataagcttagcaaggccttgtatggtttgagacaagctccaagggcgtggaatgagaagctaaaccaagtattgaatgaacttgaattcaagaagtgcaccaaagagccatcagtctatagaaaacgggttgatcaacacattcttcttgtcgcagtctatgttgatgatttatttgtctcaagaacaagtcttaaggtcatagagggtttcaagaaagagatggcgatgaaattcgaaatgagtgatcttggtaaactaacctactatctcggaattgaagtttgtcaacttagagaaggaatagctttgaatcaaagaagatatgcactaaaaatattagaggaagctggtatgacagaatgtaatccggtgcatacaccaatggaagcaggtttgaagttatcaaaagccttggaggagaaggacattgatgccacaagctataggaaaaatgttggttgtcttcgttatctactacacacgagaccagacctatcctattgtgttggtgtgttaagtcgatatatgcaacaacctaaggagtcacatggggcagcaatgaagcaatgcttgaggtatttaaaggggacaactactctcggattgttttttggtaaaagtaaagaagtaccaaggttaataggctatagcgatagtagccataacattgatccggacgatgggaaaagcacaatgggacatgtgttttattttggtaagagtccaataacttggtgttcgcagaagcaagatgttgtggcaatgtcctcatgcgaggcataatttatggcgggaacggaagctgcaaagcaagctatttggcttcaagacctactaagtgaaatcgtcgaagctccttgtaagaaggttaccatacttatcgacaatcaatcggcaattgcactcacaaagaatcctgtcttccacggcagaagcaagcacatacatagacgctaccacttcataagagaatgcgttgagaatgggctaatcgaggtactacatgtttcgggtgaagagcaaaaggcggacatactaaccaaagcacttgggagagtcaagttcaaggaaatgaggagtctcattggagttaaggacatggcgcaagaagacttcaagcttaagagggagaatgttggagtaaacttgaagttaacttaaaccggaagcaactaaaccgagttatggtttagagaggagaatatcaaatatattaagagttatctaatatatatgtaatcctagtgagattaggatttgagagactagtataaatagagaggtcgagtcatgacctaattgtgtgagagttgtgtggtttttaaaagagaacaagagcttaagttttgagttagtttcttaggcataataaagtgagtttactttgttgatcttgtagtcttattcatacaaatctctattctataccgcttctcctctctcttcacgcaataacgcttttgcggtcgatgataaatcttgtatatgcaattcctaattcgactttcgaatagattcgttagttccgcagctctgggagataattccataattccattttttaattaagaggcaaggaggaataccgctttagatttagaaaaaaaaaagtaaagggagaatgccgctaaccttgctgctgatcccattcccgcatgaagtctactaaggcgtcgcccgcctttttttcggaacttggcctttcctgcccttgtaaggcagaaattttgcgcataacttatactccctctgtcccattttattagatgtttagactaaaagcacagaaattaagaaacaataaatgttttctcatttatgaaaattcaaccaatagaagaggatactgcataattaaaataattaaaaactattaaactaatataaatcatgcattgaaagtagagaaaatcttatataatggaacaaatgaaaaggtctaaaacatcttatatattgggacagatggagtatataataaacattcctatagttaatacttaatattacttgtacttttagtgaagctttaagggtcaattagtgattgttttccttgattaaaaagtacacagtataaattataaaaccataataaattttatatctttgtttaagattaaagaaaaaggataatcaatcagattattggcatcattgcatgcaacaacacaagatccttctttttttttgggtctaataactcaagatccttatgatgtacttatatatattggtttcatgtttgtcactttcgtagaagaagagaatcagttcgggtg

SEQ ID NO: 5250 - DNA, 5899 bp, Arabidopsis lyrata
  Intron number 3 from transcript 491802 (locus 491802) deri ved from phytozome v7.0 (chr-ID scaffold_7; pos 5258841 to 5264739)
tgttcagaccaaatttagtcaatagagcagaagaatttaattagagcagctcggcaagtccgcaactggcacttaacttcaagaaaaaggtgttctggatgcccatctgtggttcttcttaccacggctcggtgatcttcggtcagatcacagtccctgaaactgatgtagaagattgcattcccagccttgagctcttgctttggctccatggctttgtacaacgaccttcttgatcttcagaggtgcagcaaacttgagctttgtcttggagacaaaagacaagttaggcataaaaattaacaaccaacattaatgtttacacattgtataaccaaaagccagaggcatgtgaaacagcaaaacaaacaaataaatttcattattaaggattcagatcttcagtttattacattgcaaccaacatcttagataaatttatagatactgactactgagagaacagtacctatactgagagaacagtacctaatagatatcatactcaggccaaacttctaagttaatagaacgactcacagatccttgagccaacacttaaactcaagacaaacatgtcctggaatcccatcaacagttcttcttacaatggctctgtgatcttgaggtggaccatgaggagcattcaagactctgaaactaatgtagaagatcgcattcccagccatcaacttttcctttgactccacagcttcacgagtctctacaatgaccttcataatctgcaccggcacacaagactcgagcctcatgtctccttcccacagcgagtaagacgcaatttcagtgtatagattaagccagttgtgttctttgatatctgactcttgcacctcataaaactgatcttgctcactgcatggtatcaaagcatcatccgaaatccactcaggtagattgcctttgtagatatcatcaattgcttcgtcattccatcgctttaatatgtctccagtacctttttaaaacactttccagcatcatcaagattatgataacaaaaagaaaacaacccactaaaatcaaaaccacagtaatttaattcaccttgaatcttgggttttattctacaaacttcagtcagtatcctcaggtcttcatcgttcttacatgtagttctcgtagcacatgtctggaaagtgaaacgtgaatcgttggctggatcaatagcctccgcagttatatggtaagtcataagcgcacagaatctagagttatatttatctacgtgcataaactcaaggtttgagccctgaaatcagtggtagagacaaatgtcaaaattagtagaggagcaaatcgcagatacagaacacaatggttccaatctagttagaaatatgagaatttttaccttgtgaaagttgtaccaatggagtcccactctagcacaaatgccaacaatgtcagcatcacgatagtcatcattgttggcacatttgtacacataaagaaaactactcggaatacgtatgtcaacatcaaatccctgcgaaccacaatcattacgtacgagaatattatcaaagtcacacatgaataagttgagatcagggaaaatatgtatctttacgtcggattcgcgaatttggcgatataactcttgctccaaatccgtgaccacatcatcatcatcttcgtcagtccatccagatggtggatcattatttacagcggcagaccattcttctttcgatataaaaccgctactaactacatcatcatcatcatcatcatcatcatcatcatcttcgtcagtccatccagatggtggatcgttatttacagcagcagaccattcttcttccgatataaaaccgctactagctacatcatgcgacacggtggtctcttcaaatttccgtttgcccactgcttccatatcctaaaacaaactctagatgacagcaaacatgtgggtaagtgaataatacaacaccaaatccatgagatacacataatcgctaaatgtatcacatgaggaacagcgagacgaagactggcaaacccctaaacaatttcagtcaattcgaaattacaaatctgaaagctgtggcttcaaaatttcaaaatatggataagaaaatagatctgcgatggttaaaataaaagtgagaagcagatttcacgaacctggtaatcgtcttcttcgtcgattttgcggagacaagtaggggaaattgaaaatattattattatttgtaaggcataaaccaacgtcgccgttttgtgtagagtgtcccgtaataaatatattagatattacgccgtcgtttaaggtttatatatcggtaaaccgattttttttcattccactctactaagcccattttgtttagaagcccataatatgggtctatcagaaattagaagaatagataagtttgagaatacaggtacttgagtgtaaaaactaataaattaaaccgtacatatatggaaattgattggaccaattgtcaaattcccgcttattcgtcgccggctattgtttaattcgtcacaagattttgccttcgtcgatcgtcaacagtaacatctttttgcattccgtgtacagaaagtcagaaactatagcgaacgtacgtaagagttaggtctagctagcgtaatgaaatcataggatctcctctctttctttctttctttctttggtattttctgttcccagcagagatctttggttattgatcgggtctagtagaattgaaaatcgagttgtttaaatggatgctaatacttggcgtatgtagtgttgatcttgtttctttttttggtgtgttagaaacaacacccctccggtaaaaggatagcgctctatgcatagaagaagaaacaagatccatggtttctaacttaattttctttatccgatccgcaggagaaataagcaaaaatgtcgtcaatcatgaaacccaaagtaagtggatgccaaagactatagaatgcacatgtacaaaactgagaaaactccttaatgattgtagtcgaaacttggttccttgtttgaaacaggaactgttatccgtaactcgagcaaatgtgaaggttcttgctcacattttagagatcataccagttggcacattctcgcaaatcatggcaacaactcctaattctggcatcaaggttgaggaggtgctcgaagcagtatatgcacgttggcgtgtatcacgggtaatggcatgtaccattcatttgttatcaagtatttatgtatagagttatgtagacttaaaaggaacagctttcactatttcagcatgtccaagatagcctgaaaggtacggattgggagaaaaatatgtgtcacatgagagatcaaggatgctgccgtaaaaactctttccaagttttttacacacacatatctgcttgacgataaacttcataataatcacttttttttttcctcgcagagacatgctgggcagtagtggtgtcggagcttattagtgcgttgctctttattgagggcatagacaacgaatatacggagtactcaatccaagaactagttgattttgctgatccgtcgaaggcaggaacacataaagaccgaaaacactattgttacactctaagtatagggaaaggtttggactatgtactcaaacatgggcttcaaaaggcaattcataggaagtatgtggggtgtagaccaaaatccgagattccagcacgttctacagtagatctggcacatataactcgcgtggatagattatctttccctgaagcacttatcagacttaagagacaacccattggagcttccctctacatattcacgcctgattacgtgaatactaaaggggtatgtatctgtatttcttgaatttgatctaaaactgttaaactcatccaaccatatgtgattctggaaacatactgaaacagggcgtttatcgtggccccatggaaaaagagtctaaactagaaggagttcatgctgtttcaattcttggtgtgacagaggaaaaaggagaaatgttgttcaaggtcaaatccacccacggtgatagggtaggagtgaatgggtacctcaaagtttcaatggaggttatgttggttcaaattcctaaaaagggcacgcttcctgatggtaagtttgagaaaccgacgccattgatccatcggttctgctgtccaactattattcctaaagctaaaggagagtctagcgcaatgcaatgcgactaaggttggtaagtttcttttaactttctgtttctttttttccaagtttagatgaatgatgttcgtgttgtttaaagtttaacgcattttcatccttcagtttcaggggaattctgacgccaagtagatatggtgagagactaacatctatggctgtataaaggaaacagtggattctcttctcttctatgataattaagaaaacaaaatattgtcttttgtagtttgaactagacctaggtatccggttcaaccaaacaaacagttttattggttaaaagaattttttgtagctgttttgttgacgcttaatgacaacaaagaagaaagaaataatagaaacgatattgtggaaagaccagacgaatgagaatgagatctagactagctactaagagcaactggaaatttttacaggaaaacctgatttttcctttactctcacggctaatgtaagtaggacacatcttcaatgtattataatgatataccaaagtgaccaaccaaaatgaactttcctttcactgttttaagaaaattttgtgcccacaatgttcacaacacttgtataagcgattttctgtgactgcaacatggcggatactgcaggaacactgtacagcttttggttctgttcctgcaataattaagtatcaaatacaaaatgtaaaaatgtttctgcgatagattcacagggtaaaagacagtgagaattgagtaataacaagcaccatcttcgttaagtagctcttcaagacttaaagggactgtttcagtagacatgaatatcttacgacagactgctcttcatctaccaatgccaagaaacactccaaatagactgaatctaaagatggggaagatcaaatgcttggctaaaaagggaaatgaatgatatgtatagattcagtcttaaaggctcttcatcgtgaacttggcgataatactcttgttcgagaaccggatcaacatcctcgtctgaatcagatgctggtggtgggacgtaacgtaatcggatccttttttacaggaacacaccttccttcttccaatatatacaaggtccggctggtttcttcgaccgacttaccttcggccgttggggtgactttttcgacctttctctttcgctgtggaggtggttcattcgtcgccatgactcctacttggttgagtacacgtgaaattaaagggggagagagtcttagatccgtatcctctctaaaaaacgtgtgactcgttttgaaattaaggtatacaagttacaacatataaatttgccgatccatggtaggttacttctcatccacggtaggcagtgttactgttatgtttttcttttcttttttttcgtttctctagtggtgaaagtggtgggtctcacgaaggtatgagattattggatctctctgtttctatctctctgtctctctatttttttctttggtacttgagcatttcgaaaatttgttttgtgcagatactctgctgcctcaggctttcaagtccatctccatctgtgagtgattttaaggatgttgtgtgcccacaaaatgttgacaacacttacttacaagctatatatcaaactgtattacaaatccagtgatagaaattgtgtggaacaatagtaaggtatatagagcagaagaatttagttaatagagcagctcgacaa

SEQ ID NO: 5251 - DNA, 759 bp, Arabidopsis lyrata
  Intron number 2 from transcript 485547 (locus 485547) deri ved from phytozome v7.0 (chr-ID scaffold_5; pos 15841213 t o 15841971 reverse strand)
gccggcgttttcgaagcctctcttggaattttcaggtgcttttttactttgattctccttaattaatttttgtcctttttatatggttttacttatataaaagtgtgagttatatattcggtccaatgcatgtggaaaaagattccggcataaaaattatctaccaaatactgtagtaactttttcttacttttttgtttctttttgtatttcttaccttgatttcttactaagactatgagtgaaatgcgtcatcgcgagttacgtcacgtgaaacaagatatagttgctgacaaacgggccaatagggacaaagctagataactatagaaaatcttacggtaatataattacttgactggtatggtcggtttaataagtatattgtatgcgacagtggagaatcatactagaataatgtaattactttactcgtaagatcggtttaataatatatgtttataatcttagtgtgatttattcaaaagcaaatgagagatcatttctgtgacgtatagatatttagtatataaaaggtagaatctttcattggctccacaaaatttcggtttatctggccagaactggattcaggcctaggggtattaactaaggttggtgagtttgatgatgatatatatgagttaatagtgcaaactgataaattaattgtttagtagctaaacaaaattaaattaagaaaaaaataataatgaaaatgaaattgcaggttaggtttcatagtggactttctatcgc

SEQ ID NO: 5252 - DNA, 11220 bp, Arabidopsis lyrata
  Intron number 1 from transcript 480599 (locus 480599) deri ved from phytozome v7.0 (chr-ID scaffold_3; pos 21856550 t o 21867769)
agggctttggggtacactttctttgccttcaaaacctattttaacaattctccgattcatctcttttgatgggttcggttctgtttctttcgatctctttcaggtagaggcacaagaagttggagagttaaaacacaagagactcgtcaagttgttgggatattgctgcgatgaagatgaaagacttcttgttgcagagttcatgcctaatgacactcttgctaagcgtttgttccatcgtatgattcattttcttcttttgttttcacatttagaaattggtgaatctgaggttatagatagggaatcagaacttgatagcattctctgtttttgaagttctaagtctgttgtgattcacagagaaaaaccaaaccatggagtggtcaatgaggttgcgagtggcgtatcatatagccgaaggattagaatactgtagtagtgcaggttttgcaaagtacgataatctaagtgcctccactgttctgtttgataaggtatgtaaaacaacatttacacacgcctatgccttctctcgtatgatcttataaggatgctaaactgttttatatttgcttaatggatatattgaaggatgatgatgcgtgtctttcctgtttcggtttagtgagagagatcatcgattatgatcgaagaagaacaggtacatcaatttgcatttctctcttgagattattcatatcagaatgtgatgtttatattctcattgtaggaagtgtgaacactgggaatgtgacatacagatttggtactatccttttgaatctactaactggaattcaaatttctccaagccatgtaagtgattctgttctcaagtcctcctttctttctttcacttgacgttgtggttgtaatcataaaattatgtcattgtcaatttcttgcaacacaagccatatattactgagttgttatttcgtctgtttctaggctcctgagatgatcaatggaaaggatattactgagctgatggatccaaatctgaagggaaagttctctaaagaagaagctaccgtgattttaaatctcgcctctgactgtttgcagtgcacggatagaaagagtctcatcacaaaagagcttgttgcaacacttgaaggcttgcaggctaaaaacgaagtaaggagtcttactgttattgtaattgcattcttgataatctttcgcattcgtgttataaaactgaatctttttgcttgcaggttccttctgaaatgcctgaaataacaaagcagcaggaggaggcatcatcttcgagtcaacagcaataacttgaacactgaatctgctaatagcttcaacaaagtaaaatggttagggtagaagaatcttgattttctgtggggtaaaaagtgaactatatactttgacatattctttgttggtttctgattggggcgttttgtgtaaatttttgagctaagactcaaaaccaaagttgaaaccttgtttttttttttcatgttgattagtgtaatgacaccaaacccatgcgtatcaatttttacatagggacctaaataaagtgtgataatcaaatgagaactacatacttggtggcttagtacaagtggcaatctaaaacgttgaacattttctttttgttttgatattctaaaaaacgttgaacattggagccaatatattaattagagagttataatgtaaataaattcctctcatttaccaaaaataattattatttaaacaatacataattatgaagttattaacaaaaagatatcatagtagtaatcttgatcttagtacacaataaaacttttatcataatcataaagccttttacccaacggtctctgtctctctataacgaagaacgctttggaagctctgctttgcccgcgaaaacgtgatcatcatgggttgttgtttcttctcgacgcctctcgagaacgacggattcagcgactggcctttcatagagttcttcctctccgatctcacgaaggcgaccaagaactttagtgccaacgagatcatatcagagaacagagaagaatcttccaatgttgtctacaaaggtcttttatcagagattcttgacttcgtcgctatcaagagattcaagaattcagagtggtctgatcatgaagaatttgcggtatcctttctttgcttgtgaattttgcgatagttattgatctcttttgatgggtttgattctgtttcttcaggaagacgcaaaagcagttggtgaactaaagcacaagagactcgtcaatttgattggttattgctgcgatgaagatgaaaggcttcttgttgcagagctcatgccgaatgataatctcgctacgcttttattcaatcgtatgattccttctcttcatttgttttcacatttaaaatttggttgatttgtactatagatggtgtctatgtatcttcttgtagaatcaattaagaagtttttagcattctctgttttgaatccgaagaatcggtattgaatcagaacttgttagcattcacagagaaaaatcaaaccatggaatggtcaatgcggttgcgagtggcatattgtatagccgaagcattggattattgcaatagtgcaggttttgcatcgtacaataacttaagtgcttactcggttctgtttgataaggtatgtgaaacaacattttcatgcctataccttcttaatgatctaaggatgctaaactgtttttattgcttaatgggatattgaaggatggtgatccctgtctttctagttttggcttgataaaggcgatcaattatgatcgaagtcagagaacaagaggtaatcaattcgcttttctcttcagattgttcatatcagaatgtgtgatgttacataatatattctcattgtaggaattgtgaaccctaaaagtgtgacatatagatttggtactatccttgtgaatctgctaactggaaagcaagttcctccaagccatgtaagggattctgttcaagtcctctctttagtagcttagtaatcttatggattaatcattgctcttgaccttttgactgtaacccttagaaaatctgtcaatgtcaattccttgtaacacaagccacatatataagctcattagaatagttgtgattgtaatccttaatttcttgcaacacaagccacatattactgagttgctatcttccaatttctaggctcctgagatgatcaatggaaaggatgttactgatctgatggatccaaatctgaagggaaagttctctacagaagaagctttcgtagttttcaaactcgcctctcaatgtttgcagtgcgaaaatagaaaaagtctcatcacaaaagagcttgttgcaacacttaaagccatgcaaactaaaacacaagtaaggaggcttttactgtaactgtaattacattcttgatgatttctcgcattcgtgttataaataaaaccgatctttttgctcacagactccatatattcaaatgcttgaactggcaaagccgcacgaggtgggagcatcttcaagtcaacaacaacagcaagaagtaagaaaaggagcttattgtcaaccgcatttaaaatgtaaaatgtaaaaaacaagtgatatcttttacctttgttatattagaaaaaaaaatacatataaattcctctcttctttttgttaaagggttcaaatgaaatacatatgtaactaacacatgtcgttttgctgattggctattcgctaattagttcatcttaggtgaatagttcaccacttaacttgttctattttctcaaaaaatttcattatattccctatgttcctagatatttaatgtactaatttttttagtttgttccacaaacattaattttttaaatttttattaactgaaattaatatatttataaactttaactattctctattactattggttcagagttattaaaaaatatgaaaactcaaaaacattaattttctagcaatagaatgagtatagtttttctataattgtcgcttgatttcagaaatcacgatcaaaaaaataataaccaaaagcatttgttagaaagagtccaaaccgaacttaaaccaaatcaaaaaatttatattgaaccaaaaaaaagaaaaatttgattctgaaaatctgaaactttaatcgaataactaaatgtctactcctagtgtttggtagaaaagtttatagaaataaaaagaataagattatcgtacaaaacttttacaacaaaatatatattagattttatacttgcctcaagctcatagaaacattggcacgaccttttcaattgatatgtgaagataaaaattacataaacattggtacggccctttcagttgatctcgtcaggattcatatgatatgatgagagtctgaattaatggcaaaaagtcttggatttgagaccattcaaggctaagtcagttgcacttttcgaatacaatggaaagttagtaatcatgtggacaatggttggagatgacaatagaataataaaaagcttcagttgacaactatagcattgaagaagactaaaggagggatcacgggagtggctgacccatgtttgattcttggcaaaataggacaagaatctgaattccgcttttgtgtttcaatttcaggttaaaacttctgtttttatctttccctttgcaataatcgtgaatagctaaaggttttttgtttgctattcgaagactgtaaccgatttatcaatattttatttataaaattgtcaaataatatttaaaaattaaaacttcacaaggttttaacaatttttaatatttatatatttttattatcaaatattacttaaaactttatttaaaataaaattattttgtttattaaatataagtatatattgatgatataatattatattttgtcattatccaaaatgtatccaatcaacatacttttttaactaatttcattatgtgatttttcattaagcaagttttcactatacaagttttattctacaacttatgcaatgtttaagttctgggacctacaactagagcacccaaaaatatgtctacttgatgattgtttttccaagaagttgattatgttgcacgtacttgttcttcctccaagtcaccactcaacactgaactgaacttaaactaaatactttaagcccatcacgaaattattaaagccaagaagtattaaaaccaatatttaagcccaacactaaattgacatcaaccagtctgaaagatttgcataaacaaattcgttccctaaaataaaaatctcatagatagcaagttgtaacccatcaaaactagcgaaaacagatacataggttcaaaagaagaagagctctgagttgcaatgcagagtgcagacaatgaaatggtccttcctgaaggacatgatcaactatattcttctcaagccacaagattctgagcagattggtgtcattcttcgtgatggggtcaaacccttctttgcaaacttgcaaatggactcatcaacctatttcaatcatcaaaacaaacatgaggaacaaacatcaggaccaatcaaaccaaacagcatcacttacatgacagatcgcagagaaatggtatcaagttctgattcaatatcgattctacaagcagtgatatcttttacctttgttatattagaaaaaaaaatacatataaattcctctcttctttttgttaaagggttcaaatgaattcatctcattaaaagaaaatatcagacctttgcaaatccccttgttacaccaccatgcaatgcaaaatcttcttaaatataggaacatataatttaacccactagtgaaaaacaaggaatatataatatcaaaagcgagacagacaaaaaaatgtgagcaagtaaaaaaaacaaaattaataataataattagaagatgaagatcaacgaacgatcaagattgcgtgatcttgagtatagatattagtgatactctgttttaaaagattcatcataaccataaactcaattctttagtgatatatactctcttcgtctctctctcactttgtcattctctctctcgcaaagaacgctttcgatactctgcttttgccggcgataacgaaaccatgggtggttgttgctcctcgacgcctcttgagaacgatcaacaacctccgcaacagccgcagattcctcccggtgaacgcaagaaggacgatgtcaagaacgacggattcgtaaactggcctttcacagagttcttcctctccgatctcacggcagctacaaagaacttcagttccgacgagatcatatcagagaacgtagaagaatcttccaacgttgtctacaaaggtcgcttatcagagaatcttggtttcgtcgctgtcaagagattcaagaatacaacaccttgggatgatcctgactactttgttggtgtaagcttgaagaagaagttacttgtgcgataagtaatttgtttttattaagagataatgtcatatctttgggagttatccatagatattagttttaggagttatctaaaacaagtcatagtttgtttaggattaggtcttgagattttctatataagagttgccaaaagcttgtggtaaaccttaagagaattgagagagagattaaggagagctttagtttgagttatttctaaagttaagaaaaggagtgttcttttaattcttgatcttaattttcaattctagatttggtatcagagcctatagctttgtttctcaaacgtgattaagaacgaagatcatccgagatatgagtgaattggccacgacgggtaacaaaccaaaggagggagtaccatcaactatacaatgtccgatgctaacaaattcaaactacacagtttggaccatgaggatgaaggcaaccctccgtgcgcataagacgtgggaaacaatcgatcctggttctaatgacatagagaagaatgatatagcccgtgctctattattccaatccgtaccagaatcgatggtcttacaagttggcgaacatgaaactgcaaaaggtgtctgggatgctatcaaatcaaggaatctcggtgctgaccgtgtaaaggaagcgagactgcagacacttatgaatgagtttgacaggctgaagatgaaggaaagcgacaccatcgatgactttgctggaagaatgtcagagatctctacaaaagcagcctccttaggtgaaaaaattgaagaaacaaaagttgttaagaagtttctcaagagcttgcctaggaagaaatatattcacataatagcagccctagaacaagttcttgatctcaagacaacaacttttgaagacattgtgggaagacttaaaacatacgaagatagagtttgtgacgaggaagaagatccgcaggaagatcaaagtaagctcatgtatgtaagctcagactcacaagaaggaggaagaggaagaggtcgaggacgctttggaagaggcagaggaagatttggttaccaatccagagagtatggctatcaacaaaaggaatttgctcaaagagacaagcccaaagtgacttgttaccgatgtgacaaaacaggacattatgcttccaattgtcctgatagactcttaaagttggttaagcttcaggagacacaagaaaaggaggaagatagtactcatgaagcagagtcccttatgatgcatgaggtagttttcttgaatgaaaacaatgtaatgccaaaagaatttgagacaggttctgaaaaaacttggtatcttgacaatggggctagtaatcacatgacgggacatcgagcttggttctacaagatgaatgagacggtcacagggaaagtaaggtttggagatgactcgtgtattgacataaaaggaaagggctcaatacttttcttaagtaaaaccggagaaagaaaaattctagatgatgtttactacataccagatctcaagagcaacatcttaagtttaggacaagccactgaatcagggtgtgaggtaagaatgaaagaagattacctaattctgcatgacagagatggaaacttgttagtgagagcaacaagatcaaggaacagactgtataaggtgaatctggaagtagaagaaacaaactgtctacaacttataacatcagatgactcagctaaatggcatgcccgacttggacacatcaatcttgagactcttaaaacaatggtggcaaaagacatggttaaaggaataccggctgctccaaaagaaaaagaaacatgcccatcctgcttacttggaaagcaaacaaggaagatgttccctaaagcaacactgtatcgtgcatctagtattctcgagttattacatggtgatctctgcgggccaatatcaccatcaacggctgctagaaagaggtatgtgttcgtcttaatcgatgatcactcacgttacatgtggtctattttgttaagagaaaaaggtgaggcatttgagaaatttaaaagtttcaagaaattggttgagcaagagagtggtgccagaataaagatacttagaacagacagaggaggcgagtttatgtctcatgagtttcaagaattttgtgaaaaagaaggtatcacaagacatttaaccgcaccatatagccctcaacaaaatggagtggttgaaagaagaaacaggaccttgctagagatgacaagaagtatattgaagcatatgagcctacctaactatctatggggagaagcggtgagacattcaacttacctaataaacagagtaggaacaagagctctagcttaccaaactccatatgaagtttttaagaacaagaagccaaacatagagcatttgagagttttcgggtgtatcagctatgccaaaattgatggaccgcatttaagaaagcttgatgaccgatcaagaatccttgtacaccttgggacagaacatggctcaaaggcgtaccgtctccttgatccaaccactagaaaaatcattgtaagcagagacgtagtttttgacgaaaataaaagctggaagtggaataactcagaaatatctagccaagaaacaggaacctttacacttatctttggagaatttggaaatcatgggattgatgataatgaagttgttcaagaaacagaggaaaacagagaacatgagaatgaatcggatagagaagaagaaattgctgatgaatccgaagctgataatgttgaaccagaacagccgcaagcaccaccattgttaagaaggtctggaagacaaatctcaaagccaacctacctgaatgactacgtgttactagcagagaacgaaggagaacatcttttgctcatgatcaatgaggaaccaagtgacttcagagaagcaaacaaatcacatgaatggaggaatgcatgtaaagaagaaatcatgtcaatagaaaagaacaaaacatggagtctcgttgatcttcccattggtagtaaaccaattggcttgaagtgggtttttaaactaaaacgtaactccaacggaagcataaacaagcataaagcaaggctggtggcaaaaggatacgtgcaaaggcatgggattgatttcgatgaggtatttgctccggtagcaagaattgagacaatacgttttattatagccttagcagcctcaaagggatgggaagtgcaccatctagatgtcaaaactgcgttcctccatggagaattgaaagaagatgtttatgtaagtcaacctgagggatttgtgactaaaggaagtgaaagaaaagtttacaagctacacaaggctctctatggactaagacaagcaccgcgggcatggaacaccaagctaaacgaaatcctcagagagttgagttttgaaaaatgttctaaggagccttcactttacagaaagaaagaaaaggagaaccttctcatagtagctgtgtatgttgatgacttactagtcacgggttcaagcttggatttgatacttgatttcaagaaaggaatggcgggaaagtttgatatgagcgacttgggaaaactcacctactacctcgggattgaagtgtttcaaggagaagatgggatcgtgttaaggcaagaaagatatgctaagaagattcttgaagaggctgggatgagtgagtgtaatgcggttcatacaccaatgacgtcgggtcttgaactttctaaggcactagaagagaagcgagtcaatgagcaggattatagaagaaatatcgggtgtcttaggtacttacttcatacgcgacccgatctttctttttgtgttgggatcttgagtaggtacttgcaagaaccaagagaatcgcatggaacggcattgagacagattttgaaatatattcaaggaaccacaactcatggtctacatttcaagcaaggaaccaagtcgggtttagtgggctatagcgatagcagccacaatgtagatcttgatgatggaaagagcactgctggtcacatcttttatctcaatgaatgtcctattacatggtgttctcagaagcaacaagtggtagctctttcatcttgcgaagccgagttcatggcggctacggaggcagctaagcaagctatatggttacaagaactacttgcggaagtcattggagtagaatgtgacaaagtaactatacgggttgataacaagtcagctattgcactcacgaagaacccggtatttcatggaagaagcaagcatattcatcgaaagtatcactttatacgtgaatgtgtagagaatggtcagattgaggtggatcatgttcctggtgaagaacaaagggcagatattttaaccaaggcacttggaagaactaagtataaagaaatgagagatctcattggagttcatgttgtgtcaatggaagacttcaagcttaaaggggagaatgttggtgtaagcttgaagaagaagttacttgtgcgataagtaatttgtttttattaagagataatgtcatatctttgggagttatccatagatattagttttaggagttatctaaaacaagtcatagtttgtttaggattaggtcttgagattttctatataagagttgccaaaagcttgtggtaaaccttaagagaattgagagagagattaaggagagctttagtttgagttatttctaaagttaagaaaaggagtgttcttttaattcttgatcttaattttcaattctagatacttcacggtaccttttctttgcctttaaacct

SEQ ID NO: 5253 - DNA, 585 bp, Arabidopsis lyrata
  Intron number 2 from transcript 496397 (locus 496397) deri ved from phytozome v7.0 (chr-ID scaffold_8; pos 20376787 t o 20377371 reverse strand)
gaaaccaggtcagatttttacgctgagtgagattttgatttcttcagaacatttgattttgatttggtaagactttggtttatcaattaggcttagggttccaattgaatgtttcattccaaaaaacaaagttggttgatgcttatatctgattctgcgtaattgagcttagttacagtgtattttctcatattttgagctcatctttggtttcattagatttctagtctgttcttgatggctatttagctactgaatatgcataacattgtcactcttatggaagaaattagctaccaaaatctgaagtacatcttcatgttttacacacccgattactaaaatatcgacgccaaatcaaccttagagttggagtatcaagttctactattggaacatttggaatagatgaaagtttccgtggattggttttgattgtaactagtgtctaatttgttcatgtatctgtcactaataaaccgcaaggatgttcagtttttagctttggcgcgacaaaagtcacggctcaagatttgtttttttgaatcagatatacgcaccaaggcttgacgatccatctacaaa

SEQ ID NO: 5254 - DNA, 435 bp, Arabidopsis lyrata
  Intron number 3 from transcript 891098 (locus 891098) deri ved from phytozome v7.0 (chr-ID scaffold_7; pos 17884454 t o 17884888)
ctataagattaacttagtattacggtgggttttttctcggttgagttttgtttttcggtatgattgtggggatcttaggctgattttggatttggtagattttactagtcacggattgatttgaaggttatgagtttaagggttaaaaggcttagatttttggaagaagagatcaaattaggaacaagtttgcgaagaaagaggtgttgggattttgatttaattcatttacggatctgtttgaggtgtcttggaaaccagattttttggatttggatgtggaattgtcaactggtttttgaggaattttcattatcaaagaatgatttgatgacacattttttttcaatttttggaataaacgatcatatgttttcctttttacatatggtgtgggcttcaaggttggtggagatttggttttatttggtatta

SEQ ID NO: 5255 - DNA, 8200 bp, Arabidopsis lyrata
  Intron number 1 from transcript 473308 (locus 473308) deri ved from phytozome v7.0 (chr-ID scaffold_1; pos 13865715 t o 13873914 reverse strand)
ccttctaccccaagtatccctcaagtgtttccgtaaaggcgtaaaaccaatgacactcataaagcctcatttcgcaaaaaaattactatttgactgtcaaagttattgtatcaattattaagtttaaaacttacgtgtgattcaagcaagtaataaataaactaaattacaaatttaaagttggaatatatttgactctatatttaacgtaaaatataccattacatatgattaagtagtaaaaatatcatttattgagatggaaacaaaaaatcccaaagtttctcaccatgctcctagatcccaaattttctagaatcctatcacttctggaaactcttttaaatctatattattaattgggaatcattagataataaaaaaaccttcttctttttttgcgtcaaaataaacttctattaattcccaagatcagagtacaaatcgtttacaatccaagaaggaggattagtgctatcagagtaaaaagaagatcttatactaccaaactgagctaacttatgagctacactattacaactccgatttatgaaagtgaaacagatttctttaaatttggttgcccaaaacttgatgtccgacggaccattgttgatgttgttaatcagaatttcgcagtctccttcaaaatgagccttcgtgaaacctcgacaccaagtctgttgcattgcggacagcaacgcctttgcttcagcttctaatggtgatccggccacctgtaaatttgagcaggggcagacccacgttggggaagaggggtgcagttgcaccggttaaaatataaaatgttttgattatatatagcatttattgatctaaagtggtctagtggtaaagactgcaccccttaaatatgaggtggagggttcaattcctctttacaacattttttgcaccggataaatattttggctgggtccgcccctgaatttgaggatccccaagctttcgtagttccaacgtgatctcgaataacccatccaccatgtgtttgatttgtttgcaaactgaattttgcatcaaagttacatttaatgtatgatgccggaggaagtgaccaagtcaatgaagagttctggtgtaaaacctttcagttgtaaaatattacatagaatgccattgttttttttttaatttgaagaaagaaaataaaaaaagaaacggcaatttaatttaataacaaatattatttagtttaaattttataagattttcttaacaaaacatgctaattaatactgattagtacacatgaaaaatacacaattttaaaatttgattttctaaatatgaaaaaacatttagtatattggtcatatataatctaaactaaatacttccatcctttcatatatagcatattcaacaaataatttttgcattttagatttgtaaatatctagaaaatatttccagtatatattaaaatattttacgttttaattagaatataaatggtataaattttgacatatctttttaaaaacgtgtagttttcaatattttaaatatgtatatcactaaactaaatttgaattatataaatgaaaatatatttttaaaacgtattatagtagttactataactccaaattattttatttagagccaaataaattaaaagatttcaaatcaaataaattattttatttcctatcaaattgttacaagcttttggaatatacattcttctaaatttgattattttctttttcaataaacagtaaaatataatttaaataccaatgtcttaagttttcaatgcaaatatttaaaaatgagaaaatattgattcacaccaatattcttatttttcttttaaatttgaataaattttgttttggagacaaacattaataagatttttttaacagctcattaattgtatttgaacaatcataattactatatttgcgataatgcataaggagaagtttcatggaaacataccaaaatcattgagatcataggaaattttagatttatttaatatttttttcatcataaatttaaactatgtaattaagattatttatttttggtaaagattgaatccacaaaataaaacctaattttgtgtacaatctatttcctatgaatattatgcatttgtgcatacgtccatgttgattatctcacagttaattaagaaaattgattctttaaaacaatatatgaagatttacaagtaaattaattcatgttcttatgatgtttatctcccaattttactaacttcctatgcgtatttttatggtttttggttttagggtcaacactagatcacaagtcgcttattgatccattcagaaagaaaatatattttcataaatgttatcatatatttaattttgtatctgttaaacacattttaatctctcttttttattgtctattggccaaagcgagagatttgatcgtaaggaattcaatacataaaactgacttaaaagtaaattacttcatgttcttatgatgttcattcatttccggttcttcttatattcttatcatgtttggttctattttttttttaatagaagtttccattatttatgctcctcaattacgtatttaaattataccgtattcatatggattttttttcaggttcaacgtttgatccagtacattataatttatatactacattatatatcaccaaaataataaaataatctatatttactaaaattttattattatatatttcttaaaatatgaaccccgcacgtacgtgcgagtcaagatctagtaattttataaacaaaatatatagatattactgtaaattatgtagataaatttaatataaaattttggatgttgtggtagaataatattgaattcaggataaatatatgtagtattggaagctagaaatacttcaaccccttcatttgtaacgcattagaactaaagagaaaaatcaaagggtattttcttgtattgcccttgggcttttacttgtctttgttgaattttgttacactatttttagatagctttggtttggtgatgatttttgttttctccaaactgtaaaacctaaactcaaaccaaaaaggaataataagtaagaaaattaaatttcatacaagtgtcaaaagttatggtttggtggtaccataaaagtgattcgggatggactcatatcaaacaatatcttttgtttagtgacataaaccttaaaaacaaatccaacttaacaacaacttgtgcatcacaagtacattttgagtccaggacaatgatgatcaaatttgcaagtgctaagtcgaaacaagagtttttcaagaagctcctcaatcgatcgatccaagaaacggatcgatcggtccaactccagccgtcgagcaagggtatatccagaagcttgggatcgatcgatcctgtgtcacgacgtcgacgattgttttctagacactccgggaccaatcggttcacttgtcggatcgatagtgtagcatgcaacgcccattccggtttttctttaccggttttatttcttttttacgttcactttctgcaatttttcaaagagttattctataaacaactactctggattagagattcatctttttgacagtttgaaaagatttctaacctcacagtatttattatttatttaatggaatcatgttttgtttcatatatttttgtcttgtctcttttactatgtgtgagtagtttcataattgggttctatggttctaagtagaagattcaatgaattagtgaattaattgtcattagaaattctttatccttaggttctttgatttacattttcttaatgttataataggaatgatcaaactgttttagatgatcggtttttctatgcgtaaaagtgttagatacaatgtgatgaggacatcaagtcatcatcaaccaaggagcatggaaaaaacaccgaccaagaaccccggagagaacaaacatgagggtaccaaagacatatgtgtcttatttggggcatatcagcccaaccaggaggagttaggctacaaatcaacctattcaagaaacttaactcatcaaggaatcacggagaggtggaattggttcaaaatctttccacatgagggagatattcaagttaaaagtcagcagacttccaatgaacccgatggagaccaacaactacttattggaggattccgaccagagaagaaggatttaagctacgaagtgaattttcatacattcttgactcatcagaggaactcgtcaaattggaatcaagtcaaaaacaattttggtttagaagatattaattttctaaaccagctgattctcggcttgccttatttggaagctgacgggtttagtcacttgcaaaccaaactttggcgtccaggaaagtttctaatacaactagaggctcttaagaacacctcaagcctcattcccatccattggatcaagtgggttcaatcttggccattcatacaccaagactttccatatcaagactcaattgccttacatgcactctaacagctaaatacatttaaaccaatgaagaccacgacttttgggagactctccataaaccagaggctcttagaacgtggatatgtgaagaagatatcaagatacaagcactttctaattctggcgcattcacacctagcattcaagcctaacggctacattatatcaaagacaatccctttacaaagtctaaagttactttgtgttgtttgttctctagttcttattgagtgattctctaagttctattgaagcctgcaagataagttatttgagagattcaaatcacttgttttgtccattgattgagtgagtcaatctctaccttttcatcattccatcccttatattccgagagagtgcgataaagccagctcgtgaattccaccttccgcaagttaagcttggaatctcgtgatcaccgagtgatctaaattttggagtgattccaatcttatatcatcacgatgaagaacctgactatttcgttgaacaatgccataatgatttgccaaaaaaaaaaaaaaattgccataatgaatgtaaattgaggaatgtgtttctaaccaatgagaattgatgttggaacatattgtgaaccaagagaacatgtttgataagtaaacatgtttggtaatgcgaatttgattaaaaaatcacaaatgaaattttttagtaatcgagtattcaaatttagtagttaatatcttgaaagagaattagttgaaacttgtgtttatgtttgaggatagttcttcattattgaattccttgtttcatatatttttactaatcattgttctttgaaataccgtataacccaatatctttaatccaaaagtttaatcgttaatttattttacaattttatttacaaatctgaaaaccaataaacaaacttcaaaccctaaaacttacgtatgattcaagcaagtaaaatatataaactaaattacaaaattaaagttggaatatctttgattctatatttaacgtaaaataactattacagaatacagatgatagtaaaaataacatttattgagacagtgttaaaaaatccgtgagatttaaaaaagaaaaagcacattataaaaaggtatagttttgaccttgttctggtgagatatagacaaggcaattaccattgttattgttcgcaattccataatgacgcctcaaatcttcatcatctccaaatcctttaagctgaactcttctaatttcctttttttctacatcgtagtagagaatgtaaaaaggtccaaggccacgtggtaaacactttggggtaataataatatctcccatcttgttggtgccatgaaaagatattggaacgtttcctagagaatcatgccgcaaggaacatgtcttcatcgaccattgatgttccttggcatcttgtaatacccataaatcaaagacaagatatttatcacacgagttgacaatattaacattagctaactttccttggtagtttatcaaagttgaagttgagtcccaatatatgccgtccattgaaggtagtttgataaaacttagcgtctctgttctaacatcaaaacacactattattttactcaaatttggtgttggagtcgaagcgccataatatacaaacccattgatgcttattccctttgttaaagggtgataattccgagtaatgccttcaatatgtctccatgaaggtgttttatcaccgccaagtgttaaaaccatgtgctcttgatcatcttcaaaatttgaaaccttcttacgcattgctttgtattgatgattaaccggatcataccccaagtatttataagcggaattccaattagtacccgtgattttgatttccggtaaggttataacttgtttcgtgctagggttacatatcatgaacctacctttatgtgaaaggcagataaagccgttgacggaacccgttgaccgtgtgtaaaaataagcgtccactgaagccattgtcatgtccaaatttgctattaaagaagaagatgaatcttcttcttgtgaagaggtaaagaagaacatacggttttcagcattcttatcggtcaatcgaccgtttttaaatgatataagcagtcgtgatgattgcgtcgaggacatagagaccaacaaatttaagaaatctttgcttcggatgatggaacaccatgtcttcgaaacatattggagctctaggagagattttacgggcaacctagtgagaatatcaatcattacatcaaaagggatcgaatctatgtgactaggaccatttttaggatcgtccttgttattttcttggtcattgcctttcatggtggacaaggggttgagtttccacgtagggtttttaactatacgttctctattctataaggtatatatctatatatacatttttgtatcacaattagcaaataaatcctgaagttgagaagtatttacaatggcatgccattagcattaattatttagatttgttttatttaagtaaagattgttaaatgaaattcatttctcatatatttagcaaaagtctgtacaaaatctttccttatctatttaagtaaagattttgaaatcaaatatgttctcaacaatttaccaaagatctctacaaaatctttttaaaaatctcgacttagttaacttctgatttttatctgcaaaaaagaaaaaaattaatagtaacgagtgatgtaaaaatcgggaatgttgatattacaatttcttctacttttttttttcatataatgaaattattttttagggatactttctcaaaacctctaaataaaacaaaaggtttcaaaagatagcttctcttttggcgggtcgacacgcaaacccgcgactctccacgggcttatccgcatgaacctgcgacccgtagtggataaaactattattcaaaaaaaataaaaaatgatgtttaattttacgggacggggttatatggtgcaacgggtttagatcgatattaatattaaacaatatactatggatgaaatcttagaatttaaaatcaaaatttaattataaaatcagaaacactaaacaaaataaacaatattaacaaaacaaatacaacttaaaattttgctaaataatttttagttataaaaaaattgacccgcgatacaccgcggggtaaaatctagtaactctttatatatcaaaccaatatcaaacaattcagggataggaaattgattaagtcggtgttttgtggataggatcggttcaacaaaaagaaaacgtctttttgtatttttttgggtctagcaaaacaaaagttcacaattttcttttccccaaaaaaagtttttaattgaaaaatgaaatgcattaatgattgattagaaaaagaaaaatcaagcatcgaaggcttatttttccatcttcttatttttctttaatctatcgtttcgagtaaatgggagagagttgagagaaattgtgaaaggttgttattttttttccgaaaaaattgctaaatctattaatcaaaatttgataacgatcgtggaggtgtggataagttgagaaaactgttttatttttcaaagtaaataaaaattatggaaatttgtgtatgtgtcaatcaaaagaatgttgcggttctagctcaaatctaggtgtttgcgatacaatctaatcttctccaagtcga

SEQ ID NO: 5256 - DNA, 394 bp, Arabidopsis lyrata
  Intron number 3 from transcript 481085 (locus 481085) deri ved from phytozome v7.0 (chr-ID scaffold_4; pos 835172 to 835565 reverse strand)
tccaagaaggtatttcttttttcagaattttgaacaagtagagtatcatgttgtgttttttttatagatgttctaggtcagctttggtagataatcatgttgtgtgtttttttttttttttttgtaattagaattttaccatattgtgagagttaattaattaagtcaatggttatgatttttattttttgtcattttgtaaaatacactttatttgccaacttaaggtgttattgttaggtgttatttatattgttaaatcgaaaatatcatcaactttggtgtttcaaaaataaatctaaattaattcatctagctataaaaataaatgttgatggtcatttagtgcaattagccttttctaaatattctttgtgattgaataatttttcag

SEQ ID NO: 5257 - DNA, 1094 bp, Arabidopsis lyrata
  Intron number 2 from transcript 485940 (locus 485940) deri ved from phytozome v7.0 (chr-ID scaffold_5; pos 17352295 t o 17353388 reverse strand)
gtcactggtggtgctcctaacaagctctctaagatgtaattattctcttctctcagctctctctcttatagcaacaaacttgattttgtagcttactttgataatgttgttattgcattttgagctgcttgatattgggatcactagcctctttctgagtatgatctatatatagcccctgttctaaaaatccccgcctaaccccgattattccccgcttaatcgctaggcccaccttctccgctttgattaatgactaatcccctaaaaaatcagtaacccgattattctccgcctaatccgattacttcccgcctaatccgattatttcccgcctaatcttacatactccgattattttttagattgcaagtataaaaaaaacattttatttttgttattcaatcatttgaattgggagtttgtgatgttttacataacttgtgttttaataaaaatcataaaaatttgtttttattgtaattttgaaaacaatattggattaatatattttaaacatattaaaataaccctaaaactaattcccgattaatccccgattttaatccgattttccgattaatcgctaggcccatgccgagcgcccgactagcgcctagcgatttttcaaacaatgtatatagctagtgagaaaagtcattgtggattttataattgttagttgaaatgtttatgttttacataattgggcatttgatacattcatgtcattagtgtgtatgcatggtacttgacttatggaattgtggatatttggtctctaagcatcaatttttatgttcagtgtaactagaattcttagcatcttaagcaaatttcctctgttgattggtttgagtcctagattagtttttggaacctgtagttcttgtctgtctacaaaatgggaaaagattgataattatatataaatctatttgaatctctgaacaagcaagaaccttgtttgtttaggacttttagcaatcttgggaaggcctcaattctcaagttattatggatctgaatggggtccttttttttattgggttgttgcagcaaagtggtgaggaagtcgattgcgcaagtgttga

SEQ ID NO: 5258 - DNA, 36739 bp, Arabidopsis lyrata
  Intron number 7 from transcript 900061 (locus 900061) deri ved from phytozome v7.0 (chr-ID scaffold_4; pos 5218708 to 5255446)
aaaactgatatgtgtcaaattacccttagactagtctcttaattagagatgtcactataatatttatgggtcaaattccacaaatctctttagttcatgtaataaacttatgactgctaaacaagaaattttgaaaattaaagtttgcaatcaagtaaatcggtagtaaattcaatggattaaggcgctagacttaaagaaaatcttttccgtaaatccactcgaccaacaagctcgactagacgtctaacaggcttaaaccgacttagtattttgtcgttttgtgttttagggctttcttgattttcaccggaggatactcgaccaccaccacgagaagctgatactcaaccgacacaactcgacctcaattcgaagagaaaaactcaacctcttctcaaagtactcgaccgacgaactcgctcctcctccaccgtcatactcgactagccgaaaaaagaaaaaaacaactactcgacctcaagagcagaccaccacaaaccggtcacatactcgaccatgttttctggataaggaggagccaccatctcaaaatttgtttactcgacttaaaccaaacaaagaccactcgaccaccgtctctctaactcactcgacctcaacttctacttgaccaacatcggttcatttcaaacatttccgattttgtattatctcttgaaactaacctgttaactttgagttatacatattctcaggatcaacatgagcaactacactggcggttcatcaatggattctgactataacgtcgatgaggctgaatcttggtcttcaagaccagaaagagaacaacataaatacgaaagtttcaggaggagagctgagatagctcgtgggaagagagcaatgacagaaagatatgagctggtagatgaggatttagaggacgagtatatgcctgagcattctcgcagagctacgaagcttctgaacaaaccgatgaactaccagttgaagagtacatcagactcttcaacctgaatgagttctgcgaaacaagatatccgtgctccgagacactggcaaagctggggttactggaagatgttcaacatctgttccagagttgtcacctggacactctgatgagttacccatacgtcgcctacgaggaagaaacaattaagctcttctccacactgcaagtggagctctaccaaggaatgactgcagacgagttggaaagagaagggttggggttccttacattttccgtgtatggacaaagttacatgctcacaatctagcgcttggaaggattgtttggtttccccagtggatcgggaaccaaaccaacgtttgacagaggcgagttgaaggatctgtggctcaccattggaagcactacagcgcttaactcttcaagatccaagagcaatcagatacgcagccccatcatcagatacttctagcgctcagtggctcatgtcctctactccagagagtcaacagggacggtgaccaactctgatatggagatgatctctatggctctcagaggcactctccatcaaaccaagaacggtatgactctgcacggtgataccagtgacacacctctcgctatacttcttttgatccacctgtgtggatacaagaagtgggctatcactaataacaacaaaagagcacgaggcgctctctggataggaggtgttgtgacaccgattctgattgcctgcggagtcccaatcacatctaagggatatgaaccaagagcaatggattttgagtacctacgtcactgcgaattcctcgagtatgcaatggttggtgacaagtatcgataccggtttgagcatcccacagacaagacggccaacatccttctcccctgccccgagcttacacgtatcatagagggagacaacattgactttgtgcctgcaatcgacaacctgtatgtcgagaaagctcacccgatgaatgaggatgttcatgcagaagaagctgcagaagatgagattgatgagatggatgaggacaaggaagaggagtatgatacaagtatgtatcattttagtgagcatgtagctccagcgagggagagtaagagtttgagtgaagcttacagaaacccaagcctgttgtagaagtggtgcaagaagcaggataagttcatctcgaaatgcataacgagtatcaagtctttgaaggctatggttagctgctcctcttccagcacagcaataccgcatggagacgaacttaccctgcttctagctagaaaaaggaggttctgcaagatgaggagaagctaaccattgccttcaacgaatttatactatttatccatttggagatgaacttatcctgcttcttgcaccacttctgcaacaggctttggtttctgtgagctttactcaagctcttactctccctcgctggagctacatgctcactaaaatgatacatacttgtatcatactcctcttccttgtcttcatcaatctcatcaatctcatcttctgcagcttcttctgcatgaacatcctcattcattggctgagctttcttgacatacaggtcgtcgattgcagacacaaagtcgatgttgtctccctctatgatacgtgtaagctcggggcaggggagaaggatgttggccgtcttgtctgtgggatgctcaaaccggtatcgatacttgtcaccaaccattgcatactcgaggaattcgcagtgtcgtaggtgctcaaaatccatcgctcttggtttatatcccttagatgtgattgggactccgcaggtaatcagaatcggtgtcataacacctactatgcagagagcgcctcgtgctattttgttattattagtgatggcccacttcttgtatccacacatgtggatcaaaagaagtataacgagaggtgtgtcactggtatcaccgtgcagagtcataccgttcttggtttgatggagagtgcctctgagagccatagagatcatctccatatcagagttggtcaccgtccatgttgactctcttgagtagaggacatgaaccactgagccctggaaatatctgatgacggggctgtgtatctggttgctcttggatcttgaagagttaagcgctgcagtgcttccaatggtgagccacagatccttcaactcgcatctgtcaaactttggtttggttcccgttccactagggaaaccaaacaatccttccaagcgctggattgtcagcatgtaactatgtccatacacgaagaatgtaaggaaccccaacccttctctttccaactcgtctatagtcatcccttggtcgagctccacttgcagtgtggagaggagcttaattgtttcttcctcgtaggtgacgtatgggtaactcatcagagtgttcaggtgacaactctggaacaaatgttgaacatcttctagtaaccccagctttgccagtgtctcggagcacggatatcttgttccgcagaactcattcaggttgaagagtctgatgtactcttcaactggtagttcatcggtttgttcagaagcttcgtagctctgcgagaatgctcaggcatatactcgtcctctaaatcctcatctaccagctcatatctttctgtcattgctctcttcccacgagctatctcagctctcctcctgaaactttcgtatttatgttgttctctttctggtcttgaagaccaagattcagcctcatcgacgttatagtcagaatccattgatgaaccgccagtgtagttgctcatgttgatcatgagaatatgtagaactcaaagttaacaggttagtttcaagagataatacaaaatcggaaatgtttgaaagatgaaccgatgttggtcaagtagaagttgaggtcgagtgagttagagagacggtggtcgagtggtctttgtttggtttaagtcgagtaaacaaattttgagatggtggctcctcattatccagaaaacatggtcgagtatgtggccggtttgtggtggtctgctcttgaggtcgagtagttgtttttttcttttttcggctagtcgagtatgacggtggaggaggagcgagttcgtcggtcgagtactttgagtagaggttgagtttttctctccgatttgaggtcgagttgtgtcggttgagtatcagcttctcgtggtggtggtcgattatcgagacggtggcgaggattaacagcgacggctcaagtgaacgatggagatggatttcttctccatggtggagtacggaatggagatagaatggctatttggtagagggtgggagtgatcgaagtgacgaagtaattgtgatagaaaacgagagagatgagagtgagaggagtgtcagtgagaagaaaatgatggtgagagatgctttgcgaaatgagaggatgaaggagcctatccagtttctcattcagagctttgatctccttcttgtgtttatcatccgagtcagttgttcctctgatggtcctgtcgcagtcttcgtcgtaatttccatctgactgagctaagttctcaaccaattcccagccttcagcaacatccttgttttggaaatttccattgcttgcggtatcaagaagcattctaatccgtggaagagcacctctgtgagagtgctgagcaaataggcttgactgaagccgtggtgagggcattggttggtgtagcttttgaaacgctcccaggcttcacagaagctttctccattctttgggcaaaaccagagatctcattcctgagccttgtagtccttgcgttggagaagaattttgcaagaaaagctttcttgcagtcagcctaggatgtgatggagccctgtggaaggttcttttcccagacatgcgctttgtcacctaaggagaatggaaacaaccggagcttgaaaccatcttcactgactccgttgattttggttaggctgctgagcatatcaaatttgtttaagtggtcgagtgggtcttccataggcacaccgtggaacttgtttccttgaatcatcgagatgagaccactcttgatctcgaagttattgttttgaatagcaggaggtgagaccactcttgatctcgaagttgttgttccttgcctctaacggtgattccttggtgcatctccagcaccaatgtttgcgggtagattctcgtcgtcttgatcatcagccattctgaatggatggttgtgttcaaggtcgactgtgtctctcctttcccttagttctctgtctatgcggtcaatgttatcgttgaaaaggaggttctggttgcattttgatcgagtttgcatacatcagaatagtacctggatcaagaaaacaacaagaaacacacatagttagtaaccgaagtgaaaattgaaatagaacttgatctaagcaagtctgaattctcaaatgtaacaaacaaacacccaaatggccacggcgctaaattgatagtaagattttaactagttatcaattccttaaatcactatcatgtcattgtagaatttaaggtgttaatccaaatgggtgtgatgctagcaatcaagatgcaatcagatttcacatagtcaagccaagcaataacaggttttggagtttctaacagtcctaggtgaacatgcagaaaacagaaattctaacagaaacagtaaatatactcaaccaacaccgcttgatgccaagcactgggtgtggtcgagtctcaggccgagtaacagacagaaactgcaaaaagatactcgactgcttagtctgttgccagactactaggtgtggtcgagtacttcaagagaaacaggttagaattgcaaaaactaagcaaccggtaataagaacaagcaatcaatagcaatgtaaacagagaaatcaattggaagagaaattcccgaggatggggtaatcgagtagtgaagtctccttaatctccaggtggttaacatggtcaacaaactatccctagacaaaaagttcaatcaccaaatcaaagtgctatcgcaacagagctcctaaagctaaactagtcccagactcaatcaccattgacgagagctaacctaacaggcattacgaatcaacaagttaaagaaaaaacgctccctgtaaccaacaccttggtacagagccacgaatctctggagttagtagttcagacatttcatcgaacaccttgtgggtgcggaaatgtctgggctcaaattccagttgatcagaaagcaattagcattaagaacaactaattcataagggatctaccaatcaaactcaaccacctagcagatcaaggattctaaactattctaacccatcctcaagaaccctaatcactactcaaacttcatcacaaagaacataaacccagaaatgcacaaatactgcataacaacaagatcttaacaagatgaacaactttgtagaagaaataaaatgcaaaaacttaatagattaagagaaatctggattacaaatgtgaagaaaacactaattgttctgcagaaaaaaaaaaacttagtctcaaaattaagagaaacaatctatttataacaaatactaggaagccctaaaacacaaaatgacaaagtattaaaacggtttaaagagacactcgaccccgtgtaatcgagtagataggtcgagtaaagctggagcctttgcggtttcttgctctggtcgtgatgcagtcgagtacctaggtcgagtacgtggtcgagttctgcttcatcctcttctcttccttgtgctcaagtgtctggttgagtggttgaagaaggggatactcgaccacgaggtcaagtggttggtcgagtattgacgaagaggttgtggtcgagtgtctatggaggctggtgatcgagtgctctgagaggatggttgatgagagtactcgaccaacacggtcaagtacttgatcgagtcatttggtgaagagcatggtcgagtgcttttgaagtggtggagctgagttactcgactgccatggtcgagtggctcctcgttttgtacatgatcatactcgactaggtaggttgatagcgggtagaatttcacttcagaacttttacctgaaagactatacgttaaactgcaagtgcacagtaatcagagtagtatttaaggatcgatcccacagagagtgtagctacgggttattgaattcaatgaaaagatctagctaagacaaaactaaactttggggttttggttttgggtttcctaataactaatgcagtgaaagtaaatgaatgcgataaatgaaagctaagtaaactaatgaaggctaagagaatattcggatgtaaactatgagactaaggcattgggcgttctagggtttctccagggttcatgattctcgactaactagggtttagatctctagtgtttttatgttttcgttctagttcataactacgaaagacgaatgaacgagttatcctatgttatagaataagccggcaaatctccctatactccgttactcaactgacgcaggcaacgacgcatagatcgacacattagggttggattcactaagtactctaagtcctgttactcaacttacgcagacaacaacacgaaggattggtaacactatgttcgagattaggtttacccgattaaagctcataacctcttggatcagcgtttggtgatcaatccaaacacatgcattaagtaaaagatgtcccaaaagaatctaagtatgaacgaaataatagatctataaacctaatatgatttgaaccatgaatcccctttgaatcaccccataaaacccaacaaagaaaactactcgctcatgatgctaagaaacgacatggagatgaagtagaaaagcataataaacaaagggggttcaaaggaaacttctctagtgtcacagaagatacttgtctccccaaaagtcttgaaagaaagagaagaagaaagagtagaagagaaaacaatgaagagtaaacgagagtaagcttcaaaggacgacttcttcgggatgcaaaagcttcgacgaggtggaggaaggagagctgagagtctcatcgatggaggctgcgagatctaggattgagaggcggtgaagagctttgaagaggccgtcgggtttcttcaacttatcttggtatttataggcttcgattaggtcaaggggcaaaaccgtcatttcccatgaagtaggttaagtgaggctcgagtttcttggacatggtacgacgtgtgatgaccggggtgaactgtggagagcaactcgggcacgggcattgtggcaccccgtcccggacgtccggcgaaccaaggttcacgttcgtgcctcctcctggccgaacctccatatttttcggattttaacataaaattgcctttacgaggcttaattctataatccttatctcttaacacagcggaagtctttctacccttggtctaattccaaccatccattgtaccggtttgatcgtctttgtcccttagactttagaccaatcatttactcggccaagtcatgcaatttgttcgttaacccttctaagtctaacgattgcatattcttttatccttaatccaacggccaattcctaaacgtctagcttaactagtaagttagattcgtttacataccttggccaacatgcggattcgattcctcttcgatccgttggttgatcatttccttagccttcttgtttccatattccattcgtataacgattcttaaccaatcgtgtattgatggaccaatctctatcgttacttagccatacatccaaccgaccccactggtctaagtcccacgatagagattggggatcgtacgtttcctttggttcacggtggccgaatcaagctcttggctcattagtccatccgtcctccaaacgtacgccccttcggtttcatggtggacgatcaagcattcggcttatcgaaccatccatgtttccgattcggcttatcgatccatccatgtgatccgaacaatatcattatcacactcaagggtccgtggattcatccatcggattatcgtaggctagcctatgaaatcattcgtccgtcggcctttggtttgctcgcgggtccaacatccgttttgtccaccggttttcaccatggactttcccgttggttatccgttgagtcaccattggtcttaccgattcttaatcggtttcaccattggccacggcgattgatacctaaaggcggccgcgatattagatccttacatggtgaaccacgtcacttacccattctcggtgcttactccctttaccggtgagaatgcatccatgggcgacctttgggtgtgtttggttgcacttatccccgtgcttcttcgaacacctttcccttatacaccttcccgattaacttcccgttaaccatatcatctatcggtctatctttggattcgtcaatacttccatattgacaatcttagatttgccgatccatttccttttcgtgtcctcccctcgacgatatgattcatagaacgaacgatccatcgatcccatcatcgagctatcgatccgtcccatcaatcaagtcgtcgaactatccttccatccaactccttaatcgaattgtcgttccatcgatctgatccatcgatcgataccacgatccgatcattcggttgacccgacgatcttacccgatccgacccgtctctccgacgaacgatccatccgttctgatctgtctctccgacgatccatccgatcaatccatccaaacattccatcgaaccgttggatcgggaggtagcatgcgcatcagttcggtcgaggctccgagaatccattccgattccggagatactcgctgagccgcaccacctttccgaccaacaacttcgtggcgtgtttaggactattttcggattgtgtttgtgattgtgagatcctcccaatgcccttggacgtcctcccttatataggggccgaatgggtgtgtttccgaaacatcacatccattcgttgcaccctttcgaaaggttgcgtctttccgatcgtaaccgttcggccttatccaccctttggccaacggtaaccatacgtcggtaaccgctcgaccttacacctcttcatcccgagttaccacagtccaccagctcgagtgtcaactgaccggaccacctagctgggtcagtactcgatcagttcaccgagctcggttgagctgtcggtcagctcacctagctgagctagctagtcatgcagctgttttagctcacctagctgagctagctagttcatccagcttgtccagctcatatagctggtttagctcggacagtttcgtccgttcttttcggctaagtcttttggtccatttctcggccttgactacgccattcctaatctttccatgatcatttctccatgatcactagattatcccgaaaccgtctaagtcatctaccctttccatgacttaaacgtttcattacttccttgggttaactttttcattgggctttctcgaccatgacctagttttccccaaaacaaaccggccccccttaggatcgcgggacgcgggtgttacaggcactcacgaccaggggcgtcagaaggcgtcggaccggtcacaagcctgtctggccggtccgggacatgtcttcactcttcagagcataacatccgattggctcgttgaaaagctccgatttcacttcgaggtgaaactagactctcctagctttccatatccaccgagatctcttgatttggtaatcgtaaagacctcgaacggacgccatacttctgaagcacagaaactctcttgaaacgggatttgatcgtcttttactcctttttgcttgaaaacacattattcattcttgaagcatcaagtaatcatccttgaaatctccaatatatcctgttttctccatggaaaacctaaataaaacatagtaaaagtgggctaaaatacgatgttatcaactcccccagacttagactttgtttgtcctcaagcaaacaagaaagcttagccggcggagaggtttgaaaaaccttgggaattctctttgtatcagagaccatgtcctaaaagataacctgcggacgcataaagacagggacaacacgttagatcattctcactatagactcaaaactttcaccatccttatccttccatctcgaacctgtaagagaactctgaaatcacgttagttaactctctacattcattaataagtggcgtgagcgtttctcattagaagatgtcattcggggtagacggcgcttggtaagaaaggggctttttggtgtttagtggtggagtttaagtgtttagggttaccgtaagtctcgagaatgcaggatatgtcacaaaaccgcaagagagaacggatctgttgaggtccacagttaccaaccacttcttcttgtaaacacctcatcttcttacttcttttcgtcttttcgattcccccagacttaggcttttatgtagggatctctgtgaatgattccatttctcctctaagtgatccatgtctttccttgggatctctctgtacttataagaattcttatttgtaaccgcttcctttcttttcttcttcgttttttcttttttttttttgaaaggggaagcggtacttatttactgacgagtcttaaaagcacgaaataagtaccttttgaaatcgaatctcaaggaagagtaagctctagaccaaatcatcacatcctccctgtaaattccgaatctccgtcttcgtggcgggaaactgtgtcgttcgtttctctccgacgtttttgcacatagctactaaaatgagaaaaggaaaaagagaatgcatgaggtctgaaagaggatagggtttaagggtaggaaccactaaaagtgagtggccattcaggatcagcagagagtggtaattaaagggataagaagtcctgaatgtatatgctcgtttccctgatctgaaacctcttcatgagaaagaattaagatcaagttaatcgtccaatttaaggtagagttaacttctggtcaaacaaaatctctacggtcgaaacttcaggggaaagatcccgttaggagcttctaggtattgactgttcttgtgggtcctgcaaaacttgtcactcaagaaatgaattagaacatatggaatggtcattttcatcatatatcaaggtcatcattccctacatcgttgttgactcaataaaactaaaataagaaaatgacattaaaatgactcaaagaaaaagaaaaagtacgttagtacagataaatacccctcagacttaaattacactgtccctagtgtaacaaagcggatgggtgaaaagaaaaataaaaggaaagaaaaattcgggaaaagtaaagatagaaccgaatgacctctactacgccgaggaggttgcaaatccggtggtgtgacaaataaatgtcggggatctcgaatcatcctctccatctgaaccgtgagggcaatctgctcggctaaccgctgctctaacgcaatacgtcgcgctctttcttcctcgagggaggaagaatctgtctcgtgtgaaccggcagcttgtgtggctctcctggaatccaacgccttcctcttgacgtaaccggcaagtgtgaaaggaagtcgctctccggtttgtagtgacaagaactcactactctcgggatcccatcttgtagcttcattccacaaacgtggaatggtgggacaaggaagcgtgatagtacaaataaagcgaggagaaacgtgatacctatatccaaaaagatcgggatcgatgcgtgtgccctcaaaaatcctcatcttacggagtctctcaaggtcaaagtagtgctcctcggcggtgaatgggcggtccgtgagatcaactcccgcagcttcaagtgtcgtcgtgatgactccaccgaagcttagagaagcgtcatcatcggtgtaatggatcgcctcgtgcttgatcttcaccaatcgcttcgcaaagagcgaggcatagttaactctccggggaaagtcaacaaaaggtgtcttcaagacaagaagctcatcgccaagtacattgttatgagcggtgcgggtgaagatagatgtggctagcagcttgtgaacgcatcgaatggccggatgagatatcaaggcggacttggtctttccactagagaaaagacctttcccggttcgttgccaagtatctccatgcgtttccgggccaaagtctatagcatcttggtaatcaaatccaagtgctcttccaaggtgtggaatggaaatgttgaagtgggtgccgttgatcgtgaagtagagaaccccatccctcgccaaaggtgaactcgtgcgcaggaaggctagggaaaccgtggcaagaaattgcctcgtctcttcttcgtagatctctcggcgaatggactccatgaagtgatgaagtccaagtgtatccaacatccatatcacgtcatcatcaagatcaagcactctaagggtcgagtaatcgatgagcaaagatggcgtcaacttgatcttgtcgatgaactctctataatcaacatcgtctttcaccggttggccaacaaacttcattggtagctctcttctcggcggttgttgtcgggaaagacttctaagagtggctccgactcgttggggcactaaggatgtgagcatgaaatcgccatcctcatcgtcgtgagtcccgttagaggttgtagaggctccttctacttgcttcgctttgcctttgtctctagctcggtcatggtatctcttgctacgccgttcgtcatatatgtcgtcggtgacttcaaatatgtggacgggctcctcaagcgctcgtgaatgtcgcgatcgtcgtgaggaattcctagaatccattggtacctaagaatgcaaaagatatagacaaagttagcactagacatggttaaaccaaaattcaaatctcttggtgcaatgatacttaaataagtatctagagattgaattagcaatcaacaacatcaccgtcaaatataggcatcctattcccagacttgatgacatgctagatgagctcaatggagctaccatcttctccaaaatagatttgagaagcggataccatcaggtgagaatgaaagaaggtgacgaatggaaaacaactttcaagactaagcaaggactgtataagtggttagtcatgccttttggactcaccaactccccgagcaccttcatgaggttaatgaaccaaattctaagggagtacatttgtaagtttgtggttgtttactttgacgatatcttgatttacagcacatgtcttgcatatcatttaaaacatcttgaaatggtgataaaaacgcttaaggctgaaaacctatatgctaaatttaagaaatgcacattttatactgatcaagttgtgtttctatgattttttgtaagctcgtagggtttgaaggttgatgaagaaaagatcaaggctacgactggccaacaccaacaaccattgggcatgttagaagcttccacggtctggctagtttctataggagatttgtgaaggatttcagtaccatagctgcaccattaacctcggtgattaaaaaaaatgtagaattcaaatggggtcaagcacaggaggatgcattcaaaatgctcaaataaagcctcacacatgcacttgttttggtacttcctaatttgataaaaaaaattgagattgagtgtgatgcttctggtacaggtttaggagttgtcctaacttaaagagggaaaccagtagcatagttcagtgaaaagcttaatggagctgcacttaattatcctacatatgataaagagctctacgctttggtaaggtctcttgaaacttggcaacattatttgctgtcaaaatagtttgttattcatacagatcacgagacactcaagcacctaagaggacagactaccctcaagaagagacacgcaaggtggcttgaattcattgaaacttttccatacatgatcaagtacaagaagggaaaagagaacattgtggctgacgctttatctagaagacatgccttgataagcaccattgagactaaggtcatgggatttgaacatatcaaagttctatatgatgaagatccagatttcaaagaagccttcaaagaaacaagcagagctgcttatgggtcattctaccaacatgaaggatttctctttaaggacaaaaggctgtgattccccaaggatgcatgagagaacttctgataagtgaagcacatgtaggtggacttatgggacatattggacgtgacaagactctaagtgttcttatggagcatttcttttggccgcacttgaaaagagatgttgaaaggttctggtcaaagtgcataacttgcttgaaagcaaaatctaggtcacatccttatggtttatacatgtctttgcctattcctaacctaccatgggtagatatttctatggattttgttctaggacggcccaaggtcaacaataaagactccatttttgttgtggtggactgattctctaagatggctcttttcattctatgcaacaagacaaatgacgctactcaaatagctgatctctttttcaaagaagttgtgcgtttacatggaataccaaggaacattgtttcagaccgggatacaaaatttctaagctacttttggtaaactttgtggaaaaagctcggaaccaagatgctcttctctaccacttgtcatcctcaaacagatggccaaactgaagtagttaatcgtactctctccaccctgttgagagctacggtgggtaagaatcttcgaaactggttatcttgtttgccttacattaatttttcttataatcatgctaagcattcagcaaccaaactctctccatctgaaattgtctatggttttacacctctgtcccagcctgtttattctagtgcagaaggagttacaaaagcagattttgttaagaagcttcatcaaagggttaaaaaaaatcttgagaagaaaagtgaaaagaacaaggagcatgctgacaaacaccgaaagaaactaacatttgaactgggagattgagtctggttacacatgagaaaagaaagatttccaaaggagaggtagtccaaactatcaccaagaggatatggaccatttcaggtcttagaaaagattaatgacaatgcttacaagattgaacttccaggtgagttaaacatttctcataccttcaatgttgctgatttgtctccattccatgaagatgaaacagttttggagtaagaactttctcaagagggaaggaatgatgagtacatcgagactatccaaactaactcagaggaagaagccaacaacataacaaccatggttcaagcaccaaggacaagatcaggaaccaaatgcttaagagaaaaattcaacaagtctattgaaagattgattacacttatagagcaagaggaactcgaaggaagatcgttcactaaggatattatccgagagacacccattgagcctcaaatctatccaaacatttccaaagctcaagacttagagaatgatcaagaacacaactattttgagcaatgtccatcccaagaaaccgagatcatcaaagagaaagcttgcgtggaactcaagacccaaacaacttcatttttgccagttttataaggaataaaggaacccactctcttcatcatttccaaaattattaaattaagggttggagcgtgcatgagctatattcccgaggtaagtgtttgaagtcaaataataaattgtttttttctttgttttgcaggaataagaccgttgcgtttttattgagtcgtttatttgtcttaggtcctaatttcgggtctgttgtttttacaagtttagtccttttattatgtaataatttttaccctagaaggtccccatatgctagactattatataatgccccttctcagctatgtaacctttcaagttttatgaaataaaatgagtgttttcttaggtttacttctgagatagaagcaaccacgttctccttcttcttgtgtgtgaatccttgaagattgagtccagactcatcatagatcctttcacagatctgtgtggcgtcactcattccacccttctactcatctccatctctatcaaatctgttgagagtgacatcagtccagcaactgattctccattattccgcttctattccatcctccattcacttggatctgtagagagtgacctcagtccagcaacaatttcaccatcttccaccttttgttttagctcgagtagactccactctacgtaaggtcgagctagttggtcaagtcagtcaatttgctggatcgtacctgtatcatctcattacggagtcttgtagctcatgaatttgagaagaatttgaccagaaattcattttcatagtcattccaagatgtgatagaaccttgagaaagcgactttcccacaaatggaccgtgtctccaagagaaaatggaaacaatcacagcttgaagccatcttcactaacttcattgatattagttaggctacagagcctatcatactcgtcaagatggtcgagtggatcctccataggtaggccatgaaatttgttgctctgaaccatggcaatgagaccactcttgatctcaaagttgttgttctgcacttgtggagacacaataccgtgaccctgattatggttacgtggtgcatcgccttcaccaatgttgtttggtaacgctgcagggttatgatcgtcggccatagtttatgtatgcagttggtcaatatcgtatgtgtctatctttccctttagttcacgagcaatatggtcgatgttgtcattgaaaaggaggttctgatatccttttgatcgagtttgcatacaacaagtatcaaccagactttagtggaccgtccagtggaggtcgagtaaagctagtgaatggtaataactggatcaaatagacaaacagaaaaacacaaaattagtaacttgagtgaaattcgaaaaaaaagaacttgatcttaacgattccaaaatctcaaatgtaacaaacaaacatccaaatggcaacaacgccaaattgatagtaggatttttactagttctcaattcgtaaggcactatcatgtcattgtagtagttaaggtgtcaatccattcaagtgtgatgcaaacagttgaaatgtgatcagaagtcactaagtcaagcaaagaagaaataggttggttttctaacagtcctaaaaggttatgaagaaggtaataaaaccgaagaaatacaagcatgtactcgatcacacatgctcactgctagaagagaggtggtgatcgagtatattagtggtgacagagaaaaaatattaaaacttagcagcagttaacaaagcagacgaataatcatataagtaaataggtaaattaaatagacgagaaatttctaaggatgggataatcgaataatgtgatcttcttagcctattcagatgattaacaaaacgtaatcaagctatccctagccaacaggttcaacaacagatcaatttactaacttgatagagatgaatatctctggaattagtagatcatgcattccatcaaacacctcctgagtgcgggaatacctaagtttggattccagttgataagacagaaatgagcagtaagcacaactaatcgagaagggattcaatcaattctacacttaaccatctaaaagactaaggatcacacaactcttctatcccatcctcaataatcctaatcactactcagacaacaaactaaaggacacaaactcgaaaatcaatgaaaattgcatattcaaagatcaaagagaaacaaaattgtaatcgaatatttagcggcgtaaaaataaaatttacaagcaattcgaattacaaagttgaataagcaaaaacatttagcggcgtaagatttaggtaaaaactagataaaaaaggagatgtctctggaaaaacccttcgagatttatttataacaaaaattaaaaaaaaagcaataagagaggcggtttgtgagttcactcaactggcccatcgagtaagtggatcgagtagatgatgggccaaaatgggcttcgtgatcgagtaaagattcaaacagcgctcgagtacttcctctttgcctcttctcttccttatgctcagattgtctggttgagtgtgggttgagtagagggatcgagtaggtgaccgagtaagtcgtgatgagtgatctggtaagttctgcagctccaactcgattgcgagatcgagtaggtgatcgagtatactagtcaggatggactgctcaggggactgcttctcttctaccagtgtaatctagtatgtcggtcgagtaagctgtcaagatggactgctgagcagacttcttctcctcaggctcaatgatcgagtatgagacagccatggtgatcaagtagatgatgcttctgctctatttcttctttgtttgcacatcaacaacctcaagatacctgaaacaacttcaaaatacataatatacaagactaatacaaaacacacctaattatgcaaagtatgcaaaacaatggtaaatgatatgaaagatgaatgaaactagattcaaaatgatgataaatgaatgcataaaacatgcaaattatgacatatcatcggctcaaacctaacactttctaccaagctctttcctaaaataggcctcacacaccacgagaaataacaaggcttgaaagaatgggttagttaagggtaggggaaactgttccaataatagaaacagctaattggatcagcaagaatcgtaaaaagatgaaagaaaatctaagtatgtatgtgggtatccatgagttcaaattcgatgctaaaacatgataattgtaagacagattaaggttcaagttgatagggaatggaatcaaatcaaaaaatgcttcaatcaagatagcgcgatcgagtagagcattttaaagaaggtgaagtcttacttcaatttcattcgtttatgcatcagacaactaacaacgagagcattgattctatctagtaaattagcatctttacaaggctatttcatcataatctcctatgcgtatgcaacagtactaaatgaaaacatactagactcaatcctaatgaaaatgtaactacctgaacactctgtttttgtgcgatacagtttcaaaatatttcatcattcaaataagccttggttttgaatatcacaagttaaacaaggctcaaccaaggaagcttacaacttgtgcaagtgtgctagtatgtgcgttccacattgtatccttgtcccctttgcactccattatccattggactataacaaagcaaaggatattccacactttgtctcctttcccattgattaaagttgaaggcaaatcacccctacctctcttccacacgatttcaagggtcgcaagtgaagaggcactcattctcctccatatatcttgaagccccacctccacctctcctcctataaatactcggcttccaagcaagctaggtgtgttttgcctacaaaacctaaatctccttagttcatctctctcttgaaatcgttctcgaccaccaacatctgttttactcgatcactaagcttctccacatccacaacagcttaatctaccgtatccctcactcgatccgtaggcttacttgattcgtctctctattttttctctttgatttcacctctaagtaaactactaaattttagttgtgagtctaaatcatttcagcttcaacatgatttcatacagttatgaatcttctaaggacgaggattacaacgttgatgaagctgagtcttggtctactagattagagaaagaagaactgattggaactcaaaactacaatttagtaggtttgtgagccttgagatgtgtaatcaaagagagaaaaagaggcgggttagtagccaaagagcaccgagtataacagagagggatcgagtgaatgttgcgaataggatagagaactttggatgaaagctattgagagatgaaaatgatttttgggtgaaagatgaactatagagagagattttatcttgctaatgagagtggaagtgatagttgagagtgagtatttaccttcaccatggtcaagtatatataggaggaggtgtggagatgtgctttcaagatatgtggaggagattgagtgactcttcacatgtgacccttgaaaacttgtggaggagatagagtgactcttgggtgtggcctcaacttgatcaagggatattattgacctttgggtaatgtaggacaaggggacaaggtggtgcgcatgcacactaacacgcttgcacaggttgtaagcttctttggttgatctttgtttgacttaaaaaatttgaaaccaaggcttactcgattgcaccactcgaccgcttactcgatgctcgtcagtggcttgtctccaaattttcaaaatttctcgaaccctgaactatatgaagcctatcaagtggagacgatcaaattccttttaaccctttaagtgcagatctatcaagagctatcaaaagtagcagaattgagtgaggaagggttggactacctgggctttacaatttatggtcaggactacctcctcaccatcaagaagtttgaaggctgattcgggttcctcaaggggacagataccaagcaaaggtttgagagaacacaattggtggcattctaaaagataatcgatacaaatgtcaagtttacatcatcgagaataaagatctacgccattagaagctcggtttctccgctatttccagagagctttagctaatgtcttctttgcaaggaaaatcacaaggatgataaaaagtggagagatagaaatgacggacgtagcatttaaagatcttctctacaccacaaaagatggaaatgtgatgaaggacgaaatgactgacacctatccctcactttacttgttgtccaactttctgagctacaaaggatgggcagtaactaacaacaataagagagcaaaaggagtgctttgaatggacgaagtggtaacacccatactgatggcctgcggagtaccattgcagtcagtggttattggaccaaggtggatagatatcccccacttaaggcatgctcttacccctgaccattggttgtagaacgagatgcacgtatagaacttcgaccatccagaagttggagctgcaaagatcttacttccatgcatcgccttcactcgaatcttggaaggcagcaacattgagttctcaccaccaattcaggcactttatgatgcgggtggaggagctcagcatatggaagtctctgaagaagaagatgaaccgatggaagaggtcgagtatgatgcgaggaggtatcattttgaggaacaccctagtcctacaagggagagtaacagcttaacagaagctcacaagcgcattggcatgctccaagcttggaacaaggcgcatgaaaaagtcatgaaatcttgcttgaagactatcaagagtctgaaggagatgctcaattgctcttcttcaaccattgttgttacgaggagcaatccacctaagtaaatgcctgcacgaagaagtgaagccactgtgccaaggcagtaagtctatgaaccaagagaacagagcattcccaaactgctgcaaggcactcctcccatgaaccaagaggacaaagaagaaggaggaagacgagactagtccgctcaagcagcaaggcgaggatactcaaagcaaagtattcactcaaccgccgcgctgagcacctcgtcgagcatccaatcaagtctgctgaggaaaaagtaggcgagtaatcacaagaaccggaaaaagtaggcgaattagcctaggctataggtctaaccggcaaatctttttatactccgttactcaacttatgcaggcaacgacgcatatatcgatgtgttaagattggattcgctaagtattctaagtcctgttactcaactatcgcaggcaaaaccacgaaggattggtaacactatgctcgaagttaggtttacccggttagggctcctaacctcttggatcagcagctaggtagcgaacctaactatggtgcattaagtaaaagatgtcccaaaagaattacaaagagtaagtaatctgagatccaagaactaaacgaatcaatacgataatcccatcgacaaaaccctagatctataacaaagaaactaatcgaataagaagagatgaaagtaaagaaaaaacgaaattataaacttaaatatagaagtaagatggttaagaatactcatctatgaggcacaaagagaaggattcgtctcccttgaagcaattaaatgaagaaaaacaaggaaactatgaaagaaaagtgtttagttctatggtgaaagtgaaagggagaacttgcggccaagaggccaagttatatggagagaggtgcagccagatgccgacttgtttcttctagggttcctcaaggtgtatatatagggctccaagtcttctaggtcggtttaggattttcccaagtcgaaataagtgaaactacgtcggtttagtaaaacctggtaagaggatgttttggaccggccacaatgtggaagtcgaaactaacacaatcaagatttgtctagggttttattttagggatacgataatcgtgaattctcaaagaacaacagaaacgattgataccaaagatggtgttcttgatattattaatgaaaagatgattttgatcgtacaagagtttgatcgtaaaagaaaaaggtgtttgtgctgtgagagctttgcgtagtgtaaattctagagcgatattgcttcctctttgtttgagccttgaatctctttatatagggatgataaatttccatttatcttgaagtcggtgtagaatatcgcggatcaggataatttccttattcttcggagttttttggaagatttcctgatttaagttgatccttcgtgattctcctttatcatttccgggtttatcggaactgacccttcggaaatgatgccttgtttggaaatgatactttgaagatgaatatttatcaagtctttgcctcgggtgatgatgaagacttcgcctcgggtaactttgcagacttcgcctcgggtgactttacacatttcacctcgggtagcactgagactttgcctcgggtagcactgagcctcgggtagcactgagactttgcctcggggtaactgcagtataaggctcggcagtgtaccccgagctgactgtgtaccccgagctgactggcagactgactggcagactgactggcaaggtacccgagctgactggcaggctgactggcagggtacccgagctgactggcagactgactggcagggtacccgagctgactggcagactgactggcagactgactggcagggtaaccgagctgactggcagactgactggcagggtacccgagctgactggcagactgactggcaggatacccaagctgactggcagactgactggcagggtacccgagctgactggcagactgactggcagggtacccgagctgactggcagactgactggcagggtacccgagctgactggcagactgactggcagggtacccgagctgactggcagggtacccgagctgactggcagactgactggcagggtacccgagctgactggcagactgactggcagggtacccgagctgactggcagactgactggcagggtacccgagctgactggcagactgactggcagactgactggcagggtacccgagctgactagcatgataatccgaggtgttgaagtttggctcggtctcaaaggatgggtgaaatccgaccccaacagttagccccccagcttgttgacttgggagcaagtgtgatgagcttcatgaatgagtcgaccgagctgttaacttttgcttcgagtcgccagtgaacctgaggcggcactcttagaaccgtcctttttcttctttttggttgtagtgtaagattgtgcatggatgactttgtcgttgtatttttgcaaagtaaatacaaacgctattttcaaagatccttgtcttcgaagagaatacaatgattttgaatagtttccgtatcaaaacatctttttgtcctaagtaaaaaaagaatttatgtagctggagcgaaagatagataccagtgttaagataaactgggttttagtagccggagcgaaagataggtaccagtgttaagataaactgggttttagcagaaagatttgaacgtttacggtcgcgacccgattcgattcaatcgataaccagtgcttagaagcgaactggggcaccagtgttaagattttactggggtttctgaagacaatttcatctttggtcggatatcttcgaccagattgtctcgaatgcttatatagcgcgctgtaaccgtggaggtgtagatgaatttagttcgcgggcgtggccatcgcccaaacgaaccgaacggagtttagaccgtgttgatttcccgaggcgagtttcggggtaaagaccgaggtaggtttagtaaaacccgaagtgtatacttagaaatatagtttgataaaatttgaataggagtataggaaacatataattgataaagtttgagtgggagtatggatatacggaccccactctccccccccccctttttgataaggggaggtagctgaactcgtccgaggacgagctgcctacgtacccttttcggggatcaagccaccccgtagttcaagcttatgcgtaccttaggtttttagcggtagtatttcctgaggtgtttccacaactgggatagtctcggcctcctcatgaccaattgtgacggcaatgggattaagattcgtcatctccacctcaggctcatcggtcgctttgggaggagcaagagttccaagaacggcctccagagctttcttctctacggccgccttcttttctgcaaggtacttctccttgcttcggccaatcttcgcctttttacgattgacctcgactttagattcggcgacgatgtttcgaagtttatgtgctgccatgaagcacatcctggaattcttttggcttccccatatcgttttcacaccgttaggcgtcgggaatttcaagcagagatggtatgtcgaggagacagctcgcattaggtttaaccatggggtgcccataatggcgttgtagatggtcggttgatctgtgacagagaaatcaactatcttcgttattccactggcctggactggcatctgaatagttccgagtgtcattagggtttctccagagaatccaagtactggcctcggagtctggtttacttgcgacatgctgatgttcatttgccgaagcgtctcgcggaaaattacgtcaatagtgctgccggtgtcgatcaacacccttgatacgtcatgatcttcgatggcaagcgtgatgaccagagggtcgttatgaggcatgtcgagcccatttgtctcactctcttcgaacatgattacatcgttaggttggtcgaatggccttaaccagttgctgggtgcttcggctcgtctctgataggctttgatcgcggctacggtgtcggggcaaaacgctgatcctcccattatcgtgtagattctttgtcgtgttccgtcacgctcctcgtcgggtgttccccggactctcttcggagcctctggctcccttggctcgggaccccttgctgtgtccacctgttcgggctgaacttgttctggctgtaggtctttgagggttatgttcgtcccaagctctccggctagaaatttggccgttaatattgctccgaggctcctgcatctggaagtgtgatgcccgatggtcttgtgatgctcgcagtattctttttcgtcacctgggggttgacatcttgtccaagtgaatgaatctcttcctcgcccacagcctacgtcgacttgatagttgtgggctcctgagaaaacgtgcccctcgtggtgcgtgtacgtttcactctgatccggcttcttctggcttagcggtcctgtttgggctttctcggttttctcggctcggggcgcctgttttgttggctcatgcctctttgctagcagcgccatctcttcttcgtgggcgacgaaatccgaggctcgatgcagcgcgtcgcgaattgttgtcggtttagacaggttcaactctttcctgaattctgacttgtaccagagagctttcttcaaagccgaaagagcggctacatctgtaattccttcgaccttggctagcgtcgatttgaaggttgtgaggaaatctctcaatggttcggtgggctattgagatagggaccacagatccgcgtcggaggttccggggtcgatgaggacggagtattgtttgaggaatagtgtcgacagctcgtcgaaactgtcaatcgagtttcgttccaatctagaaaaccactctaatgcgggtcctttgaggtgttccacgaacagcaagcatagacctgcatccttctccccgggcttaaacctggctcgggctacggatatcacgaaagatttaatgtgacacttcgggtcggttgatccgttgtaggagtcgattttgaacttccccagattggacatcgtcgtttcggaaattcttttggtgaagggcgtattacgagattcttctaaaattcggtcgatgtttggtgcagaggatgaaacgctatgtatctgggttttgacgagcttcatatcagcttccgccttggctagggaggctcggatcttgctgagctcgtcctccctttcggattcttcggcccatcttatgttttcctcagtttcttcatcgtcagtgagatctgttcgctcggcggagttagctccggctcgggtacgctcatcttgcagatcatctggctcgtccgtcaaatccactgcgtctggttcggtgggatcatcttggttctcgcgtctggcagggtcggctcgggttgcgactctagtgttgtcggttggcgtcgcgaacgtgagtctcgttgggttgacgccagggaagtccctccgagctcgtggcggccgagtctggaaacgcgtggttttttgttgcccacgtgttgcgatttcgtcgactcgctgcgccaaggttttgttagctttctcttgatcgtcagctttcttctggaatttaaccatcatatccttcagttcggctagggctactaagattgtcagatcggcttgaggattttgagggttcagagcattagggttccctcctccggctggcggtatctgacgatcgtcttcgtttaccatcctctctggtattcgagtctcgcgttcttagggtaagagaattctaaagtaatccccacagacggcgccaaactgtggaagtcgaaactaacacaatcaagatttgtctagggttttattttagggatacgataatcgtgaattctcaaagaacaacagaaacgattgataccaaagatggtgttcttgatattattaatgaaaagatgattttgatcgtacaagagtttgatcgtaaaagaaaaaggtgtttgtgctgtgagagctttgcgtagtgtaaattctagagcgatattgcttcctctttgtttgagccttgaatctctttatatagggatggtaaaccgcctctccagcgatattctcggaagatttccatttatcttgaagtcggtgtagaatatcgcggatcaggataatttccttattcttcggagttttttggaagatttcctgatttaagttgatccttcgtgattctcctttatcatttctgggtttatcggaactgacccttcggaaatgatgccttgtttggaaatgatactttgaagatgaatatttatcaagtctttgcctcgggtgatgatgaagacttcgcctcgggtaactttgcagacttcgcctcgggtgactttacacatttcacctcgggtagcactgagactttgcctcgggtagcactgagcctcgggtagcactgagactttgcctcggggtaactgcagtataaggctcggcagtgtaccccgagctgactgtgtaccccgagctgactggcagactgactggcaaggtacccgagctgactggcaggctgactggcagggtacccgagctgactggcagactgactggcagggtacccgagctgactggcagactgactggcagggtaaccgagctgactggcagactgactggcagggtaaccgagctgactggcagactgactggcagggtacccgagctgactggcagactgactggcaggatacccgagctgactggcagactgactggcagggtacccgagctgactggcagactgactggcagggtacccgagctgactggcagactgactggcagggtacccgagctgactggcagactgactggcagggtacccgagctgactggcagactgactggcagggtacccgagctgactggcagactgactggcagggtacccgagctgactagcatgataatccgaggtgttgaagtttggctcggtctcaaaggatgggtgaaatccgaccccaacacacaacacgttgtgaccgttccaggagtgtcttgagaccggcaagagcttggtgaccggtgtggcttgccctggagctcagatcttcattcccttcttgcttcatcttcgagcctgcaagacatatcttcagtgtttcggtgataactctcgactgggtcaatagtttagtcttattctacttggaggtaaaagctgactcttgtatctttccaacgacgccaatatcatcaactttggtgaagaggaaaacctacaacggacgccatacatctgatgctacgaatctgtccagaaacgggttttgctccccttttagtcatatttgcccaaaactcataaatcttttttgaagcacaaatacttgaaaacagccttgaagtatccaatatctcttgatttctccattgtaaatctaataaaacatagtaaaagtggacgaaaatacgatgttatcaactcccccagacttagacttttcttgtcctcaagcaaacaagaaattatatccggtgaggagaggtttgaaaatcgcaggaagtctcttattatcagtgaccgtgaacataatctgtagatcacattaaacaagatttacgttagaacattcgcactatcgtcctacacctttctcatccttgtccatccgctttgaacctacagaaaactctgaattcacgttaatcaactttttacattcattaagtgtttggcatgagctttctcattaggaggtatcattcaggctagacggtgcttggtatgaaaggggatatttggtgtttggtggtggagttgaagtgtttagggttaccgtataatctcgaaaatacaggatatgtcgcaaaaccgcaagagagaacggatctgttgatgtccatagtttccaaccactttttcttgtaacatcatctttctcctttacttctcttctttttagctcccgcatacttagatttttctgtggggatctttgtaaatgacttcatctcttctctaagtgatccatgtctttccttgggacttccctatgctttgagactttctttaggtaattgtttcctttcctttcgttttttttttcttctttttctttttattttctttttctttttctttttttttttcttttttttttatgaaagggaaacgatactctttaagaacgcaagtctcatgagcacgaaataagtaccttttgttacgtcgaatcctaaggaagaataagctcttagactaaatcgtcacagtctcttagttttccgattcctccgtcttcgtgttgggaaactgtgttgttcttttctcaccgacttttttgcacatagctgctaaagtgaggaaagaaaaagagaatgcatgaggtcttaaaagaggatagggtgactaaccatatgatctttccttgttgcttgacatcgacttaactcagcttagtttaaatcaaattccatgaaataaatctctattcgcatcttttttgaaacaaaaatctaataacatcaatagtttcaacaaaacaaaataaataaataaaacatacctaagatagatttgctcttgttttgatgtcggcttattcacgattaagatcaatgtcgtggtgatggatggggagaatggatggcgagacggttgtggtatcggatcggatgggtggaagttatgggatagatcgggtacaaaattgcacgacagttccatggtggcttagcacaaggcattgatcttcccattgaaatcaattgtatatcactgtcatcctaccccgagccaaatacaccaggctacccgaggtgaaaactctgagatacccgaggtgaagtcttcaaaattacccgaggcgaagtctccaaagtcacccgaggtgaagtcttcaagatcacccgaggcaacatccgcagagtcgcccgaggtggaatgcgcaatattacccgaggcgaagacttgatgaatatcacctccaaagtctcacttccgaatagaacgacatcatttcaggaaaagaaggatcatttccgagatactcggaaatgataaggaagaatcttgaaggatcattgcaaatcaggaaatcttccaaaagcctctgaagaataaggaaagtaccttatccgcgatattctaagccgactccgggggaaatggaaatcttccgagaataccgctggagaggcggtttattatccctatataaagcgactcaaggtcttcacaggggggacagaaacaaaaacgctctagacttcagactacaaacgctctgatattcaaaagcaagaaaacacttttctttttacgatctaattctttgtacgatcaaaaccacacttttcatcaataaaatcaagaacaccatctttggttactattcgttctgtagttctttgaggattctcgcaaatcgtatccctaaataaaaccctagacaaatcttgattgtgttaagtttcgacttccacagtttggcgccatctgtggggatactttagaattctcttactccaagaacgcagaactcaagcaccgaagaaaacgatgactgaagacgaccgtcagctaccagccggtggaggtaacccgattcctccgaaccctcagaatccccaagccgaaccagcaatctcgacaaccttagctgagctgaaggatatgataattcaactccagaaaaaagccgacgatcaagaaaaagttaacaagaccatagcgcagcaaatcgaagaactcgcgtcctgcggacagctcagaaccacacgttcttcgcaactccgaccgacaacaatagagccaaagcccgagttgagcccgcccgacgcgagaatgaggatgatcctgcggacctgaacacgacacatcaaacgaacgagccgggcaatccgcaaggcatatatccctgaactggagttaacttcaccgtgcggaccgacatcaccgatgacgaaaaaaccgaggcaaacataagatggaccgaagagtatgagaaggaacgagagctcggtgaaatcaaagcctccttagccaaaactgaagccgatatgaagctcatcaaatcacagatacatagcgtgtcttcctcagcacctaatatcgaccgcatcttagaagaatctcgcaatacacctttcaccagaagaatctccgaagcaacggtctctgataggaaagctcaagatcgattacttcaacggaacgaccgacctgaagggacatattaaatcactcatgatatctgtagcccgagccaagtttaaacccggagagaaggacgcaggtttatgcttgttgttcgtcgagcacctcaagggacccgcacttgactggttttcaagattggaccgacactcggtcgatagctttgaagaactgtcgacgctcttcctcaaataatactctgtgctcattgatcctggaacgtccgacgcagatttatggtcattgtcccaacagtctaacgagccgctgaaagacttcctcgcgactttcaaatcgacactggccaaggttgagaaaatcactgacgtggattctctctcagccttgagaaaagccttacggtataagtctgaattcagaaaggagctaaacttatctaagcctaccacgatccgtgacgcattacatcgagcttcagattttgtcgcccacgaagaagagatggagttgctagcaaaaaggcacgagccgaagaagcaggtggcccgagccgacaaagcacaagctggtccgccgatccagaacaagacaaatcaaagtggaacatatacgcaccacgaggggcgcaatttcgcagaagcccataactaccaaatcgatgcaggccgaggacgaggaagagactcttttacttggacaagaagtcaaccaccaaatgatgaacaagaatactgcaagcatcacaagaccttcgggcatcacacttccaaatgcaggagccttggagcaaaattagcggcctaatttctagccggagagcttgggacgaacataaccctcgaagacctagagctagaacaagttcagccagagcaggtggacacagcaaggggtcccgagccaaggaagctagaggctctgaagagaatccggggaacacccgacgaggagcatgatggaacacggcaaagaattcacatgataatgggacgatcagcgtattgcccagacaccgtagccatgatcaaagcgtatcagagacaagccgaagcgcccagcaactagttaaggccattcgaccgacctaacgatgtaatcatgttcaaagaaagtgagacaaatggactcgacatgcctcataatgaccctctggtcatcacgcttgccattggagaccacgacgtgtcaagggtattgatcgataccggcagcacgattgacgtgatcttccacgagacacttcggcagatgaacatcggcatgtcgcaagtaaaccagactccgaggccagtacttggattctctggagaaaccctaatgacactcggaactattcagctgccagtccagtccagtggaataacgaagatagttgatttctctgtcataaatcagccgaccatctacaacgccattatgggtaccccatggttaaaccaaatgcgagctgccacctcgacataccatctttacttgaagttcccgacgcctagctgtgtaaaaacgatatagggaagccaaaagaattccaggatgtgcttcatggcagcacataaacttcggaacctcatcgccgaatctaaagctgaggtcaatcataaaaaagcaaagatcggccgaaacaaggaaaccccagttattactaacactagtgccctagttcatttctaaacactggttatcagttgaattggatcgggtcgcaaccgtgacctcaacactggtacctaaacatttgcttaggatataacttcttttcggctcaaagtttaaagaagaaaaatcgcttcggaacaacattcgtttaaaataaacaagtattcacttaacaaaatatttagtcttgaataaagccatcctcacaatctttcactacaacaaaaaaggaagaaaaagaatggttctaagagtgccgcctcaggttcactggcaactcgaaccaaaagttaacagctcggtctgctcgttcatgaagctcgttacacttgctccccaagtcaacgagctggggggctaactattagggtcggatatcatccatcctttgagaccgagccgaactttaacacctcgggttatcttgctaatcagctcagggtatcctgccagtcagcttgggtaccctgccagtcagctcgggtaccctgccagtcagctcgggtaccctgccagtcagctcgggtaccctgccagtcagctcgggtaccctgccagtcagctcgggtaccctgccagtcagctcgggtaccttgccagtcagctcgggtaccctgccagtcagctcgggtaccctgccagtcagttcaggtaccctgccagtcagtctgccagtcagctcgggtaccctgccagtgcgtctgccagttagctcgggtaccctgccagtcggtctgccagtcagctcgggtaccctgctagtcagctcgggtaccctaccaatcagctcgggtaccctgccagtcagtcctgccagtcagctcgggtaccctaccagtcagctcaggtaccgtgctagtcagtctgccagtcagctcggataccctgccagtcagtcctgccagtcagctcgggtaccctgccaatgcctcggctcggattgtatatcaccatcatcctgccccgagccaattacaccaggctacccgaggtgaagtctctgagctacccgaggtgaagtcttcaaagttacccgaggcgaagtctccaaagtcacccgaggtgaagtcttcaaaatcacccgaggcaacatccgcagagtcgcccgaggtggaatgcgcaatattacccgaggcgaagacttgatgaatattcacctccaaagtatcacttccgaatagaacgacatcatttcagaaaaagaaggatcatttccgagatactcggaaatgataaggaagaatcttgaaggatcattgcaaatcaggaaatcttccaaaagcctctgaacaataaggaaagtatccttatccgcgatattctaagccgactccgggggcaatggaaatcttccgagaatattgctggagaggcggtttattatccctaaataaagcgactcaaggtcttcacaaggggggacaaaaacaaaaacgctctagatcacttcagactacaaacgctctgatattcgaaagcaagtaaacacttttctttttacgatctaattctttgtacgatcaaaaccacacttttcatcaataaaatcaagaacaccatctttggttactattcgttttgtagttctttgaggattctcgcaaatcgtatccctaataaaaccctagacaaatctcgattgtgttaagttttgacttccaactctgcaaaatactagtaagtggtaagtatagtggtaagtattccccatgttgcgcggtgaaaagggagtttagcttaattcgattgtcataagtttattgtgtgaactagagagttttgtggaattcgacccctaagtattacagtggcctctttatttgacagagtagtctaagggtaatttgacacatatcaattttggcgccattgaactcaaaactcaattataagagtcgttaaactcaaaactcaattataaaactaatcaactctcgttacaaaagttatctatgtctaaaataaaattccaaatatctttgagaattaaatgaattagacaagcattaaattttaagtttgattgttcacaaagtcactgaaccagatctctctgagaacatgtactttgctcacctaagattatttcaggaaatcaagcgcactctcgtgttaactaattatcctatgagctagattctaggacgcaacgagtgtcgagcgacaccgacacctctgagacgctccaagttgttcttcttagctataatgctgcaaatactcctattttgctccaaagtccaccaaagtgtgcatgtacctacaaagacttgaaaagacagaaaaagactaaaaagattctaaaaacaatacttatatcttgatcaaaacctgtaaaaatcatgatatatcaaaaactgagtaccgtattgctctaagat

SEQ ID NO: 5259 - DNA, 37527 bp, Arabidopsis lyrata
  Intron number 3 from transcript 493859 (locus 493859) deri ved from phytozome v7.0 (chr-ID scaffold_7; pos 21701451 t o 21738977)
actctgtagaagcaggtaacaaagtgttgctctacatggttgtatcttgcatctagtgacttgcgtgttatagatgttttaatttttttcctgataattggacctgaatcagttggtggtgaaacggaaacgaatgtggttactggcgttgttattgaagaagttctcgaagaggcaccaaaatggaaagtcttacgtgtgagtgactgagtgagtttcagtttcaatgccgtttccctgttactgttgatttaatggtggaagttggttcagctaatgaccacatttgttctttgttttttgacctctttgatttggccgccacactctatgattgacaaacacgttttcctggatttgccgtatgaaatcgcttttatacctaatggtgtgcgcgtgattaatacaggagattttagaagagacacaagaagaaagacaaaatcagactctttctgaggaagaaagcagtgacaacaatggaatagttcttgtggcttgcaaagatgagcggtcctgcatgcagcttgaggattgcatcacaaacaatccacagaaggtccagttagataactatgttttgcaagattttacgtcatgcattaacaacagacaagaaccattctcttaaaagccaacaaccaattccataatttgtctggcccacacaaatcatctcattttacctacacttgtgcaggtcatgcgggaagaatgggaaatgtacctgctgagcaaaattgagctccgtagtgtgcagacaccacaaaagaagaaacaaaagactcccaagggttttgggattcttgatggagtagttccggttactacgatacagaactcggagggtagcagtgttggtagacaagagcatgaggctcttatggctgctgcatcttctattcgcaagctagaaaagacaatagatatggcatctgggaataacaacccagagcctcatgttgataaggcttcatgtaccaaaggaaaagctaaaaaggattcaccaagtcttcggagatccataagaagttgcaataagaaaacggcaaacagtaaagctgaaatcataaaagacccagagaatgaagaaagagctagtgaagctagtacatcagccccccgagaagccaatgctgttcactccagcggtgctagaaagctaccgcctgtgcatttttatgccttagaaagcgatcaacctatactagatatcttgaaaccctctgtgatcattgtctaccatcctgacatgggttttgtcagggaaattgaggtgtacaaggcagagaaccctctgaaaaagctgaaagtttattttcttttctatgatgagtctacagaagtgcagaagtttgaagcaagcatacgtcgagaaaatggagcgtttgaatcattgatcaggcagaagtcttcaatgatgattcccgttgatcaggtttgaaactcaaatccctacattttgaaacaaagcctgtgtgagtttcttttcgtgcttcaaaatttacaatttgacatgaacgtacattagaacaactctgattaatggaaaggttgctcaaacaagtttataataatttggatcagaccaagtggatgaaactttcaactgaaattttacgttatcctcttgtttttccaccctggattccagttttttcccctgctttcatctcatccatcctgtgctataaacttggaattaggatgggctctgcatggggtcaaattcatctacagagtttccagcttcaagtactcaaaactcaataacccgaaaagcaggcggaagaaaggaaatggagaaagagacacaggttcgtatctcagtactgatctgatctccaagattaactcgatttgggaaagcttttacttgaaaacttcaatggttttctcaccaggtaatagttgacatgagggaattcatgagcagcctaccaaatgttcttcaccagaaaggcatgaagataataccagttacactagaggtcggtgactatatcctatctccttcaatatgcgtggagagaaagagcattcaagatcttttccagagcttcacatcaggtcgtttattccaccaagttgaaatgatgtcccgttattacagaatacccgttcttctcatcgagttctctcaagacaaaagtttctcctttcaggtgccctctcaaatttcaagcttcacagtcaaaatattttcatgttcttcattgagtttggatcagttatttttttcttttgcagtctgcgagtgatatatcagatgatgtgactccatataacatcatatcaaaactatcattgctcgttctgcactttcctcggttaaggatattatggtctcgaagtctacatgcaaccgcagaaatcttcactaccttaaaatccaaccaagatgagcccgatgagacccgagcagtgagagttggtgtgccttcagaagaaggtatcatagaaaatgacatcaggtaaaagaaaactctctttcttaaactgcaaaatcagttttgtttatttgcgttggtaaaatatcgaaattgactcattatgtgaaacagagccgagaactataacacatcagcagtagagtttctgagaaggcttcctggagtttcagacgcaaactatagaacgataatggagaaatgtaagagtttggctgagctcgcgtctttgcctgtggagacattagcagaactcatgggtggtcacaaagttgctaaaagtctcagagagtttcttgacgctaagtatccgactttgctataaagagagaggtaacacttatttaatttagaagctcaatcacaaagctgcttagttatttcttgttcatctgtgacatttgatatagattagttttaatattctccatttctccatttgatcatttatgagttgattgatctgttttaacagttatactagtgagcatactttgattgtatttaaatcttcgttttcaatgagtagagtgccctccttggtagtgtggtaaaaacagtaaaagtattgaattggtgatttcagatagaatctatttttggtcaagatttggatattatctaaatgatgataatatgcaaactaacataaataattatatatccatgatatatattacaaataataaatacacccaaaaagaaaggccaaaactcaaaactcactttttctctcagaaaaaaatatatataaaagggagaaactatatatatgtaaaacaataattgaaaaaaaaactatatattgaacataagagaaatttgtacaatactgcaccatttgattcttctgagaatatcggttttacctcttcttggcatttttaagataacgtacagtcataacaagttgttgtctctcaccttcaacttctgcaaatcttagacttatctctgaatatctctcttgcatctccttcaattccatctccatcaatccattttgctctcttagtgacgctacttcttttaccaaatcttgaagatcattactgtataaacaaaacaaacaatgagaaatcattgtattttcttcagtttatgttggttcatgaacatacatacctcttattcaatggcaaggcttctctggaccttcaccagcctgttcataaaaccagagttatgttgtaatgtttgaggtcgtaggaatttagatgatttgattatctaaactacaaaaaaggttaattctttttacctcttggctattttgacttcgctcgtagagtttaatctgcaattcttcgattctgtccttcaattccttttccttttcgatgaacatcttcgaagaggcttccaaagcattttcctttagtttgatttgttcctagattacaaaagtttggcatcaacatcaaaataattagccaaatagtgaatgttctagtgttagactgcttctttatcatctttgattcggtgtaactctttcgccaaagatgccttagtctccatacttgatttgctcatctcttccaactcaagtctcaagatttcaatctcatccttcagccttttgatctgctgtgttagatctgcattaatatcttcttcttacttcttttgattctctagatccttggatttttccacaagatccactaactttctctccatctctttcgtcttaagatccgtctttcccgagagctcgttgagctttgcttcatactctaccctatttgctccgagttcatcgttaacgcttatgagaagttcttctagctgacgcttctgcatgcgcagttcgcgggtttcggtcattgctttcatagtcaccttctcttttgctgctaacgtagaagacatctgctcagagattctcttgaactcgtcctgtattttgcctgctacactagcatttttccacctcgtcttcctcagggcttcttcggcttcgatagctttgtgctcttgctccactttagcacgtgtgacagcttcaagatctgcatcaaatatctgagcctgtttctctaattcttcttccatgccctcgatctgcgtttcaagttctttaatgcggcataaggactcagagaaatcctcggactgcttcttgagcttagcttctaggctctcgacatgatccttcgctccagtacgtgtgcttcttttgcatccatgtgtcccttcacaagctcatccagtgccttttgatcctcatcgtcatctgtctcacttgtgcagggccttctccttgattcttcggtgttcctctcgcaggttcttggtctgggaagaccaactgttttcttacttctttgccccaccatagcttctagatcttgcacagcaaggatcaactcggtgtttgactcttgtgtcttttgaagctgtaatcgtagattagaattcagatccttctcataatccagttcttctcgggtttcttctaaaagaacgtgtggatcccttccttcaagctgcaacttgttcctaatttttgcctcttcctttcgcttgtcagatgctttaatactctcataatctaccttcagcgaatccctctcctgtttcaggctagtgacctctctcaggagatcctgacttcttttggtctctttaacaatttgtttccgcaggctctgtagctctagttctgaaagatctgctcgccttgccaaagctacgagctcggctttaagcttgtctacctcgtcctatgatgcacggggacgttaattttcagccgtctcacgtcccagtttcgtttcggggacgggtacttgatggggacagcctaaaaacgtttcccccacgtttcagagtagttagggacgtcaagcaaaaaatggaaacgtgagggaacatatacggggacgtttccaatgagtttttggaaataaattaagtgtcctccttttagaataggcaacttaactatttttcctacaaaaaactcaaacgtaaaaggaattaaaaggcatgttctaggggtttaacataagattccatggaagatatgaggttctttgagttttccaacctttagatgatccagatctttgaaaatcaattcctcaatattaagcttttttatgttatttagaatattaaatcaaaaaaaaaaataatgttgagacttatatttatatttaagggtattatatatatatatatatatgtatatgttttattgaagtacccatgccgtacccgtatctatgaatttttattttgccgttttccgtccccgtttccgtacccgtttctagttcccgtacccgttttggtgctacttagacctcgtcatccgaagaactttttgttgtgtctctcaggctggcatcgtttgaactattcatggagtcatcagtactgattccctgctcagaacttcctgaccactcggattctgatatatgaggctcttcatatacatacatttgtaaccgaatggtgatgcatagttgagtgattttgctgaatgttatctcctctgttttcaacttctcccagtgtatccagttcagagacactgtcaaagcttgacaacgtactatcagattcaatcgatgctcgacgcctcaattcagcaatccgggaagctttaccaaatggaccttcctataagaacatacacaaatagaattttgaacttctggatacaccaattgcttcaataatcaagaatatggaaagaaaaaaagtcattatagaacataattactgtacctcttgtgaatcacttttatgactttgatctgtttcaatacttaaatgggatttcaaatcttgaccccatgaccttttcaccaagctatcgttttctttcaccactctgtagagcacacagacaaaacaaacaaagactcccattaataaatcctaaatgaataaagagatttgcaagaaagaaagaaacttcttgtcacctttgcggatccgcattttctagctgcctttgtattgatacctgataatgaaccagttcgaagctcagtacagaaagaaaaaaatatcattcaaaagacaaagaaggaagaatcatgtgagctttttccttaggatgcaaacactgtaatgtctcatgacaaacattaatgcaaagaaagaaagagagaaagagagctaacgtgcaacattgcatttgaatttgaattctggagaggaagagaaacattgcaagttttaattgcatcacaatattcagcaaaatcaatcgaagtctctcccacaacaccagattttgcaaaaaaaaaaaaaaaaaaaaaaaaaggctaagaacatcttttggaggagtatatatctgcagtatattaatgaatgatgaagagtctctgcaaatgtctccgtcgtcgatgcagatgaccacaatcagtaccttggacaaaagctcacacaagattcttatatatgttgcttgacagaccaagtaatggttactgctgctcattcatatgttcaaatcatttgcgcagaggatgttatctgcaagcttacaggtacgagagatatatatcgtatggtttttctactttcttgtatcggaggctaaatatgctcacatatacttgcaaaaccagacaaaatcttcagcaagaagcctttcttctggaaaaccgaaaagtatttgctcatatgttcaaatcattcatatgatattcagtcatataatcagtcattcatatgttcaaatcatttgcgcagaggatgttatctgcaagcttacaggttaggatatgtttataatgcttgctttttttcgcttccagcctgcctttgcacaacaagagagacgtcaggtatttgtgcacccagttgctcagcaagaagcctttcttctggaaaaccgaaaagtatttgctcgtaaatctttactattggtggctttttggttctggcactttgtatttgtggcacatgttacttttcatcagaaagccagaaaattacacaacatgtctctttgagcaccttgctggattatatccttttcatttcagatgaggttatcagaagttgtatttctattttcaatcttctctgcacctgctactaaagcatttctgaattcgtggacagtgcaatgtagcctgagtcgatcggatattaagattctataagatgaatacaaacctttcttgtcagatgaggcagcgtatatacattcactgcagggtcaggcggagtatctgtagtgacgttgatttgtgcttaaccacctccgcatgcttgctgcagggaatttcttatattgctagatgccattgtggagtgttggtctagcttctatatacgatgctctttttgatgagatatcttatgttgaaccatttttgttgtgtgtatgttagaactgtcacaaggaaaaactttgggaattggctcgggggagaagcaagtcctgcttccttgcttcagttgtatgttctgactatggaagtctaacagaggccgctattggagtacatgacatcatcggtgagttaatgtcagctgtagagactcattgttggattataagcatctttgcaataggtcacctttttttgctccatattaattagaatggaatcattcgttttatcagtgagttacgttgggatctataaagagattcatgttggattttaagcttcttcatatagaggttaaaacagcaaccagcagaggaattgaagaggagaaaggtgctaatatgtgtgaatatatcagtaggtcggtctttacaagttatctttgtaattttccagagacttgttccttgatgtgctgtttacagtactgggtcaactttcatcctcccttgctttgaaacggtaattcaaagaacatctagcggtaattgaaatatacggtcaccttacagtctttactggtgtcaaacttattgtttctaactgcagttcctattataataaagatggcaccaaactagaggagcaaaaggtgtgtaacctgcatcctcttcatgtgatctctcattggcatttaccaacacagttatctttccatttgttctatcttgtttctttcccatatgaacagtgaaactggtcaagaaggacagtcttcttgattctcaacttgtcaacaaatcttctgatgatagagcaaaagatgtgggtttgtttttgaggaatgaatctaccacgtcatcttgttttgatcaatcctctgtttcatcatcatctgaggacagagatgatcagacctcgttggccaggaatgactcctgtagttgcactagtactatatgctatttagtccccagatgtaagtgttctttgaaatttttacggaatctactatgtcatcttgcaaagttgtaaatgttgttaaggcattatattgcaaagacgaggtcatctggtagggtaaatatttcatagtctttttgtaaccaaacttgaaagagacataagactcgtgagaaaaaaccaaaaaacacaaaacaaagaagtcaagtaaagagaacaaccgagaaaagcaagatggacttgaactcttaaaattcatttcttcttcttgccttgcttaagcttcttcttcttctcttgctcaagcttttccttgtcttgctcaagctttttcttgtcttgctcaagcttcttctcagcctttttaatctcattcttgaaattaaagattaagttctctatctccaacctcccgttcttcaccaaatccacgtgtttcttcatagcttcttcgtatttagaagacaccaaacctctttcataatcggccacatcaagcgaccgttccatcaacttgaaccgagaacttccagcagctacaagccctaaactgatgagacgagtccataaaaactcaaactcttcttttctgcgtccgtaagcagacaactccttctcaagttgctgcttcacattgagctcacgtacttcaacaggtctaaattctgtagagagaatcaaagctcattacagtagttctaaaacgtaattccctgaaacataaaagagacagttgaatcacctctctttgttccagctgttgaagctccaacgtcaaaacaacctctcttagcctctacagatgtttcaacaggtccaacttcaggtttacacgatgaaacagaggacgcgaaatctcctgaaacaataatttttagagcttttgaggtccaagatcccatcatatataggtaatcgctaaagcttatataccttcactcttctcatcagacagatcttgtaattggatcccagaaacaacagcttggtacgggtccatcgatctccttcaaagcaagatgagattatgatgtgaattgtgaactagaagagttaaagtggttaataaagacgaaagggaaagaaaaaaaaaaccctaattctggtgtagggaagaagaaatcttatcttattatataaagttggattttcgaagttagcaactcacgagatcttgacacatgtcatattcattgattcgagattttgacacatgtcaaaaaaatttgtttttaaaatttttaaatatatagaaagataattatgagaaaatactaaaatttaaataaatttaaaaatgtaaaaagataatgttaagaaacttaaataattttaaatataaaaagataatgttaataaaaattaaatttaaatattttaaaaagtgtaaaaacataactatgatatagacacgtgtcatatttatcgattcgagattttgacacgtgtcaaaaatatttgtttttaaaaaattttaaatatataaaaagataattatgagaaaatactaaaatttaaaaatataatattaagaaaattataacttaaattattttaaaatataaaaagataatgttaagaaaaatttaaatttaaatattttaaataatgtaaaaagataaatataattacttattatagttttaagttatgatcgcatagagatgaatttttatattttctaataagatagcttaataggatttcgtatcagctcatataggtttattgcgttttataattgttactataatttaatataatttttttatctctacaataattatttgagaagtagaaacgcactatattcaaagttagggcattggaggcctgtggttaaaagttggaatgatttgtcctaaacacccttaatgaattgttcttctcgaaatttcttcttcttcgtaattaggggtatataagtctaatcgtgtgttgatctctatactaatgtcctaaacaccctcgatacgaaattttttgttcttaattattaggggtatataagtctaatcgtgttttgagatgattagtcttaatcacccttaatgaatacactatcaaatccagttttctattttttggtgagggtaaaacaataaaatcgtgtgaattttattaaaatatggaatattccgttttttaatattaaaatatagaatatttcgtttttaaatattaaaatatagaatatttcgttttttaatttttataaaaatttaagatagatactaaaatatattacgaatatttttatcaagaaattttccaattttaaaaaataaatttttagagataattatgacggtgtgccctagatattaaactataaatatagagccgcaaccacaccattagaactcagattcgttagcctaaacatatcgttttgatattatagcttttttttttgttgctttggttcttttatggatcgatttattttgcgttattattttttaccttttcttgaggttatatttgtattgttattatcttggtctatgaattatcaagattgttattgttttgctgatttgtatcgtgtgaattatgttttaggtaaccgctcatgggagtttctatcaagagattgaatgaacgagttgatgaagacatgcctcttcattaaattcattaacaaactttttacatcaatcgtgagtcctctttaattttagttagcgcttctcttatgtctctttgtaaattacttacaattttataatttgtgttggtttaattattgatagttgtctctcatcggatctgatgtaaaataattttttaccatgcactacataacgaaataattttttttttgtcaatgttactcataatttttgtgtttttgaaggcggagcattgcgctgatgcgaaagtgatttacaagtttttggaggtcaatgagattgataagacacatgctgtctactacatagcttatgctttgcacatgggagtttaagaataaggtgaaaactgctaaggagatcttcaatctcggaatctctaggtaatatttattacgaatgaatagacatgtaatcatatatactttcatgtttctgctccttacattatagacccttataaatttactgattttctttgcttccatctacacagcttaccagagagactcataattttctcagattttgttttgcttcttctttctctaattagcatatttctctcgatcgatattttatgacggaagatgatttgaagcaataatcttccaattctcttgatttctagggtttttagatttcactattataagttttttctttgtttcgcatatttctctcgattgtaatcattcaagattgaggaagatttgtagcgattattactgtaagaattcttcaaatcctcttgatttctaggatttctaaatttcactattataatgttttcgttttttcttttggtttttttttttttcgttttgaagaggcttttgatatttgcacaaccgaaaaattcgtgtttcaaagttttttttcttctgtgaattacaagttctttcttcttctttttttttttggttttaattgattttgtttttggttcgtgtttttttttttttctgtagcgctttgcataatttgataagcatgaaattgttgcgatcagttgtggtttattgcttgtgtttttctgttttgtttgatttctttcttattttgtttttcattcgaacccaagagagatcataggcagacactcaattattagtgttttgttagaatctttctttggcacattgtcccgtcgagtttggacccatggcttatgggaaattttgacctgagactgaaaaccgatcctttatccacggcttattatttcgacatatatacttgggattggtttcagtttactggtcaaagatcaagttacccacggcttaaaacatcatcagtctttagacagagactgagattcggaaaacgaattatttagacaaaatattggattgggttatgtttggtggaaggaaaatggtacccacggcttcaaacattagtctttagactgaggctgattcgaccattgatccttcatggtacccacggcttgaaaatctctagacatggatcatgttcgttttgttctttcagtttttagacaaagagacagtacccatggcttaaacatcatcagtctttagaccagagactgagattggcttatgtttggtagaaggaaaatggtacccacggcttagaacattagtctttagacaaagactgagattggcttatgtttggtagaaggaaaatggtacccacagcttaaaacattagtctttagacagagaatgagatttacttatgtttggtggaaggaaaatggtacccacggctcaaaacattagtctttagacagagactgagatagacttatgtttggtggaaggaaaatggtacctacggcttcaaacattagtctttaaactgagactgattcgaacattgatcccttatgttacccacgacttgaaaatctctagacatggatcatgttcgatttggtctttcagtttttagacaaagaaacagttacccacggcttttaacaccataagtctttagacaaagacttgagattcgaaaaaacaatccttaagacaaaagattggattggcttatgttttggtggaaggaaaacggcttaaaacatcataagtctttagatagagacttgagattccattttttatatttgatgagattttgtttgttgttctacggattttctatcaatattgttttactaaatttgggttgcttggttggtgttttaggtttacggatcatgtaatcctcaatcaaaaccatgttcggacggacgagttgatgaagaaacaaaaaaaaactgttaaggtattattagttgttgtgtttagttttttttgggtttgttcttagttttgtaatttaatgatcagttgattacgtttcaagatagcatgctggtttcatagcaaaataagtaatagttttcttatagaaataattaatggttttacgttcagtggatttgagatgtcaagtccgagaagacaagcaaaggtctcaaatttgagatgtttagtgaagatattccttccatactcgacggtgattccttgattctgggggagctttattacttaactaaggacaaaacagattatgcttggtataccacaaggtaactaacttccttcacaagcaacatttccttttttggtcttttaagctttatagagagacttaatttttgagttgattccatggctacagcataaagattgaagatgatgacataccagaccagaaaggtcagaagacgatactgagagtagcgggtcttggtcacgcattaatcgtttacgttaatggagaatacgcaagtacttaaacagtcatttaaggggatataagacacacagagagagttttatgtaactttctgtttgctatatttttgttgtaggtaatgcgcatggaagccatgaaatgaaagtttcgtgtttgcaaatccagttaacttaagaaccagagataattgtatttcaattttgggtgtactaaccggattaccagtgagttagaaacagtcaagatcgagattatatatgtcacaccaaacaaagtataaattagttctaatctttcaggacagtggatcatacatggaacacacgtatgccgatccacgtggtgtttcaatcatcggtttaaagtcaggaacacgagatttgatagagaacaatgaatggggacatttggtatttatgtgcatctgaccaatataatagaccaattttattcttggtttgggatataatgaagattaatccggttaatgcaggccggtttggaaggtaaaaagaaataggtgtacacagaggaaggatctaagaaggtgaaatgggagaaatatggtgaacataagcctcttacgtggtacaaggtaaacatataactcaataaaacgtttcttgtgatgtttacagatttgtcgtaataaatggattcgcagacctactttgagacaccagaaggagagaacgcggtcgccattaggatgaaaggaatgggaaagggattgatttgggttaatggaattggcgtagggagatactggatgtcattcgtttctccactcggagagccaattcaaacggagtaggtttttagaaatatgacttgcaggacaagaaactgatttgagactaaacccatctatatatggtggacaggtaccatataccaagatctttcatgaaggaggagaagaagaagagcatgttggtgattctcgaggaagagccagttgctaaaatggtgcctacaagctctcccaccaagatgatcaacgacctgctgaattagaaggacgggatggttgctctcagagagacgcaaaagccttgaaatgatcaaggcagatatagagtaaacgtccttgaagaatagatgaacgccttgcgtaaggagaatgaggaggcgaggaagaagaacagtaacaagggacaatgctcttaaagggacagaaaaagcataattatttctcacgagactgacttaatcctgtgattgtgagctatgtggttggattgggaacgatgtgaaattctctctattgtacaactaggattaaatacaattaggctatgagacatttgtagttctctttcctttggcctatgttgtacggtttgtattctatcatatggtaacaaattaaaaaaaaattgccaagatagatatgtatatttgatgctttgtagatttacattattatgatttgttccactgttgtgtagcaaatatactttgatatattgtattttttgatttgttaagtacacgattacaagaagatattgtattactttgatttgttaggttttatatctaaaacaataatattgagtgttgccatctctacgataattatttgacaagtaattttacaccatattcaaagtgattaaacgtcggaatgatttgtcctaaacacccttaatgaattgttcttctcgaaatttcttcttcttcgtaattaggggtatataagtctaatcgtatgttgatctctataataatgtcctaaacaccctcgatgtcgagattttttgttcttaattgttaggggtatataagtctaatcgtgttttgagatgattagtcttaattacccttaatttttttttaatatagtgtaatcgtttgggatacgaatgtcataatgtctcgactttaagtattatggaatattagcttaaatttatttgttaattttttggataattctatatcttagtagttaatattagtttttgttagttttctgatttagtttctaattaaaaagttaaatttcttaagataatgattgatgtttgccctaatcttaaagctatatatattgttgatcggccagagaattatgtattattttttctgtgtccattagatagttttcaccgttatggttttgttatacaactacgattctgatgaatcaaattgtttgtcatgcaaatattgttttcatttacctttagaggtcttgtgcatattgtttgtgttgtttgttttattttttgcattagttcgttgatttattgttttgctgatatgattcttttggtatgtgtttcagttttgtagaacgtgagaggttccatcgacaaagctttcggacgaaggtggtgttgacgagaagaaaacgaggtttggaaaggtacttctatagttttggtttgtatattttagttttccttgcgatggtccgggacgaggtggtacttgtgatatttcggtttgggacacattttatttggcagttttctggatgtttgttttcgtaatttttttttttggtcgtttaggtttctctaaatcaaaatttttatcatgttgttatgatttttgctttccttgataatttaaaccgttttatagcaatattaatattttttacctgtgtaattatcgcagattgggtatgtggaagcaagtgaatctatagatgcaaagttcagatccgtgtgcaaccgattgacaggtgatcttctatctttcatgcactaacaatctctttctttttttttaattatgaatttataattcatattagggttacaatattttcgttacaaatcagatgctagctggaacaccaacttggatgtcatctttaagcaggtattgtagatacttatatatcttcatgaacaaaacaggttagcctctctctctttttagtcgaacatatttgtttaatgaataaaagttttttagaaaatattgtggtttgtttcatcctatataaaagtattctctaatctaactatattttgtatttggtaattttttcgtttgcatattttgtttactgtcctgtaactcaattatattgtctcctaaatctttagtataattttttttattaaattaattatatttttgtttggtgcagtgtttagagatccctttaataccatattataaaggaggaatcatcgtgtagaacgctggagactattcggaaacccaaaagtcaatttcagagtaatttgaaaccgtaatttagttattgcacgagagaggaaacaagtttacgacattgtctcatagaagacttatttgaaaaaaatggtattgctttttttttttaatcttcgacaagagaaggccagagaagcaaaacaaaagtcaaatttcataaataaaaacaagagatttgcttcttttttatttgcatgtatcaggaagaccaaaccctcgagaataattccactacggaaatatcactccaacaaaattgattgttttctcgactcagctctttgattaatggagcacaaaggtatgtggtcaatggagtcttttatttgacatgttcgaatatcagtccaaccactcgatctcatattatctcctgtcatttgattcctcgaatgaacaccattaacaacagttcccacctgccaaagttggttggccgtgctcaaattcaatggcaactcaagagttgcgtagatggtagcttcgacattgatcagagtctcggagacgcgattcacaaggaagctaagattaccacatgagttgcgtgtcgtagcaactcacggaagatgtataggcctggcattggccacttgagttggtgaatacgacgagctcttgcatcccaaccatatgagtactacttgggttaagtccactagcaatccaagaagaagaaggggttccatggtggcgaagggagatggaaacgatactgtttgatttgttgtatgtccagtgtttagaatttcataagcctggtcacttttatagtactctatgtttgttttgttttacgttattgtgctttataatatatatatatatatatatttttatatatgtatatatgtatattgttgacttataatatatatgttgttcttgtggatgtataatttatattggtgttgcaatgttttcgtaacataccacgaactataagcgccatatacgatttaatttcatcgtctaagacggtaagctcgcaacaaactatattgtgtttcaaatggtttggtagctttcttgcatagttatcaattctgttgttccaaaatcagtaattaaaaaattgagagtttttatcaaaaaaaaacctagagagtcagattcaacaaactaatatttatattaaaatatttgttgttgtaaaggatgaaggcatgtccgatcttatttgtataagtaatctccctttagttctatttttttaaaaaaatgtttaatgatatgttattaacaaaattgggtctccatttatgttctcaacttggagaaccgtattgaaagatgttgggatacagattttgttggtaccagtcaccattcagaagatggagtccatcggcacaaatacattcgttacatggataggttctttacttctttattatgtataactgtattttgtttaagagatttattggtatttttgtttaatgttttaagatgtactaataataacgtataatatcttgtgataatatatgctacttttcttttcgtccttctccatattcaagaaattatcacatctttttaaaaaatttaacatcaatctcaatctaattcttaattgtttttgtaacataagatatgttaaacaaggtgtagtgattatcaattcctttttttaatattttatctattttataaataaaaataaaattatattattttttatagggaatatgatagtcctaaatataatttttcgtctgtctaaaaaaaacatataaagttatttcgattttatttttattattaaaaatgtggtttaaattggaaaagaaataacaaggtgtaaatattgattgttttttaggttattccttcgagaacaaaaaaaatttatatggctagattcatatttatattatttatttattaaaaagataatggtttaacttgcctttatgatattaaaatatggaaatatcacatgttttgtgaaaaaatgccgagtttgtgtagtaaaagtatagtttaaattaaatgaatacatatgatataaaagtacccggattggtatctatctcgatcgaaagtactcggattgatatgtgtctcaatcggatattttgagataagtaagttttttttgttatgattatttactcgtgtttagttgtatctaaaataataagattaatataaaaaaatttattgttgaaaaggagatcgaataatttcaaaatttataattgttttttatatgtatccatccacatttgacctcttaaatctttttggtatgtgagatttatctttatttgtaacaaaaagagttttgagttttatattttatcgcaactaaagccaattcatatttttatagtgattttggcaaaacaaaatttaagtaaggaatcaaacaaaatgttaaactttaccactatgatcttcatcagctcttgaagcttacagaggatgaatcaacctaaaaactcatctaaaagatgataaaatatttttatctaatagtctcattttaaatatgaacagaaaaatgatgtttttatttcttatagaaaatacgaaattttttggttatcttattataacatcgtctaacatgaagcatactttttacatatcatatactagattttttaaaaccatatcctaagtgtatatctaagtcaaaattatatgttaaagtgtttttaatgacttcatcaaccatctcaccaaaaaaaaaatggcttcactaacctaaacaaatttcggtataaaagaataacatagtcgcatatagttcatactttttttctcggtcatcgttatccataatttttcaagatttttagtataatttagtagatatatatttgacaagtaaaaacgcacaatattcaaagttggggcaaggaggcaataatttgtcttaatcacccataataaattactcttaaaaatctaattcgatttttgtatagtgtaatcgttagggatatataagtcaatattgtgtcgatctctatatattgtacaagtagaaacgcaccatattcaaatttggggcaaaggataatgtgattaaaagttgagataaacgtataaattatttgctcattaatgagtttggctataacaataataactgaacaacatagacaaaatggacggttttttgtagtccgatgaaagagatcttgattaacatagaaattatttgctgattgatgagttgggctataacaatgataacgaaaagaatgagcaagattgatggttttctgtaggctcacgaaaaagctcttgataaacgtagaaatcttttgctgatgatgagtttggctataaccatgataaatacaaagaaggagcaaaattgacggctttctatagtcttatgaaagagatcttgataaacgtaaaaatcagtaattagctgattggagagttttgcaataaccattataacggaaaatgagcaaaattgaaggttttctgcagcctgatgaaagagctcttgattaacttagaaattatttgctgattgatgagtttggttataacaatgataaaaaaaaataggagcaaaattgacagttttctactgtctaatgaaagagctcttgataaacgtataaatcatttgctgattgatgagtttggctataataatgataacaataaaagagagcaaaatagacacttttctacagcctgatgaaagagctcttgataattgtagaaatcatttgccgattgatgagttggctataaccttgattacaaaaaaaaggagcaaaattgacggtttcttttagcctcgagaaaaaaatattgataaacgtagaaattattttctgatttatgcgtttggctataaccatgataaaaaaaaaaacaagaggagcaaagttgactgttttctgcaacttcatgaaaaaactcttgataaatgtagaaatcattcgctgattgatgagtttggctataaccatggtaagacaacaagagagacaaaattgatggctttctgtaattcgatgaaagagaccttgataaacgtagatatcatttgctgattgatgagtttagctataacaatgataaaaaaaaaaaagagcaaaatcggaagttttctagaggttcatgaaaaatcttctgataaaagtagaaattttttgcagatgatgtaataccatgataacaaaaaaaacgaacaaaattgacggttttttacagtctgatgaaagagctctcgataaacgtaaaaatcatttgttgattgaagatttttgttataacctttataacggaaaaagagcaaaattgaagattttttgcagcctaatgaaagagctctttattaatatagaaatcatttgatgattgatgagtttggtaatagccatgataacaaaaaaagaagagtaaaattgacagttttctgctgtgtaataaaatagctcttgataaacgaataaatcatttgctgattgatgagtttggtaaaaacattgataaaaaaaaaaagagagcaaaatagacaattttctgcagcctgatgaaagaggttttgagaaacgtagaaatcatttgctgattgatgagttggttataaacaatgataaccgtaaatatcatttgctgattgatgagtttggttataaccatgataaaaataaatatgtttatgggtttctttaacgtaatgaaagagcccttgataaacgtaaatattatctgctcactgatgagtgtggctataaccatgataacaaaacaagagagaaaacaattgacggctttctgcaatccgatgaaagagaatttgataaacttagaaatcatttgcagattgatgagtttgactataactataataacgaaaacaatgaacaaaattgacgattttctgcaagttcataaaaaagaacttgataaacgtagaaattatttgctcattgatgtgtttgactataaacatgataacaaaacaagagaaccagaattgacggctttctattgtctaatgaaagagatctggataaacctagaaatcgtttgctgattgagcagtttggctatatcaatgataacgaaaaaggagcaaaattgacagttttctgcaggctcacgaaaaaactattgacaaatgtagaaatcatttactgatgatgagtttagctataaccatgataacaaaaaaagaggagaagatttgacggttttctgtagtctcatgcaagagctcttgataaacgtagaaatcgtttgctgattgaaaagttttgctataaccattataacgggaaatgagcaaaattgataagtttttacagaatgatgtaagagctcttgataaacgtagaaatcatttgctgcttgatgagataggctataaccatgataacaaaaaaatgagcgaaactaacggttttttaacagcctaatgaacacctattgataaacgtagaaattattttctgatttgtgagtttatatccatcataaaaaaataagaagaacaaagataaaggttttatgcagcctcatgaaaaagctcttgataaacgtagaaaacatttgttgatggtgagtttggctacaactaggataacaaaaaacaagaaagaaaaattcacggttttctcctattgatgagagctcttgataaatgtataaattatttgctaattgaagagttttgctataacaattataacggaaattttgtagaattgactgttttcttcaacttcataaaaatgtccttgataaccataaatatcatttgctgattgatgagtttggctataaccatgattaaaaaaaaaagttgatgggtttctgcaacgtaatgaaagagcccttgataaacgtaaaaattatttgctcattgatgagtgtggctataacaatgataacaaaacaagagagacaaaattgacggcattctgtaatccgatgaaagagaacttgataaacatagaaatcatttgaagattgatgagtttgactataactataataactaaaaatattgaataaaattgatggttttctgcaagctcatgaaaagaacttgataaacgtagaaattatttgctcattgatgtgtttggatataaccacgataacaaaacaagagaatcagaattgacggctttctatagtctaatgaaagtgatctttataaacctagaaatcgttcgatgattgatgagtttggctataacaatgataacgaaaaaggagcaaaatggacggttttctacaggctcacgaaaaaactattgacaaacgtagaaatcatttactgatgatgagtttggctataaccatgataacaaaaaaagaggagaagatttgacggttttatgtagtctcatgaaagagctctttataaacgtagaaatcgtttgctgattgaaaagttttgctataaccattataacggaaaatgagcaaaattgataagtttttacagaatgatgtaagagctcttgataaacgtagaaatcatttgctgcttgataagataggctataaccatgataacaaaaaaatgagcgaaactaacggtttttttacagcctaatgaacacctattgataaacgtagaaattattttatgatttgtgagtttataaccatgataaaaaaataagaagaacaaagataaaggttttatgcagcctcatgaaaaagctcttgataaacgtagaaaacatttgttgatggtgagtttggctataactaggataacaaaaaacaagaaagaaaaattcacggttttctcctattgatgagagctcttgattaatgtataaatcatttgctaattgaagagttttgctataacaattataacggaaattttgtagaattgacagttttcttcaacttcataaaaatgtccttgataaccataaatatcatttgctgattgatgagtttggctataaccatgattaaaaaaaaaagttgatgggtttccgcaacgtaatgaaagagcccttgataaacgtaaaaattatatgctcattgatgagtgtggctataacaatgataacaaaacaagagagacaaaattgacggctttctgtaatccgatgaaagagaacttgataaacatagaaatcatttgaagattgatgagtttgactataactataagaactaaaaatattgaataaaattgatggttttctgcaagctcatgaaaagaacttgataaacgtataaattatttgctcattgatgtgtttggatataaccatgataacaaaacaagagaatcagaattgacggctttctaaagtctaatgaaagtgatctttataaacctagaaatcgttcgatgattgatgagtttggctataacaatgataacgaaaaaggagcaaaatggacggttttctacaggctcacgaaaaaactattgacaaacgtagaaatcatttactgatgatgagtttggctataaccatgataacaaaaaaagaggagaagatttgacggttttatgtagtctcatgatatagctctttataaacgtagaaatcgtttgctaattgaaaagttttgctataaccattataacggaaaatgagcaaaattaataagtttttacagtatgatgaaagagctcttgataaacatagaaatcatttgctgcttgatgagataggctataaccatgataacaaaaaaatgagcgaaactaacggtttttttacagcctaatgaagcacctattgataaacgtagaaattattttctgatttatgagttcataaccatgataaaaaaaataagaagagcaaaaatgaaggttttatgcagcctcatgaaaaagctcttgataaacgtagatatcatttgttgatggtgagtttggctataacctggataacaaaaaacaagagagcaaaattgacggttttctcctatttgatgaaagagctcttgataaatgtataaattttttgctaattgaagagttttgctataaccattataacggaaaatggttaaaattgacagttttctgcaactttataaaaatgcccttgataaccgtaaatatcatttgctgattgatgagtttggctataaccatgataaaaaaaaagtttatgggtttctttaacgtaatgaaagagcccttgataaacgtaaatattatttgctcattgatgaatgtggctataactatgataacaaaacaagagaggcaaaattgacggctttccgtaatctgatgaaagagaacttgataaacatagaaatcatttgcagattgatgagttttactataactataataacgaaaaacaatgaccaaaattgacggttttctgcaagctcatgaaaaagaacttgataaacgtagaaattatttgctcattgatgtgtttggctataaccatgataacaaaacaagagaaccagaattgacggctttctatagtctaatggaagagatcttgataaacctagaaatcgtttgctgattgatgagtttggctataacaactataacgaaaaaggagcaaaattgacggttttctacaggatcacgaaaaaactattgacaaacgtataaatcatttactgatgatgagtttggctataaccatgataacaaaaaaatgagcgaaactaacggtttttttacaatataatgaaataactattgttaaacgtataaattattttctgatttatgagtttataaccatgataaaaaaaaacaagaagagcaaaaatgatggttttatgcagcctcatgaaaagctcttgataaacgtcgaaattgtttgttgatgatgagtttggctataaccaggataccaaaaaaaagagagcaaaattgacggttttctcctatttgatgaaagagctcttgataaatgtataaatcatttgctacttgaagagttttgctataacaattataacggaaaatgggtaaaattgacagtttcctgcaactttataaaaatgcccttgataaccatatatatcatatgctgattgatgagtttggctataaccatgattaaaaaaaaaaagttgatgggtttctgcactgtaatgaaagagcccttgataaacgtaaatattatttgctcattgatgagtgtggctataaccatgaaatccgatgaaagtgacggttttctcctatttgatgaaagagctcttgataaatgtataaatcatttgctacttgaagagttttgctataacaattataacgaaaaatgggtaaagccgtcaattttcttcaactttataataatgcccttgataaccataaatatcatttgctgattgatgagtttggctataaccatgattaaaaaaaaaaagggtgatgggtttctgcaacgtaatgaaagagcccttaataaacgtaaaaatttttgctcattgatgagtgtggctataaccatgataacaaaacaagagagacaaaattgaccgctttcttcaatccgatgaaagagaacttgactataatagaaatcatttgcagtttgatgagtttgactataaatataataacgaaaacaatgaacaaaattgacggttttctacaagttcaaaaaaagaacttgataaacgtagaaattatttgctcattgatgtgtttggctataaccatgataacaaaacaagagaaccagaattgacggctttctatagtctaatgaaaaagacctttataaatctagaaatcgtttgatgattgatgattttggctataacaatgataacgaaaaaggagcaaaattgacggttttctacaggctcacgaaaaaactattgacaatcgtagaaatcatttactgatgatgagtttggctataaccatgataaaaaaaatggttgatgggtttcttcaacgtaatgaaagaacccttgataaacgtaaaaattatttgttcattgatgagtgctgctataaccatgataacaaaacaaaagagacaaaattgatggctttctgcaatccgatgaaagagaacttgataaacatagaaatcatttgcagattgatgagtttgactataattataataacgaaaaataatgaacaaaattgacggttttctacaagctcatgaaaaagaacttgataaacgtagaaattatttgctcattgatgtggttgactataaccatgataacaaaacaagagaaccagaattgactgctttctatagtctaatgaaagagatcttgataaacctataaatcgtttgctgattaatgagtttggctataacaatgataacgaaaaaggagcaaaattgacggttttctgcaggctcaggaaaaaactattgacaaacgtagaaatcatttactgatgatgagtttggctataaccatgataacaaaaagagaggagaagatttgacggttttatgtagtctcatgaaagagctcttgataaacgtagaaattagttgctgattgaaaagttttgctataaccattataacggaaaatgagcaaaattgataagtttttacagaatgatgaaagagctcttgataaacgtagaaatcatttgctgcttgatgagataggctatcaccatgataacaaaaaaaagagtgaaactaacggtttttttacaacctaatgaagcaccttttgataaacgtagaaattattttctgatttatgagtttataaccatgataaaaaaacaaggagcaaaaatgaaagttttaagcagcctcatgaaaaagctcttgataaacgtagaaatcatttgttgatggtgagtttggctataacctggataacagaaaaaaaagagagcaaaattgagggttttctcctatttgatgaaagagctcttgataaatgtataaattatttgctaattgaaaagttttgctataaccattataacggaaaataggtaaaattgacagttttctgcaactttgtaaaaatgcccttgataaccataaatatcatttgctgattgatgagtttggctataaccatgattaaaaaataaaaagttgatgggtttctgcaacttaatgaaagagcccttgataaacgtaaaaattatttgctcattgatgatggtggctataaccatgataacaaaacaagagatacaaaattgacggctttctgcaatccaatgaaagagaacttgataaacatagaaatcatttgcagattgatgagtttgactataactataataacgaaaaataatgaacaaaattgacggttttctgcaagctcatgaaaaagaacttgataaacgtagaaattatttgctcattgatgtgtttggctataatcatgaaaacaaaacaagagaaccaaaattgacggctttctacagtctaatgaaagagatctttataaacctagaaatcgtttgatgattgatgagcttggctataacaatgataacgaaaaaggagtaaaattgacggttatctacaagctcacgaaaaaactattgacaaacgtagaaatctttttatatgcgttctgcaatgataccttttacctctgatccatgtgatggtggttattttcgtattgcgtctcttaaccctaacatgggtgagtggtctgtctcggtgaagattttgaattgttggtctgtttcgcgtggcacgggtagagagctcaatatgattttgggtgacgagcatgttagttttttgataacttaccttctatacatgttttcgatattaaattgaattggttttgtctttaacgttttatttgcagttcacccaaatccaagccgttgttcgtgatgaattaattgataattatctttcaagattgataatcgatgagtgggtgagcattaaaatttttgatgtatcacgggttaacagcatattgagaccagtaccgcatagattcaagattgtgtttcgttcggacactttagtgcaaagtattaatatgtgctccagtagaacctatttcaatctaactgagtttgtgagtatattgagtggtactgttaatccgaatatttgcgttggtaagcctaatttgtaaatttatttgtgcttttggagtttatttgcggttcatgttctgactgtattattcatatgtgtgtttcatagatgttgttggcaaaattgtcaacgtgagagagttggtttttgttccttccgtggaacattctcaaggaggatattttgagctgtactttgatttacgtgatactgagtaagtcactattcttttaaagatttaaaccagaatataaagtcttatgacttcttcaaatcttaaaattaggtgtatccatctagagtgtcgtttaacgggtgaccttgcagtcgagttctatgacttatggaagcatcgttcacgtaacacagtgatatgtattatcaagtttgtgaaattagagctatcacaggaacattggtggagatgtaccaatgttaccggaagtacgaggattatgttgaatccggatctcagtattaccgacgagatgctttgttggtaagtattttttttttccgtttacaatcaaaactctaaagttggcgactggacattcactgtttatggtgttctaaatcggatgtcaggaatcctgaaaatgaccaagtaccgatcatcacacggaaggagaatgccatggagtgatgatgttcgttgatttcttattttgttggtgaatgattttaaaagatgatttattataatttttttagcatttataatattattgaattttttaaatttcatcattttccataattttaccacactaaatcctaaacaatttaccatatttttcttacactaccaagtaacacctaaacaatcccttatttcacatgattttaccattcatacaacattcttcccgcgcatgtgcgcgggcaatcacctagttttattttattatggtggtagattttgaggatgtggaacaaaccatatgtatcaatgcatgaagctagctatcatcgtatgataaggtaagttttgatcaaaacataattcttttggtattgatttatatgttttaataattagttttgaactattttcttaatttttagtaggttgataccctatgatttattcattagatgaagaagtgaatttttttgaacatataatatgtttaacttttgatatgattatttagggttagtgtattaatgtttttgtggatgcgaagatttagagacgtttgatatgatatgactattgtgtgataatagaaatgtgacatttcatatggttctacacgttttgataaggtacaaattcttttgtcaatgttcaggaggttgctgcataaagattgatttcaccggatgaatatataaaatcttgaaacatgattgactataaaaaactatatattaaaaaatatatgaaaataattactaaataaatagaaaacttaaatgaagtaatttataaatatttacagaatatcttattttgttttttttacacgggttattaaagttttagttataaagccgcatatacgcggatcctaagtttattctcttacacgggttataatttatatgaaaataattacaattttaatacttaaaatttttttaaattaaattggttaatttataaaaaaaaaaattacaaaacattagattttaattttatacgaattataaaatttttaattttaaacccgcgtatacgcgggtcctaatctagttataataaaaaaaaagaaaatcttattgggctagcagtgaaacctgactctcttcaggcactactatatcgttgttatctctgctagatgagtttaaattataaagagtagactgaatttataaaaaaaaattataaaaaaaaattgtacgaatttacaaaatggttaatttataaaccattacaaaatcgtacgaacttacaaaaattgtacgaatttaaaaaaaatttataaaaaaatggttaatttataaaaaaaatttacaaaacattagattttaattttatacgaattataaaatttttaattttaaacccgcgtacacgcgggtcctaatctaattataataaaaaaaaaaaaatcttattgggctagctgtatacaattttccagcccatcaccatgaaggacgcaaaagctgcagtgaaacctgactctcttcaggcactactagatcgttgttatctctgctagatgagtttaaattataaagagtagactgaattccctcataagcaatgaagtatgatttttttaaccgggccttgtggcctagtggtaaaggggtcacaactgtgacttccgccaccagggttcgaggcacggccactggcaggtttacataggggaattgccagcctcgtgggattagtccttgggcctaggaagcctttgagagacccgcggttattcaaaaaaaaaaaaagaagtatgttttgcttttatgaattcttgttaagataattactttcatagatcgatagatggtatatttagtatgtggtttggtgtgtgcgttgataaatacataccgaaagactttggttttattttgacatgcacatatgaaatctgtttcctgcaagtcaaactaactaggctggaagtgttggtttaaagggatatgcaacgttaatgcttagttagagaaaatcctatcctaatttgatactagctaggttatggagagacatatatagttaggacatacatgcagtatatagttaggagaggtggaacagatgaggcattaatgtttgaatgggccacttaattggcaccccgccccaagtgtacaaacacagaaattgagaggtgattcattgaaagcacagggaagttgttggcccttcaaagagacattgcccaacaaacaatcatgatcaaactacaacaaacgttaattagtttcatcgaagatgtgcgtcttttctttgagagaagagagagttcagatgaagcttatggatgcaaggcttttcttggaggagaagctatctgaattagaggaagctaatagacaaggagagacggagaggaataggatgatgaaaccaaagatactggagagaccggggaggaggatcggagctcggagggttcaaagctggagtgccaattaaaaggttcagctcaaaattctgcttagacaaattaaagaccaccccaagatgtacccctcttcttgatactgtaagcttttcttttctttgtccctctcgctcaatctcaataattcacatctcagaatactaataagattctctttgtttgtccgttagataatattttcttaaatttgatttcgcatctgaccaaatatatcgatcaaatgccaaaaggtcccgttggcgtaaaatattagccaaagaacccacgtcgaatttatgtcacagacagaaatatatgggactttccaagatattttaaaatgatttgattttacattaacacatttgaaattgttaatttcgaaacaattcatcacgtacgccttcttgagataatgtgcttctagttatatattttgatagaattgaagcttcctttagatcaattagttagggtgatcagactatttttggactaaaaattagtggggtaaagtgtgttcaaactaattataaatgcgtaaaaatttattaaataaaaaatatattaacattttcattaagtaataatttttttttttaattctgtaactaattattttcttcaattgttttgtatttttacttatgaataaaggactgtacagtactacaatacaatgataaatataacttttaatctaattaaattaatgttaaatagtttataatgttattttaaaagttaacactcattgttgattggttaatatccctattaagtgaataaaaagatttgatatacgtcaaaatctaattgactaataattaagtaataacatacatatacattgtttcttctgtttgtgtcaataacaatatatatattaattggatgactcggaaagccaaaccgaggaatagagtttagatacaaaaatggagacttgactgaggtgcatatttgtaattatgaaacagaaaacgcactaagttgctgccattcacacaaataagttagagcgggacgtattgtatgtaaaaacgcacttgccaaaaacaaaaacattttttttttttgttcatcatttcttaaaaacgcacttggtacaataactcactctccacgtagcggtccaccaaatccgcagtgataaaataaagacaaatccgaatggtaaccgcggtttttattgtgcgggaaaagcgttattatagtgcggtacggttcaactgcggtacgtgcgggagaaatatatttgcgggacaagtgcggtttgtacaaaataagcggtacagaataatgtttgattggtgaaaaaaactacttacggtacggattatagattatatatatatattaataattaattaattttttgtgttaataaagaaataataacagatatttataaaccatttatacaaaaatcgatcaaaatataaatttaattttgtaacatatatattgttacatgcgttgactaagtttatcataaaaaatattatctattactttgattttcccataacatatttgcaatattatctcgtatttgcgtcatatgttctccatctgttatctttattgattttatgtcatctaaatcatgatcaaaatctctgttgtttatatttgtctctgtcattacatctgcaaaatctgtatctgagaagtttgaaattctgatgaaattatgtaatcccattgtagccattatcattcttttatttaacatgaacattatatctcagaaaatcagaaagaatcctccatttttttttccaaactcaaaagttctctcgacaacagaatttaaaagaaagtatgatgatgtcgaaaagagagattaaaaaaaacaggttataataaagtgaaagaaaagtttagatatgtttatttggggtaaaaaatatcatatatattaatatataaatacttttaataattaaaatataaataaaaaacatatatgtaaaacccattgcggaatttgttggaccgcatggcttttgggagtttgctgtttcaaaagcggtctacaagcttttactctgttttgaaaaacgtgaattgtattttggtagaaaagtaaaaaacgtaaatatgtattaaataatgttgattggtaacgaaagtgtggttttcaaaatgagttgttgaaatccgcaatttttatgtcgtcaatcacggccaaatgttttttgggaaaattggaaataaaggataaatatttaagtatttgtccatatatgaattctatgaacaaatatcaactattcctaaactaccttttgcataagattgaaccaattatttcaaaaataattaagaaaaatatgtattaaaatgataaagaagacatgaagatatataaaatgtcaaaaatatattgttttgttttcgttttagatagataaaatttgatctataaagtttagcatatgtcttctgaaattagaatgtatattctatacactctacatgttctacaaaatttagattatgtattctacacactctacatgttctacaaaatttagaagtcatttcttttctacggtatttagaatactagtttctacgacttttagaatacatattctatactttgttctttgttctacaaaaattagaatatgttttctaatatttactcatgttctaagaatgttagaaaacatattcttaagatttttttttattctataaaaattagaaagtacattctatctaatttagatttttttaaaaaaattcttaaaatatggaaattgaatatagtgaatttgattacatctgtaaattacaaaagttgaattctgaatactttaaaattctttatacctaagtgaataaattataacacaaattagaatttttctttatacttcacactttttcctatagattacgcttaattttttgtctcaaaacccggaaaattagttgaattttgaatactttaaaattctttatacctaagtgaataaattataacacaaattagaatttttctttatacttaacactttttcctatagattacgtttaatttcttgtttcaaaactcggaaatttataattgcgctccataaagaaattgaaatcaagggagtgagatagagagagagattgaagaagaagaaaaaaaaaattatttagtatggcgttattagagaggagagaacaattacgaaatcttaactttgatgagcaagagaatcaaagaagaagaagatatgaaattatctacggcaaaataaataatggaatgtaattaaatgttgattttgtcctatattttttccaaattgtttttagaaagaaatcaatttaattttgaatttttttaatagtttagtaaaattttaaaagactgggggcatattaggattttaattatatgaaatcatatatgaccaatattaaagtatatataaccaatcataaatatagaatgcatagatggacaatagtttaattatttgtcctttatttccaattttcccatgttttttttagaactaaatatagataaatgttgttattaatgtttatacttgtgcattatttttcgtttagaacagaatatacttttgaagtttcgaaccacattcagaagtctttacttacttttacgttatatatatttaaactgaactataccgaactataccgaagttaaccgagccaaattgggattaatagtggaaattatttgcaactgaatttaaacgacaccgttttggactttgaacgttttgttttttgacgcaaacaagcttttttatcgtcgtcattagtcagtttctccgatttgcgccgtgttcttcaatggcgctaaaatttcaccaacagatcatatcagaccttctcgaggactctaatggcggattagtaatcctctcctccggtctctccctcgctaaattaatcgcttctctcctcatccttcactctccgtcccaaggaactctacttctcctcctctcccccgccgctcaatctctcaaatccagaatcatccattgcatctcctctcttgattctcctactccgacggaaatcaccgcagatcttccggcgaatcagcgttactcgctttacacctccggttctcctttcttcatcacgccgcggattctcatcgtcgatctattgactcaacggattccagtttcttcactcgccggaatcttcatcctcaatgctcattcactttccgaaacctccactgaagcattcattgtacgaatcgttaaatccctaaatggctccgcctatatacgcgccttttccgatagaccgcaagctatggtctccggtttcgccaagactgaacgcaccatgcgtgctctcttcctccgtaggctccatctttggccaaggtttcagttggatgtgtctcaggaattggagcgagaaccacctgaggttgtggatattagggtttcgatgtcgaattacatggtggggatacagaaagccataattgaagttatggacgcttgtctcaaggagatgaagaagaccaacaaggttgatgttgatgatttgactgtagagagtggcttgtttaagtcctttgatgagattgtgaggaggcagcttgaccctatttggcatactctcgggaagagaaccaaacagcttgtttctgatttgaagactttaaggaagctgcttgactatcttgttaggtaatagctctctctctcgtctctactacatcagtattgttcttatgcaaagccttcaagttgagtggttcttcagtttctaacagcaatttgttgttatatttatggattttgtggataggtatgatgctgtgagttttctgaagttcttggatacactaagggtatcagagagctatcggtctgtttggttatttgcagagtccagctataaaatatttgattttgcaaagaaacgagtgtatcgtctcgtgaaggcaaaagaacatgttacaaataaaagtggtaaaaagagaaagtccaagagcgaaagtgactctgtagaagcaggtaacaaagtcttgatctacattggttgtatcttgcatctagtgacccgtgtgttataagcatttcgaaaaaatttcctgataattggacatgaatcagttggtggggaaacggcgacaa

SEQ ID NO: 5260 - DNA, 19663 bp, Arabidopsis lyrata
  Intron number 2 from transcript 893621 (locus 893621) deri ved from phytozome v7.0 (chr-ID scaffold_6; pos 7010674 to 7030336 reverse strand)
tgtgtgttaagaaacacaacgagaccaaggttagtgagaagatttatttttgatttgtggtttttggattatttttgagtttaatttatatatttttcatagggaacgactttagaattggtaaatgttgtgagagctactgaaaggggagcagctacatggaggttttacatcacttttatggctcaggagtatcgtgatgggcctcttgttgagtaccaagccaaggttatcaaattcttaggggacaaggttcctttcccagttctctgcagaccaagtcctaaaccagaaatctagatcctagattaatttaaagtttctttaaaggtatatgtgtaagtcttctttgttgtttattgtgtcaaattacatgagatctctgacgggattgtctgtttaattcttttctttaattttgaacttgtaatcgttctgcctaaattgcagattgtatgtattgttgacactatatgcagcgcaggttataaaagagtaacaatttgacagaggacgaacaaaatattgaattgcgtaataatataagactaggccagctaataatgttttattggaatctaatgtcaaatatcctttatattgtaatgataatataggaatttactgttttaatcatgccattcacgctgagtttgtttttcttctactagtcttcattctcaaatatattacgttatttagttcttgaattttcagagaatatttgtatgttaagtaggtgacattggtagagaattattattgttgttgtctcttttaaggataaatcgtacgtctgatctaattatttatttgcacctgaagacatgtgcatatcattatcaaaactcaaaaacatgaattaaatttgtgcctattctcacaaggcttcttcctatatatgtatttgtatgtagcaaagatttttaaatgaattcgctttattaattagtttacacgaaggggttggaccgtagccttaaaactctttagttttgttttctatgagaaggcccaaaataatgaaagggtgattgcgtaaccgtaaatacttgtaacttctttgttgtattttactatgagacatgagtttagcaaattgtcttttctagggtttcttcgcttttccaatcatggatccccaatcaatggatgttgagacggcgaaacgagcgtcaatggcggaggacgaatctgcttctcctctcacgaaaaaaaccaaggtcgaagaggaagaagacaaggaagacgacggagacacggaagatgacggagattatgacagcgacgacggctataccgtttttagaggtatgagatttaaatacgtgccagaaaaggaaccggagtgggatgtggacagctacgatggtcgtgaatacgaatcagatccagaggatcgtaagcatttcaccagcgaggacatgtataatgaataccgtctggacaagcgcgagatcttcgagagtaaggtaaatatgcgcttttatcttttgtaaaacggcttagtaaaatgtaaaaaccctttttgagttagattactacaaaaaaagatgatgaaattattcttgtgttgatttcttgggattttttcaggggtttataccagattacgcaaacggaatctacccttttggggatctggaagcaccagcgggtgaaaacaggactaatagagatgagttgacacatttggcttccttgtgctttaagaaactcaacgagtacaaggtaagtgacaagtatcaaggatcatcatatgttatttgaatcaacatatatatgaatctcatttgtttgatagggaaagtgtgtggaattggtgagtattgagcgagctactgtaagcggaggagctcgatggaagatttatataacgtgtatggctcgggagtatgagaatggaccgcttgtagagtatcaagccaaggtgatgaggtatgctggaaattatgaacctccctttcccatactttgcagaccaagccctaaaccctccatctaagtaggtgatttcgagacaaattgaatttgtaatgatgggcttattaattattgccttctattttctatctaaattgcagataaatcctagacttgcataattgcattgaggcattgagccaaatgcctaagccaacataaattaggcaagtataagaaaccatatatgagttgatcatgggagttttgactcaactttaagtgtctccaaaacttttgcgatcgacatcgaagaacttatctacaaaatcaaagatcgattcataccgaaacaaggttttgagagacttggatagttggatagatgttcaacctatgtaatgatgataatatctaaatgtgaacccaaactctatattcattttcatatagtcatggaaaaaaaaaacatatgaacatcggccaactcgtgtactatttccataacttttttaatgggctaaaaggtttgaaacaaaactctgttatatttattattaatttatcattcatcaacttaatattttttttaccaaaacaccaaatcgatcccggtaaactttacaatattttacaattgaagttctgttccactttggtgtatacattttattaaccggactgaattgtataacataaccaaatatcctactcaactataattaagtatcttaatttacaaataaccgttccataatctaccgggccacgtttctttcgcagggaaataaccaaagatgatgtcacaaccctaattacttaccaacatcgatcttgtcgcattgttgacttagaatcttgaattgccaaatcgtgttctagggttccttcatttttttccggcaatgacatcggccaacaatgaattaactggttctacgatgggtacatcgtccgaggaggaggttgtctctaaagtcgacaaggaagacgacgatagcagcagcgatagcgatatggatgacggcagcgacagcgagtgggctgagtataacatgttaccggaaactgaaccagaatgggacgtcgatagctttgatggtcacaaatttaaaatcaatcccagggttcgtaagatgtacggctctaaccagcaactttatgacgaatattacaacgacaggctcgaggctttcaacagtaaggtacaatttgtttaaattaacctcttcgcttactggtctcaattctattttctcttatcgcagcaaaacccttgtgcttttgttaagtctttctcagtttcattttttttttttttttacttactgcattcctaattggcttaaactaattttgtccggatctattttggtttggttaaggggtttcttcctgatcctctgaacggaatctacaaccttcatatagacggccaggggaatcatagggatttagctgcaaatcttgctaatgtgtgtgttcagaaattcgacgagaccaaggttagaaagttgaaagatttacttctcttttttttttgatggatataaatttcgtgttttggatcatttggattttgtacattttttttttctcagggaacgactttagaatttgtaagtgttgtaagagttactgtaaatggagcagctacatggaagttgtacatcacctttatggctcgagagtttcgtgatgggcctcttgttgagtaccaagccaaggtgatacacgctatagggaccgtggaacctcctttcccaattctctgcagaccaagtcctaaaccagaaatctaaatatatatatatatatatatatatattaatttaaaggtatatatgtgatgttttctttgttgtttattgtgtcaaactctgaggggattattgtctgtttcatttcgtttttaactcttaatatttctgcctaaattgcagattgtatgtattgttgacgctagacgctagcgaaggctaagaagatgcattgaagttataaaagattaacaatacatgcaccagctgacgaataaaatagtgaactgcatatattataatatgatactaggccagctattactgttttattggaatctaatgtcaaatatcttttatattgtaatgacaatataggaattattgttttaatcatcttttaaggataaatcgtacgtctgatctaattgtttctgcacctgaaagacatgtggataacattatcaaaacttgtgcatattctcacaaggcttcttcctctctatatatttgtagccaacatttttaaatgaattcgctttagtaattagtttagacgaaggggttgctggaccgtagtcttaaaactctttagtgtcctttcctatgagaaggcccaaaaaaaatgaaagggtgattacgtaaccgtaaatacttttttggttttaatgttaagatttataccaaagaactgttacaacctaaattacaaactacaaaacagacacccaataacacaggaacagacagacatgagattacaagggataagagatataagagaagtaaacttgaagaagcgaaggggagcgcaggtccggagaagggaaggacagaagtcgattcctcaaagaccgatcaattgccaagcggagacttgcggccgatgatgggatggaagtgaagatcctagcgtttctctctctccagacatggtaaactgccgattgaaggagaagctttaggatagtggtgacatgagagcggttcggctgagagatgatccagcccgtagcagcagagaggtccagcggtggagccggtgaaaatttcgccgcgaagtactcccaaattgctgaagagaaggagcattcgaagaataaatgcgcattcaacgacacaggcccagagactgatagcaggcccaatccgaaacaagcccaagtccaacacaatgcaaaagcagaagaaaccgtacaacggctacctgcgacaaaagccaaaaacagagcattagcagaacagacaaatggtacggaggtgacaacgcaaaaccgttttgacgcgcttaggatcgtgtgacgacagctatgccacgtgatggtcaatagccagctatgacagtcaagggtacactaggtttagatgtaaatctctataaaaccattgtacctctgtaatcgaaaactaagttgaaaggaaatcaaaatataaagaatctttccatttctcttcatatctttcatggtatcagagccatggacaaatccatggagctctatgatcttccgtccctaaaaatctccaactgtgttacggtgaaactcaccgaacgcaactatatcctttggaaatctcagttcgaatcttttctttctgggcaaggtcttctggggtttgtcaatggcacaatcacagctcctgtcagcattgtttccggaccacaagccaccggcgtcactgaagctgtccaaaaccctgagtatgaagcttggtgtcgtctcgatcaagtggttatggcatggttactcggatcactgtctgaagacattctcagtgtggttgttggttctaaaacatcttatgaggtatggaaaaatctcgcaaaacatttcaatcgtatctcttcttctcggatttttgagctgcaacgtcgactccatggtctatcaaaagaagggaaaaccatggaggagtatttgcggtatctcaaaaacatttgtgaccaactagcctctgttggaagccctgttgctgaaaaaatgaaagtctttgctatggttcatggtttaacacgagagtatgaacctctaatcacttctcttgaaagctctcttgatgcttctcctggtccatcttatgaagatgtggtctatcgcttaaaagggttcgatgataggcttcagagttacaatgcaagtgatgtttcaccgcatctggcgttcaacactttcagatcttcaaacagaggtcgtggaggaagaaacaggggaaaaggaaatttctcaacccgtggtcgtggattccaacaacagttctcttcttccagttcttcagtctcaacaggagagaaacccgtgtgtcaaatctgtggtaaaagaggtcatcctgcgcttcagtgttggcatcggtttgatgactcctaccaacagtcagaaactgcagctgctgcgttctcagctctccacatcactgatgttacagacgacaatggttggattcctgactctgctgctacagcacacatcacaaacaacagctcacgcttgcaacaaatgcaaccctactttggtaatgatacagtaatggctagtgatgggaatttcttgcctattactcatattggctcagcaagtctcccttccacttcaggtaatctccctttaaaagatgttttggtctgtcctgaaatagctaagtctcttttatcagtgtcaaaattgactaaggactatccttgttccttcacgtttgatgctgatggtgttcttgtaaaggacaaagtaactcacaaggttctgacaaagggaagcagcacaagtgatggtctttacaaattggagaatcccaagtttcagatgttctactctactaggcaagtcaaagcaagtgatgaagtatggcatatgagattgggacatccaaactctcaagttcttcagtctttagtcaagaataaggtgatccaagtcaataaaagtaccagcaagatgtgtgaatcatgtcagcttgggaagagttcgaggttgccatttatttcttcagattttgttgcatcaagacctctagagagagttcactgtgatctctggggtccagctcctgtttcgtctattcaaggatttcactactatgtaatcttcattgacaatctatcaagatattgttggttttatcctctaaagcacaagtcagatttttgttcaacattcatcaagtttcagagttttgttgagaatctcttacaaacaaaaataggaacgtttcagagtgatggaggaggtgaattcataagtaacaggttcttaaaacatcttcaagaatctggtatacaacattatgtttcttgtcctcacacaccacaacagaatggattggcagaaaggaagcacagacaactcactgaaagagggcttacactactgttccagagtaaagcaccacataaattttgggttgaagccttctttacagctaactttctcagtaacttgctacctacaacagtgctggataattccacaactccatatgaagctctatttggtaagacaccaaactactctgctctaagaacattcggctgtgcatgctttcccactctccgaccttatgcacaaaataagtttgatccgcggtctcttaagtgtatctttcttggatacactgagaaatacaaagggtatcgctgctactatccaccaactggccgtgtgtatttgagtaggcatgttatttttgatgagagctcctttcccttcagtgatacttatgttggctcgcagcagtcttctcttacgcctttgcttgatgcatgggtaaaaggcttctcaaatatgcagtcttcttcagaacaagaacaaatggccgcagaaaccaccagctccagtgttcctgcaaccaacattgatcaacaacaacaagaccagctcacagttctaaatatcgagggggagacaagcaacaacacatcaaatgagccaaatgagccattatgtattacacctatacaaagtattacctcccaagaaaatgatgcagttcctgaatcttcacctattggcaacagcgctccatcatcacctcttagacctgaaaattcagtatcttcaagcatcttgccttcaacaacagaatctattcatcctatgacaactaggctgaagaaaggaattgtaaagccaaatccaaggtatgctctccttacacataaagtttcatatcctatgcctactacagtcactgaagctttaaaagatccaaagtggactgctgctatggtagaagaaatgggaaattgttctgaaacgcaaacctggtcacttgttccacttacatcaaagatgcatgtgctaggctccaaatgggtgttcagagtaaaactacatgctgatggatctctggacaagtataaagcaagacttgttgctcagggattcaagcaagaagagggtattgattatcttgagacatactctcctgttgtcagatctgcaactgtcagggctgttcttcatcttgcaacagtcatggaatgggaactaaaacaaatggacgtcaaaaacgccttcctccatggagatttgattgaaacagtctatatgaaacaaccagcaggattcgtggataaagatcatcctaatcatgtgtgcttgctccacaaatctctctatggactcaagcagtccccaagggcttggtttgataaatttagcaaatttttgctgagttttggtttcatatgtagtatgtctgacccgtctctttttatttgtgtgaagaacagagatgtgatcatgcttctcctttatgttgatgacatggtaattacaggcaacaactccaagctcctctctaatcttcttcatgatctcaaccaacagttcaaaatgaaagatttggggagattgagctactttctaggaattcaagctcaattccactcaaaggggttgtttctttctcaacagaaatatgctgaggatttgcttgccacagctgcaatgtcacattgctctcctgttgcaacaccactgcccctgcaacctgagagagctccacatcaaacagagctttttgacaatccaacctacttccgcagcttagccggtaaattacagtatctcactcttaccaggccagatcttcagttctcagttaattatgtttgtcagaagatgcacgcaccaaccgtgtcagactttcatcttctcaagcgaatccttcgctacataaaaggcacaacaacaatgggaattgcattcaacaaagcaacggattgcaaactacgggcttatagtgatagtgatcacgcaggttgcctgggaacacgccgttcaactatggggttctgtaccttccttggcaacaatttaatctcttggtgctcaagaaagcaaccgacagtcgccaaaagctccactgaagctgaatacagagcaatgtcggagacagcttctgaaatcacttggctcgttaatttgcttcgaaatttgggtgttccgcaacttcagaaaccggaactcttctgtgataacctctcggctgtctatcttacagcgaatcctgcgtttcatcctcgcaccaaacacttcgccacacattatcactatgtgcgtgagcaggttgcttttggtgaactcattgtgaatcatataccgggtcacttgcagctcgccgatatcttcacaaagtctctagccactgctcctttcgaatctctgcgattcaaacttggcgtcgatttcccacctcctccaagtttgagggggagtatcaacgacacaggcccagagactgatagcaggcccaatccgaaacaagcccaagtccaacacaatgcaaaagcagaagaaaccgtacaacggctacctgcgacaaaagccaaaaacagagcattagcagaacagacaaatggtacggaggtgacaacgcaaaaccgttttgacgcgcttaggatcgtgtgacgacagctatgccacgtgatggtcaatagccagctatgacagtcaagggtacactaggtttagatgtaaatctctataaaaccattgtacctctgtaatcgaaaactaagttgaaaggaaatcaaaatataaagaatctttccatttctcttcatatctttcacgcatgtgtctcatccccatgagagcatagaacacaagaggagggaatattcatgccccatcccctaagtctatctctagtgggcaatctagaaagcaaagacatccaagcgataagagagaaccgaggcacatatatactctttaaaccaaatcaccttcgcccatgggacaagaggagagtgaacccgaatctgctcccaagtgtctttggaagagaaggaagggaggaaagaaccagaggcgttgcgccaaagaaaggtatcatgtcccctgttggaatgcggcacagcagcctcagttaaagctgccataaacatctgaatattatccgaacgcgctgccggcataatccaattaccatttcttgaagcttccactactaatgcatcctgccttattcgcagttgtctaggtccagccgctccaagaaaagttataagctgaccaaaatctgtccaagcatcataccagaaagaggcaatttcaccatctcctacctcacaacgcataaactcaacaatggtgggtttaagatgaagcatactgttgattattttagaaaaacgatttgacacctcctgcaaccagaaactctttctctgaaaaatatttccttttagccaagcaacccataacgaacccgagttagagaaaaaattccagatttgtttcaacctgaaaaccacctcaaactcctcaagcaatctaataccaagacctccttcttccttgggcttgcaaatatccttccaggccactctcgctcccgaggcggagcatgttttattcttccaaaggaacgcggaacaaagcgagtccactttagcataaaaatgcttaggaagaacaaaaacactactccaaaaattcaccactttagctaaccgtaaatacttaacctctttgttgcattttactatctgccttttctagggcttcttcgcttttccaatcatgaattcccaatcggtggcggaggaggaatcagcttctcctctcacgaaaaaaatcaaagtcaaagaggaagacaaggaagatgacggagattatgacagcgacgacataatcgaagaagaaaacaaggaagatgacggagatgatgacagcgatgacgtcaaagaggaagacagggaagatgacgccagcgacaacggctataccgtttggagaggtatgagatttaaatacgtgccagaaaaggaaccggagtgggatgtggacagctacgatggtcgcgaatacgaatcagatcccgaggatcgtaagcatttcaccagcgaggagcagtataatgaataccgtctcgacaagctcgagctgttggagagtaaggtaaatgtgtgttttttctctgtttcttgtataatttccaacgattttgccttagattactacaaagaagatgatgaaattacttattcttgggattttgtcaggggtttataccagattacgcaaacggaatctacccttttggtgatctggaagcaccagcgggtgaaaacaggactaatagagatgagttgacacatttggcttccttgtgctttaagaaactcaacgagtacaaggtaagtgacaagtatcaaggatcatcatatgtgatttgaatcaacatacatatgaatctcattttgtttgatagggaaagtattgggccatatgggcctcggtttagcttagcttagcccacaagatattgctgtaacatgtttactaggtttaacattgtacgtttgtatataagccgatgaggccgtatcaatacattaagaaatcctttcataaactgctatgaggttttaacatggtatcagagcctagatctgacctctcttgatctagtttttaaaaaaaaaattccgcttattcacctctttctttgacctaatctctgttaaaaacttctgctaacagagagatttcttaaaagatgacttcatcatcgtcttctacccagtggcggaggtagaaatttatgttatgggggtcaaaatttttttttttaatataagataatacactaaaaactttaatattttttttggtgttttgtaaaaactgaaataatattaggtgagtatttcttttatttaaagttaattatgggtctaaaattttagtgaaaatcaaactttcaaatatttaaactataagttgcaatattaattttgtattggggtcaaaatttattataagttggggtcgttagaattattgctaatgacatataatggatttttaaaaattcatgggggtcaactgacccccctatcaaacctctgcctccgccactgcttctacctcgacaagttcagctctcacgtcttccatggttgacactaaaaggaagacgatttctccgtatgacttgtcatctagcgataatccgggcgtcataatttcaagacctttactacgtggtccaaattatgaagcttgggcaacgaacatacgtttggctttaactgcacgcaagaaatttgggttcgcagatggatcaattccaaaaccagaagaaaattcagaaaactttgaagattggattgccaataatgctttggtagtctcgtggatgaaagtgacaattgaagagaatatctctgattcaatttcacatctagatgactcacatgaactttggacacatattaagaagcgttatggtgtgaagaatggtcagcgtgtccaaaggttgaagactgaattggccacatgtcgtcaaagaggatctactcttgacgagtactacggcaagctctcgggtctgtggaagagtttgtctgattatcaacaggcaaaaacaatggaggaagtacgaaaggagagagaagaggacaagctacatcagcttttgatgggtctcgacgaaaccatttatgctacggtaaaatcctctctgttatctcgtgttccattgccatcgttggaagaggcatataacgttttgcagcaagaagatgaatccaagttggcgagtcgtttccttgccgagaggaccgatggggtgagttttgcagtccaaacccaatctcactcattaccgtacgctgatcacagaaatcacacttgcaagttgtgtggaaagattggtcactttgatgagaactgttttaagaagatcggatatccaccatggtgggttgagaagccaagaaacaaacccaacaacagtcgtgtcacgacagcagctccgtctcaaatgtctcgtggccgtggctctgttgatacatcacgtggcggacaagcaaatgctgtgatggtctcacgttcgtcgggttcagctttgcacaccgccacaatcaccgacgcggacagagtagggttaagtgggttgaatgatcatcaatggaaatcacttgttcagatgcttgaggaaagaaaatcaacctccactgaacgtctcaatggtaagtggtttcttgaatcttggattattgacactggtgcttctaatcacatgacaggttccctggattttttgaatgatatttgcgacatgcctccggttttaattaaacttcctgatggtcgattcactacttcgacatgtcaaggaacagttcagttgggatcgtcactacgattatctgcagtgtattttgttgatgagttaaaatgtcatctaatctccgtctcacagctgacccatgacagtggttgtgtgtttcagataactgatcgtctatgtgtggtacatgagcgcatttcgaggacggtgattggtgcgggtgagcaaagaaacggtttgtattttttccggggggttgcggttgcgtcagcagtacaaaggtcggattcacagtctttggcgttgtggcacaagcgtttaggacacccttcttctaaagcattaaatttgttggatttttctaagagtagtagttcttttgattcacattcttgtgagatttgtattcgagcaaaacattcaagagattcttttccattgagcaatactacttctcaaatggcttttgaattaattcattgtgatctctggggaccatatcggacttcagcactttgtggttctcgattcttcttgactattgttgacgattactcacgagcagtgtggatatatcttcttacttccaaacaagaagctccaactcatctcaaaaattttctagctcttgttgagcgccaattctcgactcacgttcgtacggtacgcagcgataatgggtccgaatttatttgtctccgagatttcttcgcagagaaaggcatcattcatgagacatcgtgtgtgggtataccacaacagaatggtcgcgttgagcgcaaacaccagcatatactaaacgttgctcgggcacttcgttttcaagccaacctacccatagaattttggggttactgcgcgcttactgcaggctatctcattaatcgcactcccaccaaacttctcaagggaaaaacaccattcgagctgatttatggtcgtcctcctcctcttgaacatttgcgtgttcttgggtgtctttgttttgttcataatcaaaaacatggaggagacaaatttgctccacgaagtaagagagctgtgtttttgggttatccttttgcgaaaaaaggatggcgagtttatgatcttgaaaccggattggtttctgtttcacgtgatgtgatttttcatgaggatgaatttccttttgttttattgggcagtgatgagaagatggatttgcagtccgactcttcaccaccaattcttctctccgatgacgacattcaaagggctgaggatattgactctgctcccgctcctctgtcttcacttttgctttcaccggaatcaacttcacaagattccagtgaatcggaagacccggtgactcctagaacagtggtcacgccagattcatctctttcgtcatcacctgcgacttctcccgtcacacctgcaatttttcccgacacacctgcaactcctcccgtcatatctgcagcttcacagtcatcgaaaaagtctgtagaattgtccacttctacgactctgtctgacactccggttacgccttcttcattcaattctgatactccggttttgacatcacccagtccagaaaaattaggacctggccttcgtaaaaagaaaccaccagttaaacttgcagactatgtcacaatgctcctccatcaaccacatccatcggcaactccatatccaattgacaatttcctctctagctcacggtttaccgattcatatcaagcgttcttgttggctatcacttctggtactgagccgaaattttataaagatgctgttctagaagaagaatggagaaatgcagttcaagatgaaattgtggcactcgaagacaacggtacatggacagttgaaactcttcctcaaggcaagaaagcgctgggttgtaaatgggtattcaaattgaaatacaacgccgatggtacgttggagagacataaagctcggttagtggtacttgggaataatcaaaccgaaggtgttgatcttaatgagacatatgcgcctgttgcaaaaatggttacggttcgtgcattcttacaacaagccgcatcgaatgactgggaggtacaccaaatggatgtctacaatgctttcttacatggtgatctagatgaggaagtgtttatgcaatttccaccgggatttcgtaccgaagataagtcacaggtttgtcgtcttaaaaaatctttgtacgggttgaaacaggcgcctcgatgttggtttgcaaagttgggttcagctttaaaggaatatggttttgttcaaaacgtgtcagactactcattgttcacgttcgatgattctgttgcttttctcaacgtgcttgtttacgtcgacgacattatcatctccggcagctcgttagccattattgaaaaattcaagtgttacttaagtaattgttttcacatgaagaaccttggtcttcttcggtattttttgggtattgaagtagctcggaattctacgggattctatctttgtcaacgcaagtatacacttgatcttctcacaactacgggtgtgttaggtgccaagccggtcgcttttcctatggtgcaaaatcataaactcgcagtggctaagggagagcctattcctgacccacttcgttatcgtcgcctcatcgggaagttgatttatcttggtgttacacgaccagaactgtcatacgcaatccatatcttatcgcaattcatgagccagccaaaggaacaacattggactgcagctcttcgcgttctttgctacttgaaaagtagtctgggacaaggtatttttctccgtgcaaacacacctcttgttcttactgcgtggtgtgattcagattggagttcctgtcctgtttctcgtcggagtctcactggttggtttattcaattgggtggctctcctatctcatggaaaacaaagaaacatgatgtcgtttctcgctcttcagcagaagctgaatatagagcgatggctgacaccgtttgtgagatcttgtggctgcgtgagttattacctgcgttgggaattgattgtactgctcccacgacgctttactcggacagcttatctgccattagccttgccaagaacccagtctatcacgctcgcacgaagcatatcgaaaacgacttgcattttattcgtgacgagattatacgtggtgccattgttcctaaacacgtttccacgacttcacagctggccgacgtcatgactaaggcattggggaagacggcatttgaagcttttttactcaagatgggtgttcggaatctccacactccaccttgagggggggtattgggccatatgggcctcggtttagcttagcttagcccacaagatattgctgtaacatgtttactaggtttaacattgtacgtttgtatataagccgatgaggccatatcaatacattaagaaatcctttcataaactgctatgaggttttaacagaaagtgtgtggaattggtgagtattgagcgagctactgtaagcggaggagctcgatggaagatttttataacgtgtatggctcgggagtatgaggatgggcctcttgtagagtaccaagccaaagtgatgaggtatgctggaaattatgaacctccctttcccatactttgcagaccaagccctaaaccctccatctaagtaggtgattacaagagagaaaatgaatttgtatagatggacttttagtttctgaacaatgtctaattttctatctaaattgcaaacccattaagttgacgccgacctaacgaagatcaagattttattgaagtaaattcaaaaactaatgggactttacaatttagatcaataagagaatgtttcggaatgacatatcaacattttttttgttgaattaatattgttagctacgagcctacgaccgtaattttgaactatattggtggataatggttaatttgtgccgtgcagtgaacttactaaaccgttttatttattaaattaaattaaattgttcaaaggatctaaattaaattggatggatattgtaaaattgaaacggtttagttacttttgatagttttattaaatagcgatatagtgtatagactatagagaagtaatgtaattcaatcttcaaaattagtcttgtgaaaaaaaaagtgtatttaaacatttatatttgcagcaaacaaaacaacttgtggcttggggtacccttgaaatttcctaaaaacgtgtgacataaattgaaatttaattttagttagttgttaaataatactattgtacactttgaatttaagctaattccttcacttttcccacatttatatcaatggttatacctacatgacttttgtccactttcttgcggtattctcagcagttacattttgttcttcaattaacctaaccttaatggtaaacactttgtttgatctaccctacaaaattatataaacaggataatgatgcatcaacattttaaattaatatataaatatacaaacataaaaataaattaaagtatacgcctataaatattaactttttttttcttctatcaattttttcaattcccttgagatttatatggtccgttgctttcctcatagaacaaacagttatatcctccgtatccaacttcttatgagtgttaacctcctatgtttttaatcactttttcaacaaatatttgtatatccaaaaacttttattgaggaatgggacgatttatggtgtaggttaattctagtatttttatcaaaactagagcccaacaagtagttgcatttgaaaataagattgaatcttattaatcctaaccaaataaaaattacttgattataatgtcaatttactattattttttaagtgcaaatagttgacgtaaatttagaaattagaaaagttgaattcattcattttatattttactatttgagatgaaataagttggaaaattgattcaactacaaaaattagaaaactgaacaaattatagaagaaaattgttcaatccatttatttactatttcatagaaaaatgagtgaaatgttgttcaaattctttttttttttaactcaatattttcaatcatttatctacatgaaaacctttgcatactttagatgcaaatagttcatttaaaataagaaactgaaagagttgaataactattaatctatttgtttatcatttgatatgaataagttggaaaactaattcaatctgtttaaccaaatttttttgaaaaaattaacattatatagaaaaaattgcttagagaaagaagttaatgttcaattattttttgtttaattcaaaaatttccaatcattcacgtgtcatctatttgcacattttgttatgtatttattgaaatcgaaaaacggatcagtggactgctaaaacgttgggtcgtgggccgtataaaataaggttttgagaagggattgggtctttaattaatgggccgtagcccaaatagcagtaatgaaaggtgagggtataactgtcaatactgaaaacttggttgtactaattaatattttacagctggggaatctgaaatccccaaatcgaattgttgatctagggtttcttggtttctctacaatggcaaccatactaagcgatgaacagctggcgaaacgaggttttacgaaggattcattggcgttggaggaggatgctaactcttcgctcataaaaaagcaaaagattgacgaggaaggcgacgatagcagcagcgatagcgacggcagcgacagcgagtgggctgggtataactggttaccggaaactgaaccagagtgggacgtcgatagctttgatggtcacgagtttaaaatcaaccccagggttcgtaagatgtacggctctaaccagcaactttatgacgaatactacaacgacaggctcgaggctttcaacagtaaggtatattaaaattgtctattcttttcttgtaacctttggtatatctgtttaagttaacctcttcacttaataatttctcttatcacttgcaaaatcattctgcttttttgctgaatatagatggaccaatagatttgtgtatgcctgcctagttagttagttgcctacaatttggcttttattaaatcagtaaaaaatagatgaaaactaatctcttttgtttgtttgtttcagggtttccttcctgatcatctgaacggaatctacaatgtttatctagacgaaaaaatgaatggctacaacactactcgggatttcatggcaaagcttgctaatgtgtgtgttaagaaacacaacgaaaccaaggttagtgagtcgaaagaagtaccttttttttttttataagaaaatggacacgaatttcgtgttttggttcatttggaatttttatacatttttcacagaaaaagactttggaattggtaa

SEQ ID NO: 5261 - DNA, 29843 bp, Arabidopsis lyrata
  Intron number 1 from transcript 493621 (locus 493621) deri ved from phytozome v7.0 (chr-ID scaffold_7; pos 18455864 t o 18485706)
tgttttgttaactttttttaagcaatgtgctattcccgtatttgtaaaattagactcttatgttcagttgttttttattttgcttatctgagttttacttttattttgcttaattagtaagctttctgtataaaagaaagcatggaatatcttttttttttaattgtgctattatctagcacaagctatggaatatctttttttttttatgttaataatgtttttaaatttcagagaacagaaagaattttttatattgagcaaaatttactataaattgatccttctgaatgacactaacctcaataataggttgatgatccgagatccttgctccctattgtttgatattcttatcataatatatcctgtcaatcatgaaagtatataatttagttattaactacttctaaagaatgttaacttactcaagtattttaaaagttagtgagaatatctacaaatagtacagaaaattaaaaatattatgtacatggtactttatgatataaaaactatctacaatggcatatacataacatgaaaacttaaatcctaatccaacaaagcctattttataattgtaaatgcataagctttaatttccagtcaaattatctgattgtcaacatactggtatgaatcctataggaaataaacagccaataaatttcctgttgactcatgcaattattttcgttaatccccccatcagtcttaccagatttaattgttttacatgacaaccaaacaggaaatcctaaaataccaataactaatatatgttctgatatttatttccattgtttggtatttgtgttggatgtgaaataggccacttgctttgttttccaattcacgggttttgtctattagcatcactcttacaacatttaaatgtatctgaataagcaaacacaaaataggcacgaaaaccattaaaagctgttatatctggtcaaaattcaagcttcttagaggtaagacaaagacatgaatcttgaaaaacaaaaaagctgttatatcagtcaatatatcaatcatatgctatggtcatgttttacaactggtttttacatagtgatatattatttgttacactttacttttattaaaacatcattctgtttacttttatttagtaaattggacacaatgctataggttttcactccattcataacctgtatataaatacatctatacttcactataatatcacactcaaatcgctcatttcttagaaacaaaaagcacaccagttagagaggttttcatcctaatctacttcgctgatcatggcagtgcttttttctgatttaaatcgaaggaagaagaaatggctggtttttgttaaggtcttaagcatctggaataatcctcctaaacatcctaatgatcagacaactatgattcttgtggatgaaacggtatatattgttttctctttgcgctaataatgttatatattttctctttgtgctgataatgataaaggaaacttaacttattatcattttctttataagggacaaagaattgatgctacggttcctacaattgcaatcaaaaggaacttccctagagagctcaacgaaggacaatggtaccttttgtcggaatttgatgtgattcctccttcattgcctgaaaggaactctaatcatttttaccagattagctgtaataggaacacagaggtagatcctgtcagaccaaaatcacaatccgaattttttaattgtgtagattttttcagtatcaataatgcatcagaagaagacaaagaatttgttgttggtaagtttctgttttatattggcaaccatttttagttaattttaatagatcatctatatactaatgattgattcttgccatatttagatgtatgtggagtggttgtcagtgtctctcctgttggaagacttctggaaggtggaagtgatatggattcaagatatgttactttcacactgaaggatactatgtaagtacagttttacaatgctattacgtgctttgaaaaatatgtatgtattagttaacagtcttattacatatgagcctgtgattatacattgtatcattacatgtagtggtcattacttgaattgtgtggcaaaaggaaatttctgtgaagaatttgtaaggaagtattctagaagaataagggcctgattggtaacagctgtagctttacatttgttgctgtagaaatatgattgtaggtttatttgctgtggctgtagattttagtgctgtagtattttggctgtgaaatttaaaattttggaaagttgaaaattatgtgctttagaaaaaaaggctttctacagccaaaaaaatgaattaaggaaatattttggctgtgaggaaaaaaaggaaagccaaagcttctaaagcttgattggatgtatttcaaatctttagaaatttttttgctttgtaaagactctaaagcaattgccaatcagaccctaagtgatgtggattatcacaatgaaccaatcattctgcgattttggaggatttcagtgtttcaaggtgattttctacaactaattataaaagtatgtgacagtttagatagccaagcatttggttatggaactgatttttgaatttctctgttttataggtaaaccttgcttgattactggtgtaggttgtccaaggattttctttgatccaaatttccatgacatcaacagacagcaattcatgttttccttcgctataatagattcaatttacctaaacttatactcaaattgttagattccgattttagttgtattttggattcacagaaagtgttacactcagggagatgatgaattcacaccctcagatgatgacgatgtttttatggaagaagttgattcaaactaatacatcaattcttagtggattgttttctgaatattccccctatgttttattttagagaaatctaactaatgtgccacttactgttcaaaaacttagcaaaattgccacaaaacataaatctttccaaatgtgccataatggtggacaacatttcttgtctaccaaaaattttgtatgctgtttcgaattattgtccaccaaaagtctgttgtttcaaaggtggacaagattttttgtccaccaaatatcttcccaatctgttgtttcaaagatggacaacatttcttgtctaccaaaaattttcgtttcaaagtcttgtctaccattatggcacatttggaaaaacaaatgttttgtggcaatttctgtaagttttgctacagtatatggcacattagaccaaaatccttttattttatcttgcttttcatttatgtttgctttgtaaaacttaatattaaatgtgctattagcacaagctatggaataatatatttccttttttcttaattatgttttattgatttcagagaacgttagattatatcgatcaaaatttactataagcggatcattctgaatgatactgacctgaataataagccagtgatgctccgagattattgcttcctgttgtttgatcttctcatttagtatatcctctcaatcatgatagtatagaatttagttactaattacttataaagaatcttaaattactcaattttttttaaagatagtttcagatattgaatatatcgacatatctaacaagattttattctcatatctggtacaatagtatttatccaagctttagtcattctccaactcagatgcataaattctcatacagtcaaaaaactcgctttgttatattcttatactacggaacacattcaagagtttgataaggtaaaacagagcatagaagttatactttccaacatctacagttatattcctacaaattttgtatgtcatcacatatgtgttacgatctatcctattttttcctcaggaaatcacattttcatgaggaagaagaaagaagcaaggggtcaaattgatcatgatgtcactcaaactcctgttagaataagaccatcatctactatactcgatgaaaacaatgttccaggttcaggagaaagcaatatcagcaataatgttgtagtcaattcagtatttagaagagttttgggagacatatctaactcaccacgcattacatctggacaatcaccatctgaccaaagaacaccattgtcaggaactgcaatagaaaaatttaatcagataagcactccttatcataaccctaatgcaaagaggtcaagaaatatctcacctatttcttgtaagtaagaatatttctgttagaagtatggttacaatctatttcatttttttgacataatatagagagctaattctataaacagtatttaatgagtcaggtactaaatccaatacttcccagattacctcaactcaaatcaatgactctcctctgttgagtcaatcttcttatatgcataatgatgattatcctcctgcatcttctgccaataaaagattcaaaggaaatttatcaggttatatgtcagaattagtacaatatcacataattcatgtaaatggtaatgcttaagagatacacgaaaatatctatgagaaattgatatatggatatatcatttggtatttgtccacagttacaacaagaggatccggatcatcaatacaaaacaataagttttatgatgatctccttcactctcatcagagttatgtagaagataatggtaacagttcagatacagatgaagatgctgatttttcaaattatgaagcttcctcacaaggtaagacctttatcatgttttaaaaatcttataaagattcatatttttaaaatttttttccaatataaacaggagactatgaaggcaacaaccaagaagatttcttttttagtagtgaagaagattattcatcaaatgcatcctcagatgaagatgaccgtgttgacgacgtttctcaaatcacagatgacattatttatcaagctaaagataaatttgacatacttactatgtttgaaaaagcttttggaaaaccaaatcctttacctactaatcgtcagaacagaaagagtggtacaatatacctattaactcaatcatgagactcaatttataaaattcagtactatactataacctatattatttttttggtttttttcagcttatgtcgatgaaggtgatccaggtcatagttatgagaaatgtggtgctattttttggtatggggaacgtgtaaacaagaggaggcataccaacaatcctaaattttcattgtgttgtatgcaaggtcaaatcgtattaccatcctttaaggattcacctgaattattatggcatttgcttaccagtaatgatgatctctcaagacattttagagaaaacatcagaccttacaacatgatgttctcatttacatctattggaggtaaaatagatcattgtcttactaagggccgtgggccgaagatgtttgcagttcaaggtgaaaactaccatctcataggtgctttgaagcttaaagctggtgactatccaaagtttcaacaactttatattgcagatactgaaaatgaggttgacaacagatacaacataatgaggtattttctctcttactcactcttctttataagccaatttacatgagtttatcactaatatatctgataacctaaactatgtttattcagtaaagggaaggaatctgaaaacgaccagggaaagaacaggttcagaaaggaaatcatcgacagtatcatcaaacttttagatcaagtcaatcctcatgtttaggcgtttagaactgcaagagacagatttaatacaaacgcagaagagccttttcatatgagaattattgccgctcacacaggtgatggcagaaattataacatgccatcagcatctgaagttgttgccttaattccaggagattttgatgaaaatatggataaacgtgatattgttctacagaaaacttctgggaagttaaaaagaataagtaaactgcataaatcctaccttgctctacaatatcctctgttattcgcatgcggggaaaatggttatactcttggtatcaagaaagctaaaacaaatggccatggcagtgacaaggaacagaaagatgtaagtatgagacagtggtttgcattccatcttcaagaaaggaaacatgagaaacatgtcttacttcgttccaagcgcttgcttcagcagttcattgttgatgcttacactatgattgagttaaacaggctgagatatattaagaagaatcaaccaaagtttcggagttctaacttagaatatattcagaatgcgtctaatgctggaaacaatgatttggaaaatcaaggtaaaaaatttaagattccagcttcttttacagggggaccatggtacatgaccaacaattatttggatgtaatggctatttgcaaacactttggatttccagatcttttcataacatttacttgcaattcaaagtggcctgaaatagttagattctgtaaagagaggaatttgaagcctaatgatagaccagacatcatttctaggatattcaagatgaagttagataacctaatgtatgatctgactaccaagaagctacttgggaagacagtttcaggtatttattatttgaatctgttatctaaattattagtacctgtgattgatatatcctaaaagtttaatgatttatatgttttgtttttttggcagccatgtacactattgagtttcagaaaagaggccttccacatgcccacatattgttgttcatgcatgccaccagtaagttttctacagcagaagacattgacaaagtaatatctgctgaaattccagataaggtgaaaaaacgagaactgtatgaagtggttaaagactgtatgattcatgggccatgtggtgctggttttcctaattcaccatgtatggtgaatggtaaatgctctaagttttttccaaaaaagattaccaacaatactagggttgatgatgatgggtttccagtttatagaagacgtaacactggtatttacattgagaataatggttttaagtacgataatcgttacgtgatcccatataatgagaagctatcccttgttataatgctcacattaacgttgagttgtgcaaccaatcagggtcaataaagtatctgtttaagtatgttcataaaggtcatgaccgtgtcacatttgttgttgagccacgtgacaaggatactgcaaatgtggattctaatccaactccgggaaagactactggtaccaagggaaaggacgaagttcaagatttttttgattgcaggttatttcattattatcgtcattactttacaaatatatataattcaggcaactatatggattgtaacttaatttgttgtatattttttgtaggtacgtatctgcttgcgaagctatgtggagaattttcaaatttcctatacaccatcggactacaccagttgttaaacttttcttccatgaagaaggaaaacagccaatttattacaagaaaggtgaaacaacagagagtgttatgactcgattaagtactgaagcaactttttggcgtggtttcagcttaacaagaagattccaaatccaatagtcaattcaaatcggaaaaaaaaaaccaaagaaagctccagatccaacaaaccttttatatgaagaaattccaaatctgttcacttggaatggcaaagagaaaaaattctcaccaagagaaaggggatttgctattggaagaattaactttgttccacgtgcaatagaggatgcttattatttgagaatactcttaaacatctgcagaggtgttacatgttataatgatctcaaaactgtgaaaggtgttgttcacgaaaacttcagggatgcggttttcgctttaggtttgctagatgatgacaaggagtacataaagggtattaaagatgccaatttttggtgctctgcaaaatatgttcgtaggctatttgtcatcatgcttctttcagacagcttaagcaaaccagagatggtgtgggagtcaacgtggaagattatatcagaggatatagagcgcagaaaaagaaatgaatggaaacgaccaggtctctttctcaatttcctttctaatttatcttattgttatgtttttattaaatttgcagatcttattctaagtgatgaggaaaaaaaggagttttgtttacaaaatatagccaggctcctaaccaaaaatggaacttcacttacaagatagaaacagatgccacaagtttcttcggaagatgtacaaaaatgcaaccattttttgttggatgaacgcaagtacaaccgtgaatatttgcaagaaaagcatgaagaatggttggctaaggtgactttagagcaaaagaagatatatgatgagataatggatgttgtgatacatgacaaaggcggagtgttttttgtttacggttttggaggtactaggaaaacttttctctggaagttactctctgctgctattagatcaaaaggagacatatctttaaatgtcgcatctagcggcatttctgctctgctattagatggcggtcgaactgcacactcaaggtttggaattcctttaaatcctaatgagtcgtctacatgtaacatttcacgtggaacagatcttgctgagttagttacaaaggctaaacttattatttgggatgaagctcctatgatgagcaagcattattttgagtctttggatagaactttgagagatattatgaataatccagatgataagccttttggtggaaaggttatcgtttttggaggtgatttcagaaaggtattaccagtgatcaatggtgctggtagggaggaaatcgtttttgctgcattaaattcatcttatatacgggagcattgcaaagttttggagctaacaaaaaacatgagacttctcgctaacattagtgagcatgaaaaagcgcaatatcgaggaattttcaaagtggatattagatattggggatggtaaaattgctcagcctaatgatggaattgctcagattgatatcccagaagagtttctcattactcaggatcatgatccggtcgaatcaattatacaggctgtttatggaaataattttatggacgagaatgatcctaagttctttcaatgaagagctattctttgtcctactaatgaagatgtgaactccataaatgagcatatgttgaacatggtgaatggtaactacttccatcaacatctgttagtcttttttaagttagctaatttaatttcaaaacaactttattagttatttacaattgttttccttccgtctgtaggtgaagaaagaatctacctaagctctgacagcatagaccctgctgatacaagttctacaaataatgaagcttattctcctgattttctaaacagtatcagagtttctagattgcctaaccattgtttgcgccttaaaattggttgtccggtcatgttgatcagaaacatggatcctaacaaaggtttatgcaatgggacaagactacaaatcactcaaatggcagatacagttatcgaagctagagttattacaggtaataaagttggtaagattgttcttattcctaggatgctcataacaccatcagatgcaagactgcctttcaaaatgaggcgtaggcaatttcccctatctgtagcctttgccatgaccataaacaagagtcaaggacagacactagacaatgttggactttatttgcctaggccggttttttcacatgggcaactatatgtggcaatatctagagtgacgtcaaaatcaggtttgaagattcatatcaccgacaagaaaggtaaacctcagaccaaaacaatgaatgttgtttttaaagaagtcttccacaaccttcgttagctgattcgatgattcaatttgattgaacatcttaccttcaattttcctttctgcaagttgtggaacaatatgtttagacttcttctcctttcacttccgtcactcgccattattggggtctatcacctcataagattagatcaaatcaagattttgcattttgaattacattatttcaatccacgatatataaatggtctctataatttgttgaagtccttacaacattacaattcaatcagtaatcaattgaagaacaatattcatcgatttttataatagatacgattaaacttgagaatttgatgtacctttaagacgaatttctaattccactgatccgaaacataatcgatgaactatagttcttgaattcttttattccaaaattgtttgagaggaatgaaattgcatgcatttatcaatctggaaagctcaattaagaagaattagatatcaaaatcgttgaaagatgtttattacaaggattccgacttctctccattatcagaaatcgaaaacgaagcaatacacgtcgtttgtttttctgtctttttttttttcgaaaaaattatttttttatgtttttttaaatcatttatgttattattaaaacaaaatcaaagttgattacttaaagattgggcctatttttattttgcaactttaatattgaacccaacttggcccaattttatatatatctctcaatatttttatatacattaccatattatctaatcttttattacgaaacaaattttcacacataaataaatataatacaacatttaatcctattaacaaataaaattacacaagctatgacataaattttatatttttgattctattatattatttgctttttaatacaccttttataatttaattttattaaaaaaaaattcacacccgtgctatatcatgggttatgatctagtaaaataaagcatcgtaattgtttgttgacatgaaagaaattaaaaaaattggtatttcttttttgaatttaattttaaattatattttttttaaatgacgtttttacatcgaatgtagcgtatgtttaaaaaaattggtattatgtagatgcaaaacatgcaatggagaaaacagaaacaaagaaataataataataataataataataataataatacttataataataataataataaattatcatattttatagcaacaaaattatgtttaaaattttgttaggcgctttatcgtgggtttggattatatttagtgttaagtaaataaataaaaaattagtcgaaaactagttctttgaatattaactagagatttatttgcggtacactacatggcgatttgtttttttttattttatgattatgtattatacaaaaaataattaaaattgtatgattttcaaatatatatatatatatatatatattatagtttacgataaagatgttttaggtttcgtttgtaaaaatatagatacaaaaacatacatttcattaagtaacgatatacgacgggttgaatatgtttaatttgtcaatataaaataatattctttaaactctggagctaattatttgtaggtgaaaattttgattttttttactatataattgctgaattaattatatattaaaatagtcacaataattggtataaactgaaattttggccaaagaaaacaacattgctaaatgatttttgttttataccatcttaacaaaatcaagataattcgatatgtctaatattgttggtgttaaaaataataaaatgaggatttaacatgtattgaagcggcgggttaatgatactagatggtatacccgcgcgttgcgcgggatttaattttaaactttattctttgagtataaatataatataataaattgaattttaaaatattttactttaattcatgtgccttatctttccaaagtagtaaaaagtttcttacattttttactacagtttttctcgttttcttttatgatttactcgtcgtctccccgcatctattttcttttctccttagatcgtttttattttctcattcatatcattcaatactcaaaattctagtaagtttcatgatctttttattaaagtgaacatcagaaaagaaatctgaggagatgtttgttagggcatatgcaagggtgcatctttgaagattgatcttaagggagaaaaaatattaaaatattataagagctttaattaagatcttttgtaaagtaattgattattggtagaacatgtttagatcatatgaattaataatttaataatcaaaacattttaaagtatattaaaattaaaaaattagttttaaaattgaaaacataaaaaagtaaacttatattaacattgatttgaaaataaaaagaaacacaaaatacaattccaaataattataaaaaaaacattaaagatataaatgaaaaacaaaaaaaaacaatcaaacatattaactaaaggttacaaacattttatttaattaatacaaagtaaaaaaaaaacttaaatatttaaaagattttcgttatcacaaatcgcaacgaatcagaccatgccacgtcgccacaagatcagcccaaaaacagttctagcttaagaacatgagaagtgttctttttttttttgccgtctagatttattattaattgcaaattatgagaactattacatagacgattctacaactgacaattctttccgacccttactagattcacgacagactacacttccttcttcgtgatcttgatgaatacccttcaatgatccatgacctggcgacatttccttctctgcgtagaatcctggcgaacggctataattgtacatcgctgaagatctcttgcacacttgcccccattaatctgcaaatttgttaataaatcgcaatatctgggactcgaaccccagacctcttggtgtagaagcattaatcaacccttgatcaaccaataggccaagggggcttccaccatgagaagtgttctaaacccactttttacaaagtttattattattaaactctaagatcaggcctgaagatgggccgttaaacatggtcttataaggtgtttttttaccatgctttggtgcatctaaaattgttttatagaaaacaaatctcatatatggattcattcctataaacaaacatagaatttcaacgtgaaattttgcactttatcttgaccatttgaaaaatacaaaaatctctttctacatatataatttaacatatattatgattttagatggtatttttaatgtttatttttataaaatgtgacacttacgaactcataaaaattattctaattttaaaatatatttatttagaaaataaaacaaaatcatttttatttctagtgaaaaaaactcttcaatctaccattactatatatagatttccaaataacattctcaaatattattattacacagttttattattcgataaaattattttatttttatttgtgatgtttatgatagtttttgttttatttcaaatcacccttagtttgtttcaatctatgtgaatttcctaaaaacactaattaatatttagtttttcttctttaggtattcacttttttatttagaaaacatttataatatagaaaatttattaatttgactacttatattatattataattataaataataatatgttctaaattcttcttattttttaatcggtactcaaattttaaatgtctatttttcagaaatgaattgatttctattttaagtaaaaatctttaaatttggtatttttaactcttatttccttttctctactaaataatggcaactcttaaaaaataaattttgtaccattaaaatatatgataagtttctttttcgtatctctaactattttaaaatatttactcattatatgttaaaatataatgatctaatttatatatattcaatctctattcaaaaatttcatattttaagttgtatatttatttttttcgtttttcataatatttcatttaatttttgtcaattattgtttttatttaatgtgtgaattaattagtttagttttaatgtttttgttttaataaataaaatatgtggaacccacaaaaaaataaattatggtgacatggatgttgatgtggacaccttagatggagagaaactctcctattatatatatatatatatatatatagattttaaagtttgattaacgttgattcaaacatgtctcgctatataactccgtctcgcaatataacccacccgttgttgttttaaatttttgttcaaatattcataatattataaacttttaatgattttaaatatatcaattataattttttaaattttttaaaagtttaaaatttcctatatccggtaaaaaattaaacagcttaaattaaaaccgaattaaacaatatacaaacgattaaatttgtatgcttgtaaagttaaccttccttctcatttggatttagatacaaattttttcgacatttaaactatatctttgaatgtttacttaatttaccaaaagatattcaaacattattaggaagattatgaaataatgaaactgtaatgggagttgggcgttgctaataattatgtaagaaacttgaaaaataagttatgtattgtccataataactgagataagttactagttttactagttcaacaacaaacgggtggtacagaatggcttcattgcatacataattcatcatcccattttatttaaaccacattttcacccttctctagctataatatcatcaataatgagggagaaagtgataaaattccacacgcaaatcgtgatggtctcgaaatagggtagtcacctgcaaaaaatatgctcttattagaaaagaaacaattttaatattatagttatggtacaacacacatatacctcatggcagacttcatcaaggctcatgtttttctttctatacatgtccaaaatattaacaaatgatttatatatacggtcatcatcctgaaactttttctacaaataaatgataatgtaagggaaaatgaaaaatcaaacataaaagagaaacttataagttctagtatggctagactataaaatagttttatttggtttatgttcttatagaaatgataggaaaaacacttaaattcatgatataaaataaaattttggcccctattttttatccaaagttaccttaacctttctgacaaaatcaagagcttccgaatactcaacatcaataaaatttgttggtggagtttgttcacagttgagtgttatctcaaaaccctttggcaagaatgtattgaaacccgaaatcagctcttgatcctccttgaagagttctttcaccacagattttacaccatttggatcaattctgccatgaaattaccttcagattctttcttcagctcctcaaaaatcacaagagtctttcatggatagaaatcatatttaagagcaaaaccaatcattaacactgaaaatatatatattatacctatgagctgtgtaagccgtcatgacctgaagaaacctaacataaatgtcacgtttgttttgaagtttgttcttcacaatcttgaggtacttacgtgggttaattttagttggctttggtgcgctcatggttttaaattggtcagtgcttcattatacccaaaaaagaaaaaaaaaaacagaaaaagtaacgatcagcatagtctcccaacattaaaaactttacaacaatggaacgcaatcaaagtcggaaaaaaaaaatttaacataacatttacataatatatatatatatatatatatatataatcatttgaattacaattaagaattagatctagcaaccagataactatcataggaaatatagcaatggaatatgaagcgatcattgataaaacttggaataacgtaacctaagtattatttcatattatttttcgaaaaaagagtgataagaaaagaaaaaaatatagagaagtgatcaaagggtccaaacaaaagtcgaaagaaaaacgactaaagaagtacatgtatcgacacttacctcacacgaaagaaaaagagaatagacaaccaattttcacaaagaaagccgagagaggtgttaagcttttactacatgagacttataaagagaacatatataaaagacacaatcttcatttattggtaacatattagatttctctccttttttaatgttcttcatcttttttttgactagtgtatgatctgtgttttgcgcgcgattttattttgttgctttatttaaatataatatcatgtgatacacgtctatttttatttgagttgtttgttttatttctgtaatagtagtgttaaaattaatttattattaatttcctaaagtagttaatgtcaaaaagtatatatatatatatatatatatatatatatatatatttctttattggtttgttatacaatatttgatggagattagtttctgtttggataagtatgagttgctcatagtcaactttataaaaaaaattgaaagcaatccataaatgtatcccaaatagaaatgaattataagtatttgatttataataataatgtattaaatacagtttcttaattttggtaaataagttaaatacatttttttattaagtattttctttaaatatttataagatgttgatttgatgggatataattcaaagatgaaaaagtaaattaattttaaagtgagatagtattggccattgggttatttatattatttttatctagttatatcaaaatgaactttaaatattgaattgaattgcccatatttaaaactacctaaataataaatttaaactaatgataaaataaatttgaaaaagtggtgatgaggtggcactctagatggagtagttcattttcattttatacatgtagttttttcataaacgaaagaaaaattatattttaatattaaacagaatcaaccatatatacaaccaacaaaataagaaatttaagataaattatatatatttgtgtataattgtatatatattagagacaattagcttcataccatttttaaaaaaataattaagaaacaagagaaagtttttgaatatttgcagaagaagaaagagaaagtggtacaacactttattttggacaaaaatacccttaatgaaaaggagaagtgtttatggtgctagtggtgataaaattttatgaacggaggaggaggacatcacaacataaaaatgatgatgcacatgacattcttttggggcaagaacacggaggttctcttctccggttggctcggaacaagctctggcatgtatgctctttgtctcatctttattttcttcctcgtcgtcctcatcgaatggcttgattatttccctctccttcgcggcacgaccggagattcggctaatcgcaccgccgggctaatccaaaccgccatgtataccctctgcatcggccacgcctatctagtcgtgtttaccgtcttgttcacctatctagtcatgctcgccgtcatgtcgtttaacgccggtgtgtctcgtcgccggtcatgtccttggtttcatgttgttcgaaagaaaagagagagataggatgaaagagaattgtgtggtgaaaaagagagataagactaatggtatttttatcttataatacatatttttagatcatcaaaattcaccaaaatgccacttatctttagggatgtgaattgggctgtctaggtccaaataagaccatgctggtgtaagcccaaataggaccgtatctaaataagactaaacccaaataagaccgtaaccaactaggcagcccatggggttcagataattcatgaacacagttatgcaattacacaagaaactctatactaaacaagttataagtgttttacatactaaacaactcttaagtgtttcacccgatccaaaatgaaaacataacttcatgatgattttagtctaattgaataactcaaattaattctcaacgtgtatcttcttccaaaatttcacatatagacagaatctcacatatagacaaatacaaccatacacattcacaaactcacaattgtgtaaagtaaaccatacacattcacaaaatcacaattgtgtaaagcaaaccatcaccttctaagtaactcggatcttctttcttccactttttcgtctcatgcttcttctttatcttcctcagaaaactcagattcacctatcacagtgaaaacattcagaaattaccaacaaatactgagatgtcttaaacaaaaccgaattataataattagtaaacttacttatctcttcaaagccacgtaaccagtttcttgcacaaatcagagcttggacatttggtggaagaagacgactcatgtacttgttaagaaccttacttcccacactaaacgatgacccggaaaacactgttgttatgggaatacatagcacatcacatgccatacgagacaactccttaaaacgtgaaacattgtctttccaatactttaagacatccaaactctgaaacgcaaccatatccaagactagtaaaagccgtgcattatagacacataaaccagaaatcaaaaacacttacggaaaaaaaatcagaaatactaaagcaaaacaaaaccagaaatcagaaaaactaaagtaaaacaaaatcataaatacaaaaaaaaaaaaagattgtatgttacttacactatatcgagctggtaggctctcctccatgacttgtgaagttgaagaagtgttcttaggattcttctccatcttcttactgactatgataagttatcctttgaattaattatttgttagttttatgctatagagtgcaatttctctatatattatttaaattagaagtaaaagaaaataatcttgctctatattccttacatgtagtggttgatcactaaaccgcccgatttttaaaacaaacttaaacatgaaaacctaaacttatgtgaccaaaaaaatcttttagtgagactacaaatcatacatcattgttccaatacaatttgatcccgtacaaaaactattcacaggtcgtaatacaaattaaaacataaatatccagattgacacaatcgattaattaaagcaaaggtgagaaatgtaataactttcagcagagctatataatcaaacgaacaaagtatatatcaacactagacagcgaccaaatatcaaccaatgaaatagtagaatggtacgactccaacataagacgacccaaaaacgactgagtaaataagaacttatatgagtgtaaattcgttacaaatctccggcctatgtattaattacatgattttttttttgttaaagtcaaatgattaactacaacaggtcgtaatgtataaaaaccccgacctatggtagttaataaattgactgactaccaaactcttgaaatttacctacatgtgaataagaatttatatgaatgtaatcggtcggtgataactacaaatccgatagatatgtactaacgctatatgatcctacaaagtaaatatgcacttgttggtatagaaacacaaatatctaaatttataaaagttattaattacaatcaatagataaacatatatcaccaaaagttataaaagctagtggcacaagcaaccgtctatgcgatttggaagaagcaaaacaatatccttcacaacttgcaagtaatccctccgcttaatatcttcaagattattgaccgggaaatcatcaactccattaatgctagaagacaccgaagaaatttcagaattctaatgggtctttggctatgaatacattatgagtaattctgtttttgtttccttgtttttttatctttttttgccaaggaatcaagcttttggttatcaacatgtaaatccaaacaacctttcattaatatgatatttactcacttagcaaaaaaaaaacatatatcaccagaatataacgattatgtataagcaatgcaatagcgaaaaagtacaaccccaacattggtcaaacaaactagaaaatgttggttgtcatagccgaaccatggctaaagctcattaaggaagggtttaaggcagcaaatgagtataagtagtattaggggcatcattttaaataaatgttattgtagtttagttctctatcctttattattctcactctttgtgacggtttcgatttccacttatgctattatttgtgaaaaaaaattcaatagtttttgttaatgggccaaattttattttgttttaggcaacaaaatagtttgggccggccatgttggctgctaacaaggtggtaataaagtaacaaagaatagatacattttagtcatctaagatccaacggatctactgttaaccacctcgtcgaacagcgaaacctaccttatcgccaccaatttccgccgccgcagctaccagaacgaccgttgaacttgaggagcttcggagcatctctcggcgtccttaaccgtgaaaccaccgctgcaaatctcctcctccgccaatctagagccacgaccaaatcgatggtgataatccacaccgccgctaacggaggagagtaacaactcactcctggaataccttcgagagatctctgacttgtgatgaagattggaacggaccgaaaaaaaaactagatctgaatatctccttcaagagagagagacaaagagagagaaaatagctcttaaatcgaggaaacgattgtatccgtccaatctacatcaggttaccaattggtgctcaactatagatgtagagttagtaactttggcttacaaacattacctttgtaagcgatacacgtgtcgagatccgcctaatatataattcgatgatcaagagtttacaagcttgcatatggaagatggttgaaagtagagatgaaggtgagagttttgaccattatctttctcctcaacattaaaaaaaaaggtatagatgaacacatgacctacatgtcttttacctatgtcttttaccttccaacccatttgtcccaaaattgaatttgttattcaacagaagcagatttacatatgttttgacctggcataaatgactaaagtcaagtcgaagtgtttcccttccatttggtatggagtttcctccctctcctcgatattttccttacatgactccatgtattcccatgtattcccctctcttggacaagacttaccacttcttttctcccaaacaacatgctggtttttgttagacattttctggcaataacaatatttctctgtttatagacacctggaaactcaagtgttgattcagcagatggattcatttgcttctcctgattacttttaataggcactttccaagtccgaagacattcccactacaaaatcaactaacttccatacctttggaatgttgtctctaagagacttcatcttttgaatgctaggatttccatggttagtactacgaaccatagtcccctaacactaacacacacctccatggcaaatcacatttaaaagaacaaaaatacaaaaacaaaggtactttttggaattccccaataaaaaaatacaaaaattagcattagtgtgctacgaaattgtctaaaaattgatgttttcaaaagagattttatataactcaacttaatttaaaacaaaaaatcattttaattaaacagaaaactttgtagagttacacctcaaagtgaatgtccctaaaggtctcagctattgaagtaaaccaaccaaacagtatcagaaaaagccatattgcatcttcctctggtctccactggtttcttcagacagagaaccggcttcttctcgaatcatcctgcgtatagacaacgattaattaagccacacgagaactaaaacatgaacaaaaagatgatagcttctgtgaagaagtgtaattacatggttagtgaaagttatcttgtcggtgacatcaagtatctccttccacttcttcccaatacccatctggataacaataacaaacaacaagtagtatattcatcagatagattcataaaccaatcttaacatactgcaaagttctaatcagatttacatagacaaagatagctatgtttataacactaacgaacaataaacggctggtttacaagatttatcttcaaacaactcacaacatataatcttaacattaacaaaactattttactatcgcagaagaagtatctcaaacgtcagaagctggtaaaactcccaaggacaggaaacaaagcaagttaagcatcaaacctactagttagttctatgtgtagcattgagaattttcgtcaataaccaaactaaatccgtatatcccaacaattcacaactagaagaaaacaacaattataatcatgaatatccaacaccaacataaatatgaacatagtgagaagacataccagaacagcttcatttgatttagtcctagtccacaaggagagcttgtcttgcttcgcctgtgggcggacactagcaaccacaccacaaatctcatctgcctcatcaaattgctctccaattaaagccatcaactacaaaacacgagatagaaaccagtcattaaagccacatattgtctaataaaacacagaagagtaaaaggttaggttagagaatgtcatacagtttcaagccagcccttgtctaaatcttccttcctgttactgccagtaacaacccaagtccactttcctccattagcacactctggatcttcccactttggctcaacaccagctttgaacaagtgaatttcagcctgcgctgtcaatttgctagtctggaatatagtctctcgcaaactgcaaaatcaaaaattaacattctgagattttttgggatccagacacagactattacatagatttacatagatcgagattcacaaaaatcccagatttagaagctaccaagcaaggcattgacaaacgaatacaaaatccatagatacatgtttgaaatcaaaggagaagagaggaaacacaaacccccaaaaatcttcgacggtgtcgaaagtataggctttacgaagagaagctccccaggggacgcctttctttgattggttatcgaaccagaaactccactttctttcgagcttgtgtggttgtttctccgcctctgtcgccggtaattccgccgccgccgggagggactcgttcacatcatcggttgccatattcttcgcagttgtgtttttcttctgagacggctcttgttgaaagagagagagattgtttgtgagatatttgggaaattggaatggttggttaagtaaaaagggcttcttctcgactctattgggtcattttgggccggtccatcagaacatttaactctattgggtccatcagaatatttaactcttctttttaatttattttattcttttttagtatttaaaaaataaaaatctgcaaaactaattgcgaatggaaatcgcaatagtaaaacgtttaggtcttgattggtggcaacgttattgcggatttctaaaaggaatattgaaaaacgcaaaaagtcacccaatcaataaaacaaatacaatttgcgtttttttcggaaaaaaaaaaaaaaaacatttgcgtttttgaaaacagataaatatacaggaccgcgattctatgcagtcttcttcctttatccagcggtccactccaattacgcaatgggtaatatccagtttttcttttccaatttttctttatttttaattgttttttataaaatgagttttcctatatatacctctacaaccaaataacatatgcaatgcaaaagaaaaaagttcctaaaatatctctttttttttttacgtatctccaatctccttcctaaatatttgcacatttaaggtaacttttaatcttttaatcatatttagttatatatactatatgctaaacatcaccaccattattctcttgttcatcatatagtaataattaatttggacattcattaatctattttcatgtaaataattaattagggtatttatgtattaatagtttaattaatatatacttataattatactaaatttttgtagaatctcatcattaattatcatagagaacgttaagacaaatataaattatggagtttgcatgtattagttaatattattcgttaatttgtaatctaatttacttggtttgtctaaactatacatgtccgttaattatgaaacaattttttaattttgtaatgtttcatatcattttatagttttctttcagtaattgatatatatatatatattaattagtctttttttaacaaaattatgtttatatacgttaaatacatattatacttgaatatatatacttcaaaaaattattattgaaataaaaataaaatagttaatatcttgtcaaatttgtttattacaaattacataatcactgtatgattttaatgattgtagatatgtcgtctaatcgtcgacggaacacaaattcttccacacgaacaggttcaactcagccaaccgaaatttcaactcctcccacagaaacaacagtgcgggtaaatttacttttacttctattttttaataattttttttattaaatttgacataataagtaaaattgtatttatgaaatttgtagaacaaagacaagtacaaatggtcgtacattcaagaaaaaacattaattcaattgttcgatgaagcaattgccatgaataattatactcttaagcatcctacttctatcggtagagagtatatggttgaaaagttcaatcaagcgttcgacatgaatgtaacttatggttttttcaaaaacaagcttgatgaattcaaaaaaagttacaagaggtggaagtttctaatgcataaaactggcatcacggttgatcctgagacatccatgatatatgcatctgacgtatggtggagggaacaagagtttgtaagtacacataattattctattcatcaaaatatgtttcaaaatttcggtattaagaatctaattgatttaaaaattttagggatgcaaattaacaaaaagcatgaaccgacgaccgcctgagttctggaacgtaatgcaacgatgtttcgtcttatatgatgttcaatcacaatctcaacattctgctcgccaaagaagagaacaattgatcaacgagcatccaattgatgaagagagccaagatgactcagacgctgatagtggtgatgtgcctcaaacacaagttcctgagacgcaagaagaagaagaagtgtatcgtgttacaattgatgttgatgaaacattccaaaattccgctactataaaccaacaacgaggtaggcaatatgtgatttgaatatgttattcacatatatttggaatggagcacctggatcatgtcacgatacagctgttttgcaaatggcacaacaaagtgattctgaatttcctttgcctccgtcagagaagtattatcttgttgattctggctatctaaacaaacaagggtttttggctccttatagatcatcacgaaaccgagttgtgagatatcatatgtcacaattctattctggtcctcctccaaggaataaacatgaactgttcaaccaatgccacgcatcattacgttctgttatcgagagaacttttggagtttggaagaaaaaatggaggattatttctgatttcccaagatataatgttcacattcaaaaaagagtagtaatggctacagtgggattacatatattcatcagaatttcaaatttctcagatgcagatttcgcagatgtaatgacagaaacaaatataaacaatggagattttgagcatgatgtaggtgacatggatgcagcagagttagcagatggagaacatatgacggaaataagagacaatattgcaaatatgttatgggaaaatcaaaataatagataatactttttttaatatgttgtactttttttatgatgaaactattcaacggttttaacaatatgtatgttaaaaaattaagtttatattttgatcactttgtgtattaacggtttataattatatgttattgtttcttcgttaacaaaaaaaattaattaatcattaatatatatataatctataatctggaccgcttattgatttgttaccattcaaacattttattatgtaccgcaattagttttttcaccaatcaaacattattccgtaccgcttattttgtacaaaccgcacttgtcccgcaaatacttttctcccgcacgtaccgcagttgaaccgtaccgcactataataccgcttttcccgcacaacaaaaaacgctgttaccattcggacccttaaaagtttttttatacaaaaagtattccatatcgatttccagagagcagaatttcttgcatattgttaatgcaaatcttagttagtatcaaattagataatattgtttacatcagaagttccagagtactaaacgattaaaaaaaataatcaaattagatagattgctaaattgactagtttaattgatcaataatctaaaagatatattacaaataaattatagttgatacgtactggtaccgaaatagtggagttgctcgaaccttctttccaagaagctatttaaatcagaacttgagaagttttcattgatcaaaatactactataacaataggcacttgagatctaatgaattgaagactacattaactacactgcaaaagactaaatgtggtacaactttgtaaaataaatagtatcttttacgagttggagtagtatagataaatagtaaattcaaatttaaatttagctttttttacaaatgaaattaaattgtttagatgtgtttataagttaatataataataggtaattctcaaaaataccactaagctaaaaaatttgttccaatagtatcatcacaagtttttttttcttaggaatacctagaaaagatatttttttcgaaaataccacaaaactaaaactaaactttaaaaccttcaaaactaaatcctatcccctaaaacaaactctagaccctaaacacaaaaaactaatcccaaatccaaaattataaattataaacccttcaaaatcattttgagtgtttgtggtatttttgtactaaaaagtttgtgctatttttgaaaaaaaaaaaactaatgatggaacttttggtacaaaaatttagtttaatgatattttacggcatttctctattaaaatagaactatgttattgtagttctaaactttccaacttttctttgagactaaattcaaatcagtttatttagcatgggtgtcaacaaaaaaaggtaggagttaaagcaattttttatttgctaatacttgtctgaagaacacaatcattgtaacaaaaaaataagaaaataaaaacggaaaagctttcatccgctcggatacaagagataagacatctacattcttataattagaaaattggttgaatatgaaacacatatattgggtcaattttggaccggtccaccaacacaattttggaccggtccaccatcacaattttggaccggtccaccaaaacattaacccttcttttcttttcctattctcttttggtaataagtggcttaatttcatatctccattttgaatccagttataagatgataacgtatcacatcctctccttacactacacaccctaaagaaacaagaagacttttttttttatcgctggatcaacatcaccgaccttccacatgtatgatcttcttcttccacgagtggctttacttttcgaaagtttttaaaatctgttttggaattttatttattatttattcttgcaatgtatataatttttttgttgattaataaatttcatatttcaaaaacaacaaacaatatgaagtagattgcgtatataatttacttttaagacattcatctatttaaatgacatgagttgtaaaatattatcaatttaaaggtttctatcaattaatatatggggcataaaatctgtttgttaaactatattatcataaaaatatatttattaaacagatatattgtaatgtatatatagttataaaactcacttacacaatttaactatatcccctatttttttgcttgcaaaattttagaaattaaaaaccaacacacaaaatttttacattcatactttgattaactagattttaacccgcggtgtaccgcgggatgatttaattttaaagttagtataaaaatattttgtaaattgtatctccttataacatatttatttatattatagtttacaattattattaagtaacggtataccacgagtccacgcgacaattattaataaactgaggatttaacccgtattaaagaggtatataaatattggttcaaattcaaccgccatataaatcctttccaaaatataactcgttccgtaattccttaacccgtcgcatgatttgtttttattttaaaatttaatgattatttattatatataaaagtttacaaatcatatcattctctaagacaattatattttaataaactgaagatttaatatgtattaaagcggcatgttattgatatttaaattttttaaaatattgttattaattaacattataccacgggacaatttttggttttatacaatcttttctaaatgagactgatttaatatgtctaatattggtggtattaaaaaaaaaggatttaatccgtattgaagcggcggattaatgatattttaatattttattattgttgattcaaaaacccgtcccgccaaacccgtcccgccaaaaaactcatttattttattaatgttgatcttatttatgatttgattctgaatcattgtctaaatattttaatcgaatgtagaacatagaacacacattttcgtcaattagataatatatgtccgtttttaaaatttcgaatcacagtatatatatgcataaaaaattgattttttttattttatgtattatatgatgattcaaaacagttacaaacaaatcaaacaaagataataggagaatcataattctaaatcttaatcaaatattctaaatatctaaattattaaatatggaatatccggtgtatgagttgggttaaatataacccgacccaacaaattttttgtgaaggattttataaaacgggtcagatatccgattaacccagaagcatttttatccatccgtcaccaaattgttgcaaaaatactagtatagatgtatgttgcggtttgtctaatagatatttagactattgttgtaccctataaataatgtactactaaaagcaaaatgtgtatttagattaacttatttaccatttttacttcttcttctttggtaaataatagtactaagtaaaaacacaacattcaacctttcccattattggaatggtaatgtcttcaataccattgaccatttttaaggaatgtctttattatttttggaacctaaatgctaatataccgcaatcacttatgagtattgaagttgagatagaggaggtacaaggagaccttatctgcagaagacaaaaagccatttttagtaaaactaaagaaaaaaaaaaacaaagattgaaacacaaatatgcgccactcgtagtccacccctatctctttggcaaaagccaacttcactctttttctttttatatattaaaaataaagattcttaagcctcttcatattttgctttttgtcaactcttcctttgccatctgttacaaacaccaaactctcctgattcatcagttttaagtcttcttcaagtcccaggtaacttctctcattttcctctgtgttttgtcacttttttctagcattcttgatctgtttgttcttgtcacat

SEQ ID NO: 5262 - DNA, 5798 bp, Arabidopsis lyrata
  Intron number 3 from transcript 320100 (locus 320100) deri ved from phytozome v7.0 (chr-ID scaffold_4; pos 1089582 to 1095379)
aggcaagaattgcactcgctgcaagaaaatcatcggtacgtatttgcttacaaactaaaaaactgttaataatcatgcgttaattcaaaactaggaaatacttagtgaattaattgtatcttatatactattgttgatcttttctcacttgatttctagctaaaacttttctctctttaattatttttgcttaaaactaatgttcggctaaaattttgcggattaattaacatatatatatatatatatatatatatatattcttcttcttagagttacttgtttgtgataattaatattcttatatacatttagacaaaaacagccagttacatatacaggtaacaaaatggatgttatatatgctactaataaattactattttcttagaaatgcatatatatcttatcagctagattggagaaaacggattaataggaaccatgatcgagagagaaaacatggtgaaaaactcaatttctcattaatgatctgattgttacaacaattatagtcaacagactcaactaaaccagaaataaccaaagagattcaccttaattagatgaataaaccggactatacagagcccttaaccaagcctattatatacaagtatagactatagtatggaaactatatacactctaatagcctccctcaagatggcagtggggcaaagatgttgcacactcccatcttgcctgttagtgcatgaaactgagcaggatagataggctttgtcaaagcatcagctaattgatcttcagtagccacatacatggttttaagaaaacctgattcaatcgcctccctcgtcttgtaacaatcaagctccacatgcttagtacgctcatggaatactgaattgtttgcaatgtgcaaagctgcagtgttgtcacaatagagataagctggaggagtgaatggtaccatgaagtcatcaagaagccgtgatagccaaatcatttccttagtgccctgagacatagcacgaaattctgcttctgctgtgctcatagagacggtttcttgcttctttgatttccaagaaactaaagaatctccaataaacatacagtaagcagcaacacaacgtcgagaatcagtacatgaaccccaatctgaatctgtataacctcgcaagtcaaagttaccatctgcaggataaaaaagtccttgacctgcagtacccttcaagtatctcagaaccttatgggctgcattcaaatgtatatcccttggatcatgagaaaactgacatagagtattaactgcataagcaatgtcaggtcttgtaatctgcaaatacatcaatttcccaacaagcttgcgatattgagttgaatctttcagaggaacaccatcttccttgttcagttttacactcgggtccaaaggtatagatgatggtttactaccaagaaaaccagtagtagacaataactccagaatatactttctctgacaaatggagattcccttagcagatcttgcaatttctataccaagaaaatatttagctgctcccaaatctctcaacttgaaataagatttcaactcatcagtgaaccttgccacagcatcatcactattactcactatcatgatgtcatctacatacaccaaaactccaagaaacactccattagcatatttaagaaacagagtatgatctgcattagacttcttaaaacccattcccttcagagtattagagagcttaatgtaccattgcctagatgcttgttttaggccatatatggacttatgtaacctacaaacagcattaggaggcaaaatttctccacttagctcagcataaccttgaggaatcttcatatatatctcctcatccaagtctccattcaagaatgcattagaaatatctagttgatgaactgaccacttcaatttagcagcaagcaacaacatcattctgacagaagtcaacttagcaacaggggaaaaagtttcttcataatccaaaccttcttcttgagtatagcccttagctaccagacgtgacttaaatctctcaatacttccatccgcattatgtttgattgtgaaaacccacttacaaccgatagcctttttatttgggggaagactgcatatactccaggtccgagtcctagtcatagcaccaatctcctctttcatcgcatcacaccatgccttaaaatctttagcttctgaatatctttgtgggataacagcatttgtgatattattaacaaaggcacgaaaaggctcagctatatatgaataagagatataattgttcatagggtataagatattactagtaatagtataacaatgaaaatcctgcatgtgttttgggggtttcttttggcgtttagactttggttcagaaggaaccagagcctgagaagatgacacatcttgaggtggatgtgcatcaggaattgatgtttgctcaagaggcaaatcatcggttagggcaagcaactgtaatagaggaaagaaatctttgatatcatccttgatagtagatgatatgaaaggaaaaatatcctcatgaaaaatgacatgtcttgaaatagaaacagcatgtgtctctatatttaatagcttgtaccctttgtaacctagaggatatcctagaaacacacatgctctagccctaggttcaaatttatgtctatgcttaggagaagtagaactataacacaaacatccaaaagtctttaaagactcataggtaggaggagtgtttttaagcttctcataaggagacttattatctaaaacaggggtaggcaatctatttatcaaaaatactgctgttaaaacacaatctccccagaattctaaaggtatattggactgaaataacaaggctctagcaacattcaagatgtgctgatgctttctctcaaccacggaattctgttcaggagtttcaggacatgaatgatatgcaacaatgccatgttcagcaaaaaaatctttaaattttaattcatgtgcattgtctgatctaaccgattttaatttggtctgatattgtgtatgaaccatattaacaaaagtaggaaaaacatgtgaaacatcttatttgttctttaatagataaatccaagtggctctactaaaatcatcaacaatagtgaggaaatattgaaaaccatctttagtaggaacagagaatggaccccaagtatctatatgaactaaatcaaatgcagcattacacatattctgtctagattgaaaggataaatgcttttgttttgataaatgaccaacatgacaaacatgagaatgttctttatttatcttcttatctttaatattcaacacatcagacaacaaatcgattttagaataagcaggatgacctaatctcttatgccatgtaatagaatcaacaacaacagaagaacaagtagaaaattcaggacacatagaattggtaccttttaaagacacagaatgattattttcattgaaatccagaacataaagattcccaacttgactacctttaccaatcatcaactcctttgtaagttcctgaacaaaacatgcatcagatgtaaaacttacttttgattttaaagtctttgtaagaacactaacactgatcaagttgaatttgaattcaggaataaaaagcacattgtggagagagattgcatcagacagttgaatgaatcctatgcctactatcttaactgtacaatcattgggaagtttaacaaaggtattttctagggacctaaattctaagtaaaggtctctattgtgtgtaacatggtgagtggctcctgaatctattacccaagctctaggagacacagctggttctcgagatatagatgaaacgagcatgtcataataagcattagagtaaagtgccagaaatgtacctgagatctgtgagatcataggtacagagggtgttgcagaagtcgaagcagaagatgtagtcggcagtgatgtggaagatggagtgtgaagcttggtactaagataagaaatcatagtctgaatctgatcagtcgagaattcctcacaataatctgtcttctcacttggtgaatcattcacaggctgtgttactgcaagattagtagtaccaatggtctgtgccttcttccactttgaaccaggtggatacccatgcagtttataacacttgtcagccatatgaccaagtttatgacagttagagcacttaggtttctgataagaaccatgagccagattgacttgagattgattaacaggggaagcttggatctggaatgcagcagtaggattagacaaagcagaactcccaacaagacgttggctctcatcttgatccagcatattataaatctcagtcaagcctggacgtggcttcatattcagaatttgacccctaatgtgagcaaaattatcatttaatcccataaggaattggataatacgactagtctcagcctcctccatcaactccttgacatgctcacaattacacttcttcacagtgagaagtctagtattagctagctgttcccaaagtgtcttcttcttcgtgtaataagtggataaatctaagtttccttgcttcagagtgtgaatggattgttcaagctgatacttccttggaagattgctcactctgaacctcaagaatagatcattccacatttcaaccgcatcctcatagtacaagatgctatcataaatctccttactcactacattcaacaaccaagctttaaccatgctattgcatctactccatatcttgaacatttgatcattaacatcaggcctaggaagagttccatctacaaagctcaacttattctttgcatctaactcattcgcatagctatcgaccaattgttataattcgatccatcaagagtgtgagaaacaatgctcagacctggatgatctgatgagtgaaggaagaacggactatgcgcgttgtcgtatgcttcaatcggtgcggaatttgactgataacgatcgcgattagccgtaatcttgagaggcggagtctcatcgacgtcatcggcaactggaaatgaagatccagctcgagtcttcatcggtgaatactccgatgttggagaattactccgattctgcgttttcttcttctgtttcgccatcggaagtgagatcgaagctcaaatgcgtgattgaaagtgaaatcgaagcttcagaaggtgattctgatccgttcaagttcaaatcaacgcatatctggaatcgattcagtgattaaacggtggaaaacgaagaaaaacgaagaaatcaatgagaaatcgaagagaaatcagagaagcacgagcaaaaaatgctctgataccataataggaaccatgatcgagagagaaaacatggtgaaaaactcaatttctcattaatgatctgattgttctgttacaacaattatagtcaacagactcaactaaaccagaaataaccaaagagattcaccttaattagatgaataaaccggactatacagagcccttaaccaagcctattatatacaagtatagactatagtatggaaactatatacactctaatacggatcattaatcttcgtaagactgcaccattgagattacacctttgcaattgagatatcttattggatagattggagaaaatgctttttctgtcggcatgggtcacttatgggattagtcgggtggattaaactggttgtacttgaccatgtttgttctatgtatatatattaactgcagtaatcttatgtaataaagcaggcacctaacgggagagcaattaa

SEQ ID NO: 5263 - DNA, 7507 bp, Arabidopsis lyrata
  Intron number 12 from transcript 481579 (locus 481579) der ived from phytozome v7.0 (chr-ID scaffold_4; pos 10639905 to 10647411 reverse strand)
gattctctgtggattatctgtttctcttcacatagctggatttttgatggagttgataaaccacttcaatgccaaaaaaaggatttgaatttgaaggtttctaaattctcgtttttaaaattgctttcttacctttgttccaacttccaactagatagtaaagaattgcaagcgataatgatatacaccgaagtcgtacaaataacctggatgtctttttaaaaaattttggttacatcgatgaataattaaaaggtaaacaaatctgaacaagaaaaattaagttcgaataatttaattagcttttaatgtatcaatctttctaggatctttggctattgacctgttgtttacacactggctagtgggccagttgccactgattaatttaattattaattgtttgttcatttgatttaactatttttatttcacttaattatacactgatccatttatattttgtttctctagtttctctaattttctatatattaaaatagggattttcttgataatgtgtcaaatccacaatttttctaaattttttttatttttgatttatttaattccattatcggtcttgtcaaagactttattaattcaatatattccttatttttattaactaaaacttaccaaaattaaatatctcgaattttttaaataagaaagcttctataaaaagatattatttctactaaatgcgttgtgttttttttttttctattgaaaattaaacaatataaatatatactttatgcattttaacatgaaaaattatttcatatattatataaatttaaattgaaccaaaaatctatatacctcaacgtataatgcgtaaatacaaatttattttaaaatataaattaataaaatatttaaaattttatttgtaattttatttagaaactaaaaagttgtgttatttaaatatcattattttaatttaaaaattttgagtttttttttaataaatcgttctatcaaaaaaattaatcgttctaatttttcataacaaacaccaacttcaaattttatattctgcaacaaaaggaattgtctttaacttttttttaacatatatccattaaaatccatcattaattttaaatccataatccagtatctgggatattttaaaacgttaacggcgtttgtttttgtttctgtcatctttgttacgttcgaagccgttaaagtggtactgttaggtttaggtttaatagttaccttttcattttcacatactctttgcctctttcttcgcaattttgaagctacatggatgaagacggagagaaacgtgttcgtaccaaacgatcatgttctcctgaatcttccgaaaaaagatctggcgatgaagttgattgggtaagagatttgccagaatctttgctttttcatgttctcctgaatcttccgacaaaagatgtggttaagagtagtgtcttatcgagcaaatggagaaatctctggaggtatgctcctggtttggacttggactgtcgggatttcaaggaattcaatgctgttgtgagttttatcgaacggtttctgagtttcaaccgtgagtcatgcttaaacaagtttaagttaagaagctattgcgatgttgatgaggagactgaaaacgatatcaggcggtggatcaacactattgttaagcagaaagttcagtatctcgatcttacgtggagtgcagtggagatacctccaatactttacatgtgtgagagcttggtatctttaaagctttgtggcgtaatcttgccaaatcttgagtttgtgtctttaccttctctcaaagctatcgttctagagtgggttttgtttgcaaatgatttggctttggaaatgcttatctcaagctgcctagttctcgaaagcttaactttatgcaaaagtccaattgacaatgtaaaagttttacgtgtgagctctcagtctctattgagcttcaactattacggccccaaatacaaaggtctttatgataaagatctagtagttgaaattgatgctcccaagcttgagaatctcaagctctctcatcaagtaactgcaagtttcataataaagaattccagttcacttgtaaaggcggatatcaatattgagtttaactttggtttgggaaaaaagtttgatcccaaagatctaccaaagagaaaaatgattcgtaattttcttgccaggatctctagtgtcaaaaatctgatcatcgctccatgtactcttgaggtaacctatgttgaatccgcgcaattttaaggttttaactttattttatcagcttatcttaaagcttttttttggtggttgttgtaggtcatatatgattactcaagatgtgaaccactgcccttatttcgtaatctatctttcttgagtgttgacttctatgacgacatatgggaaatattgccattctttcttgagagctgcccgaatctaaattctcttgtcgtggtaaggattgtttacttaaaacttatgtactttctttggtataataatgaaaatggggaaagtttactcaaacttgtttcattcacttggttgtaatatatcaggaatctacttcttatccaaaggagagaactagtatcttatctcgacctcggcgtctcctatcatctctcgagtatgttaagattgaatcgtcattagacatgatggagttgaaattagtgagttactttcttgagaactcaccagtcctcaagaaagtcactctatgtttgaatgattgttccagaaaggaatctgtcatcctcagagaactccttaccattccaagacgctctagctcatgccaagttgtcgtcctctgatcctcattgacgaacatacaatgttttccttcttcattgtggtgactgttgtgttgtagatcgtaacaagatcatatgtttggcttaaatgtttcaattgaaccaaaaatgtaatgtggttcgtgtaagacccaaggattaaagtttccagatactctttattaatgtgaactacatatgtgatttcttcttcattgtggggactttgatgtcttgtatgtacatcgtaagaagatctgatgtttggcttaaatctgtatttgttacttcttttgactcaaaaacatgtttttggtcaacaataattcagacgttgagtagaaaaataaataatggtataagatctgtgtaagacccaaagattaaagtttttagaaacgttataataggatactgtgtcatataaacttgttcagtggcagtatttcaccatggttaactattaccatggctccattcggatttgaccatttcatgatctctaggttactatggcaagattttccttgttaatgtcaaggaaaatcttgccaatgtagaagtccccgtccatgtagaggatgcagcttttaacgccaatgtagacgatgcagcctctaacgccaatgtagaagtccccgtcaccaccccgtttctcctcacgtggcaggaaatgttgccctcttctaagatcctccagatgtcggtagcgtggacttgagcaacatcttatcctccaaaaggcaaaatccatactaacacctccaaaacgcaatgatcaatcacagagtaacccgaccaaaactgaagctttatgttataggaaaatggtaggctgggatgacgtggaaggttaatgaaatctaattggtggaggtgtaagttgtgagttggcaactaatgattggctggaaatgaggagaagaactgaagctaaatagaattcgaagatcgattggggaggataaccagaaaaatatctaagtttgtatcttcttcttcttcaattctctctgtaaactctttagggtttttgatatctcattgttgctagagctgtttctacttctaagctctatcacatgagatttggattctcgttttatgaacgacgattcaattgtgtttatcagaatctattgtgtttatcagaatcgtgagttttactgtatcaaaggtatcagagccaacagattctcggaatccatggcggagacaagatcgcaaactccaatcaaggagacggtggctagagaagcgaccgcagtggttcgtgaaacggtataagagatgtggcttcgatcgcattcgagatacgcagatcctaaaaggttagagatagttgattttccacgatttcatggtgataaaatcatggattggttgtttcagattgaacaattcttcttaattgatcgtactccggaggaatttatagttggtatcgcttcaatccatttcgatgacattgttgcgactttgcaccaatcaattgtacaatcaatgtggtggaagcatgttaggcatgattggtggagttacaaactgctgttgcaagtgagatataataagcatgtggatgattcgattgcaaaactgaaattgttgcaggaaattgaaggaattgaggtttatcatgctcgtttcgagtcgattagcactagagtgaagttagatgaagattactttgtaagtctgtatttgacaggactggaaaatgatactcaagtgaatgtcaagatgtttcaacctcagacgattcaacaatgtttcttgattggaaaattgtatgagcgagcacatcccaagaagaacaatgtaaacaattggtctggtgctaaatggagtggaagtagcaatcagtctaaagggattttatcatctaaaccggagactgatcataaaacagtacttcttactagtatggagagacctaaggatactacaacgcagcctcacaaagtcttatccactgaagatatgagtaagcgaagggatcaaaaactttgttatgttggtgatgagaagtacaaaaatccacgatttggagctgaagaggatggtggggaattggaagaagtacatgcaaagaaggttgaattggaggaaactggagtaatagctcatatttctgttaaagcagtttcaggaatctctgattatcgaatgatgagggtgaagggttcttatgagaagcaagtcttgtatatacttcttgactcgagttctacacacaacttcatggatcctaaagtagctgagaaattgaaatgtgttttaaaacctgcaagtatggctagagttttagtcgatgatgggagaatgttggaggttgatgctaaaatagataagttccaatgggaatttagaggcacacaatttcaggctgatcttatgataattcccttgaaggggtgtgatatggtattaggcgctcagtggatggggacattggggccaataacttgtgattttaagaagttagagatgcatttccgtttaggacataaaaaggttcttcttcagggtattaggcaaggctccgtcagagatgtgaaggcattaaagcttcataagcggagagaagatcaagttcaaccttccatgatatgtgttcatgaagttcctacggaggaactgtgctctttggaagctaaacatcactctagccaaacaggttttgaaggggagcaattggtgaaaagtttattgctgcaacataaaacgatttgtgccaaaaaatcgatggaaatgttggcgtggactgatgcaaattcagaactgaaattacacaaggtcatttgttcttcaagagaagaaatcacagggtttttcttcgaagtggcggattggtgtgagcagtcaacatatgtctgtgggctgaatgtggtttatgtactacactggtttgatagaaccacttggcttaccaatttttggtggagtaagtttttaaaagattggtgttttaagtacaaaactgagatggcgaagaaatggaaactttgaggtgctaagaagtatcaacggaggcttaaatacaacaagttcttatgatattgagagaaatccgtctcatcattactctgtaaattggaaaaccatgaaccttgaggtcaaggttctctaaggaggggagatttgttataggaaaatggtaggctgggatgacgtggaaggttaatgaaatctaattggtggaggtgtaagttgtgagttggcaactaatgattggctggaaatgaggagaagaactgaagctaaatagaattcgaagatcgattggggaggataaccagaaaaatatctaagtttgtatcttcttcttcttcaattatctctgtaaactctttagggtttttgatatctcattgttgctagagctgtttctacttctaagctctatcacatgagatttggattctcgttttatgaacgacgattcaattgtgtttatcagaatctattgtgtttatcagaatcgtgagttttactgtatcactttacgagccacacaaactttcacttagctgacggaagagagccttgagaaggaggaagcaaaacatggcctcagacaaacccggacatcatcttaatgagagtataaataaaccatcagggataagagaagtttttttgtgctaataaacaatacgcattctagctcctcacttcaaacttttcttaatacacaaaccaacaatgacaaggaatagaacttattactgcacatttgaattgtggttgatgctcattggaaagggaagctccttataatagcccgattacattatttccaaatccgtgtgacacataaaataccagaataatatgaatgaaagtacgaaagaatgtgtattttaaagataagaaagctagtttgctcatcatgcaagttagaaggttaaatagcaagaaagacactgccagggtacaatcatatcctagactgtttgtaacatgcctagtggttgattgaggtattgattgaccgaagagcacaactcggcatcaccttcagagcttggctcctgtaaaataagtaagaaaaatgttagtgataattgagtttggtcgtttgtcttgtataattatataagtacgcattatgttaagtatgtatgtattaagagagtcgtgaattatttaccaagtaagagtagttatgttaagagtcataagtgaagagttacaactcttgttgttagtgttgtttcggtcatgtcggttgactatattaagatgatatcttgttttgtaacatatattcagaactttttttttttttttttttttttgacatattcagatattcaatacaagaagtttcagttttttttaataactctgtttctctctttcgtaaagtctctctgccttttaattatcaaagttcttcaatacaccaacaaaaaagagttatgagaaacacttaagatcaaagatgaaagtaattaggggaacaaacatacacacgtatctttaagaaaacaaataagtgacctgcatggccaacagaaaaacttgcggtcatcactgttgaacttcagaatatataagtgacctgtctgatgattgagcaacctaaacagaaactagtatcatgtggtcacaatctgaaattaataatgcacattctagtaacctttgtggattcttttgttatcttcacatagctggatttt

SEQ ID NO: 5264 - DNA, 22304 bp, Arabidopsis lyrata
  Intron number 2 from transcript 913177 (locus 913177) deri ved from phytozome v7.0 (chr-ID scaffold_1; pos 15568174 t o 15590477)
tattgaaggaaacctgttcaccggtcagattccaagttcgatatccaatttgactcggttatctttgcttagtcttggcaacaaccgcctctctggcgcaatcccaaatatatttaaatccatgaaagagctccattatattctcttgatctctcccgcaacagattcttcgggaaacttcctccgtccattgcatcgctggcaccgactctcacctacctcgatctgagccagaacaatctctcgggaacgatcccagaatatttatcaagattcaaggcgctctccacattggttctctccaagaatcagtactcgggggtcgtgccgatgagtttcgccaattagaccaaacttattcatcttgatctctcccaaaatcttctagccggtccattacctgtcttgaagagcattgccgtcatcgaatctctggatttgtcgtacaacaagtttcacctgaaaacgattccaaaatagatgacatcgtcaccattcatctactcgttgaagctggcaaaatgtgggatcaagataagcttagacgattggaagctagcaggaacctatcactgtatatgaagcaaatgcagaatcttggagtataagtaacaaggaagaagaaagttaccagaatatacttattctgttaacagagaaaacagagtattaacagggttaatgactcattgtacagctaactcttagctaatcttatctcttactatataaacaattgtacagcaacaataatctttaatgagaaattagattgttttacttctctaatatggtatcagagcaataaatatctcattcaaaagtttgttttccgggaaacttgagattttccgggaaaattcctgatttcttcttgaagattccacttcagcttgttgtgttcatctttctgatcgccgatcgttgtatcaatggcgaagaaaggagccaagcagctcaggaatcgttcaacatctcaggattctggtgaagattcaccgattattcatccttccgcttcagctctcgacagatcttctccagctcgtacctccgtgaatcgtctaccggtggattcagattcgattgatagtcaccacaatccattctatcttcactccagtgatcatcctggtttgtcaatcgtatctgaagttctcactggagataactataactcatggatcattgctatgcgcactagtctagaagctaagaataagatcagctttgttgatggatctatccctagacctcttgaatctgatcgtctttacaaaatctggactcgttgcaacagtatggtaaaagcttggattcttaatgtcgtgtcaaagcaaatctatgctagtgttttatacattcaggatgctgctggtatttggaatgatctttacaggcgttttcacaagagcaaccttcctcagatctataatttggagcaggagatcagttctctacgtcaaggtactatgtctctctctgattactacactaagaaggttactctctgggaacagttggcctgcactaagaatctgatggaaaatggtggttgtcgatgctcacaagtgatgaagttgttagatgatcatgagacaacaaggattactcagtttcttatgggtctcaatgatgattttgctaacatcaggggacaaatactgaacatgaaaccacgtccaagtctctctgatatgtataacatgcttgagtctgatgagtctcagagacaacgttccattcccaatcctaatccttcagctttccaggttaaaactcaactaaataactttcagaaatctcatgttgtatgcacacattgtggattgtctggtcacattagtgacaagtgttacaagatcatcggttatccaccgggatggaaaccaaagaatcaacgtcaaaatcctaaccaacgttttatcactcctgctgcgaatcttgctcttgttgatcctacatctgaatgtgaaaacgagaaaactttgtctcaagaacagcttcagtacttggttgctttcttgaactctaagctgcagccgtctagttcttctcacagtgctagtcctatctcatctgcaaccatcactgaactacctagtacttctgaggcttcttcttctgcattttctcctatggcatgtcagatgactggtacacaatttccttctatattttgttcttcagaagagaatcaatcttatttctactctctgtctgataaattggtcaacatgaataagtgggttattgatactggtgctactcaccatgttacttatgacaagagcctttttcaacaaatgactgttatacaagacactactgtgcagcttgctaatggtgtaggtgtgaaaattcagggtttgggaactattaaactcaatgacagactcattcttcatgatgttctgtttatacctcaatttaaatttcatttattgagtgtgagttccttgacgtctcagataaagtgtggtctatggtttgactcttatggttgtgaaattcaggatcttacaagggaattgacaattggaagaggtaaacttcacaataagctatatttcttggacctgtagtttcagcctgaagagaaagcttcaccaactatctgtgtttcagtcaagattgatgctcacacttggcatcaacgcttgggtcatccgtctctacaacgtcttaaatctatgtcaaattcattgtctgtttcttttcctaaggagttaactccagaacagaaccattgcagagtttgtcatttagcaaagcagaaacatttgccttttgtagctcggaataataagacttctaatgcgtttgatttgatccatattgacacttggggtccctttgcagtgccttcttatgatggatacaaatattttctgacgatagttgatgatcattctcgtgctacttggatatttttactcagaaataaatcagaagctataacagtcttacctggttttgttgctatgattgaaactcaatttgctaccaaagttagagccgtcaggtcagataatgctcctgagtttaacttcaccaagttttacagagaaaaaggaattgtctcctatcattcatgtccagagactcctcagcaaaactcagtggtagaaaggaaacaccaacatcttttaaacgtggccagatccctcatgtttcagtcacaggtacctattgagtattggagtgagtgcattatgactgcagtttttcttatcaacaggttacctacagagaatttggagaataagtctccttatgagatcttaatgaaggtagcaccagaatatgatgatcttaaggtttttggatgtttggcttatgcttccacttcaccacatcagagaaataaatttcagccaagggcaagggcatgtgtatttttgggttatcctactggtgtcaaaggatataagctacttgatattgaaacacatgatatcttgatttcaagacatgtggtttttcatgaggacttgtttcctttagcaaatggagatatgaatcagcaaattcaggatttgtttcctacagtgtctgatataattggtgatttagcagtaggagattctgctatcccagttcagtcacaacaggattcagtgcatcttggtagtggcaagtctgcagtaggagattctgcgtctgtcacacatttaccagtgccaaatccagagaatgcagttgttgttgaagattcaacacctgttaatgctgaagtctccgataatactcttgatgatatcattgatacttcaagaacatcaaaaaggcctacttacttggaggactattattgttactatgtcaacaaagaagttgttcatcctctttgtcagattttaacctatgaaagactttctggtccttaccatttcttcttgactgctattacaaaggagtttgaacctactacctatactgaagctaaaaagcatcttgtttggacaaatgctatgggagaggaaataacagctttagaaaataccaatacttggtctatatgttctcttcctgcaggcaagcatattattggttgcaagtgggtatacaaggtgaaatacaactctgatggcactcttgaaagacacaaggccagattggtggcaaaaggttatactcaaaaggaaggtcttgattatgttgatacttattctccagtggctaaattgacttctgttaagatgcttttggctactgcagcaaaattgaaatggtcactatcccagttggatatatccaatgcgtttctaaatggcgatttgaatgaggagatatatatgcagcttccacctggatactctagacaaggagactctctacctgagaatgcagtttgtcgattaaacaaatcactatatggcttaaaacaagcatcacggcagtggtatctcaagtttgcagagactctggagaatcttggctttcaaactaatcattcagatcatacattgttcacaaaggtcagagactcaataatactcattgtcttggtttatgtggatgatataattgtttcaagtaataatgacgaggctgcagataatctcaagtcacaattgaaatctcacttcaagttgagagatttaggtcctgctcaatattttcttggattggaaatagcaagatctgaagctggaatctcagtgtgtcaacgtaaatatgctttggaactactggattctgcaggattattggcttgtaagccatcttcaattcctatggaacctaatcagaagatgtctgcagatgatggtgaattatatgctaatccagagagctatcgtagcattgttgggaagctcatttatttgactattacccgtccagatatatgttttgcagtgggaaaattggctcaatacactagtgcacccagagttcctcattttaaagcagttttgaaacttctggcttacattaaagggactattggtcaaggtcttttttattcttctgatcctaacatggaattaaaggcctttgctgatgctgatcttagtggttgtccggattcaagaagatctgtctcaggttattgtgtgtttcttggtgactctcttatttcatggaaatctaagaaacaagagattgtgtcacggtcttctgttgagtcagaatacagagcaatggctttggcggtttgcgaaattgtttggattagaagcttgatgacagacttatacatacctcctacttctccgactgttctttactgtgataatgaagccgctatacacattggtaccaatcctgtgtttcatgaacgtacaaaacacgtggagcgtgattgtcatacagtaagagacagagtcaaggaaggaacagttatactggctcatgtacggactgatttgcaggttgcagacattttgactaaagcgatatatcctggacagttccggtatcttgttggtaagcttggcatctcgaatctctttctgccagcttaaggggggctatcagtgtatatgaagcaaatgcagaatcttggagtataagtaacaaggaagaagaaagttaccagaatatacttattctgttaacagagaaaacagagtattaacagggttaatgactcattgtacagctaactcttagctaatcttatctcttactatataaacaattgtacagcaacaataatctttaatgagaaattagattgttttacttctctaatagaacctactactacgtttccatcgatctgtctgaaaacgagatctcagggagtccggttaggttcctcaaccagatgaagtatctgatggagttccgagccgcaggaaacaaactccggttcgatttggggaagctgacgtttgtggagacgcttggaatcttggatttgtcaaggaacttgatattcgggaaggtgcccgcgacggtggccggactgaggacattaaacgtgagtcaaaaccagctttgcggaaagcttccagctacaaagttcccggccagtacgtttgccggtaacgactgtctctgtagatctccactttctccttgtaaagtttagcggctaaaaaaaaagctataattggtatttggataattggatttaatgtgacgcttggattcaaaacgatttgtatacagaacataacaaattacacttggttccaagtatccaacacttctctattttttttcaatttgtattttaatgtttattcatttctcacatgaaagacaagaaactcagaacaaattgtttgtggaaatgaatcataggaaacaaattgatcagagcattataaaaattctggtcacttaaacaaaccaaagtcttaaatctcttaacttcgacaagaacaatatgaccacatcacaaatctaatctcgttacttatgctctacgcaacatccattgattgaatttattatataacttcaaaatttacagcagagcaacgagtgaataacgatttacggattgaattgtatacatgagcgcttaccaatgcctgtaacatgtggtcaagtctctttagtttgttaagctcaagattcacatagatctcatatcttttgtgtataataaacacatgtgaatgtgatcggtcaaagtcgtatacattttaaaaaaaaagtttaggtttactaaacaaaaacaaaaagaaaatagatagagaatacaaaatgaaaataaagttggatctgaaatcttgataccatatctctcaagtcgtctctctacctctattaataatttacctattgcttctctcaatcccaccacactacacgaccatgaaatcttgctccttcggtctcttcatctttgccaccgttatatttctcccgtgtttacgttcgaccggagctgcctcatgtcaccctgatgatgaggcaggtcttctagctttcaattcgggtataactcgagacccttcaggtcttctcagctcttggaaaaaaggttctgattgctgctcctggaagggtgtcacttgcatcagcgaccgcgtcgccttactggaattagacggacgttctgatgctgccgaaacctttctctccggcactatctcgccttcgctagccaaactacaacatctcagtgagatttacttaagcaatctccgaaagatcaagggatcttttccgcaattccttttccaattaccaaagttaaaggaattgtttccattcagaataaccgtctctccggtccccttccaacaaacatcggcctgttaagccaattggtacatttcgatcttcaggagaaccagttcaccggtccgatcccgattaccatatccaatttgactcggttaactcggctcaatcttggcagcaaccgcttctccggcaccatcccaaacattttcaaatccgtgaataagctccaatatcttgatctctctggggccttaatgtgggccagaacaatctatcggggatgatcccggactatttatcgagattcgagggtctctccttattggatctctccaagaaccggtactcaggtgtggtgccgaagagtttcgccaacctaactagattatatgatctcaatctttctcacaatcttctaactggtccattccctatcttggacgtgagtgacatggaatctttggatctctcgtacaaccaaattcaaatgaaaacgattccgaaatgggtgacattgttaccgatcattaactcgttgaaactagcaaaatgcgggatcaagatgagcttagacgattggaagccaacagcactcaacttctatgatgtaatcgatctgtcggaaaacgagatctcaggtagtccagcatggttcctgaaccagacgatgtttttgttggagtttcgagcatcagggaacaaacttctatttgacatggggaagctgacgttcgcaaagcggatgacaaccctggatgtttttgttggagtttgggacagtgccagcgaccgtggctggactggagaaactgaacttgagtcacaaccatctttgtgggaagcttccggcaacaaagtttccggctagtgcatatgccggcaacgactgtctctgtggctctccactttctccttgtaaagcttagcgacaagaaaactatagttcaaaaaaatatttgtattaaagaagttttgtgatatgaagaagcttcataactatgatatgtatgagtgaaagtagtatttaaagaagaaccataaaacaaacaaaattttatagtacaactaaaaatgaacaatttttaataataagaaactataaaacgaacgacaaacactaggacggatatgtaataaataaaacatatctgaataattcgaagcaatctgtctatagataattggagtggacttcactcacgggttcacatatgatttgatctttggttggtttaagtgtctttcgaatgtcttttcgtttctttggatcacggcaagatttgtgacatagacatatatgtacatttgcttggagaattcaagtcgttttttctttttaaggataagattactttcgtgtctttgtcctctgcttgtgagtttgagatagatatctatagacttccttttataataagatgatctttttgactagtcaagtataatgtgtagtaaccaaaaataaattgctattaacaatgcttcaaaacatttttaatgtgaacaaaagttacttgaaaaccaataatttcaaacgataaacatagtccatactgtaatacaaattgtttaacattttttcacataataaatttagtaaaattaatttgttaaaaaaaattagtaaaattaatatattattattctcttacaaagacaaatttgtttttaaatttctattttattttcctttttttttaataagttctgattgaaaaattatatatattgtttttgaaaactacatttgaattatcaaaagacattaaaaaataataatcaaatagcattgtatgaaaactgcaaagacgaaatgtaaaaaaaaataaaataaaaaaaagtgtaaaacacatgaactttaccacatacacacaaaaaaaatcacaaacaaaaaaaacacagtcgaccccaaattactcttcacggaaatgtatcatactcaaaagtacactggaacatggaatagtccattgaaaatctgacagctttgagcaactgccaaactaaatcagaccactattttcgggtttttgcacacacaagttgagacaggaacatatcattacagaaaaggttggtgagtgtttttcagtcggttttcaacttaggtgtcgttatgtcaaaagtgaccctttctaagaaaatatcaatgaggtatattctatgcaaggttctagaccttctagtaaataaatatattacacataagaataaagtttggtagataacaaaagaataaagcatcatataccaaaagcatttcatatgcccacattgttatctcataatatcaccatctcttacggtcacaaaagcattacctttccctctcacaaggaccacgaatatgtaattatgtgttccatgtccaaaattgaattattgaccattacttagaaccaagggttttaactagaggctagagatatgcaaataaaactatgtttgaatttggagttaatggttaaaatgttattcatataatgttgaattgttgggaagttttatcagaatatcattgagttcattaagagatttacgaggatgcacaacgagattcaggactaacaagaaagtaacactcactagtcactataccctataacaaaaaaaaaaaaaaaaaaaacactcactagtcacttctaatacagaaatgtttgagactttacatgcttctttttgtttctattcgtctcccatggcgagttcaagggcgtaatcatctctttcctgcagtgtaacattgataaaactgttaaaagaccaatgccaagaaagactaacacaacttttaaacaattttgagtcctgataataataatgttaagtttgatctctttgacaacatctgttactagtcctagtgaacggcctccaattaaaataaacaaatccccaagtttcttgacagattccagtctatctattcgatgtctctagatacacttcaccattagtctttttacgcatttgttggtttgcaggttatgttttagctaggagtaccaaaagccctaagtttttaacgggtcgcagtctatttgtaacaagaaaattggaccaaggttttgtttttggctctgagaacttacaattggtccacgagcgaagtatcttccaaattgtagccagtagacctgtgtgttatataagacttagaactgtgtaactagaatgtaatgagagaggactagtactgttgcagcagttcttggattttcaaaagcgtaataagttacctcgtcctcgtcttgtgtttctacttcaaggtcagatgtagggaaacccacacaaagaagtgcatacccctgcatgtataaggtacagaacttaaaatgctagttaaacttgaaatcaaaatctaagtaccaaatgatatgtgattatcatgcctattattaccaccagggttttaaacctatgcttcaatataattcatttctaagaataagacgctgttccagctaaaatacgttacgcattctctaaacactaacaattagacaagtctttgacactgtataatgtcaagcaatgagattcacttaggagaatgcaaccttacaattgaatgatttgttaaagctttgcattgttattgttgattcaataagagttggtcctagttttttacagacaccgattaccatcatcacaaattgtctatgtagttccagcctacttgtgtttctagccgtatcacaaacctacctctctaaagcacaaaggtaaagggatcttacctgggacttcagctctgctgatattcccaatgcttgtggctgcctcagctctccagattttacacgtacggcacaactagtacaacaacctgccaaagtaagattgtaaaactgaagctgtagatgagacacataactaagttgcacgctttgccaaagcatacttttaacatgtaaatctcacaggaacatttagactctctttttcatgcatatggctctaacatacgtccattagtgattggcttatcctaatcatctacatcacctttcacatttcaaatatacggtacatgtagaacaacaaggaaacataaacacactttcaaatgttttagcaaccaactgaaacgggtaaagagaacagtaccatgcctgcaagcaaacggaagagtaatgttctgagattcagctgagtgcaatatatactgatcctgcatttcaaatagatttccatgtatcaacaaaatgaaaccagtgataagccagacaacgcggttatatcaaccaaactaagcaatgtctaaaaaactacaagctgattcatatgttttctacaccaagagagccacctgcagagaattcgttctaatttcctccgcttacacatttgaacatcgaaatcgaagaaagagagcatctgaacctaagtagaatctacattagattagccacaaaaaacagctcaaaacataccaagtaagattgatccatagctatacaatacttgaatctctacactccagagcatacattgcgttctatataggagtagttctagaataccaagcaaatctaactaatccaagctataccattctccaattgcagcttcttttctgatatgaaacaattgtgtcgcgaatttaaccataagcagcaaccgcagcaaagaacagcaacattttccgcaaaaatcaaatagcaatacggatcaaaatatacatagggctcaaaatcttacctccggaacctcaaactcgtgaactacgcctcgttgccgatcgtgaacagtgaccttatgcgaaggaacatccaacgatcctctatctgatggagtggaaacttctacaggaattcggaactcacatctcgtagctcctcgacggaaattcggagaatatcgtcgacgattgatcggaaaattctgtcgctgaagcgaagtacaaaatgtacagggcaaaatcagagccatgcttttgggcgattttgattttcgcgactgttctataactcggggaaagagaccaaccattcgctgcgtaaatcataaaccggaaggattttggttttaatttccggtttacaaataattcaataatcatcgagtctaaaccggccaattaaaccaccatatacatctatttccgacttgtgcgtgtaatggatatcaatctgtagagtaagccaacgaactaacgaagcatttttacgtggcagctgaatcgaggcctaggaattgaaccaagacacgtggcgacgctaacaaaacgtggcactaatacgccccatttgaaccgaccaagatactcaatacatttttatttaaatcaaacaataatcattcaattataactagagaaacgaaaaaggaaaaaaattaaaaagaacaaaaaaaatgcaatcggcgaaacagaagataagcgatatggctagtacagccaaagagaagatggtgatatgtcaagcaaaagcagatgagaaggtacccaatcgaattttaataatgatttatatcaacgtgtggtgtgtgtataatatgtagataaatatgattagtacaatgacgtgacgatatttacgtggccatataggcggagcaagctatggcaagggcgaaagaggagaaagagatagcacacgagcgtagaaaggcgaaagaagcagaggctaaaatggatatgcacatggctaaagcggctcatgcggaagagaagcttatgactaagcaatctcactaccacgttactgatcatggtccacatcaaacgcctatgcaggctccggcaccagtcatgggacatggttacgggcgtaattaatcctcccggagttacatccgtgcctccggcagcttatcctcctggagttacctccgtgccttatcctcagacaggacatcatcatcatcatccttactgacccgatctacactgtttttgggacgtttcatgattttctttagattattgggatgtccttgaaattaagtagttaagtgttgacttgatgtttgcgtaaacctttgttgttgatatttatttcggttattccatgcagtatcttgtatttcaagacgtgcacggtgcacctcgatttgggcttctaagtattgcttgtttaatagaaagttagcacacatttgtccaagaacgagacagtttatctgcaagaacttgtattaaaatggtaattcaaagaacatctccctaaaactggattgtggttttggaacacctcctgattgctgtgaatttcgttgtttctaattgtagttctagctatgtcaagacggcagaagaagttagaaccaaacttgaggagcaaaaggtttgttattttcatttttcttcacgtgatctctttcgctgttttccaattggagtcatctttctattgtcctattttggccagggctggtttatctcccatatgagcaatgaaactggtcaacaaggacaggttcgttctccttatgaatcctttaaatgcttatttcattacaagacattttagatatttgcatagtaactgatgttaggatttcttatccctttcttgacgatctttgatactttagaaaaaaagagacaaggaatgacctgatggaactaacagattctgctagagcaaagcttgatcaagcaaagcagatgagatccaaccttatgcaggaaaattctaaggttatttactttagttcgacctgattactcttgatggttttggttctggcactttgtatttgcgatatgtgttttgtcctatatacagatttttttcccttccagtaattccttaaataagaagaagaacaattttgagtacacgatgtgtctctttgagcacttttctgaattatataatttcatgtcagatcaagctatcaattgagcatgtgaagcacaagattaatgagtttaaggtaatcactctctggaattctttgcaagcattgtgatgttgaatgagttcagacatgtaagatttgttcctgcacctggtactatactatgttctttaatttgtgaacaatgcaggcagagttaatgttggtggatatcaaggttctagaagaggaatacacagctctcttgtcagatgagtctggagaggcagagtatctaggttcgctgcagagtcaggctgagaaactgaaggtgacattgatttatttatataggcttggattagattactaactatatgataatgaccacctccacttgtcgcagggaatttcttacattgctaaatgtggttgtggagaggaatacagtgttggtctagattaggccaaagttatacatgcactatcaccatttcaggtatctgtcaaattattatctgaatatgtgaacaaatcgagaaccaaaagtagcttaatgtgctagttctttagaatctgtggttaattgtttagtttgtagagagatagaactatcatgctgtcttgttgcagtatataatgttttacagttgaagaaaattcaagctcgttctgtttaagatcttaaaactaataaagaaagagtagaattagtggcatttgatacagaattctacagaagaagaattggaagtaaatgagtgtttacaattaaatatcgatttgattgcaccactgaacgccataaagctcgtcttgtgattttgggtaaccatgacaaggagtgttttgactatagtgatgtgttttctccggtggccaagatggcgattgttcgtgttgtactatgtagctaaaaagaattatgaggttcatcagctagacgtccacaatgtgctttcttaaatgtcatcttcatgaaaaagtatacatgaagctataataaggaattttgtcacataatgaaacgggcgggtgttgtctttattgatttttatacgaattaaaataagtttttcgttgttggtttgcaaaactggtgaatactaaagtactagatttgaacccgcggtacaccgcggggctataatttttttttaaaaaaaatctaaatataattagttttgtttattaatagagagtataatataatatttcgactattttataaatgtaccattcatatatctatattaatagttttgagtatattaattgtgttttaggtttaaatggtatatctatatatatacacttaaacgacatttggctttctttttcttcttgcctcagtttaggaggaagattttttttgcggtataccgcggagctattatttttagaaaaatatttttttctttaaacttctaaatttagattttaccccgcggtacaccgctggtcgatttttttataactaaaaaattattttgcaaaattttaagttgtatttgttttgttaatattgtttattttctttagtgtttctgattttataattaaattttgatttttaattctaggatttcatctatagtatattgtttaatattaatattgatctaaacccgttgcaccatataaccccgtcccgtaaaattaaacatcatttgttatttttttttgaataatatttttatctactacgggtcgcaagttcatgggataagcccgtagagagttgcgggtttgcgggtcgacccgccaaaagagaagctatcttttgaagccttttgttttgtttagaggttttaagaaaatatctctaaaaaataattttcattatatgaaaaaaaagtagaagaaattgtagtatcaacattcccgatttttacatcactcgttacaattaattttttttttgcagataaaaatcagaagttaactaagtcgagatttttaaaaagattgtgtaaagatttttggtaaattgttgaaaacatatttgatttcaaaatctttacttaaatagataaggaaagattttgtagagacttttgctaaatatatgagaaatgaatttcaattaaaaatttacttaaataaaataaatctaaagaattaatgctaatggcatgtcattgtaaatacttctcaacttcatgatttatttgctaattgtgatccaaaaatgtatatatagatataaatttctacaagttcgttctgattattttctctttgtttattaaatatatattttgttttttgaattacgtggatgatataatcatatataattattatgtgatcatctaatcgttaaaggattaccattctaagcagtaaaaataaagttcaatttttttgaattttttcatttgaaatgctaaattagaatccatttaccatggggttccaaaaatgataatgaacaaacaaaataaataaaattggagatgtaataatgtttacaggcgtcggatttattttaattataaaatagtggaatagcaaactttttcacttgtattttggtttagcatatgtcgggtcttaggtatatcaatatacaatactgtatatacttatatttgttaacttgttataataaacgaaattggccatcaaattttccacaaatctccaaataaaaaccacaacaatttggtatttaaaaacaatttctaaacttgaaagctaccattaatgccggtggtatgtatgacataatctccctcttgttctctttacaattgctaaaacagtctactactaattgcacaaaaaatgttcttacgtaaaaaaagttcatatctttataattttcaataagtaagctttaatcgatcaaaatcgtccaataaatagttttttttttatagtaaccatctcactttgccagtttcaggtgacgatcttcaaataacctctcgttgcaggggacgatcttcatttaggtagtttttcttgccaattttttttttccagaagatcgtccccatcaattgtaggggacgatcttcatctaggtagtttttcaacgtgcatgttatttgccatatatcttctggtgttatatgtatttttttgcttggatagggacaacaacattcctgctgacaaatatgctgatcgagctgctgttgcagttttgtttgaggagtggttggctctagatgagtcaacgaagatccggcacactatggaagcttcttttcgccacactatggaagtttttagctacttaatagggcacttacctacttgatcttttttcttttttcaatatactggtgttatatgtccttcttgtcaaactcgtgtgatccgctggtctagtgttaggagcattactgttttcttcttcaatggcggacccagaaattttttttacccagtgcaaaattataatcgtaaataatttgttttatcatatatactttacaaataaaaataacagaaaaatctcttcaaaaataaaaataaattttgagcaaaacaatttgtatttttaatattagtcaaagttaaactattataataataaaatgaacaaatgttgaaaatgattagttttttttgatgaattgaaaatgattagtttgaatagaagaaacacttaacatatctttaaaatatctaatgaaattattggtatgcatttaacagagattgcaatttcagcaattttaccataataaaattaaatataaaactgggaataggatcttttgtaggattttatgctcattttgtattaaatgttataagtgttcttcaaactttaagaaagaaaacaaaaaattgtatgttttaagcaaaacataagcataatattgtttttttttctccgattgactatcaatcatttcatcgatcgatctgaatacttcgtccatcttggacgcatggaattgagtagatgcaacataaaggggaaacatccagagtttattggccaaggttttttttttgcttaagataaactagatcttaatgccccataatcggtttacaatttgtgttttttttttgtagtgacctctgttttaattttttaattggcaagatttcttcgtcattcgccaatttgaagatagttgatttcgtgtaagtatttgaacattagtttaaattagaatcgtttcttctatgaccactaaaataattttgaagtattacctatcagtttcttgactggaaacaagctgacaagggaattccaaataaattcattgaaagaaacataaatctgtatgggatacacatcatttttaatgttcctttgtgcttgttcaatgatgtttgttttctcttgacgtgtagagatatatctatgtcttttctaacttccaatgtacttgttcaatgatgtttgctttctcttgatgtgcgcagagatttatcttacaataattttactcttcaaagttcgattcctaatggtgattgcgaccaagttaagcataatactgtaatttttttttctccgattgaaccatcaatcatttcatcgatcaatttgcatacttcctcaaatcatcgatatgatcacttcattggtccatccataagatataaccgttcggtcgagaggtagcatgctaatcagttcgttcgagtctcagtgatcttttccgatttcagagatactcgccgagccgcacctctttttctaccgaacaatttatttcgtggtgtgtggattgtgttgtgttgtaagcatataaacagcaacaaaaaaagaaaaaaaaaatagaagtcataaaataaatttgggatattatataaaagaaagtaaacaaaaaatggatgatttatattcataaggtgtaatggtcattatttaagttttaaaatattgataaattatgcatccttaggaaaaatatttacctactaattttttttttatttagcatataaatataagtatgtgaataacgctaatttaaatagatattatcatatttgatacatccttaagaaaaatatttctctactaaatgttttattgtatgtagctaggattgtcaagttggttaaaccaaaccaatccaatccatatccatataaatttagtgtctaatggataatgagtcaatccaattcatttagtaaatggtttggatgaaaccataactcatttgaattattggattcatggattaattgagtttatccatttgataatttttctataatctaaatatttatcataattaataactatgatagtataatcatcatcataccatcatcatttcatcatcatcatcatcatcatcatcatcatcatcatcatcatcatcatcatcatcatcatcatcaaattaaggaagttcctttttattgagaatgaatcacaagagatttgaaggaaacataagtcttggacaaaaaccaagcaaagtttgaactcttatttcccaacaaaagaaaggagagtagcaaatcattacagaagttaagaacaaatacggtaaagcatttttagcctttcaaagaagacgttattgtgaacacgcaagactctgtttgtgcttcacctcaaacaaaccatctggacctgagaatggcaaatagaaacaacgaagaaactgttaaaccatcttctctcacattttctcactggcagactaagtaaactacaatctcgtcttagattcatcatataaacacgaacagatctgaaacacaagctgattttaatcttgaccctttcatagaaagggaacacacctatttagatagaaagagcagattgttcttccacagaaattggatccgaccgaatagtaactatctcgccattgctatctacaatttataagggaagatattagtagtataaactaacccaagtaaagcaaattgattgatacataatagtattttttaccttcatcatcaaccttgtaaccatgtatccaagatcgtgtacatagtaacgcttggacgttactaggaagaagtcgactccggtatttgttgatcaaatgagatccaatactaaaagaagattcagaagctacagtggttatgggtatgctaagaatgagaaaagaatcagggataccacaagagaagctcaacatattaaagaaaccatagcaacaactcaaagagaagctcaatcgtcctagaacatgagaaacaaatgataggagagattagcataccaacacacacaatataaaagttggtgaagaatgctaattctggttcacctaaaacactaacaaagaagacaaagaaaccatgaaaattgattttggctaactcacagaatcagtgacttatatacctttaaaatcattcatgaccaatcattcacgacaaagactagcatgaggaaatgtgttaatcatgcagttttcgaagagaatgatgctacagtcttaaagacaaacggatacagaagaatgctaattctggttcacctaaaaccctaacaaagaagacaaagaaaccatgaaaattgattttggctaactcacagaatcagtgacttatatacctttaaaatcattcatgaccaatcattcacgacaaagactagcatgaggaaatgtgttaatcatgcagttttcgaagagaatgatgctacagtcttaaaatttctagaaatactcaaagaggaagatgaattctgacctgaaactatagccgtactagttctcaaatcccccaaacaaggtttttctccagtttctcaactacccgaggttcgtggtggagaaaggtatgatagagacttagaaaccaccattgcccctaaaccaccagcttctccgacgaatcgatgaccagacttgatcgacaaaacagaagaacgagacccttaagtatcgaagcttccgaaaaccctttaatggcgaagatagatagattgatggtggtgagagattgatgatggtgagaggtgtgataatgtagcttataaatataattatgtaaataacgctaattaaaatagataatagtgtatttagcattgaaaaaaaagacacatttcaaaaagaaggatactacgtgtcaatattctcaatgtttaagctttgtgaaaaccttattttattatataaaattagaacgatccggtgttcttgatgactttgggaatagttttttttcctttttaaaatgttttatttatatgcttttgaggacagttgactttcatcacatgaacaaagaggcgttgacgcatcaatacctagttgcaaagagaagaacagaattctcatttgccagttcggaacttcttaaggactgtctcgtctctaattgttttagaaaatgaatcataagaaacagatcgaccagagcattatagagatttctgccaaaaccaatgtcttaaatttattaacttccgcaataacaacaagagaacctcttcaagactctggtaacaacctcatctcaaatttcgttacttgtgttctacgcaacaaccattggcttacaaagatgtcttaaaatcttccacaagaatataatgaaaatcgccggttaataaattcaagaattaccgcagagtaggagcgcttaccaacggtcatcaatagtctctttactttgctaaaatttcatatctaatgtgttcgttcagtataataatatacaaaaatattctatagcaactagaaagagtgttcaagccagtcgtaggaatgataaattcggccacgattataattccactaattacggccacatgcaaatggatcagtcaaaatcatcaactttcttttattaaacaaaaaaaaagtgttactagaaatagaaaatgcaaagagaatgaaattagatctaaacctatgactttgcagctctcaagtcgtctcgctcccttcctctataaataggtaccaaatgcttctctcagtcccaccacacaaacacacaataccaccatgaacacttgctcctttattttcatcttaggtgctatctttctccggtgtttaagttccacaggagctgccacgtgtcaccctgatgacgaagcgggtcttctaggtttcaaatcgggtattaccaaagatccttcgggcattctcggctcttggaaaaatggtactgactgctgctcctggagcggtgtcatttgtatcaacagcgaccgtgtcacagcactaagagtgtacggagatttcatttctagccgagcctttctctcgggcactatctcgccgatgctggccaaacttcaacacctcgaggggatttacctcacctctcttcgaaagatcactggaccttttcctcaattccttttcagattaccaaagctaaagtatgtttacattcaaggtagccttctctccggtccccttccagccaacatc

SEQ ID NO: 5265 - DNA, 583 bp, Arabidopsis lyrata
  Intron number 1 from transcript 496351 (locus 496351) deri ved from phytozome v7.0 (chr-ID scaffold_8; pos 20199054 t o 20199636 reverse strand)
ttctggaaatttccgtttatccgattcctactcacgtaaacctctctctatctctctctctctctctctctctctctctctctctctctctctctctctctctgtatatcgtctctgtttctctgtgtttgatttcgcaatcgaattctgggttttggaatcttttattgtggtttgatttcatattcaaattctggggtttggaatactaagctagaaactgagattccatagtggatacgttcgaatttcaaaagtcaatttactctgtttatggatgatctgctagaaaccagattttagattgttcttttgttccaaatttgattgtatttccgaataatatatgaaatgaccttccgatttatctggcttttatcagtcatggttggttgctgaacaaatttgaataagcacatgtactaaaatcttctggttaaaattaggtttcaagtggttatcctctagtgttcattcgtagtttgagctagctttagagtttgtgatattttatccatgtttatgaatttcattagctgaatcaatcactttccttttatctatgatcttcaaacaggagagg

SEQ ID NO: 5266 - DNA, 771 bp, Arabidopsis lyrata
  Intron number 4 from transcript 311847 (locus 311847) deri ved from phytozome v7.0 (chr-ID scaffold_1; pos 2941329 to 2942099 reverse strand)
catccatctttcttctgcgatattgattacgagaggttagcttttcatacgattcttcgatctgaattttcgttcttcgatcgatcttggtagaatcagtttcgttccgttgtcctttacttcttcttaatcaattctatcggatttttatttgttattcacatgtatctctctgatttcatgctcgttcttgataggatcgtgtagattctttgattttgtggcttagcacttcatcggttgagggaattatcgttctatagtgcaatcgcactgctgatttcttttttttctttcttttcactgctgatttctttttattctagcttttttctaaaaaaaattcctgtcagtcgatctggttttgtgaattttctgttgtgtgattgaattgttgttagatccatattactgaacttaattcatctattggtccatcacaaacgtttttaattgtcgatttgaattgttattcggtagttctggagcagcataacaatccattgtttccttcttcttgattcaaagttgtggaaactctctgattgtttgctattgatctcctttattactgatttgtatggatttagctcgcttagcccagcggttagagcaccactaattttgtggtagaaatcggttcgactccgatagcggcttttaacaactatagttttgattaacatgactatcatattgattatacatgtctgctgtttttattgattcattatgatttgatctttctgcagatttacttgacaagtaacc

SEQ ID NO: 5267 - DNA, 5003 bp, Arabidopsis lyrata
  Intron number 1 from transcript 901265 (locus 901265) deri ved from phytozome v7.0 (chr-ID scaffold_4; pos 16304805 t o 16309807)
ggtttttgttgaaagttaaacttgattttgaatcaagtttaattattgggtcaattacccaataatcatttgatggaccaaatccaagttctagagttttctctagaaatatcataattaccacctccttaaaatgttctagaaattttctagaatcatcttccacctccttaaacataaaaatctatatattcttatagaataatctagataattagaatattgtaatctagatattatgttaagaactctctagatttaggattaaaatattttagatattttgtagtttggagactataaatacctcctccctctctcatttgttgtaatgttatgaagttgtcttcaagttaaaatcaaagtaataaaagttatatttcctaaaactctctctcaaacacttaaacactttcttcattacctctaaaagaattttactctaacaaagtggtatcagagcttgaagatcctaaagatggcgagtaacaacgttcccttccaagttccaacgctcacaaagaacaactacgataattggagtctacgaatgaaggctatgctaggagcacatgacgtgtgggagatagtcgagaaaggtttcgttgaaccggagaatgaaggtagtctttctcaaactcaaaaagatggtttgagagactcaagaaagagagacaagaaagctctctgtctaatctatcaaggattagacgaagatacgttcgagaaggtcgttgaagctacatcggccaaagaagcatgggagaagcttcgaacctcttacaaaggtgccgatcaagtcaagaaggtacgtcttcaaactctaagaggagaatttgaagcattgcaaatgaaggaaggtgaactcgtctcggattacttctcaagagtgttgacgattactaataaccttaaaagaaacggagagaagctagatgacgtgagaatcatggagaaagttcttagatcgttggatccaaatttgagcatattgtcaccgtcattgaagaaacgaaagatttagaagctatgacaatagagcaacttcttgggtcattacaagcttatgaagaaaagaagaagaagaaagaagatatcgtcgaacaagtcctcaagatgcggattactaaagaagaaaatggccaaaattaccaaagacgaagtggtggtcaagtacgaagacgaggtcgtggatatggaaatggacgaggttggaggccatatgaagacaacacaaaccaaagaggagaaaattcatcgagaggtcgtgggagaggaagttcaaaatcaagatatgataagtcaagtgtcaaatgctacaattgtgggaagtttggacattatgcttccgaatgtaaagctcctagcaacaaaaaagtcgaggagaaggccaactacgttgaagaacaagtccaagaagaagacatgttattaatggctagttacaagaaaggtgaacatgaagagaatcataagtggtaccttgatagtggtgcaagtaatcacatgtgcgggagcaaaagtatgttcgcggagcttgatgaatcagtgagaggaaatgtggctttaggagatgaatcgaagatggaggtaaaaggcaaaggaaacattctcatccgattgaagaatggagatcatcaatttatttccaacgtttactatattccgagcatgaagacaaacattttgagccttggacaactcttagagaaaggttatgatattcgactaaaagataataacctttctatatgagaccaagaaagtaatctcattaccaaggtaccgatgtcgaaaaatagaatgtttgtccttaacattcaaaatgacatcgcacaatgtctcaagatgtgctacaaggaagagtcttggctttggcatcttcgattcgggcatctaaattttggaggattggagttgctttcgaagaaagaaatggtgagaggactaccttgcatcaatcatccaaatcaagtgtgtgaaggatgtctacttggaaagcaattcaaaatgagctttccgaaagagtcaagtacaagagctcaaaaaccgttggagctaatacacacggatgtgtgtggtccaatcaagcccaaatcacttgataaaagtaactacttccttctctttattgatgatttttcaagaaaaacatgggtttactttttgaaagaaaaatccgaggtgtttgagaacttcaaaaagtttaaagcccatgttgagaagcaaagtggtcttgcaatcaaagccatgagatccgaccgtggaggagagtttacaacgaaggagtttttaaagtattgtgaagataacgacattcaaagacaactaacggtgccaagatcccctcaacaaaatggtgtagcggaaagaaagaatagaacaattcttgagatggcgaggagcatgcttaaaagtaaaagactaccaaaagagttgtgggcggaagtggtcgcatgtgcggtttatctattaaaccgatctccaacaaaaagtgtttcaggaaaaacaccacaagaagcatggagcggaaggaagcccggtgtttctcatttaagagtctttggaagcattgctcatgctcatgtaccggatgagaagcggagtaaactagatgacaaaagtgagaagtatatctttattggttatgataacaactccaaaggctacaagctctataatcccgatacgaagaagactataattagtcgaaatgttgttttcgatgaagaaggagaataggattggaaatcaaatgaagaagattataacttctttccacacttcgaagaagatgactcggatctaacaagagaagagccaccaagagaagaacctactacaccaccaacttcaccaacaagtcctcaaggagaagaaagctcaagtgagaggactccacattttagaagtttacaagagctctacgaggtaaccgaaaatcaagacaaccttactttattttgtctatttgcggagtgtgaacccatggatttccaagaagccattgaaaagaagacttggagaaatgccatggatgaagagataaatgcgataaaaaagaatgatacatgggagttagcttcacttccaaatgggcacaaggcgataggtgtgaagtgggtgtataaagcaaagaaaaattctaaaggagaagtggaaagatacaaagcaagattagtggccaaaggttatagtcaaagagccggaatcgactatgacgaagtatttgctcccgttgctcgtctagaaacggttagactaatcatttcactagcggctcaaaacaagtggaagatacagcaaatggatgtcaagtcggccttcttaaatggagaccttgaagaagaagtttacattgagcaaccacaaagctacatagtcaaaggagaagaagacaaagtcttgaggctaaagaaggcgctttacggattaaaacaagccccaagagcttggaatactcgaattgataagtacttcaaggagaaagacttcatcaagtgtccatatgagcatgcactctatatcaaaattcaaaaagacgatatattgatcgcatgcttatatgtagatgacttgatattcacgggtaacaatccaagcatgttcgaagaattcaagaaagagatgacaaaggagttcgagatgacggatattggattgatgtcttactacctcggaattgaagtaaaacaagaagacaatcgaatcttcattagtcaagaaggctatgctaaggaggtacttaaaaagtttaagatggataactcaaacccggtgaccacaccaatggaatgcggaatcaaattatcaaagaatgaagaaggagaaggagtggatccaacaacctttaagagcttggttggaagcttgagatacttaacatgcacaaggcccgatattttatatgcagtcggagttgttagtcgttacatggagcatccaacaacaactcatttcaaggcggccaagaggattcttcgctatatcaaatgtactataaactatggcttacactattctacttctaatgattacaagcttgttggatatagcgatagcgattggggtggagacatagatgaccgaaaaagcacaagtggtttcgtgttctacattggagatacggctttcacatggatgtcgaagaagcaaccaattgtcactctatccacttgtgaagcagaatatgtagcggctacttcatgtgtgtgccatgctatttggttaagaaacctcttaaaggagctaagcttaccacaagatgaaccaacgaagatctttgtggataacaagtcggcaatagcattggcgaaaaacccggtcttccatgatcgaagtaaacacattgacacacgttatcactacattagagagtgtgttaacaagaaggacgtgcaattggagtatgtgaagacacatgatcaagtagccgatattttcaccaagcctctcaagcgcgaagattttatcaagatgaggagtttgcttggagtagcaaaatcaagtttaagagggggtgttgaaagttaaacttgattttgaatcaagtttaattattgggtcaattacccaataatcatttgatgggccaaatccaagttctagagttttctctagaaatatcataattaccacttccttaaaatgttctagaaattttctagaatcattttccacctccttaaacataaaaatctagatattcttatagaataatctagataattagaatgttgtaatctagatattatgttaagaactctctagatttaggattaaaatattttagatattttgtagtttggagactataaatacctcctccctctctcatttgttgtaatgttatgaagttgtcttcaagttaaaatcaaagtaataaaagttctatttcctaaaactctctctcaaacacttaaacactttcttcattacctctaaaagaattttactctaacagttttgtccctgcgactcgggtttgtttggaaaaagtcgaa

SEQ ID NO: 5268 - DNA, 3148 bp, Arabidopsis lyrata
  Intron number 1 from transcript 479634 (locus 479634) deri ved from phytozome v7.0 (chr-ID scaffold_3; pos 9348869 to 9352016)
gatagcaacgaagagtgagaacaccggagcaatgtcatggagaaagttcccaatattgcatggagtcggtctacgctatcgttatcattttagggagggggtgagtttcttcgcataccaggtgaaggagaagattgttgtagtttcttgtcatagacccaaccggtactccaagaacatcatacacattgtgaaacatggtaaattcatagaattggatcatcatggtgcaaaacctacacacgaatggtctcctatcccacttctcctcctatatgttccaagtttggttcaaatccaacatggtatctagttctttggaggaggcaaaagggacgcaccaattcagctagtgcgcatggccttgtaattgtcacagtactagtctatgcattatataataagaaaataataatccaactcttgatattttataattaagatatatgcattgctaatttatgacttgttattctgtttgcaagtggaataatgttaggtgtcttttgttaaacgagcatatattgtcttgatcatcaaatttttttaatttgagcagcacgaccagtgttgacacttaggtttctaaatgatctaaagacttggaggaacgagtatgtggtgccgtgcccaagtttaccggggcttaaggcgaggttgaattttgggacatttctaatatactttttctttaaatcaaataaatacatatattgtgacaaaaaaactacatgtaaaaatagttttgaaacaaaatcacaaacatatcatcttgtcttgaacatagaacttgagtaaacaaagatttaaaagcattggaacatgatccacaattggaaaacgaacaaagtaaatataaacaagaaaattaaaaacaaaaacaagttcgtcacttttaaaaaggataaaaaatcatctatgaaactatgaaaagaaacagaggaaatagaattttggatcctcgattaccgtacctattcataaaatacaaagatcgtaaaacatacaacatatctttcatgatttgggggcctctaaatagctatatattttgggggcctgaaacaaatgccatttatttaatccataggcacaaccctgcgaatatgtcacagttgacaaggctcgctctctgcttttggttgattagggtttacgctcaaagcttatgagctacaattctgttacgccccaatcgagtatacacattaggctgaaaaggcctaagattaacgttttgtttaatgtgaatattggattttaaataatatatttgatcaacttactaaaaaccctttatttctctactagtattctctcctttgcaaaattaacagatggagcaacgttactttgaattccatggagattgaatctcactacataatgcctataatcaatcaacacaagagccagagaggaggagtgcatcagagcattagcagagtgcttcttagcaattactctttcatatttgatcagagcgttccattttttggatgatcataatcgtgccaaagataaagccagaaccctagagagtatatatttccactagcaaatcctctggaaggtttttggtcgtcatctctcacaaaagactcttattaaaccaactttctaagaaagccactgatcatggagaggtagaatcaagatagttaatctttttttttttgttttttttgtttgtttgtttaacttactttataaatatgggaagatcatatagaagagataaagactagagctagtaaatcttttttttttatcctttacactctaataaatatgggaagatcttgtctttttggtctacacagattttctacttcatttagttcgtaaatattaaatattttgctaaatataattcttaaactaactttctttttttctcaacatttaattattatcattaatttcttattttttggtgttattttgtaacattaaatgcatattcaacaaaaaaaataaaataatcaatcaatgatctgaaaatagtttattacaaaatattttatatttatacgaattaaataaagaaattgaagtagaaaatctggttggaccaaaaagacaagatcttcccatatttattagagtgaaagttaaaggaaagaaaatttactagctctactctatatatgatttcccgtatgtatagagttaagtcaaaaaaaaaaaagatccatttgtggctttatttgaaaattggtttaatatcacaatagtgtgagagatgatgacgttcagcaaccttccggaggatttggtagtggagatactctctagagttccggctgtatctctatcacgggtacgatcaacatgtaaaaaatggaacgctttgattaaagatgggaaactcgctaagaagcactttgctaatgctccaaggcactctatggctctcgtgttgattgattctagggtttattcagtgagattcaatctccgtggaattcacaataacgttgctccatatgttaacgtaacatgtcattttagcttaaaagatcctctttctaataatttttcaacagaagtcgatataggggacgtctttcactgcgatggcttattgctatgcaccaccaaggactatagactagtagtttggaatccatgttcaggtgaaactaggtggattcaacccagagattcttacaagaacgatgactgctatgctctcggtagatcctcttgcaacaagtacaaaatcttgaggcaggatcgtgttatcgatcctagccaagacgagtgcaaaatgttgtgggaggatcttcttagcaataatattaatagccaagaaatttacgagtacgaaatctatgactttacctctaattcgtggaggggtgttgatgtgaccaccggcttgttcaatccaaatattatcagtggcatgtctgtaaacggaatcacttactggtttgatattagtgagcaatgcttactaagttttgatttctcaacagagagatttgtaagtgagtctctcccaaaggatgataattatcatttggctttatcaatgactagacaagggaaacaactttgtatgttatctactcatcacacatacataaccgaaacaaacgttaacttatggatagcaacaaagagtgagaacaccgaagca

SEQ ID NO: 5269 - DNA, 8914 bp, Arabidopsis lyrata
  Intron number 5 from transcript 492861 (locus 492861) deri ved from phytozome v7.0 (chr-ID scaffold_7; pos 9782162 to 9791075)
caaacttacaatatttgagtgtactcaattttgacgtatgggtgatactaggattttactatcaattaccctagattactatcatgtcattgcagcaatttaggttatcaatccaatcaggtgctccaattatcaatcaagatgtgctcagagataactaagtcaagccaagcagaaaagaggtttgtttatctaacaatcctaagcgaacatgcataaaaacgataaaactacagaacaggagtgaacatgcataaagagaaatagctatcgatactaagcaataagcaagcagcaagtgtagagaataggtaaacaacaagtaagcaagattcaagcaatcaatagagataaaatgtcttgaggaatggggtaatcgattatagcagtctccttagtctatctaggtggttaacaaactcaatcaagctatccctagacaatagattcgaatacaaatcaatccactctcgtgacagagattctcaagctaaatcactttcatactcaattctcattgaagaaatataacctagcaggcattatgattcaatctaatatagtcaataagcattctaaacatccaatctcttgggctagagtatgcaaatctctggaaaagtttgttcagacatttcatcaaacaccttgtgggcgtggaaatgtctgagatcaatttcaagaaaaccctggagaagaagcaagcttcaacgctccccaagacaacagagcaactcgactcattcacatcaagatcatgaatgtttggaatccatattatgcaaggccaattgatcagagaagaaatagcattaagatctactaaaccagaagggaaatcaagcaattctacacttaactacctaaatatactaaggattccacacctaatttaacccatcctcaagaaccctaatccactactcaagaacactgaagaacatcatgcataaaaacccagaaaattgcataaacccagaaatcattaaaaagcaagtatgttatagattagaaggagatctacaacattgatgaagaaacgaaatccaaaaactcaaaggatcaaagggaaaaacgattacaaaactagggtttttagagagagcagcgaaatatctgctgggtaaaaggaatatcctctggataatagcgtgaacccctatttataggaaatactaggttgccctaatttggctacaagacaaaataagaagtcggcggaggaccccctcgacgtgtagtcgagcccatgacgtcgaggctgtgtgaaaatccaaggttgctcctttctggtgtcctactcgacgtgacgtcgagtccagacgtcgagggggagtgattcttcaaatttggttccttttgagaacctactcgacctggggtcgagtccaaacgtcgagcccatgtcttggtggtttctgagcacctgctcgacctcccgtcgagtccaaccagtcttttgcacagggtgatatgtctccattaaaaccaccataattcttgcatcaaagctctgattcgcttgaaatcacctccgttggaaaggtaactcaatttcctataacttgtatgaagagctctgaagctaaatcgcaatgaaagacttccatctgagtcgatcttttagggacttcaaactggttctgaatcatcaattctcttctttgcatccattaagtcccaaataagctccaaatacctgaaacacgtccaatatgcaatatgctatgccatgcaatgcaaatcgtactaagtgatgaaaagagtaagagaaagactatgaatgcaatgaaatatagaggaaacttagctaaatacacgagaaaagtatgctcaaaagcgtttaaatacagagatatcaactcccccaaacttagctcttgcttgccctcaagcaaacaaatagaactaaactggagaagaggtttgaaggtggagactcagaaccaaaacatgcatatagagtaagtgaattcaatgtccaggttgctaattctagaatgcaaggttgactgatctctacttaaaaacattagccatctccttcacatctcaacctaacctctgccttaatcaaatcaagcattcaaatcagcacattccctttaacattgattaagcaggaaccgtgaatcatactatgcagtggatatgaacacatttggcttaagggtaaaggtctagagacaaagaaggcccttaaagatctggtttaaatcgtcacaggggatctctcaagaatgattgagctttagtaaaatgctaaaggtgagtatcaagttatgcatacaaggatagaaccccatctacccagaatgtgatcaatataaacccaaatggaggtcctatttctaatcccagaatcatgaacttaactctacccttttgcactcaaagcatttacagacttttactcacaccattcctttcttttctttgcttttctatcctaggagaagctttcttactttgctctgtctagcggattaggatttctttaccaactagggttcccttttctttctttttataacataaggctttttaccctttctctttaagctattacaaaacccttttctttactttaacattcccaaatcctttactagacttttcttactttagctacttctcctaagaactcttttccctttttcttttcaatgatgaacacaaccttttctttcttttaaacacaacccaaacccagaattaagcacccacctagtcctatctagtccagataacgtgaactagaactacatgagatactatccttgtcgttacagacctaacactttctaccaagctcaatcgaaataaggcctcacattcacacacaaatgataaatggcttgaaggaaggttagggctaagggtggggaataactgctccaaagatgggagttagctacttggactagcaagagtgatcaaaaggtaaaagaaagtccaagtattttaaggtatccatgagttcatagcacaatgcacagcatgataattataagtcaaaattcaagttcaaattgatagggaatggcatcagatcaaagcgagtttcgactaagaacaagaaaatcaagcgttgaattcaaaagatggtgcggtcttacttcaagttcaatcgattacgcattagagaactaacaacctgggcactgagttctacttagtgaataagcatatttacaaggttataatcatcataatctccaatgcaaatgcatgatgcaacagtcctaagtgaaagcatactaaaacaatcctaaaatgacaatgcaagctatatgaacactctgtttttgtgaaatcattttcgaaaaatttcaaatttttatgatttttctatgccttagatgcaatgatgcaaaatttgaaataagaaaacaaaacacaatgtcaaatcctccctgagccctcccccaaacttaaattacacagtcctctatgtaataagaatttggaagagagtactcagggcaaaccaacagagaaacaaaataaaatgtagtatatacaatggtgaattggagttgttacctcttggatgggtaaagaaggaggtaattgacctgctactggtgggctcgatgagtaggctcgacttggcatcgaggtaagcttctttggtggcttagattcacttcgtgggctaaatcgacttcacgtcgagtagagaggtcgagctgggctccttctttggcaattttggttgagctcgacatcatgtcgagttagagagtcgagtcaaagccatcagttctgttttaagccttggcttccttaaaacgctttatcctgagacacttaagcaaaaacatcaaaaataacaaggaattaactaatatttacaaggatagacatgggacttcctcccaagtgagcttgtttaaagtctttagcttgacttctcacactgaatgagcttagggtggattgtagagagcaaatgaggtctcctctgtcctgcaggtggatgaatcatctggcttagcaggctctcttgataaatctgcagttgagtactcaatggcccttttctcatagtaagcttcttgttgagcaactggatagtctccttctatagaccatgctgaagtgaattcactcccctttttgctgaccagaatggatgcttcatcagttgggacgtccttgattgggagtggtacttggttggctatcccatggagcttcttgatttgatccttcagctctctcacagtgcctgttagctcccttatggctttatcctgccatttggacctctccttgagttctaaccagccatctggagcagaattgctagactctagcagcttatcacgatgtttggtcgagctagagttctccagacgagttgtaggcttgctcaaatgtatactcgagtcagttggttgagcatgtgttgagcttgcttcatatgccaccttaacctctgtttttgacccaatcaagcctttaaagacctctgaccctgctacttccttgtgtgaatctagtgatttaccacagctcaaggtttcagtgagaagatatcctgcttcaccactcttagtcaaagaagtttgttggtgatcttcctcagcaacctcctctagctgttcattagctaggcaatccattaccttaactacgaaggtctgtccttcaattgttggcttcctcgtggcatcattgatgtcaaacttcattttgaaatcatttcccagattaagatcaatcttcccattcttaacatcaatgacagctccagcagtggctaagaagggtcttcctaagattaaagaatcttttggttcatccatttctagcactatgaagtctgtagggatttcagcatttccaatcttaataggcaaatcttctaataacccatgaggaaatctgatagactcatcagccaggatcaaggagatgttgcaaggtttatacttgctgaaacccagtctcttggccacagagagaggcatgagacttttaaaagcacctagatcgcagaggcagttactgaaggctaaagtgcctagagagcaaggtagagtaaacgaaccaggatctcccaatttcttgggaataatcttcgtttggatgatttcattgcactcatgactctccatcccttgcacttccttaattctctccattaccatgtctttcaagaacttgtgagaatccggaaatagcatgaaagcgtcaatgagaggcatcctggcttctaactcttgatgtgctcagcaaacattgctctgtacttctcaattatgtcctgtttgaaccttccagggaatggtattttgggcttgtagggtggtgggatgaaagctttcttcttactcttatcaacaactggttctttgatctgggggctcttagcttgatcactaggggcagcctcttggtcaagcttagtggtgtcttctacttgagtttcattctgaataaaatccttcccttcttgaatctcactgtcctcagtgacaggagcttggttaggtcgagtttgcagctctcgaccactgcgaaggtgaatagcattaacatgacctttctgattctgaatagctttccctggcagttgccctggattcgtaggcgcagaagtagaagcaatttggctctccacgtacttcaacctggagtttagagcctcaaacttgatattgagatcattgaaggagcagtctactttgttgtgaatctcagccattttcttatcaagagctatagcaccagctgcttgaccttgtagaagctgctgaagcatttgcttcatgtcttgatcttgtgcaggtggagcttgctgggtttgatgtgcaaaaccgggtggtggattctgttggtgaaaacctccactgaactattgctttggtgcaaacccttgattgtatggtatgaaaggcttggactaattctgttgttgttgagggtaaacctgatcctgagggttggcaacattcgtgctccggtaagatagatttggatgagcatgctggtaggggttgtagcccttgttttaaccagcttggttctgtatgtagctgacttccgcagcgtgagtagtctccccctcttggatttgatagtgctcttcttcagtgatatagtggacttgcttctgttgagtaagcagaaatttatccagcttatcgttgagagcctgaatcatctccttactatgcttcgcatccggatctccgatacctctgttggagcgatcaaaatcttcattataattaccgtcggactgagctaagttctcaaccaattcccaaccttcttcaacatccttattcaagaaattcccatttgaagcagtgtccaggaccattctgaacttgggcagagctcctctgtagagtgtactgagcaaagaagctttcttgaaaccgtgatatggacattgtgtagtgtagcctttgaatctctcccaggcctcacaaaaggattcagactgtttctgggtgaaactggagatttcattccttagccttgcagttcttgaatttgagaagaactttttcaacaaggccgtcttacaatcgtcccaagatgttatggagccaggaggtagtgtcttctcccattggtgtgctttgtctcccagcgagaagggaaacagacgcagcttgaaaccgtcttcactaacaccatttatcttggtgaggctgcagagcctgtcaaagttatccaagtggtataagggatcctccataggcaacccatgaaacttgttcccttgtatcattgagatcaatccactcttgatctcgaaattgttgttctggacaggaggtggaactatgccctgtctctgttgatggtttcttggtgcatccccagcaccaatgttccttggtatcccaactccttgattgtcttgttcttgtggttccatggctactggattgtgcagttcacaaccgtctctagctctacgttcttccaactcacgggctaactggttgatgttgtctttgtagctgatgaggttgctggagccttgagaacgagtttgcatgcaaagtggctagtctcgacgtgtagactcgacttgaggtcgagttggtacctggagcacaaaaacaagcagctgaagagagtagttagtaaccaaagtaaagaaagaacttgatcttagcaattctaaaatcttgaatgtaacaagcagacacccaaatggcaacagcgccaaattgatactaggattttactatcaattaccctagattactatcatgtcattgcaacaatttaggttatcaatctaatcaggtgctccaattatcaatcaagatgtgctcagagataactaagtcaagccaagcagaaaagaggtttgtttatctaacaatcctaagcgaacatgcataaaaacgataaaactacagaacatgagtgaacatgcataaagagaaatagctatcgatactaagcaataagcaagcagcaagtgtagagaataggtaaacaacaagtaagcaagattcaagcaatcaatagagataaaaggtcttgaggaatggggtaatcgattatagcagtctccttagtctatctaggtggttaacaaactcaatcaagctatccctagacaatagattcgaatacaaatcaatccactctcgtgacagagattctcaagctaaatcactttcatgctcaattctcattgaagaaatataacctagcaggcattatgagtcaatctaatatagtcaataagcattctaaacatccaatctcttgggctagagtatgcaaatctctggaaaagtttgttcagacatttcatcaaacaccttgtgggcgtggaaatgtctgagatcaatttccaattgatcagagaagaaatagcattaagatctactaaaccagaagggaaatcaagcaattctacacttaaccacctaaatatactaaggattccacacctaatctaacccatcctcaagaaccctaatccactactcaagaacactgaagaacatcatgcataaaaacccagaaaattgcataaacccagaaatcattaaaaagcaagtatgttatagattagaaggagatctacaactttgatgaagaaatgaaatccaaaaactcaaaggatcaaagggaaaaacgattacaaaactagggtttttagagagagcagcggaatatctgctgggtaaaaggaatatcctctggataatagcgtgaacccctatttataggaaatactaggttgccctaatttggctacaagacaaaataagaagtcggcggaggaccccctcgacgtgtagtcgagcccatgacgtcgaggccgtgtgaaaatccaaggttgctcctttctggtgtcctactcgacgtgacgtcgagtccagacgtcgagggggagtgattcttcaaatttggttccttttgagaacctattcgacctggggtcgagtccaaacgtcgagcccatgtcttggtggtttctgagcacctgctcgacctcccgtcgagtccaaccagtcttttgcacagggtgatatgtctccattaaaaccaccataattcttgcatcaaagctctgatttgcttgaaatcacctccgttggaaaggtaactcaatttcctataacttgtatgaagagctctgaagctaaatcgcaatgaaagacttccatctgagtcgatcttttagggacttcaaactggttctgaatcatcaattctcttctttgcatccattaagtcccaaataagctccaaatacctgaaacacgtccaatatgcaatatgctatgccatgcaatgcaaatcgtactaagtgatgaaaagagtaagagaaagactatgaatgcaatgaaatatagaggaaacttagctaaatacacgagaaaagtatgctcaaaagcgtttaaatacagagatatca

SEQ ID NO: 5270 - DNA, 937 bp, Arabidopsis lyrata
  Intron number 1 from transcript 929337 (locus 929337) deri ved from phytozome v7.0 (chr-ID scaffold_3; pos 6436688 to 6437624)
ttgtgaggctcaggacaccactgctgccgtcgaaggtatatagcttaatttcattcttcttctcgttttgttctctcatggattgtgtggaagtgtagtcttaaccaatttctgtgtaaaattaagccttttttgtgattgctaattatgtggaatgattatctgtgactcaagttaataagttttccaatttaggagttgtgattaagaagcaccaaatcgtgtacaagtttattagtttttgtaatcataattcactactttgaaacttggattcttaggaactatatcattggattctttgggattagaactcgtagtattttggtaaaatctcatttgagaattgtttttctactgtttgattctggtctgttactgttccattctctgaaagcaggattcatacggtttggattctgattgtggaactcgtagatctgaacattaaacatagatttagtcttttgtattcactgatttagttctctgaaactaggattcacagggagtggattctaatactagaactcggagatatgaaccataacacatattgtggtcaacgtcgtttgaggactcagcttctttatctatcaagttacttggattttactctgttctatgcatccccatcatacccgaacccgtgtttccgttacactttcatgatcaaaccaggattgactgattatactaatcgaaaataaagttcctgaatatactctgtgataagaatcttgattgcttcctgttaacatatggtttgatataactcaagaaagaaccagagtcttggcattgagcattgatgtgctctgtatactatttcacagaacagttctctctaatagtctgatttgcataacttcaatcaccattgagaaatctaactagtttgttttgatgttgcagtaccaaacctgtctgattcaga

SEQ ID NO: 5271 - DNA, 3175 bp, Arabidopsis lyrata
  Intron number 2 from transcript 907902 (locus 907902) deri ved from phytozome v7.0 (chr-ID scaffold_2; pos 8948212 to 8951386 reverse strand)
tctccccctcagaccatccttcttcggtaactccagtgcgtctccgtcttctctaattcgcttagggttttgctttctcattgtttgaattgctcggaagaaaatggtgcagctatctagaattttctgtgaacgtaattggtctgcgagtgaattgaagtaaagttgggtttgattgcagctatctagatttttacctgaaaaactgggtattgatctgtgaaggagcttttttgtgtatgtgatttgtagaaaatgttaaattgtttataattaaaccgatcatattaattatgattaaaaaatagaattttatgttttaaaattctaaaattagatgattcataggaattagagcagtaaaaataggtcaaaaaccgtgggtcgagcccaaatcatctcaatatggggcatatttgtgaaaatatattaaacccgtaaataaacgggccacacgggttgattcgcagtggatcataggttttaatcggttttcgtaaaaatttagagtaaaaaagaaagaaaaattgatttacagaacatattttcgtaactttgaaaatgtagtaaccgaaaatcttaacaattagatgatctaatcccagccgaggtgtgatttgtgtatgtgatttgtagattttgtgtttcttgatttagtaactatgaacgagataaatagggtctctcatgcttccatatactctctggggtgaccttgtgttaaaatgcaggacatggtcttattcttagtcattttctataactttagtatgctttgactgtttcacatgtctaacatttacttctcttgctttttagctatgtaacatatgttgttggtttgatatttccatgaacttattgttagattcaataaggattattgttattctatacaaggtggggctctgagagtgaatgtgctgagattagcttgtgctaatagactcaggtgcaatggtcacggtgctacgatgaatctttttgaacggttttctagagtggtcaaggtacttttaacctttctgattctgtatctgactgtcataatgcattggagttcattaatcagttctcttgtttatttttcatttcaataagcaaagtcatatgcaaatgcgttcataagctccttcgaagacccggagaaaatcttggagcaaactgtcattgaaaagaatagtgatttgacaaagatgcgtcaagccactgcacaggtacagcccttaaacgacgaaagtcttttgctgtagtttatatctatccattctcttgttcaccagttttctgtttcttaagattgcttttactccaacaaatgaaagaacctaatcatttgaaacggaaatgagaaagaaaaaacaaatcttttagattttgtatgatttgatattgttaacaaaactgatcatgagtgaaaatataaaatgacacaatgatttagtcgaacaatcttgtttcaaatactttatttttatctatatatttttgactttctataaactgttggattctttagagctatgattaaatgaatttatcgtcacggcattactcaattaaacaaagaatcatgtctcccaacaacttgtggaagaattccaacgggttcaaaaactttgtacaacttgtgaaaactctcaattttctttgaaagcttcaactttcgagagtcaatgaaaatatttaaaaagaaatgatggggcattatttttagggttttatgatatgatccaatcgggtgaggacatggagcgatcatattttaaagaaatatgaacaaactagcataaatcatgtctcttcttcttcctcctgcgaccattcttacggatctcttctcaccactctcatcctatttcaaaattaatcaaagattgttcaacataaagttgattggtccaatttttgaaatgacaattgaattggactggtttagtagtaacatggcatgataagtgagttaaatacaaaagtcaaagccaacattaaacatgcatgacccatggcagttcttgatgagagaaaatcaaattccaatcaacgatgatgttcttgttcttcttattatcgtagttgttgtatggttaccacttaccatttgtaagtctaaatagtaaatagtgttttttttttttggttacaaaaatattgaaagccagtacaaaatatcacacaatacccatactttttgtgtgggtattatttacatatttttcgtatggttaccacttgatatctaaattgttttgattccgcaaatagtgaaagcattttagcccatggacacaatatgtaaaacttcttttggagttgtattttgcatattaagaatcaaagaatattagtgaattattatgattgtcattttaaaatgtgtactaggatcggacccgcggtccaccgcgggagaatattggtttacatacgttgattttaatagtgcgtgttttaagtagagcgaatcagatagtgtacttataaatattcataataacgaattgtagagaaaatgttaaattgtttataattaaaccgatcatattaattatgattaaaaaatagaattttatgttttaaaattctaaaattagatgattcataggaattagagcagtaaaaataggtcaaaaaccgtgggtcgagcccaaatcatctcaatatggggcatatttgtgaaaatatattaaacccgtaaataaacgggccacacgggttgattcgcagtggatcataggttttaatcggttttcgtaaaaatttagagtaaaaaagaaagaaaaattgatttacagaacatattttcgtaactttgaaaatgtagtaaccgaaaatcttaacaattagatgatctaatcccagccgaggtgtgatttgtgtatgtgatttgtagattttgtgtttcttgatttagtaactatgaacgagataaatagggtctctcatgcttccatatactctctggggtgaccttgtgttaaaatgcaggacatggtcttattcttagtcattttctataactttagtatgctttgactgtttcacatgtctaacatttacttctcttgctttttagctatgtaacatatgttgttggtttgatatttccatgaacttattgttagattcaataaggattattgttattctatacaaggtggggctctgagagtga

SEQ ID NO: 5272 - DNA, 3086 bp, Arabidopsis lyrata
  Intron number 2 from transcript 475434 (locus 475434) deri ved from phytozome v7.0 (chr-ID scaffold_2; pos 4561991 to 4565076)
ggtgagccaaagtttcttctcatgcaaatatgtgattatgtggtaattacatgtatcttataaagttttcactacaaaaaaagtgagcattgatagcagtccactatagcacggtttcactaattgctatgaacgattgatttgggattttgattacatgtaatagcatttaatcaacgctataataaaaaattaataagtgagaagctgaaaaccctttttccgctaatacttacccaaaaaatttagaaagccgccaacacttagaaagtttttttatcttttctcaaaaacctaaaagaaatctttcagactcactcactcacgattcacacgaaactcgtcgcttccaccgtcgaagcgttgcagcctcttctcctccctctgtcctcgccgtctccgccactatagctgaatgtctctcccctcctcctcctccagctcctattctcccgaaccaactcacctaaaccctaaatccactccaatggctcctcctctgccgctgccgctaccatcaaacctaactgactcaaccaaaaccccacatctctgcctctcaatctagatctatctctcatgatgaagtttcaatttacagtggaggagaattgcatcggaacggagaagctgaattcgatagagagagggaagattcaaatagtcttagatcgggaagtagatagagagagaggatgtggttatggtggtgatggacggataacttcaataagtagagatgattcgttgactcttatctacgccttcatcctcacaaaatggtaagccatctcaattggttgctgtagggtttttagatttctttaatttggaaattggaagcttgaaaaacccaaaaggtactcttaattaagagaaatctgttaactgtaaacttgatttccaaaaagagaactctttatatctggagatggagctcgtgtgtgaaactcctcagtaggtgatgtttacttatattctttaatttgttttgatttggttttatctcttaacttcagatgatccattgagttgtattcctgaaactttgttcaggccatctcactggatttggtgttaaaaggcagtctttttctattatgaaagttctttctattaaattatcatattgattgctaaaatgttgcagccggagctgtacaatggtttgagagagggtagcttgttgaatatcttgagtggtggaaagtaaaaaaattgtaagaatacttcaagtgtaagttctaacgcatgatgtgtctatatttgctcctctgatttagtaacttcatttatttgaacttttttgtctaggaaatgaacaagctacgaacgagaatgaattatggatacttatgtcccatgatttgatgatgtcttctttgaccttcagattgcaggggaggattttggaaggtactttcttgttactgctagctttttgtgtttgatttcttgttttttgcagcttgtataagggtattgctccactttggggacttcatgataatattccgatgtttagttgggtcttgtttctgtgtgtgtgtgtctgttataacttctagcactatggttctcgtcgtgatagtaactgaatttggcatgatattcgattgtgtagtttagcattcatggccaaaaatttggaaaatgaaaattaaaaacttaagatttgagacatggaataaaaatgattcaaagtaagaattgaagatggtttttttttaaaaggacttattagttgattgagacatggaaagggaaataattgctttgtataactcttatgaaattattcatcctaaaaccattaatatataagataatgacaacatacgtttataacagttaccgaaatttatgtcatcatctgttatttcgcatacattttattcttctcatgagaaactcactctaccttgagattaatttacttagcactaattcctttttttttgttgggtcatgaagcataagtaattctttaaaggcaaagtgttgaagacgctgaagtttccctagctggtacattaaattgctcaatgctatttgcataagttttattagctgctttcccttttattgaaaagtagtttcttacattgttaactttgctacctcttcctcttccaagctcttcttctatgaaccacatagtgatgatttcaaggtaagttaaggctgatgcaaggtgaaagctttgtttagaataagagctttgtaaatcatcactttgataaagttgaatctttaattgtcaataactgttgtatttttttgttaaggatgattcaacatggcttgagctttttgatcactagaatgtgataagtgggtagagaaaggaattgcttcagccatagcaccaagcttgaaggaagaacaagaacaagaacaagtcttaatcaataaagcaccatttggagttttgacgcaagaaccagaacagttagaatttgtgatcgtagatagggtatttttctttgtcccttatctcataaattagtactcttgttgtataagagtcgtagttgatgtttttatataaggtttggtttgtattagacttgtatgtttcttttatggattttatatgaaataaaatatatttaaatatatatctttgaccaaatttaatttatatgaaaatatatgaaatatagaatgtaaaaacatgtcaattttaattgaaaaaaatagcatcgataaaatgctacaacataatatatcatggcgtaaataacgagctataattgaatcgagtatagcatttaattaacgttatggtagaataacctataatagcattcttaaaaatgttatcgtaggtaaaaaacctacgatagctgccgatgtcatagcatttgtgaattcgctatgtaatatatatgatagcaaatttttcgcgctaacaatgaacatatttcttgtagtgtttgtagagtatacgatatatattcggttcttatgctaatttttttttcgttttcccaaatgaaaatacttttttttatttatttagtataatatataaacaatcttcagtgataatttattgtttatgatagattggaactcgatcg

SEQ ID NO: 5273 - DNA, 21366 bp, Arabidopsis lyrata
  Intron number 2 from transcript 477867 (locus 477867) deri ved from phytozome v7.0 (chr-ID scaffold_3; pos 2202196 to 2223561)
gtctatatagttctagttttgtatagagttttgttctacgtacatgatttgcttgtaagagcctccagctatggcgttgcagatagcccaggcagcttccttcttgacgtcgtgctcagagttttggagcagattaacaagtgcaggacatatatcagcatcaaagacagcctatggaaagataataaacaagtgcagacatatattcagagcaacatctaaattaggcttgcgattaaaaagagaagttcagagtcgatatataggctaacctgaatctgtgactgacaaccagcagtgatattagagactgcccaacaagcttccttcctgatggtcttgttataggatccccttagaagatttagcaagcatgggagcgcttgaagatcaattatatgctaagaaaatcacaaagaacaaactttctgagaacacacttgtgataaataatcaaatattgtttgaatttttagttgacaaagataatttgaatttttagttgacaaagataaacagaaaaaagccagtaacagtagaatatccagcgcaaaaaggaaaaagagcagggataatattaaaaagcgatactaatactaaatttgtatctctggccgtttgtttactacctgagtttgactatcgtttccagttacaatatttccaatggtgcgaagagcgggagtgataactgaaggcgaacggtggctgttcagaaagcaaaaagccatcagaatctatgactctggatttttttggttagctaaagtcctgaacactcacaccgaaagaccaataagtcgtgcacaaacattggcttctatcacggcttgtattttttcatttgaaccatcagaaagatacaccagcgcccaacacgtgtaagccaagagctccttgtcatctaatcgaatgagttgtgcaagagctggtaatgcagcactcacctgtgaacatttcgtaataagtaagatgtctaaaagaatacgacattcatcaaatccaatcagaaaaaaactaaacacgcaaagaaaattagcaggataactacagcagtgtggatcacaaagttaaggtcaagcaaccataaagagagcgtgaaaggttttcaagatgtatttattactgccagaacaaaaccttcaggtgccctggttacaatgatcatatgacaaaaaaaaattcttggggattgtcctcaaccaagaatcaaaccttgttaccagagtttttacagtattaaatattccagtgctaaacaggccttgatcaccataatttggactacagccggataacatctcttaaatatgctggaccacaatatattgagagtgcaagagaaggaggtgctataacaaagctcactttgattcaaacctcacctgatcaaatggaggctgaggctttcctctgcaaagattagacaaagtccaagcggcgtttacaagcatagaaagtttggctccatggtttaactgcaacagcagagaaggtagagctccatgtccaaggactatatcacggcatctcggagagtctccagaaatatttcctaatgcccaaacaacctgattgtccaagaataccaaagaattgcaactggattacgggaggggaacaatatactcgacaatatatattaaacctacaactatatgtagtctaaacttgtatcttctttaagaaatttgctttccatttattgatcttggtcattttctttatctttaaagtttatcaattgcagaaccaaccacaggctcttagcagtcaaaatattttgagaacaacatagcatgcatgatgatcaatcaccacttcaatatacctgctcacggaccccatcgtatggcgagttgagaagtctcactagtattgcaacagctccatgatcaatcaccacttcggtattctcagatgttccagatgcaatatttgttaaagcccaagccgcttcaaactataaaatttgttccacaaaccgaaactcattgaccttgtgaagctagggataaaactagattgaatgtacaggtgtatcgaagctaacctgaagctgggggaagtcatcccatgttaggaactccacaaagcgtggaaccaaaccggcctgtataacttcttcaacgcgtaagttaaacatttctaccaaaataacataaaatagcattagagagagtgaatacatcgttatagctttagtttcatatcaaactacattacagtctaacattataaatttggaaagttttgctgtggctcatttagcaattgcaatagctcgtttatgtcttagcaaccgatgtatcaaatctgttagtaaataagttaatgggatgtctctcaccaccacaaagtaacgttctgatctgagtagtagcctcaatcaacagatccctcttgtcagaccaaatacagcttatcaactgtaaccaatcgaacatacaaactactcaaaaatggaaaaaattatccaatatacaaaatgtaatctcccattccaaaaatttcagtcaccattatcatatttcagaacatgcaaaagaaaaatcttcagttcaaaaataaatatggaaagtcttgaagtgctcatactgggaattttaagcattaaccgaattccatagcatttagatccttcagaagtcaactacaaaataccaaagctatgtagctcattctgataattctaggactattaaaccaaatttcagaacatgcaaattcttcataaaccaaaagcaatcatgaaaaattagtagctcactctgagaatttcaaaatgtcaggaggcaatccaaatcgtatatcgagaattcaagcatcaaagtcaaatttcacaacgcaacaggtcaagaaatccgaaatcccatatttgacataataactcgaatcgacaaattaagaacaccaaattcaacacaattagaaacgcaaaatcgatcggaactgtatatatcatttcaaaacttgtaacaccagaagcatgcatctatgaatcaatgttatcaatctccagaaattatctgccaaattcatcaatctccagatttccgcgacgaaaatacaaaatgttaaaaatgccaaactgaccttctggtcaagagaatcagcggacggagaatgaggaagagcctcgcgacgcttcttaagcaagctctcttctctcttagctttgcggatctcaaccatgtcatcctctcttcgccgccgtccaccaactccgtcaaccaccgccttgtacccgctcctccgtactgacatcgtctctcctcccttcatcttttgatctctcgcttccctaccaaatgatttcgacggttttatgcgaccaaaatcaaattcccacgaaagcaacgaaacaggcccacactagaaacacactaaattttaatttttagggtaaaatcgttatttaaaaacattagggggtcaaattcgaatttgtaagacaagttagggagaacaaatattaattaaaaaaaaaagcgttcgttcccgcctatattctgttacagatatctatactagtataatcgcagcactttttgtgacgggtgggtaaaaaagctttcgggtatatcggatatccgacccattttaaaaattccttcacaaaaaatttgttgggtcgggttatatttaacctaactcatacaccggatattccatatttaataatttagatttttagaagattttattaagatttataattatgattctcctatcatctttgtttgatttgtttttaactgttttgaatcatcatataatacataaagtaaaaaaaaaaaatcaattttttttctgcatatactgtgattcgaaattttaaaaacggacatatattatccaattgacaaaaatgtgtgttcaacgttctacatcgattaaaatatttagacaatgattcagaatcatatcataaataagaacattaataaaataaatgagttttttggcgggatgggtttggcgggacgggtttttgaatcaacaataataaaaagattaaaatatcattaatccgccgtttcttattttttttaatacaaatcacaggacgggttaagaaattacggaacgggttatatttcggaaatgatttatatggtggacgaatttgaatcaatatttatataccgctttaatacgggttaaatcctcagtttattaataattatctcgtgaactcgtggtataccgttatttaataacaattgtaaactataatataaataaatatgttataaggagatacaatttacaaaatatttttatactaactttaaaattaaatcatcccatagtgtaccgcgggttaaaatctagttaatgtataaaattttactattatttgttgtgatatatatcgtatggaattaattgggcaaatagacaagtggcacgaagttaatagaagcttcgattatttttaaaaagttcatattttaaatatggaatctacgattgagtcaatactataggacaaataacaaatgtaaattggaaacgtgtatcattttttttttttttatcatccgaaattaattagagttcaaaagagccattcatgtggaatgttgtttacaaatgtgatatgaagcggttctgtacgaattttcgtgctagatgatccgcttttacattagctttgcgaaaaaacgtgtatcatcatcatctgattattcagtttttaacaatcgacgtttagtggaatatgaatgtcttgtggcgtaaaataccttcaaatgttaatgatatatatacacattgctgtgattatggtgagtttgatgatttcgtataatacataaaaaagaagaaaatatattaattggagcaaatagcctttgctaaagttttttttttttgtatactaattgtgtgaatatgtaaatataatcttaagacaatcatcttactagtgtgcagagtccatgatcctgcattatccgcatagtgcacattgcagtgcaatatgggtcggacccttgtgttgacccgtaaccaagagaaatttactgaacgagaaaaaaaaaagagagaccatatctatttctaattaaggtcaagataaagtgttatagtttgtattgagatatatagttgaaaagttatccttcgtcaaaagttatttttcttctatttttgatcattttgttgtaacaaagttttattttgattttccaccgcatattacctcttccgaaatacaagctttttaatcaagcattatagagagatgctgtttactcgtaatataaaagcagaaaaaataaaacaaaagaattaggagaggaaaaaggaaaaaaaaaagaaagacaaaaccgagatggaggatttccaatctcctagaatgcgatcttacacatcgtatgaaggagataggaacctccaactggttaatcctgtagatttaagagcggtcagagggatttatattgttagagaatcgaggcgtaatcgacctccgatgacatcggatttatggcgcaagatgtcttacaaagacttgcccgttagacccagaagatcctcttctcattcaacatcgtttaagggtaactaaaaaatgaatcatatgattattgatgaatacaactaaattttgtgttttcgtttgattgcaaaagttacaaataatgattctagtggtataacatataaacaagtcatttgcgtttaaaagaatcattgctatataataatcctaatgttaaatatggggtgttataatgtttttaatattatggaatgttttgtttatgtaataatcgatcggaggatggtggaacgatccggagttaaagagaaagagacgagtggctaaatacaaattttattcagccgaaggaaagatgaagatacctttgagaaagagttacaaatggattaagatccaatgctcgaagattattcatggaatataggtctctctctctctctctactctgttttatctgtttagaagtttgttttgaaaaagtattaaatcatgtatctaatttaatttattttattcattctgtaataattgtgttcattgtgtatttctatgacattcaattaacttgcacatccagaaaataaataaatacgactacatttatattgtttgttcgttttttaattaaacacaattttttaaaaaaatgtggaaatgatcaagtgggttttaaaagcaagtatggatttaagagatatggcttaaaggctatctatctacgtgagaacgaaacgacgacgttgtgaatctagtgcatataatgtcaacaaaattttgttataaatagattacagcccccattgattagtatcacccaaatttctataaacagaaagaaacaatttattaagtttaagaaaaaaaaaagcaaaagctacgaacatatggcaaaaaccttcagttccatctgcttcaccactcttttgctcgttgtgttgttaatctccgccggtaattcctaaactttcaaatgcatgcataactttacacaaacatgtgatcttaatttaatttgaatggatgttatatatagaaatcccgaagagcaagggcaactgcgatcactttttaggcgaagcccctgtatacccatgtaaggaaaaagcttgtaaatccgtatgcaaggagcactaccaccacgcatgtaaaggagagtgcgagtatcatggccgcgaagtgcattgccactgctacggtgactatcactgaagttttactaataaactcgtgtatccaataaagaaaagataagatcgtgtctctatatataatgtaagaagttgttttctttcaaataaaataataggacgaagccgatgactgcttcctccctatacttctatagtaagatcatgttgtatcctgtttcgttttaataataaacttgttttatgttatgtctactcaatttaattttttaccattttagatcaaaacataccactgataccatcatcgtcttgatgatttactacttcttccgttctcaatactaaattttttgtagaaacaagtgcttcacaaattaaagatagagattatataactctccaaatacactacctgttttatttcttgttttggtaaatactaaataactctaacttaagaaagatcattgaccaattctggccactactcattttccaatatctagaagtttttaacctaatggaaatatatagaaaattcaaaatatttttgctggtaattcttgtacttttctgcattatcttatatatatatttcttaaaaaataatcattagtattattttaaaaaaaaaaactagctaggaatcattagttctggacaaaactgaaaaaaatatttttttctaaccaaatgtctaaaacaataaaaattaagaaaggctattttaatattctagaattacaagagttaggggagaaggatttgaccttaagcttttgaaaaaagtccaaagaaaatatctcaccggagtaattagagaaattaatgaatagaggactttcattaagaactagaatcaagtggccattgagccgagctaggaaacagttaatgggatcaaactacctctacagatttaggaacagtaactttgaatttaattttttacccctcaataaaacgaaatgttgagacccaacatttttaaaaatattccacatttgcataataccccacaagctcctgctgctctcctttgaagatttcgaccaatttccaaaggcttccaccgccattaccacccccacccttttacctgcttaattcatttcttcctcgaacaaccacttcttccttcaacttctctcaaacactttatcttacgggagaaccactatgggcggtggtttcccgcaaagaatcttctttatccgatttcaatcctttttcaacctcttatcttcacatttgacttattttcttgtgtttgaggtctttaaaaagtgttataaacttcgagagcctttgaataaatcataagtgatttatgtattgaatcctttatctttcgtgaatggtgctcagttaagaaggactctctcaagcctttgagctttgtcaaccttcacaaacctgtatttttgagagtttctttcacttcacttcttgtagcattatgttatctatctcgtttttactttttagtaaaaaaatcttagtaaaaagacaaatgcgttcaatacaaagcactgtttgatagggatattatcaaatgggccgaaatggcttataacgtgagactgaaagtcaacggaattttactataaatagattacaacccccattaagtagtatcacccaagtttctgaaaacagtagagaaacacttatttaagcatacaaagaaaagaaagcaaaagctaaagaaatggcaaagaacctcaatttcatctgccaccactcttctgctcgttctcttgttcatttcggccggtaattaatttcggttctagctagtctttctaagttgttcatatgcatgcataaatttatacatatatcaattaagaaacatatcattttgaatgtaacttcttctttttcagtctcaacctagtctaatttggaatataatggatgttcaatatttctgcagagatcccgaagactgaggctaattgtgatacgtatttaggcgaagccacagtgtcttacccatgtagggagggaaagagagtgtgaagccaaatgctatgagcattacccgcactcatgtagaggagagtgtgagcatcatgaccacgtagtgcatacccacgaagaagagcattgccactgctacggtcgttgaaatattttacaaatgaactcgtatccaataacaaataagattgtatctctataatgtaagtgtggtttcgttccaatgtaagggtatgtgtgtaagttgtttgtttctgttaaaaacagtaggacgaagctaatggcggcttctctctacgtctataataagatcatcttgtatgcgttgcttttaataataaaattgttttgtgatttgtctacgtaatttgattattaaagtttttagatcaaaacatacaatcctcgtcttgatggtctccgttcacaataccatttgatatttcttcctccatgtcttaatgttagtctgttagatgttttagtaagaaattgtttcacaaattaagataaatgttttatattttcaatgtaaaaattaaagttatctaaaataaatgaaccaatgagcgttatatcaggagttgcattaaccttttctattaagtatgaaaagtgtgaaacaactaaaacagatggagtacaatgtacatgttagtttttttttttattgtgttttgggatgttgcattagtgagtttgaatatttgattatcttaaatagttttctatggtgacactataattgtttagtgacactaaacttttaagtttggtcgttatagaaatttaaaaaaaaaaacacttataagtgtgactaattttttcgttcttctacgtcgattactgaaattaagatatcatgactaaaactacaaaatgacatacgaaaatgaaagtatcaatgcacactcattcagttttggtttatttctttcttggttaataaatttcacttaaagaaagattgaggcaaccaattcggtctaaagacatatatatatttgccaacatagcaagatatagtacactcaaaaaaaaaagaaaaagaaagatagtacactcatttagtttattttggtttatttctctcattatgattgttttagtacactcatttaggcacttttattcctaacaagtacatatagagcttagccgaatggaaatttacaacaacaaaaaaagggaaaaacggtctatttccccacgagaactatcgcatcacgatagatagagcccaaagtatgaccccgatctatatatctctgaaagaaaagttctatacctatttctccccgacacaaaagttctgtatctaaatctccccgaattaatagttctagatctattaaaccataatcctgggtttcgttggtttattttatatttaaccaattattgaaaaactaaacccaattaaaccaaagaaaaccaaattttcttaatatctctctcttcccagagaattgcacacagagagtaagatcggggcattggctgagaaggaaaccccaccaatcgtacttcaattcgctccattgaacagttccgtctacgaaggtttctggtatagcttctcgtctttgaaacttgataaacatggaatcgataattctccgattccaatcaccggtaaacacataaaaacatcaattttaacagaaattcaaagattatatgctagagaaacaaaaaaaaaaagttgagaactctggttttattggaggaaagatcaagactttgcaaagctgggagagttatacttctttggatttcgccggagagatcattagaactcaaatcaagagtctgtagattcaccaagttgaaaatcggaactgggatcgagtctttgatgaaattctgagaccgattaagaacctaatctcaactagcttcttgagagattcagtcaatttctccgacaactatttgttcacgagctccaatttagtaacccttccggtgtctggattgatagaggttaaattgcaggtgattccggtcaaattgcagcaatcagtagaagaaaaattgattcacccaccgggtttttgtttgtgattggctatgaagtcacgtaaggcatcgaagtcatacttttttgaaagggtaaaaggaagaaagtttgagaagaagaagcattagaattaagaattcaacaaaaatctttgacaaatatgagagaatacgtgatgggttttatgattctcaccattttagaagaaagatgaagcaaaagagagagagaaaggcgtgagagagaggaaggagataatgtatttgagaaatttggttttctctggtttaattgggtttaatttttgtaataatcggttaaatataaaataaaccgacgaaacccaggattatggtttaatagatctagaactattaattcggggagatttagatacaaaacttttgtgtcggggagatttaggtttataacttttgtttcagagatatatagatcggggtcatactttgggctctatctgtcgtgatgcgatagttctcgtggggaaatagaccattttttccaaaaaaaggtcttgtaagtttctgcacgaatagtgttaaaaatttaaatattaatctttaggtagtcgaatttgacagacgaaataaaagaggagaaagatttgactttaaaagctctaaaaaagatgcccaagacagataacatgttagaggtgaaattggagacattgatgaatagtggaccttcaatacgaatcaagtggtcatatggcccgagctacgaagctagtaatggggtcaaatgacctctacagatttaggaaaatgacttgtataaatttaaataaatatcataaagaaatcgctcaaattacaccgttgaatttaaaattttgcccccaaataaaaagaaggaccccaactttctttatttgtctttttaatttggacccatttcaagttttcaaccatactagaatttaacccgcggtacaccgcgtggctatattttttaaaaaaatataatgttattttctaaagtttaactgaagatatatcatattaatttgtatttttaaatatagatatctatctatgtattattatctagtgtatgattactattgtttaggtttcaatttttaaagtatagatacgaaaacatacattttttttaagtaacgatgtatggtggattttaaaattttgaatatttgactccgaagtataccgtgggtcggttttttaataactaaaaattttaagttgtatttgttttgttaatattgtttcttttgttttgtgtttacgattgtataattgtattttgattgttaattttaggatttcatccttaatataccgttattaatatcgacccaaacccgtcattccatataaacccgtctatattatcccattagctaaattattagtgttataaaatccaagaaaataaattattattgtaataaaatccaataattttaggatctcacccgtggtataccgttctttgaatgattttaaatttatattactaatatatattttaaatttatcatataaaatatatgatttcaggtttttgtgtttttaatttatttaaataaagcaacggcttaaatgatgacatatatagtttttttcttgtatgtgtatataatttttctatgtgaatattttgattattataaattagtatttttattactatgcaaaatgttaatataaatatttgctataaaagttttttgaagatatatggaaagattgtgtagagatttttaaaaacaaattaggcaagatattgtttggttcatatcttttatttaaattttgtaaaagtaaataataaatgccaatggcattctttgtaaatacattccaactccagaatttatttgctaaaagtcatccaaaaatgtatatatagatcttattcttacgtaacatttaaaggcaatcggattacattgtaagaaccagaaatcaaaccggcgcgtataatagaaatcaattgaaccagaaaaggaaaacggatatcatggagattgttgaatcgcacaccttaagctcatctgtaagaaagtaaaacggcagcgtttcataaaatggcgggaaaaagtattgaggttttattgcgcggaagggatctaaaattatttaatcggcgtcgggaaacatcgctaattccgttgccggagttgagcactcgtcgttgaagatgaaaggtcaagatctcgaattggagaaagctcgattgataagcctagctacaaagctcggattcgacgaagattctgcgaagaaatgtttggatcgattcgtcgatctttacggtaccaaaattcaaatctagattttaaaagctatgctctcgtaatcgattggggtagtacttaagttttgtttttttttttctgggtttggtcttaaaaggtgatgatggtcgggatttcatcactgttgagttatgtggagatgattttcttgcggcgttagctgattttgaggaaggaactgaggaatgggatgatatacaggctatagagtctgaagctcaaggaaatttggctgaaatgtttgataaatctaatcctagtgataacggattcgagactgatgatgatgatgattcaagagttgaagttcatgttattgaggattctcctgagcctaagaaaaaaccggagataatggagttggattcttctagtgatttggaagatgttgagacacgtttcaaagatccaaggagatcacaaacatgttccagatctatggtaagattcaacattcctgttattgttttcattgtttttggatgaagaaaaaaacaagcgttttgtttggcaaatactggtgagagatgtatctatgtatagttacaaaatatatatggtgagaactgagattaatggtatacaaaagaacagcttttatcacaaagacttggcctttcattgggtttggtgcctatgaccaagttaaaagagattattctgggtttgctatctcttttcacatgttgaaccctgttttcagtgaaaaatttgtactttcttcttcaactgtaacttctgatttgttctgctttgaaggattattccatggaggattcagtttcaacaatttcaggcagaaaaccttctgtacagatatcagacaaggaccatgaaagtccgagttacgaagagttgcaggcattggatgatctggaatttgcaaacttggtgatttttgggaacaaggtgtttcggcccctgcagcatcaagcatgtagagcttctatggaaaacaaggattgctttgttctaatgccaacaggagggggaaaaagtttgtgttaccaggttatgatcccttagctttctatgttcctaaaggcgtgatttgaatcttgtttaggaatagttagtccaagaaccatcagtttatattgccacagtctgcatactaaattttgtctcttttgtttgttttacagcttcctgcgacactaaaagctggagttaccatagttatatctcctctgttgtccctcatccaggatcagatagttgccctgaatcttaagttcgggataccagcgacttttctgaactctcagcaaacagcttcccaagcagcagctgtattacaagagcttaggtgaaaatcctctctacatttctttcattttcacagtatccaagtatcttaggcatcatttccctttcttttcctttaatggaggctgaatcaccttaatgctcttaaaaagcttatacgtgcattgacatttttacttgcagaagagataatccgtcatgtaaactcttatacgtgacacctgagaaaatcgctggaagttcatcctttttggagacactaagatgtttagaccgcaaggtagcctgttcagtttttcttgttgttgttaataacaacaaaattctaacaacattttcctttattaaccacagggactgctggcaggttttgtggttgatgaggctcactgtgtgaggtacaatactgtcctatacccttctttcacactatatcttgtggtctacggaaatgttctctgattgttcatcaccaacaccttaatattaatttctgcctacacctgcggaaattctccttgtgatctacatgaatatgttattttttctttccagccaatggggacacgacttccggccagactacagggaactgggatgtcttaagcagaactttccccgtgttcctgtgatggcgcttacagcaacggcaactgaatcagtctgtcaggtaataaccatcaccatggttagatcctcctgaaattgggaacagatttaaatgctctgagcatttccattgctccggttctcaatttagcttcagtgaacaatctcaatttatcatatgttgtggttctttatgatctgaacactgctatattgccattttgatcctcttttccacatacaggacgtactaaaaagtctgagaattcccagggcttcggttctgaagatgagctttgacagaatcaacttaaaatacgaggtgatcgtcaaaacgaaggagccgctgaaacagctccaagagctgctaagagatcggttcaaggatcaatctgggattgtttactgtctctccaaaagtgaatgtgtggatgttgccaagtttctgaacgagaaatgcaaggtgaagacagtttattaccatgccggtgtgcctgcaaaacagagagttgatgtccagaggaaatggcaaacaggggaagtccgaatagtttgtgcaaccatcgcatttgggatgggaatagacaaagcagacgtggtaagtcaagcctattcatagctgtttggttgcaaattttctgccacgatcctctttttttaatcgtattagctgcagcgtttcgttatacacaacactttgtcgaaagctgtggaaagttactaccaagagtcagggagagcaggaagggacgggcttcaagcgcagtgcatttgcttgtaccagaagaaagatttcagcagagtcgtttgcatgttacgaaacggacaaggcagaaacatggatagatttaaatcagccatggctcaggccaagaagatgcaggaatactgtgagctcaaggtaatatcgttaaaccgcaaaatggaaaagcaaacgctgattaatcgtctgtttcaattgtagattatatgttccaagattttacttcatccttactaagtcttaatctatgtatgaatgtttcagtcagaatgcagaagacagatgttgctagagtactttggagagtcattcgaccggaggatttgtaaaagcagtttaaacccgtgtgataactgtgaaaaaagctgatatcaaatcttcgatgacttgacctgttattgataatatatagctttcttcacatgacctgagttaattaatactagtaaaaccaatttatgatgttgtaatagtaagttttcttttttctcttccttctgatatatggtaaattcgagcatttccaaggataagttctcattgcaattcttcaaggtcaattttggttttgtcgtagaagattgatatgtaccaaaagaaacaaaaaagaaagaaatgaactattcaaacaaaacattatgttaaaagatactgtatttgagtttttattattgtaactgaaacatatacttatgaatttaattgacaagtgaagctaaactccagtcaatgtaacacataaaggtaaagtcttcaatgcgattcgcaaccataggtggctcattagaaggtccttcgaacgcatctttgcaatcagaagctttatcaaatgcgttagaaatagccgaaactgcttgcttgaaagagctactgctcaaaaacttttgagctttctcaagctctttgattgcctggccatgactatccacacatgcctcgtaagatcccttgagattcgggtccttaccagagcttcttgctaatttgctcatcagtgcttggtttttcagaccaaactctcgagtttcttttactgtgaggtttataaggccattgatgcttattgatgtggttctattgagccatttgaggcataagttaggattggtaatatcggaacctgaacagaatttgttgaggagctcttttgtcacgatgtctttgggggacaaggaagaggacgaaggagttatgattagaataagaagaagaaaagggaggatacaatttgtgtttcttgtgatgcaagaaatacccattgcctgctttggatgtgaaagaattttgtgtgtgtagaaaaatagtaagagtgaattagtgaattacaataatataaacctttatataataaagtaaggttttctcccaaactcatatggcatctctccttgtgatatgtttcctctttcatttgatcctaatatcactacttagttttttaacaaataaaaaatcattatttaattttattagatttagttatctatatcattattgtttaaaaactattgttaaagagacacacatttcttacatttttccttcattttatttttcatcaacagaaataaatataaacatgaatttactttatgctaagttatcttaggtaataaagtaaagtttcctccaaatctaaactcatcttctaagaagttgacatgtgacatatctccttgtgatatcattatttagtttttaacaaaaaacagaagaaaatccattatttagtttcattagattaagttatctacatcattattttttaaaatctataatttacgagacacacatttcttacatttttcttttgtttttttttcatcaattcaaataaatataaacatgaaattactttatgctaagttattattacatcaattactttatgctaagttactccggtgattggagccctcatcggagttttgacatacagttcaactagcctcaaaaccaggccttgcccagttgcccttctccactttccccttcggtttcttcacttttacgttaaatcatctcaaaacctaatatctaattatgcaaataaacactttttaccctacgctgaatgtagcccactgggccttgatagagattagagaccactgggctttggattttcccagaccaaattgaaaaaaatggaaataacacagaagtgtgaaaaaaggaaataacaaagaagaataaaaaaaaaaggaaataacatgagaaaaaaggaaactttgaatcttcaaaacacataagaagatgagtttataaatagtctcttgtgcctcctctcctctctaatcgttttagtttcaaaatcacaaagacacaaaccacggagaaaaaaaaaacagagaggaagaaacacgagttatagagtgttgatgcgcgatttctctaaaattttgattctcttattcgatttctgatttctttatctctattctctactatttcatctttgatttcttcgaattccatggatttgccctcatctctggctccaacttgttcgacgcttggtttgttttttcgccaaccagatcggtgatggatggaagatgatggtgactcttctacgaccacgatgaatgcttcgcttacagaaatcagcgacggagagagaagactatgagaggaggacattaaaggattctttgattcccagtgataaggaatggaggagaaggaaagcattggactgcacaacaaagaaaagtgtttccagcccataaagaactcggaggcccatgaacaaaggagtacccacaggtcaatttctatccatttaatgtttcctccttttataattagaaaattaatagactttaaaatatttatacgttaagtaaaaaaagaaaggttttcaattttttttttcctttttccgattttaagtttatttttgatctttttttgaattttttttttttatatgaaagcttggatagtggatttgcaaaataatgtgaaaactaaccggattttggatcctgtcatttgacatagtcattgatcgttagccgattccacaagtccaacttgttttcgcattgtttgtagatataatatctaagttttcatttgttttttaaaagttttaaaattttgattttttttttcttatggttttaaagtttttaaaattttaattatttgtttttagaaaggttttaaagttttttttttcttggataatggatttgcaaaataatgtgaaaactaaccggattttggatcctgtcatttgacctagtcattgatcgttagccgattccacaaatccaacttgttttcgcatttttttgtagatataatatctaagtttttcatttgtttttaaaggttttaatttttttttcttatggttttaaatattttaaaattaacattattaaaggtttcttttttcttaaaaaaaaaacttgaataatagatttctatcaaagttgagtataatgcacaaaatgtcactctgtttccatcccaggtgaaggataagattattggtgcaagaaggagtcaagtgaatacaggtaaatattctcggaggctaaccggaaagacattgatgagctggcggataatttaaaagaagggctcattcttttttatagaaatttgacaagtccctctttatgttttagaaaaaacaaaccacgcttgctaaagagcagattacttttggaaacaaataaagccttctttcctagtaatcataactcaagtcacacgcaaacgccaatactactcacaagcaaaactgtaaaaagtagttaagccatatatacagaaacagaaattaatttgctgtttcaaaccagagaaagcagtaaaatgatgaacaaaattggaaacaagttttttggtggaaagcagaactacatctaaaaagccatcaaacaacactgcttcatgaaagcattgagtcattccctaattatcgtttccttttctcaccctttttcgatacttcttcttgcgggttttgttgcgatatgcctcttagattcggtccaacctgaggatcaggtgaaggtacgtacgttcatttgttgagacggtgggataacttgcggcacaagtgactgatttgcagaggcattctggctgttgtctccaaccgctaagtttgcatcgccatcttcaaagtgaagcgagtctggtaacgatgggaaagggacttccactgttcttctggtccagaagctgtctgctactatcttgttgtagttcatacttaaaacttccggatcaaaatgtagtgcatgtctcctgaatcattcaacgaattagtaacagaaggaaattaaagaacatggtaaagtcatgggactcaaaatcaacctgcaaaaattagaaggatgatcttcagtgaaatgggggatcttttgccagtgaccaagaacacttggatcacactcttcgaagaactttggtggtattcttaactgcagagaaacacacacacagacacattaggttcatgacttgaagaatgtgttaagcagcttattaatatattacctcgatatccaggcatccagtttgaacatctgctttaagggacaagacatctccccactcgatctccatttttttccattgcctttttgtttttgtctttgtttctaccacgtcaagaatctcccagacaaattgttgctttccaaagtagcacctagacttaagaccattggggatgaccgcaacttgggtccaatctccgattgtaatcttggtcattggaaagttgatagctctcggtggtttaggcaagtcttgagctgaacttgcaacctgagtttacacacgacacgagtatcaaaatctaaagaacaaaccctatgaaagattttaaaagaaaagaacaaaacagagatgtgcacaaagaacatagcatgttgaatcagagcaagaacctgcgatccagaagtaatggccggagaaatatccgtgccgagatacggagacccagcggcggctgaacccaatgaaagatccaatccatcgattgaactcgacgctccaataggaagattccataataaatcccatccataggctgaaatcgacgttgcaaccggaagattcgtgcagcttgaaagaccttgtgacacattcgagtcagcggaagaagaactcgacggagcgaccgggagatttgggccgagaggaggtgtctctgctgcgtcggagtttggcggtgccaatgacaaatccaaaacctcgtgatcggaatcttgttccattcttgaattcttgaaccagaagaagaacgatgattaatgaagaagatgaagttgaagttttgcgctcatgaatatatataacggttgccacgtggcaatatagaagttacatttttagcgataaagataaattatttaaattgatggaaattttgggctttgtattttttggtcaataaatatcaaaaatctttacttattcgattttctctaacaataacattaaaattcgtttagaacaaaaaaaaagcattaaaaattcatatctgtaaaccaacaaaaaattcatcaaatgtcttatttatttacagaaaacaatgtcacatttaatatccagaggtggaaaattcaaagtctctctcttttcttctcttcttgtcacatcaatacacacacactctctgcatctcttcgtttccacaagagctccctctccgctccgcttcttattcttcctctaggtctctctattcttaacccaaatccccaaaat

SEQ ID NO: 5274 - DNA, 3007 bp, Arabidopsis lyrata
  Intron number 1 from transcript 478862 (locus 478862) deri ved from phytozome v7.0 (chr-ID scaffold_3; pos 6039802 to 6042808)
cttcaagagaacagaaacgcttttgcaaggatcctgtgagtttttctcttcttaataagataagatacactttttgttattggttttcacaagatagataccttgggatgatgttttaacagctttcggcctcggattttgattgatgtgagcaaaattgatatggcgactaccgtcttggggttcaagatctcgatgccgatcatggttgctcctactgcctttcaaaagatggctcaccctgatggtaaaagactttagcttttccctgaaacattttatagaaactgagtcatttctagagagtgaaaaaacttgctttagtatcactagagacaaagactaaggcttactcatttgggaaactaatgcaggggaatatgctacggctagagctgcgtctgctgctggaaccatcatggtatgttatattgaaaggaagatttttaagtgttagagctgcttaatccacaatccatgcataaccatgtctctggtttgtgttcttttcttccatgatgtttcagacactatcttcatgggctacttccagtgttgaagaagttgcttccacagggccaggaatccgattcttccagctctatgtaagtcgcttgatgaacaatcctgatatacctggtcacacttgatggttcacactaaccttatgattgttccgagtaggtatacaagaacaggaaggtggttgagcagctcgtgagaagagccgagaaagctgggttcaaagccattgctctcactgtagacacaccaaggctaggtcgcagagagtctgatatcaagaacaggtaaagctgcatcaattgaaatgtgataagagttggttagactcgaacatgcaatcatatagcataaaaattatagattaatgatgtgtgttcttctactacagattcactttgcctccaaacttgacattgaagaactttgaaggtcttgaccttggaaagatggacgaggcaagcatcgatcagatagtatccattgctttagtctggcaatgatccatttaaaaaacaagttataaagcatacggtgttgtttcctgattatgttcttgttatgtttccacctacaggccaatgactctggcttggcttcatatgttgctggtcaaattgaccgtaccttgagctggaaggtaagcaaacataacaaattatcagagagcacagcagaaccgagtagttgaaaacagaaatatgattcagattgctctaactttcatctacacgaacaggatatccagtggctccaaacaatcaccaacttgccaattcttgtcaagggtgttattacaggagaggatggtgagttaccatctgacaaacaaatgttttacaacaactctagtttcataagaaatacctgacaaggtcaactattattttcctcgtgcagcaaggatagcgattcaagctggagcagcagggatcattgtgtcaaaccatggagctcgccagcttgattatgtcccagcaacaatctcagcccttgaagaggtagatcattctcgactacaaacattaatttgtgcttatgtacaaaaaccttagctctattctcttgtgttcaggttgtcaaagcgacacaaggacgagttcctgtcttcttggatggtggtgttcgacgtggcactgatgtcttcaaggcacttgcacttggagcctctggaatatttgtaagcatcatatcatatatccatttaccaaaaagcttctgaaaaccattgacagtaaataacacaaaatgctctcaatctcagattggaagaccagttgtattcgcactagctgctgaaggagaagctggagtcagaaaggtgcttcaaatgttgcgtgatgagttcgagctaaccatggcactaagtgggtgccggtcactcagtgaaatcacccgtaaccacattgtcacggaatgggacactccacgccatctgcccaggttatagagaagaaaaaaacacaaaaaccagagaacagcaacaacacagagcatgtaatggctaaaaattattcatattctgattgatcactttgcttatactttgctatatttatctcaaaaacacttgtttctccctatatcggatcacaaagaaaacatgcctagagattctctgtaatgctatttggctacttttacctttcattttgttcttcttgcttgtacaatagatgttgttgatttctacactaccgatgaatactaaaatctggttcccggaaaactagcatagtcagaaaaatcttacattgcacctaacttccacaatctttatatcaatagataaaccaaaaaaaaaaaacttccacaatccacaatctacaaacttcaaatctgtgaatcccaaaacagcagccaaaatctcacagaaactagccaccaaaaaagcacaaaacattgggcttacgaatccgtgagtcccatattggctctgctagcatcgaaaggcccaatagaattaggctcacgaattcagaactcttggatggatttattcacttttttcaaacaaagaaaaacaattggtttacgaattatttattttttcgtcgagattaagaacacgataatatgtaagaaaaatctaagatacacacaatccatttgatttttgtccctatctcctcgaccattcttcacctccagcttctcatccatattgtttctttccattgccaacattttttcaatctgttaaaaaaattcacaagccaattattccatcacaaatatttaacctttaaccaaatataaacgttgagatatataataaagcatttccttaccactcacactcttcatctctcccgagagctctattccatcaaggtgtgtgcgattctctgttaatacgaaaacaaaaaccagattgttttgtgttctggagactgagaatcgtagctatgactatgtctgaatatcacaactaataactaactctgggcttttttgctcttttgacagagagacacttcagaag

SEQ ID NO: 5275 - DNA, 1022 bp, Arabidopsis lyrata
  Intron number 1 from transcript 485159 (locus 485159) deri ved from phytozome v7.0 (chr-ID scaffold_5; pos 13560846 t o 13561867)
tccgtcgctgagtgacgtcatctggcctgcagcaggtaattagtagttaaaatgaatcctacactaatctatgcactgaaatgatgatatgctcatttttaacatatatatatagtcttatatatacgttttcgttgatattaatttaattttcttgatttggattctaagtttatgaaactcgtttcatatcaagcaaactacgaatcccatatgagattcgaaaaaattaaaacattaaggataagagatataaaaataagaacatataaatgagaaaacatattataaaagtcagtagacgtacggcaattttctttgtccgaagactaaggaagagagagagagagagagatattgtctcttctaacgaccaaatagctattgatcttaggggcctagctagggtatatatgaatccaactgttcgaggttgaccaattcttgaatttagtaagaaacatgattaattatttattaattcgtatgatatttacatgtcgagtgtaaggaaattctttataaacttcataaggttatatacattttcggaaatagtcgtcgtcgatctatgttatataaataaattatgcttaatttatatttggttagaaatatgtcaattgatgaaaagggaacatctatatagtataacttagtcatgttatcaaaattttcaaacatcatgcaaaataatcgaatcaattgcatggattgataagcaagtaaggaatcggatctcggcgattcgcatcaaaggtgacatgcgattcgaagcagcctaccaaacttggatcaaagctaaaccttaatttttaaatttctgttcactcaacttttctctttaagcaaaccgttgcacaagttgtaaaaccgtttattttttcttttgaatataatttaacattagattcaaaaaaaaaaaataaacttcaatctctaacagaattagtcaaaccaaatattaagtgttaatttgtcaagttttggtatgattatatcgaaaaggagcctttgcggcg

SEQ ID NO: 5276 - DNA, 817 bp, Arabidopsis lyrata
  Intron number 1 from transcript 488545 (locus 488545) deri ved from phytozome v7.0 (chr-ID scaffold_6; pos 6917391 to 6918207)
gcggtatgttctacgttttttttcttgtataattttttttactcggaatcggtttaggtttcctttgctgctagattttgttgcgatccatattgtttctcgggaaaatttctcacgattgaaatttttggttattgatttgatttcttcttctgaaatttcgattatctgtggttagattgttccacttgccgacatatatctccgatgctatttgtttgaattcgtcgttattttctggaatcgaaattgattttgcgattctgtatttgcaactctggatttttagtttattgtgtgtctcgggtgtgatctgtaatagtgcaactatctatatctccgtgatttctaggttttgttttttcgtttattgtagcaatatcgcgattgtgtgaatctcaatttggaaccgaattttgcataggtcattgtccatattacttttaaattcgttcagccattttcgattagtttcctaattgttcatttgcgtgattctatctagtagttttggttggattttagaagcaaataatttgatttagaatgtttatctacaattgagtcatgtgtcatatctgaatcattatgagcaatgtgttttactataaaagtataaccttgtgaaactctgagctgacgtggggtgctttttttatgggacttttgatcgattagatatacttgatacaaaaatagttgaagtgtaaacagtttcattacacacctgttttattgtttccgttaatgattctttcccttttgattctttgcgatgacagtcacagataaggtcagtaaaagttggcaatctctc

SEQ ID NO: 5277 - DNA, 6000 bp, Arabidopsis lyrata
  Intron number 1 from transcript 890976 (locus 890976) deri ved from phytozome v7.0 (chr-ID scaffold_7; pos 14533222 t o 14539221 reverse strand)
ggtgtttgctctcatccttccatccataatttcaggtaacaaatatatttactcagaagtaaattgtcttaaatgcgattatttttgtttatttttctctgatatcatggtgggagacttgaagtcttatttaaagactagatcttgacccgcacatatgtgcgggatttcatattataaaaaatgtgttttcataaaatttaattcaatatagattcttttgtaattttggtcctatatgtagattctgatcagcacgtacgtgtggaatttataccaagtgcagtttgattcggttttagtgtgaagtataaaatagttaaatgttttaaatggttcaattttgaccattactttgaagcagatggactggaaataaccgtgaagcggattagtgatctataagatttttattaaacttgtgaatgattaaaaatctgtgaaccgatgagataaactaaccggttgataggtactcgactcgtatccgtctcgtacccgtctcgaaaagaaggtatatgtgaccttagggtcaggtaaagggtgttattatgttacccgtaggtaaaagtcaagtatcagatatatgtttttttaatacttgtcactttacccggtatatttctcgctttactatgtgacccgtaaatatccaatttattagtgttttataatttttcttttattttataaatatatcttatagtaaaacttaaagcctaagtttataagtttatactttttggaaatatatattgtatatgtttatgaattctttttttgttaaacaaatacttctattttggaatatgaaattattatgcggttacagaatttattttaacacatgcattttggtcctcaaattttagtccagcgggtaagggaataggtctaggattcggatgggatacatcatacatgtattatattttttttgtattttccatttgagtatttaattttacaaaattagtgtaaattatccctttttttttttaatatttctcacttatgtcttaaaaatacccgaatttctcagaacttttatcttgaaatatacctttacccgtaccaaaattgatagatatctaaattagtgagagtttaagaattgaattcagctaccctaaatttatgataccttcatattaccgtaattatcgcccgttcgtgcgaagatatgtttgttaagatttaatttgatgtagcacttataacctgcatacataccggtttcgattcgatttagagagaaggagtattggaattgtttttgttatcagtaaaggcaattatataaaaaaaaatgagaaaaagtaggaaagtccatttcgggacggaaaacccttctcaaccgaaatctgtcagaaattattccatattataaccgtttctttttaaataatttacacgtttgcaattttatatttcagttcaacgggtaagagaataggtctaggattcgtatgagatacgtgtatttcttgtatttttgtttggatatttaagttttacaaaattagttaaaatgatccacatgttctttatatatatttctcaattatatcttaaaaaaacactcgaatttctcgaaactttcatcccaaaatagacctttacccggcccgaagttgataatatccaaattagtgagatattaataactaaatttagctacccaaaatatctgatactttcttattatccgtaattcatgttccgttcgtgcgaagttatgtttataaacatttaatttggtgtaacatatataatctgtatacatattggtttggtattcagtttagtattcggtctaggtttaatcctgtttatgaatgttaaaaatgataatagttttatgtgtatcttgaaactcggattgacccggcggtcagatcatgactgaatgtaaaccggatttgaatttcaagtattaaatcacttttctgttatatcatttaattatagtttatttataagaaagattgtggcgtacataatatatacttattgagttgtaactatgatttcaatttataaattcaggttcatgagattgtgactgaatttagttcatgactaaacaatccgtttttttttcttcgtataaattgagtttaatttataggttatgtgatttaggttcaataaaattttaaggtataggatgcttgcataaaataatatgaaaatgtttttattcttaatcattgtacaataaattaaaaacaaatacgatgtaagacatcgaatgtaataaccctgactataaggtcgaaagtaaatagcaacagaattggtagatatatataatatcaatgtgctaaatttgcaagtattcacacatataatctagttggatatatgaagagtcgaatgagtcaaatgattttaaattgttggaaacgaaaaaaagaaaaaaagaaggctaaattcaaattgaaacccattaaacacataatttagaaccaaacatattgtagtttgaggtcttaaaaagcccatttatcatttagacccaaagaagaaagcttaatcggggaggggagaagtcatcttcaacatcaaggacatcatcgagacatgcagattcagtgtgacctccgactccgaaatttagatcatcgttcttaccaagatgatcataatacagtttgacattttacaatacttgccttggtgataccaaatatagagagactcgaaaaatcataaggtacaaatgattttttttcgtgaaattgtagggaagttcttagattgagactcgaaaatatttattgtctacttacatattcatctgctaatttttttttcaaattttctacatattgtgatttgtgttacttcacaggatctggacctagatgcaatataaaagaataaatcaagagataagacttacgctgtcaatgagttcgatcaatattccttgatccatgaatcatagatgtctctttgtttccttgtgtttatagtgatctgttgacctgtaaaggaaaactactttataaatttaggtgttgttttgtattagagaaacgataatactcatatatataagcatgaaattagcataaccttccatcttaatcttcaattctcagtaggtgacataatcatgtttcatagtgacttcaattttatatatctccttaagtaaaaaaaatagatatacgttttcatgtaaatcataaatatttgaaacatacaaaccttctaaatagtttcaccttgaatttctttttacttccagattcccaatacacaggctcattgaatcagactctttggatgagattctttggatgaagatctgaaacaaaccatcaagtcaagacatgtgaaaataaacaaaataaaaggtattcaaattcatctaaataaataaattagaaaaatcgacttgtcaatagaagcaatatttatagttatacaaaaaaaacaaatctataaacgatttaagtataaagaaaatatctctcatcattaaaatgtgtatttagatatagaaatttgtttcttaataggtatggttcctacaattatatagaaaaattggtatataaacaataatataccatttcgaattaaggcttttctctctcgtcaagctcttttcatgtgcttttacatcgggttgaagaccagatctttacatctgaaaaataaaatattcaattaagaggattagaacaatactattacgtacgtgtataccaatacatcacacatagaccatgttgcattcgttgcactgtaaaataaacgcactgaatctttcacaattatgtttcacagatttttggtatcaaattctctcataaaaaaacacatgtctttggttttacctttaaacggatcattaaacagtttccaatcgttgtcttagccatcaacagaaacaggcgtcttcatgaatcaccacaatatcccttttagatgttttacgcgtcacatcgatgccataagtgtagataagtggagtttttatctgcagtgacaaaagcaaaaaaatattattaactttattttgacaacaaaaccttaaatcaaaccgagttagcttgaaatgccattatttatagagagatagtttgtacataatttaggtttagccgactaatctaaatatatttaactactaagatcttaacaaatatggtgattttattattaaattttaaaaactatccttatatataacccaatttatgattgaaaaagaaaaatctttgattcccataatataaggaatcctaagttgcaagatacattacgatttatatttttttaaatcaaaattatgttcaaaataaatttttgtttccttaactacaaaatctttacatggttaacaatttttgaaagattttagattttatagttaatgataaatatattttaggaaattcgaatattttgttgacttttttactggtgtttgttgtagttgcttaatacaggggatttgattttgcgtttttaaattataagaaacagaatataacaaacgaaatcaataattgatgataaaatattttaaggaaactgaaaatattctcaaagattacgaattgtagtaatgcaccaaatcgaataataacttttgtttaattataattcgaataatatattttggctaactatagacgtgaaaaataatagtttcttgataaatccgaataatataatattttttcaatgatataacattttcaatttttaataaaatttttgaataatggattagtatataacattttcaataacattttcgaactatatgagtattataattcaaaataacatttttttataaattcgattgatataaaatgttttcaatgatgtatcattttcattaacattttcaataacatttttgataacatgttcgaataatggattactatataacattttcaataatatttgcgatcacattttcgaataatagattagtatataacatttatactatttttgtaacattttcgaattgattagtatataacattttcgaattatattaattgtgtaatcgtttgaagaaatattttttcgaattatatgaattatataaacaaaatcttttaatatattcaaacccgtttgacccgttgacccgttaatatatattagtgacatggaataaaatgattatgattagaattctttaatggcatatattgtaatttcttacaaaatcaacgttatgatccttaggatgtacttcccaaatattagtataggatttctttgaaaaaattgggatgcttctaccagcaatatacacgaaataaaatgatcaaaattctctgtatttgcattaacatgttgaaatattagttttacatgtgaagaaaaccaatatattttaatattagttttacatttgaacaaaaacatttgtgaatgtaaatacacgttaaatgcttttattttggaatgtttatcagagttttttaataagtcgagttactctagtgtgaaaaatgatagtattttttaaagttagtaaaatgtatggtttcatgcatcataaaaattagctttttatattgatgcgtattgtttagtctaaaagatgaatagtgaaacaattttaaaacaaaagatttaatcatattattttttttttacatttagttacaaaatttttttttttctgtatatttttctttaagaaaagattcagtcaactccactataacggaaggtcattttgtgttattttaaaggtggcaattcagattgaaaaatatgttaacagtttgaaaagaaataatggctatcgctcagaatttagtttttttttttttaaaaaaaactttaaaatttatattgttattgtaaaaaaatattatcaaactcaccgggattggaatcagaaacataaacatgcactagtaatacaaattcataaaataatcaatcgatagtttttgtacttaatcttcttaatgtgtttgtttatgcagtcgaagtcatacc

SEQ ID NO: 5278 - DNA, 12790 bp, Arabidopsis lyrata
  Intron number 1 from transcript 489366 (locus 489366) deri ved from phytozome v7.0 (chr-ID scaffold_6; pos 11130276 t o 11143065)
aacttactcgagaccacaccaaaggaattcttttcgtaagtaatgtgaacctctcaatccatatacaccttcattcttcacatgttgcataaagtttaaaaatatgtactgactttgattattacagaatattctcaatgctggaatagacacttctgcacaagttatgacatgggtgatgacctatttgattgcaaacccaagagttttgaagaaagtgcaagccgaggtgagagaagtgataaaaaacaaagacgaaatcatagaagaagttatagaacgactcgaatatctaaaaatggtaattagagaaacgtttagggtattaccgctcgtgccacttctaattccaagagaggcttcaaaaaatttaaagatcggaggttatgacattcccaagaaaacatggatccatgtcaacatatgggctattcataggaatccaaacgtttggaaagatccagaaactttcatcccggagagatttatggatcgccagattgactataaaggtttgaactttgagctgttgccgtttggtagtggaaggagaatgtgccctggtataggaatgggtatggctttggcacatttgacatcaatcttctttaccgatttgattggaggcttccggaaggcatggaggtagaagatattgaccttgaagaatcatatggacttgtatgtcctaagaaagtcccactagagcttatcccggtccttactcaatggacttgattttatattttcatagtttaaaatgtaaccctttggaagtatcttaaaggtattatcattttcatttataaggaacttgtttgatgcatcaacttttagctcattttctttggtagcttaacctcaacttttaataaacattgctacatttttaaactagtctaaattaatgtggttagggattctctcgttatatggcaaatatgagacattcccttggggcgttactctcctaactcattaacaatgcctataaaagtatacaaaatattttcaatttaaagaaaatacacaaatcagaattttgttcattttaattctcaaaataaacacaatgacacatcttgttaacgtacattaaaaatggttgaaccatgattttaagtttggatttcacgagacgaatctatacaaagagagaacaagagataatgaaagagagagtggtgataactgatgaagcttgaaggtgggttcagttataagaaacgaagcaaaggacatagaggaagtttgagatttgatggattgataattaagatattacttggagaaaagagactctcatcaaccagtgatgcggtttagagatgaaaatttcatataggtttattctttctcgaaaaaaatcctatagatctatatattcacttcacttgtcttgtagagtaaaatttaagatatctttagaaccaaaataaacaaattatttactgactaaggagagtttgatgaaccaaattcttggtttatttgtcacaatttctccttcccatacaactgtgaaaaaagactattacctgcaaattgttacaggcttacaacactacctcacaacacataatgtgtaagattgacgtcaataatttgttaataagagactttaaaattttaaatactaaatgcaataatagtagaaagatcgaacaaaagattaaagtgagaatcagagcttaaccggacacagtgccatgttaaggctaattgttgcttagagcgaataaaaaaatgtggtctttattactaaaaaaaatcaaaataacgaaaatattgtttcaaagcatatacaatagtgataaaagaaaataaaacaaaatttcttaaccactatttttctatacttttttcctaaaaatcatgcactaaaaactcacataatcgagttgtcgaaccaattccctctctatagatatgatagcgtaaataaccattcactatattcaaataatcattcactgtttttttttattggttagatgtcaattgtcaaactaaattgaacttgaaacacaattgatttattgttttaaaacatataaagtcaaatatacttgagaaagacaacacgagccaagagaaacacaaaaactcttatgaaattgaagcaagaaaaggtttatgattttgaagaagacgacacacggtcacacgatagtttaaccctacaaggctacaactaattttgtttttaatatttttatttttaagtggtcgattgataattatttgaaaaaggaatactaaaaatcaatttttttttttcaaattatccttttcatttaaatatgaagattattccaaaacagattttctttattcttagttatctttaattaaaattatctcccattagtgttatatttataaactaaagtctaaaacatgtgcagaaatttcctaatacataacttatacgtattgatattattctagtgtcatgggcttctaaaacaagtacccactatacaacttatatacataagcctaaaaataaatatgtgacctacgaaattcaaaaatttttttgtggccatgggtaaatgccctttcctcttcccattaagcacaaatggcggacccataaaaaatatttaccaaggtcatatataaatatgaaactatattatttagtatatcgcataataatattattcaagtacaatgaatctcgaaaaaatattaattgtggttttcaatacttttcgaccaacaaaataaaagaaataaattatctaaaggtgtcaaactggggaatcgaacatggttactggggtgtcaatgggcatgcaattaccaaatctactggttgttttttaagtactcttatacataaacacaaatataattattttacccatgtcacttgaccctcctttcccttgaatgggtccgcccgtgacaacactgaccggacattaaaagaaacatgagaccaacgaatagtcaagatgaaggacggagacaaccatgagatcaatacgatggaatccgacgatgacgaggcatgaaggagtttttatgttgtataaatgggacatttcatatttttaatatgtttgaagtcagtcacttcaaatttcatgtttaactatatatgtctatttaagaaaataacaatatatatatatacacatatatataagtttcacaaaatagtttttcataagatgttttctcaaattgctatattcctattagcataatcttttctatgaattttcatataattaatataatcgtataacgagagatttaaaattaaattttaaaaatttcaagttcactaacaatacaatttgagaagacatcattagtgatttggaagtcctttaacaaaaacagatgattagtgatttaagctactgtcacagatgtgttactatccgaattcaaagtcgcatattacatggcaataaacacatttcaaatcatcacttaaataacatgaactataaagaaaatatatatatactcttcatatttgtaaattttagattttagtggaagtttggtaaaagaacctaaactcaaactatggtattttgttatttcaaaatttaaacataaatcaataaataatttctctaagattttgaatttttgtaaattttatttcattgacacgaaatagaatttattatacaattggtttcccacaaggccacaagtcaacttcaatcgtttttgttacccacctttttttgtagccatctatcagtttttgttttacttgttttacattacttcttctgtccacaaaagataaagatgcaattattggcttgaaaattttagtattattcgtttgtgtggacacgaatgctatgctaaataaaataaacttataataaacacaatcattattgctcaaaaaaaagcaaatagtcacaattacacaacacaaagtaagaagataaaacagaaaattcttcggggacaaatctgtacctccatgtctccctctctctatctctctaattcttcggggacaaagcataagacttaaaggtaactcttatattctccaaaattcttcaatctttttaactatgtgttctttacttgttcgaatgttgcatgtctcttgatcgtgtaaagaaatttaagattcttcataggttgcctaattatgacatagtgatgatgtttaggtgggtttagtttatggggttctatatttttcatctataggtgtttgagtacaaaaattttatgactccagataatttacttaaccggttggcgcgtaaaaaaagtctcctcatttcagcttattgattcacgcaaaatggaaaatgggcttcgataaatttggttcaactcgcgaaactgaattcctagtactcttttgattctataaaacaatatttgatttaaggtttatttttgttgaataaatttttacatttaaaaaaaatcaaattcttttgaatcaaacttaacactctcatatacagccataaagaatcttttaattttctcggagcccatttgtttttggtttttgaattgtattttttttttctttttaaagtcaaaattaatgcaacaaacattttaaaattattaatttattgtcacaatcccaactaatgaaccccatacatactctctctttctttttggtatgatccactaagcatgctaattatatttcttttaggattgtcaaatataaactgagtcaacctgaaattaatttacattgaataattatcccttttcgtgtaggaagcaaaatgagtttgtggatcattgtaaggaacacaagaacgacaaagaaaaatcaacctcccgaacaagcgtttgaactcacttttgatacatgaacgttaaattaattacagatacacgaatattcaaacgaacttatatcaccttatcttgaaaaagttagcattattggtttgtgggacatctatattatgacttattgcaaaatgaacttatcacgaagaagttccgtgcaaaatgattgaaaactctaacaacaatagatactagtttttcaatatataagaaaagttgccgaccaaacaaatatatggtggttcatttgggtttagatatccgtttaaaaagtaaaagaaaaatccaattatccatctcattaatttaatccattatctcatacacagatttagaattagaaattgtatatcttgactattcgatatccgaaatcttgataaggatccgaataaaaatcatgaattgttggatccgaatatcagaattttaaaattcgaataaacctatttttatatggtggatacatgtattttgaagattaaaaagaaattttgattttttattatgtactatgtgtaatcaatacaataataacactaagaatcttttcaggtctgacacatcagtattttgggcttttctcatgttgacacctcattaaaatcgtcgtccaatgaaaacatttcgattaatacaactcaacatgtttcagcctataaataattctctttatgccatgtcattatatttcaatttgttgggctttattgtttgtagagaagtgggcttaaagaaccatagcaagatgtaataattttcttttctcctattaggcgcgtgaggatatataagtctaccgagaacagtactgcgacggtagtagaggcagaagctgcagaggttaaaatcaatgaagaggttgtgagtacattgcaaaaagcttttattctccaattaagtcgagattgaaaaggttttgatttttgaacgatcaaattttttgatatttttttacgactaaacagtttgattctaattatgattataaattttgttgaaagatcataataacaatggttcatgaagaattttgagatagggttaccaatgtcagaaaacataacttgattttaaggtgatttttgattgaatttaaatttgcttagatcttccactttgttttcgtgaatccagtcaagctggggatttgatttgacgattttgtcgacaacttgattgagatggaagttcagttgcaaggaagaaataatttgtgtgggtagttatctatttcttttaaatggtggtttgatgcttatattctcttgaaattttcaaatgtgtttgtctttctatttcgattgatttgatcaaattaggtgatggatccatcaatttttacccttgtttagtagcttaccaatgtttttataattcgctatatttatattttcgtaaggttttctgactcactgatctttaaaatttcatatttcttatgacacatgcataagaggatcaggaagctaacaacttcaacacagccaaaaatcttcaaatctcgagcagcaaaaatttctcaaattcacgcaatgaatatgagaatgaaactagagaaaccaaatcctcaacagaatccgtcgctttattagaagctgaaaaaggtcatgactgagagctcgagtacataaccaagttcatagtctctggccaactgatgataaaagaattctccttggggatagctactgatattacctctgaactttttcgctaaaattgaaggtaagagagatgcccagagtaagattgagagaaaaacactggtcgactttgtgcttatcaaatgcgagcaaatgttcatgggaagctatagaggattgttggggagagaagtcatttttcttgaaagaagagagattttgacagaagaagtgaataaagaggttcacggattgaagaaaccatggtcccaagagttcgctcattacacacttgcatcgaattggaattagatttgagaaaaacttttcaatccccaaaaattctatgtataagaaaaacacacatttcaattttctagctgagattgaaccttaggctcgccgaagaagaagaaaacgatcaacgttgtgacggtggattgaaattcattgttgtggaggttctcggttcttttttttcaatctctcgctatctctctttcttaatgaagagaagaaggatgttccagtggattcagaggtttgactttactaagccaaaccgatatgggccattcaaatccaacagaaaccttgggccattcgaaacccatcacttctcagtcattaacgcctgcaacaagcataaaagcgacacacaaaatgtgtgttctaagcagtaaatggttttggtagtcagaaatttaaacaaattatataattaacctcttcatatgtatgtattaaattattaaaaaaaaaaaccccatttttttttttgacaactgattttattaaataactgaaatgggatttacataaggtaaatcggagcctataacatcatatcaaaagcccaattataaacccaaaacagaggtgtcaatggaaaaacaaaggttaaaaactcaacattggtggattagatggaataaatgcaaattggatttcttattgattaagaacataaaataatgtgtgatatctaaagaaaagaatctaacagaggttgggcaattttgaacacaatcggctcatgcgagatacagagtgtatctcacggtagcgagaaagatcaaattttcatttgtgttcatgattaactaatctcataaacatgtagacatgtagtggaagtagagtggataaaacacaattaagcaacttcttaaaaaaacgtttttaaaaaagccccgcggcatagcccgggtttcgccctagtttttataaatatacgaatggcctccttatttttgggattacggaatgatattactattcttgtccaaatcttgcatttgtcctaaaatatattacctcagaaaacgagatcaaatgtaataatttctagaggatagcatgtgctcaaggtgccaaagaacatggttttttttttttaaaaaatttatttagataaaaagaccttaaatctatactagtattttctcagttattttggtgacggatgggtataaatgttttcgggttatttggatacccgacctgtttacaaattttggtcataaaaagtttgttgggtcggattatatttaacacaactcatacaccggatattttcgcagtcattttggtgacagatgggtaaaaatgcttccgggttatttggaaacccgatccgtttacagattttggtcacaaaaagtttgttgggtcgggttatatttaactcaactcatacaccagatattccatatttaataatttagatatttagaagatttgattaaaatttagaattatgattctcctatcatctttgtttgatttgtttttaactgttttgaatcatcatataatacataaagtaaaaaaaaaatcattttttttctgcatatactatgattcgaaattttaaaaacggacatatattatccagttgacgaaaatgtgtgttcaacgttctacatcgattaaaatatttagacaatgattcagaatcatatcataaataagatcaacattaataaaataaatgagttattttgtcggacgggtttgacggaacgggtttttgaatcaacaataataaaaagattaaaatatcattaatccgccacttcaatacggattagatccttaattttttaataccaccaatattagacatattaaatgaatctcatttagaaaagattgtataaaaccaaaagttgtcccgtggtataatgttacttactaacaattgtaaactataaaatataaatatcttagaaaatgatacaatttgcaaacttttatatataataaataatcgttaaattttaaaaattactacttttagaaaacaaatgacggaacggtttaagaagttacaagacaggttatatttccgaacgaagttatatggtgggcgagtttgaatcaatatttataaaattttaaaatatcattaacatgccgctttaatacagattaaatcttcagtttattaaaatataaatgacttagagaatgatatgatttgtaaacttttatatataataaataatcattaaattttataataaaaaaatcataggatgggttaagaaattacagaacggattatatttcggaacgggtttatataaataacaattgtaaaccaaatatttataaatatcattaacatgccgcttaatacgggttaaatcctcagtttattaacaattgtctcgtgaactcgtggtatacggttacttaataacaattgtaaactataatataaataaatattttataaggagatacaatttacaaaatacttttatattaactttaaaaataaatcatcccgcggtgtaccgcgggttaaaatctagttttaaaatattaataagaaaaggtccatatttttgaatttctatgtaagataagatttgattatttatattgggcacaaagtctaatataattttgagacgggcatgcttatgtaattgaaacgtcatatcaccgccaaaccctgtataaatatggaattttcacacaataatttcacaacacaagttaaaaaaaaaaaaaatctcatctccacttttgatctctaaaatcttcagcacaaaatataagacttgaaaggtaactaatcttaccaaaattgtttatgtttcaatgttgtagaataaacttttaactatatatttgtgacttgttgcatgtactttgatcgtgtataaagaaattatttggatgcttcttcttcttgttttgccttaattagggtgctttggtgctttagactttcgaattttagttagcgtggttctgtattttccatctgatccacataacattcttttttttttttgggttaactgtccacttagactccgaatgtcagtccgttttaataacatttagtttacttatacaatatttatatcctatgtcattactcattactcattagataattattttctaaataattaccggtcttaaaaagtaagtgatacaagcataattgacttcatatcttagtggttattattattttattaaacccactttgcagaatatatatttaaaaaatcatttttaatatgaaaaaaaaaacaaaaaatcttgaagaaagtaaaattcttcaatttccatattttcttatagtttaattacttttctatttcttcatatttgtttaagttcttttctatttcttcagacttctggcaaataataattataaaatcgttctattattttattttcaattttattaatttttgtgattttatttattaaaatctgtttttttggtgagtatttattaaaatctttttataactgtaactcatcaaatattagtcatttgcttccatttgaaatttaacaaatacataataaataaataacattttaaaaacttgaatatataatttaaatacatagtagtagtattcattctaaaagtataaacacatggttaataaaaataaaatttttaattattacctttttgagtactcaatttctcaaacagaataaatacatagtaaataaaacttagaaaacttaatgtaattgtttccgcggacaacactggtaatcacctggtgctacatatatattatcttaaaactatcaaacatatatatatatatatatatatcttatatattaatagagaagcactctaaaaaataaactttacttttacgtgttattatctaaactgccatgttgacgtgtcgttttcagagtgattttccatccatttaaattattacccaaattttactagactatttaccgattttgccattagtcttaatacatacatatatcacacaaataaaaaacgaaatcataactaaaaaacaaaaattaggcgactaatttacatatttatatttaacaacaattcacgagagttttgtttatttatattaatgatctattttttaataattaaaaaacatacactttttgtttatcttatattaataaatctttatatttatatttttctttatatatatttatataaatcttctcaagccgatgggtaaacaatctttatatttaatttatatttgtattatgtttatatataaataataaaatatatacatttagttcaagaatctcgaatttaaaactacaacatctctacatctttcataaatttataaatctattgtactaaaatacataagataatcttttttcaatatatgttacgaatacttaaaatccgtttttttggagggattctaacttttcgaaaaaaaaccaaccacatttatttataaactaaaatttggccctattataaccatttcgtagtaatccattcataatctaagaatcttaatttgaaattcactacaaaatcttaacttgaaaactatcaaatctcatctttgataaatttttggatttcttatacttaaatctcgacatcttttttttttttaatcattctcgacatctttaaaacatatagaaagggatattggcataaatggtaatatttcgtcaatactttctttatcacgttgaagctttatttcaggttcaaatatttcacgggtaaaacgtatacatatacgaaatagtcccaaatttgaataaaaaaaaataaaaaaaattattacatgtttcgttttacacaaacggatcttggatcccagataaaaaatttaatcataataattttacttgaataacttcatcccgcacatactgcgggttgttatctagtatatatatatatatatatataatgtttttttaactaacaaatatatattgagcaaactagtaactaattgaggttttgtataaactatccgttttatgcaggttgcaaaatgagtttgtggtataccattgttgcattcgtcttctttgcatctatacttattgcaaagaacacgaaaaagacaaagaaaaatctacctcctggaccaccaagacttcctttaattggtaacttacaccaattgggatctaaacctcatcgctcgatgttcaaattatccgaaaagtatggatcgttaatgtctttgaagtttgggaatgtgtctactgttgtggcatctacaccagagacagtgaaggaagtcttaaaaacatttgacgtagaatgttgttcgcgaccatatatgacttatcctgcaagatttacatacaatttaaaagatctcggcttttctccctatagcacatattggagggaggtacgaaagatgactgttgttgaactctacaccgcaaaaagagtgaaatcatttcaacacacaagaaaagaagaagttgcttccctcgttgatttcttcaaacaagctgcgtcattggagaaatcggttaacttgaacaataagttaatgaaactagcaggaagtgtgatttgtagagttgcatttggtatcaatcttaaaggaagtaaacttgagaatacttatgaggaagtcattcaaggaactatagaggtggtggggagtttcgcagcagcagattacttcccggtcattggtagaattatcgataggatcacagggttacatagcaaatgtgagaagaatttcaaggcaatggatgcattttttgatcaatctataaagcatcacctagaagatgagagtattaaagatgatatcattgccttgctcctcaagatggaaaggggagagattggacttggggagtttcaacttactcgagaccacaccaaaggaattctttccgtaagtaatgtgaacctctcaatctagaatttactttcattcttcatgttgcataaattgtaaaaatatgtactgactttgattattacagaatattcttaacgctggaatagacactactgcaca

SEQ ID NO: 5279 - DNA, 4925 bp, Arabidopsis lyrata
  Intron number 1 from transcript 906645 (locus 906645) deri ved from phytozome v7.0 (chr-ID scaffold_3; pos 22483300 t o 22488224)
cttcacatcttgcggcttacctcgtcgaaatatcggtaagtcagtgcatgcatgcgatgtgaaattctcatctaaaatggataatatacgaatcaaaattcatattttgttgttttgtttggttatagaaaacatatgcgtatgagccggaggtttaactattgagatttatctattactttgagagagagacttccggagtgcaatttccatggtcaaagattctcaaagagtctcctttgcgcaagctgatcgatgtgatcgatgttccttttattaacatatatgtataatggttattgttagagtaaagtttcctttagcttactctaagtgtatataaggaacatgtgtatcaacattctaatcaagaagattaatatcatatttttacactctctctctagttaatatggtatcagagcaaaaatgagattttctctctctataacagaaatctcaaagcttcttccgcaatatcatcatcttcttcttcttcttcttcgatttcagctcaaatcaatgaaatcaccatcgttatcatcctaaatcttccatttctagtttcgtcgagctccaatttcatcaatggagatctcgatttcatcataatcgcaatctgtttcgcgaatcatttttccattcatcacagaagcaattgctctaaatctctttctgatcgattcgtctatctgaatgagtcatatgagtctacaaggagacacatcttgatgttaaaaccgattccaactattgaggatgcctttaatatggtgactcaggatgaaagacagagaagtattaagccttctacatcagaacctgtagtttttcaaacttcaggatcaaatcaagcatctggatcatccaaccattattctcaagatgtttcttcatatcaaggtcagctggataatacagcttttgctattcagaatggatatcgtcctcgtgcaccacgacctatctgtactcactgtggtcaaactggtcacgttatacaaaaatgctttaagcttcatggatatcctcccggctacattccaggatttaagagcactttctctaactatcaacctcagagatcatctgctccatctaatttccagcctagaggatattctccaaacactgtctctagacctcattcagttgccaatgtgatgactagtcctattccctacactccaccatcagcaatagatgctatgaatttggatattagcaagctgaatggagatcaaattcagacattgattcaacaactctcaagtcatattcaagtttcagagcctttggcaccttccccatccacatcaaaagtcacagagcatggtataatggttgttcaatcatcatcgggtataattccttttccttcttcatctcttcgatatgaaaatgatcaattaacattccaacatcaatgtctctcatctttatactctaatcttcctcatggtagttggattatagatagtggtgctactacacatgtgtgttctgacttagcaatgtttggtgaaactactacagtttctggagtaactgtttcacttcctaatgacactagagtaaatatcacacacacgggcacaatatcactatctcattcactcattcttcatgatgttttacatgttccttcattcaaattcaatttgatttctgtgagtagtcttttaaaaacaaatcattgctctgctcatttttatgttgattcttgtataattcaggagtttattcagggcttgacgattggtagaggcatacttctgcataatctctacatattacaacttgatgcaccttctactcatgatgaattctctggatccttgatggctgatggaattctttggcatcaacgccttggacacccatctgctgacaagttacaatgcatttctggtactctttctttgtctaagtctgcttttaaacatccatctcattgttccatctgtcacttagcaaaacaaaaaagattgtcttatgagtctcataatcatttgtcttcacttccatttgatctaattcatttagatgtgtggggtcctttctctatagagtctgtagaaggatataaatactttcttacaatagttgatgattgtacacgtgtaacatgggtttatatgatgaagaataaaagtgaagttacacaacatttcttatcttttattaagcatgttcttacacaatataaagctgtcattaaaatgattagaactgataatgctcctgagcttgcatttacttctattgttaaagaacatggaatgatacatcaattctcttgtgcatacacacctcaacaaaattctgtagtagaacgcaagcatcaacatttactaaatgttgcaagatcattgttgtttcaatcgaatgttcctattgcatattggagtgattgcttgttaactgctgttttccttataaatcgtttaccatctgttttactcaaaaatgtatcaccatatgaacttcttacaaaaagaaaacctacttatgattttttaaaatgttttggctgtctctgttatgtttccactttacaaaaagatagaacaaagtttactcctcgttcagaaaaatgtgttttcttaggttactcttctggatataaagggtataaagtacttcatcttgaatctaacattgtttcggtgtctagaaatgttatattccatgaaactattttcccttttcatgataatccagcatcttcaaattctgagatttttagtaacactattttaccattacctattcatcttcataatgatttgcaagataatatgcatgcttcatctagtcaatcatcattgcctaatgatcattcagctgcatcatctacattaccatcatcacttacacactctagtgtcacacctatttcacaagaaacagttacaacagagactgctgttgtttcacttcctgttgctcggccaaaacgcacaggtaaggctcctagctacttaactgattaccactgttctttcacacaaatttcttctccacctaaaaaatctttccctccactcaaagtctttaccacaccatatcccatttcttctgttttatcctactctgccttaaaatccccatatcaggcttttactctttcttactccattgaaacagaacccaaaacctttaaacaagctattgtatctgtgcaatggactaaagcgatggatgtggaacttgaggctatggaattgaataaaacttggagtgttgtctctttgcctccagggaagaatgttgttgggtgtaagtgggtttacacgattaaatacaatcctgatggtactgttgaaaggtacaaggcgcgtttagtagcaaagggattcactcagcaagaaggagtggattattttgacactttctcaccagttgctaaattggccagtgtcaaattaatacttggtttagcttctaagaaggcttggagcttaactcagatggatgttactaacgctttcttgcatagtgagcttgatgaagaaatttatatgagtttgccgcagggttatacaccagtttctggttctcttcctcctaatccagtctgcaagcttcataagtccatctatggattgaaacaggcgtctcgtcaatggtataagtgtctttctaaagcacttttggatgcaggattcattcaatctcactcagatgaaacactgtttgtcaggctgcaaggtacatcattcattgccattcttgtgtatgttgatgacattctcattgtcagtaatgataatgagcatgttacttcagtaaaagcacatcttgcagatcattttaagataaaagatctaggtcaggctagattctttcttggtcttgagattgctaggaattcagaaggcatctctgtttgtcaaaggaaatattgcctggaccttcttactgatgcaggattattgggctgtaaacctcgttctgtacctatggatccaaaagtttctctaacaacagagactggtacattacttgagaatgcaacatcatacagggaattgataggccgccttctatacctttgtgtaactcggccagacattacctttgcggtacataagctgagtcgttttctctcatgtgctactgatgtgcatatgcatgcagctcagaatgttttgaagtaccttaaaggtaatcctggtcaaggactattctactctgctaaaacagatatttgcctcaatggctttgctgatgctgactggggaacatgtttggattcaagacgctcagtatctggagtttgtatatttcttggaacttctttgatttcatggaagtctaagaaacaagaagtttgcagtggtagtagtacagaggctgagtatcgcagcatggctcaggccacaaaggatcttctctggttcagttacatgttgaaagatttacatattgaggttgaaacaaaggccaagttattctgtgacaataaatctgcaatgcacattgcaaataatccagtcttccatgagagaacaaagcatgttgagattgattgtcatacaactagagatcaagtgaagtttgggttcttacaagtgcatcatgttgatactgagaatcagcttgcggatatactcaccaagccattacatccgggtcctttcaaatccatacttggtcgtcttggtgtttcaagcctcttccttcctcagaagtaattcggcttgaggggggctattaacatatatgtataatggttattgttagagtaaagtttcctttagcttactctaagtgtatataaggaacatgtgtatcaacattctaatcaagaagattaatatcatatttttacactctctctctagttaatacctttatctcatattcctgaacttgtctacaaaacatcagtcgatgattggatcgaccaacatccaatt

SEQ ID NO: 5280 - DNA, 734 bp, Arabidopsis lyrata
  Intron number 1 from transcript 934215 (locus 934215) deri ved from phytozome v7.0 (chr-ID scaffold_4; pos 17003989 t o 17004722 reverse strand)
aaaacagaggagatcctccgccactgttttgggaagtgagtgtttaggttcctttctcgctttgatcataaccctaattaagcaaaatataagtgtttagatttttgatttacatgtggaaatgaaatttctagggtttatagaacaaatagataaaagtttctcgaggatgagtgtgttggttgtttttgggctctgagttaaattgaagtttcgttggttatgtaaaagctaaagccaatagttcaagattgactcttgaattgcaggtatatagtagtatttatgcactggcatggttacatttgcttagttctcgtggttcgatgttgttttttttcgaaaagaccctctatcactgaaacattatggtacaaatgtttcattataaaagcagcctgtagctaagttgccatgatttctgtaaaattcttttgattttatcatctttgtagttttgtaacttgcagctagcttcttttttgtttgtttgtcgcttgctgcctttgatacgagttattccatgttaaatgtgatgctttcctttgggggacaactactttgagttcctaccattacatgtcttgttttctttcttgctttttgtgtgattttgagattgcacgttgattgtttgtacctttcacttctctatacaatcactaaattgatttcccctttgttctgtatctggttcaggccctctgaagttgttcaatccaacacagagcaca

SEQ ID NO: 5281 - DNA, 5451 bp, Arabidopsis lyrata
  Intron number 1 from transcript 920831 (locus 920831) deri ved from phytozome v7.0 (chr-ID scaffold_1; pos 7986724 to 7992174)
cgcctccaatctcctccggcattgtccgattacaggtacgtaataaattattgtgccaatccgaaattcataaggcaaacaatgagcttaagccacgtggagctcttgcattggtatgtgtgatattgtttcatttcttgctgtcggttccatttaaactttattgttagatttaaaatttatctacccaatagtatggggtcaggttttaactattttgcatcattggttcaacatttttgtatttatgcaaataaattgttgttagaatcaaaaagatatcaaacaacagtctttcttatgaaaaattgttatcatataataatatactaatggttttatctgtttatgaaaataattagttatttcttgatgtaaggaagtaagattttaaatttcattggtttatctggaggaataatgtttgagtttttagataaagaaaagggaaaaatgtcatttaatagccgaactttcaaattgtggccatttggcacaccaacttcacatatggtcattctatacatgataaaatcgttgacttctttttaacacatgacaaaatcgttgaccaaaccaaaacaacacccgttaacggatccgctaacaccccgttaacacctccgttatttcccaaaacgacgtcgtttcggtcttaaaacaaaacttcaaaagctctccaattctgagaaattcccaaatcgatttcaaaccctaaaattttcaattctcagcaatatcttcctttaagctcgaaatcttctttattttcatcaaattctccgtcttctacacgagatatgagttgcaagtcaggtaattcgagtgttcaagatggaggttgcgagttccgtgggtttccttcaaagtgtcactgcgggttagacgttgtcatctacacatcgaagacgaagcagaacccaggaagaccgttcttccgatgtccaaccttgaatgatgtaagtagatttgatttagtattttttgggtttggtcggtaatatatttgcaactataatgcaggaccatttgtttaaatgggtcgaagattgtgtgtacgaaaaggttgtagacactaagtcgaaaatttccatcattgacaatgagataaacaatgcaaaatctgaggttcaagtcgagatttcagagttaaagtggatgatcaatgaattgaaggaaaatggaacgtggagcaaaagagaaattaagagaatcaaagtgtggttggtctgcatttgtttaactgttactgtaattgtgatcctactgttgtttactaccaaaaaccagaatcttgttataggatactagtttctttgttgtttggtatgagttttagttgtttggtctttagtgttgtgtcttgctttaatgaaatgctattttggctttgtgatccttgtgagttgtgcctttggtaatggaaatacaaatttgtcttctcttgatcgataagagttatgtcagaaagaccaacaatcattcatacaactaaacaaaaagaacaatacaagtcatagaagaaccaaacaacaaaatactccaatagaaatgttttgttcagaaacaaaaaaaaacttcagaaaatcttcatcaattagaacactgaaacaatgatgcaaatctaccaagcccctgtccttctggttgtgcttatggttgtgactctgctccatgcgtttgatgagcttgtgcatcgtgtgattgatgatctgatgtatcttgtgatccttgagatgcaaaatgaggttgtgatccttgttgtgagccaagagccgtgtgtgttccttgtgagccttgcacttgtccttgtgatccaggatgagcttcactaggaaatgttgcaagcacttctggcgcctaccaaaaaccataatgcatttagtgagttgtcacatgaattcagtgagttgtaaagcagaaaacacatgaattcagtgagttgtaacacagaaaaagctttaaaacataccggcctttttcttggtcttcctcttggtctaggtggtggattcaagactgttgcatttttgcacccttgcttgttatgcccttcttgcaggcagttagagcatgtcatgattctcttttcccgtgacatcttgttcttattagaagaagaagcagtcttatttcttccctttctcctagcatgattattaggccttcctctgttgcctcttctccatggtggtggcaagacaggcaacctacttgttctaggccacaatggcatcccttggacaggcctaataccatccctatatgtttctcgccacattacctttgtataatactcgctgacatagtcttcaaccttctctcttttgcatattatcacagatgccgcatgaatacaagggatccccaccatctgccacttcctacaaccacaagttttattgtccatatctacaaagtaactaacaccattcacttctatttgatgcaaattgtttctggccatatatctctcacaatttctaaccccagctatcattttctcaatctcaagatgggctctctttgtgaatcttgtcttcaatctgtcagcaatgatatacctctttgcagttctgaccatgcattgcctccggatgtcttctagcaaatccaacaaaggctttctcctagcctgtctaatagtcctattaaaagactcactcagattattgaggttgtcattgcagcaagtccctattctaaagaaggctcttgaccatgtcattggactagtaagctgcagacttgcatgagcttgaggattgtacttcctaagctcttccatatgattgttgaactcttctatggtgtaactgcgggcaatcttccaaaagagacgtgttagttctatatcatggttatccctcttccagttgtccattatatgctttgaacattgtcgatgctcagcttctgggagtatggtatggatagctttgactcgaccctgcagaaaaacataagaaaacacacgaaaataagctgaaaaccattcataaaagacttaaaaccataagcaatctctaataaaccaagaaaactaaccgactgtttatctgagatgatagctagatgttgcatttcacagagccccaagctagcagagaggtgtctcataaaccagtcccaattatcatcgttttctatctctacaactgcccaagctataggaacaatcctactatcgccatcccttccaacagcagcaagaagatgaccctttatatcccatttcagaaaggctccatcgattcctatcacaggtctacaagtttgcttccaagaatccttttgagaattaaaacatatataccatgttctaaaaatccccgcctagacccgattactccccgcttaatcgctaggcccaccctatccgcctcgattaatgactaatcccttaaagaaatcagtcatccgattactctccgcctaatccgattacttcccgcctaatccgattattccccgcctaatccgattattccccgtctaatcttacataccccgattattttttaaattgctagtataaaaaaactttttatttttgttattcaatcatttaaattgggagtttatgttcaaattttaataaaaatcataaatttgtaataaaaatcataaaatttgtctcaaaaatacatttttatgtgtttactgcaattttgaaaataatattagattaatatgttttaaaaatattaaaataaccctaaaactaatccccgattaatccccgattttaatccgattttccgattaatcgctaggcccatgccgagcgcccgactagcgcctagcgatttttcaaacaaggcatatatataaccgataaaacctctacttgcttccaataacaggccctggaactgtctctatctcaaactctgtccctggattctgctttaaaacctcagcttgataatcccatattcttgaaaagtgatcatcatgactagcatgtcttgctctcagcactttggtcttcgctttagcacactgatccggagttacttccaagttgtattccctcttaatttcagtaaccatctcattttttgtaagttttggattcactctcagcctttcctcaaacaataatgcaattgaggaccgcttcaacatcttagaatagcctgacctaacacatatatgctcactgtcataggctcttatttgcatcttatgttttcttttctcataagaacaatagactctccagccacaaagaataccatcatcaccaacatagcaacacttagcagcaactatcaaagcttcagacctataaagtttaatgtcataccttgtctttaaggagtatctcaaaagagcaagcttgaagtcatcaggagtgttgaaagttttcgccagagctagcaacacctctggatcctcttcttcactttgatttccctcttcttcggctctgtcttcatcttcgtcgtccgatgacaaaggatctggaatcttctcatcctcccagatgtcatccccactgtcagaatcagtaccaccttcgtctcctcttaaagcttcgggaaaatcttcttccatgttaacattctcttccacagctaaaccaccattatcatcgttgtctccaccatcaccatcaactgcatcatcaacaacatcgttatctccaccgccaactgcatcatcaatagcatcacagtcttcatcaccatacacgacgcagtcatcttcgaggtcaggctcatgcaccatttcaggctcttcatcctcctcttcttcatgtctgactctttttcgtttccgacgccgtcgtgaagctcgacctttagctccgggagaagattgtgttccgccagctaactctgaagcttcttccgtcggaggacatggaactccatctccgacgacaacctcttcttctctatctaattcgccttgcattgcagcttcaattacagacccaatcaacgatatgattcacaattgttagttcatcggagaatctctttcgaaaattagggatttgatttttgtgaattggggattttgatttttgaagttttgttttaagaccgaaacgacgtcgttttgggaaataacggaggtgttaacggggtgttaacgggtgttagcggatccgttaacgggtgttgttttggcgtggtcaacgattttgtcatgtgttaaaaagaagtcaacgattttatcatgtatagaatggccatatgtgaagttggtgtgccaaatggccacaatttgaaagttcggctattaaatgacattttttccataaagaaaaagatactggtaagtgccttgcaagttacaaaaaaaaaaaataataaatcaaaaattaacgacttagattctctcccgcgcaaaatcaaaataaaagccctattttttatagaccttaatcttgtgattgaaggtaccaattgagcagcaaatcggagcaatcgattg

SEQ ID NO: 5282 - DNA, 1834 bp, Arabidopsis lyrata
  Intron number 1 from transcript 491912 (locus 491912) deri ved from phytozome v7.0 (chr-ID scaffold_7; pos 5733307 to 5735140)
ggagcttcctggtaacatatatatctactatttctaatatttaattatacagaatcatatatttaatcatatataaatgtgtgtgttctttccactcctggcttttttgttgggtttcaaattgctttggcaaagattcttgaaactttccattgaaaaaaatattcctgaaattaattgaacataaagaagaaatcagattcttgaaatcagatttattctccgcgtcggttaattattattgtaaatctttatatataacttgttaggattatacaattagatgatgtttacttatgtgtgtgtatatctatttatgtttgtcaacttaacatatgcatatttacagatttatgatatgcttatacttacaaaccgaatcttcttgttcgtaattctaaaaaaagaatgaaagatcaattatctttgattgtgtcaacaaacaggtgatgtgttcacataaatgctagattttagactgattaattaatcacgattataattgcatttataatagtgtaaacattatccggagtgtcatgattagttgagatacatgctagcttttctaataagatgttatgcgattataacataaagatctggaggctgtactaaagcagcaaaatatgcaaaatcacagctgtcgatatagagttctcgtagatcagatggtaacttttaataaataattatatacgtgtatatatataggtgcttacatcatacatgcagtataaaatatacatatcaaaacatgaaatatatatatatatatatatatatatgtatggatgtgtgtgtgtttttttttgtatgcttctatagtaatttttattatttgtttgtggttctttgtttgatgatataccttgagaaattagggaagctttttcaaaaggggaccgagaatcctgttgtcatctttttttctcaactttttcaaatttttgttgtcttcttaattttgactttgggggactttgttaattaataagataacttgcagattataaaattcaaagttagttaatttgttgcattatagaatattaattaaaatgtaataaaagattaactaaacaaaaaagtaggctttgtgtgtaaacacgaagaccttttttgcctcatatcacaagcaactttagagactcaagaaacctttaattatttacatgaccagtacgaacttgttgtaattatagtcgaatatatgtatatatatatatatatatatatatagtataattaactaagcaatatatatactagtctatttaggatatggttgatgataattatgtttacgaaaaagaaattgtggcctattactcttcttctcaattatggcaaaataaagaaaatctttttaagtagtcatcacatttgtcttcttgatcatcttctataaggatcaaattaatgtgaagctgataggaggaatgtttgagagagcaataatttcctccgttgaagtcaaaatcgtaattatttttttgccaaaactaataatataatgtatcacattctcgtcttgtccacatcataactcttatatcatcacattaacctttgacatgtcactgtttctatatcgaaatcctataaacccaattcaaaaaattaattaatggtggttaactggtaaaaaaatcaccacaaagtctgagggaccgtaaatcaaatttactagacgctttacgcagtatataataattagaatacgatttttatttttacaaaattttcagttaatattctactaatagatatcttgataaactcttttaagattttactaataatttctatatctcttgtatgttgtgtaaag

SEQ ID NO: 5283 - DNA, 1583 bp, Arabidopsis lyrata
  Intron number 1 from transcript 915061 (locus 915061) deri ved from phytozome v7.0 (chr-ID scaffold_9; pos 389218 to 390800)
ttttttaccgagaggtccaacgaaaaccgcaccaggtaatacacattttttaaaaattcttttatcttaaggggcaattaggtgagtgaccatttttataaacgaaatgaagaatatagcatactaaagcccaaaacaaagagaataaccataatacatagtgaaaatacaaaacacttcttgggtgtaagacacgcgcatagaaggaggagggaaaagagaggttacgtctgtgaggagagagaaaaaagcttaattgtttttttttttaatatttgtttttcttctaccccatttgactttttacattatatttagtgtttgaaaacattaattttaatttataacttttatagaaaaaaaatatggttttttttttctctatattatatgatttggatttctaaaagccgactaaaacctataaaagtaaaaaataaattaataaacttggtttatataaaacacaaaagaaatagtatagaagcaaataaaatactaatgattaacatagtggtgatggtggtatccaaaagggctagttaagagcaggacaaaattcaatgtatttatagaaaattcagcatatcaacttaaatacatgccaaagaaataaatgttatattttacaagatataataaaagaatttcagcttgctaaattaaatacaccgtgaattaataatattatattataaagacacaatataaagaacccaaactaccgatgttgtatgtttggattactcctctattcaaaattaataagattagaaaaaaaaggaacccaaactaccgaaattagattaaataaataaaatagtatagaaccaaataaaatagtatggaatgaggtaccgtgataacggtttaaggtacagtgataaccattggcggacctatgtgttaaggagggggtgcaactgatccccctaaaatttacagaaactttgttttatatattacatggaaaatgtctttggaataatgcaacactcattattcattgtttttgaagataatttccttttttagaatatcttaatatgcaacactcattttctcacttagtttacatttcattttctctggaatataattaattattaattatcttctctttcattttttttttcataattatcttctctttcataatacatctattttctgttacaagtattaatctattacaaaacgttttttctatggatttaaaaaattgacaaaaattgtagttaacaccaaatactttcatacaataagtatatatgattaagcatactgtagatgattttattttaatatttgcttactattatcgaaatatggtatcatcttaagaaaattttaaaaattagtttatatataaatattaaagaaaaagaattatcgataatatatatatatatataatcttttagtagtatatataaataatatactttaaattatttatatttttgaccccggtaatattattttctgggtccgccactggtgataacgatggtaatggtagcggtaacgatggtgtttattgtgatggtggtagttgtagtaaagcgatgaaggtggtggtg

SEQ ID NO: 5284 - DNA, 2966 bp, Arabidopsis lyrata
  Intron number 1 from transcript 493041 (locus 493041) deri ved from phytozome v7.0 (chr-ID scaffold_7; pos 10968074 t o 10971039)
ccctaactcaactgacttcgtcatcacgttttgcccctcctcgattcctaacaccaccaggtatgcgtgtgtataattactatttgagatattttataaattgattgaataaatgcatcttcacacacacacaaacaagaaaaacaaatgaatataccgatacacttataatgtgataaactaacaatatatgttatttgcttggagaaccaacagaagttcgatggctccattaggaccaaaaagtaagttttgtttttattttcctacaaatatgtatgcaatgtttctttttgttttgttaatcatattttttgtttgctaaattttcagataattctcaacacaagtttaaacccatactcggtaccaccttcttttcaaccacatccctcttccttactcggcatataactaatttttgcttgttttaattttcaaaggtttcttcatcctacgtttttttttgcaggaggctcggcggctttagttgtcttgatcattattgttgggattgtggtaatggtgagagcaaagaatgagagaaattcgaactatgagaacgttgaagcagttgtaatgttgaaaagatatagttataaaaacgtcaagaagatgacaaactcattcgctcatgttatcgggaaaggaggatttggaactgtctataaaggaaaattacctgatgccagcggccgagatattgcactaaagatcttggaggatacaaaggggaatggagatgatttcatcaatgaattagctagcatgagtatagcatctcatgttaatatcgtttctctgtttggtttttgctatgaaggaagcaagcgagctataatttacgagttcatgccaaatggatcacttgacaagtttatttccgaggatatgtcaacgaagatggactgcagaactttatacaacattgcagtaggtgttgctcacgggttagagtacttgcacaatagttgtgtatccaagattgtgcatttcgatataaagccacaaaatatactcatggacgaagatttttgtcccaagatttcggatttcggtcttgctaagctctgcaaaaaaaatgacatgtatcatatcaatgctaggcgcaagagggactgtagggtacattgctcctgaagttttttcccagagctatggaggagtttcgcataagtcagatgtgtatagttatggaatggtggttcttgagatgattggggcaatgaaaagagaagaatttgaaaattctacgtccaatataagtacaatgtactttccagattggatctataaggatctcgagaggaaaaaaacgatgagacttttaggagatcatataattgaagaagaagaggagatagtgaagaaaatgacattagttggtttgtggtgtattcagaccaatccagctgaccgtccaccaatgaaaaaagttgttgaaatgttagagggaagtctagaagctctcaaggttccacctaagccgaccttgactttacccgcggtattggccggttgggaaactgatgaagatagtcaagagacttctagtcttttgaaatcaagctagttacgggtcagagtaggtggtccgacatagacatgtttcttgcatgtatcggatagggtattttcttcttcttctttttctattcgatttttcaggaaatgtaatactatccttgatttccttgtcaatgtaacagtagctttaaccaaactggtaaggtctgaaattgtcaacaaattttatatatctcactaaccgagaaacgcaacgcaaaaatcatataaccagttgttgtaagtaaaaaaaatatacagacaaaaaaaaggtcacttaagaacatgagtagagatgccaaaattcgtttgtgaagattttaaattgtaaaaagaaattaagtttaaaacttttggtcaattacacaaaattgaagatcgaggaaataaggtccaaaaagtgttaaaagaattggttggttttattcgatatgaaagtgagatgaattacgaaacgatgtgtgaataatcgttgtataactagaaaagttcatactttaaatggtaacaaaatacagctagaatgtaattttttttaaagctaggtaaaaaaaataaaaataaaatgaaattaacaaaaaacttataaaccataaggagaatatattttatgtttaatgggcttttggttgggttgatatgtctgaaaccaggcatggtgagcttccgtcttctcctaatcagctgctcaaattcattgaccggctcgtctgaaacagattaagcactctcaagcttcgtggtaactcacagtttgaggacacactccgggtttggtttgggacacgacccaattccctggcacccacttagttttcaacttttcatctttaaaatctttcaattaatttcaaaacaaagatgcatttaatgtaaacaatggtatttttttgtgtaaataaatttaacattcattcaaaaaaaaaaaaccaacaccaacatgagagtcgatgatatccttaccatagagaacaaatgcgaccacactgtgaggacaatttcctggaaatttatttcttttcttctcattcatactagttgtcaattcttttaatttttaaatttaaagcctagctagttgatgactattttattgcttgtgaagttttataactaagataccaatccctactgaccaacaatgaagaagcaagagaaaacataacacaaagtgtattggtagttcgtattcactctttggaacgtttttgtttttctttaagccaatgaaaaagaggttgccattgattctcctccttgcttcacacttgttcgtatcaggtaccatatttcttaacccgattgatgattatttgatttgctaatcatttcttttttctttctaatctttatttattcctaggagtgttttccacgagtatccttaccatagagaacaa

SEQ ID NO: 5285 - DNA, 12217 bp, Arabidopsis lyrata
  Intron number 1 from transcript 910743 (locus 910743) deri ved from phytozome v7.0 (chr-ID scaffold_1; pos 3952612 to 3964828)
accatttatttcccgtgacagtagtgttggttctaatattcttgatgtttttcggacggaccgtctcggtcatgtgcactgtaaacgcatatttgtggctaagtctaattgttcgagtacgtatatgttcaagtacgagtatgtgtgagcataaagtaaacgacacaaagagtttgttaacggggttcggtttttcctacatccccgggacctagtccagaacaaattcactagaacaagattgcaattacaattgcgtatgatatcaagcactactatgcctatcattcttttctagatgaataaaccaccaatagatcttacatcatatatggtggggcgacgccacacaccttgtgtgcatctctcgagaataccctgaggcgcgcaagtcttcatgaagcgccctcttggtatttataacaattgctcaaccctagagttgacaattttcctattctacactaataggaatttcctattctacaccaaaataggaattgacaaatttcctttttctttatggacaaggaaactttgtcttcacgttctcatcttgaatatactattcaagatgtttatccagctcagcagacatctcttggcttgtccaagtcgtccccaaacttctgtactccaactcttcaaagcagtgtcacaactcagcttcctgtattaatgtcggaactagttcaagaactatgtcagacatcagatacatcctttgatatatcagactgctggtttcttgattcaacaccatatattctctggtttgtgtcaatcacagtcacttcctcaattcatcaatctcatgacattttagatggattataaaactcagtcaacacaacatcttcaatctctcccttgatgattgagttttataatccaagcaccttctagaaactagtcaacacaataataacaatctccctcttgatgagggcgttttagaacccaagcacacactcaatgcttcatgtttcgtcatctattcgactcaaaagatctcacatcttcattctccccctttttaacttagtttgatactcaagcactctattctttaagtcaagcttcaatcaaatcaaaaacaatcttcaactcatttcctcataaccagagtaactctctttatctccccctgcttgagtgcataactaagttaaaaactctgtgaagatccttcaatgcgtacatagagcttcacatcgttaaactcatggttaatacttcttgaaaaatcctctaaccaaaaccaagatatgcttgagactcttcttcattgctcatcatttatcaaccttgagagtctatttttcatcaaactatttatgagacctgtcttgttcttgcttcagctgttctcaaatacagaacgtctaaacttgacataagtgtaccagctcattttgacgtccatcttagttgaaatttgacctgcaaaaacttttctctgaaaactgtaactcaacttgagtaacttgcacgagtttttcttgagaatctgcctactagtctccttctttttgaacaaactgcttcctaaattacttgcagaaaacttgaatcatacatgcttcttatcattgagaattcccagtttctgaaccatctattttgaacaactcaacctttgatttatctttgcacttctgatactttgacagtcttagaccattctgctagctttccttgtagcttatctcacaccaactgatccaatgacattcttgagaacctttttaacacaatgatttaatcaaccttgagatctttgcaacccgtagcttttaagtctccaaattaactgctcggaaaagccttcatttaactatgttcttggcctccaaatctagtacccttttaccagaatctagtttcaaatatctctgccaaatttcatcccattctgaatttatttggtcgtccgtttgataactccacaagaactggccaaatctgaaacttcaaatgaactatgcccggatcaggttgaagaagcttgaataaaacacaaaccaaccgtcaaaatctcaatcccaccgttgaaactcaagacagcaataccacgaacctttccaccaagtttcggctcgatcagattacatttaactcaccaaacgtttccttgaatcagacatttcagaactgttttctcctttcttctctaatccgaaaatcatttattttgacattgatggtgcagttcatatctcctcttccctttcttctcccccatgactgcagctctctcttcttcggtgatctttgttaatccctttaatcacacaaccttctttatgtgactatcaagatcatttgttccttaaaagtgtgatctccaagctagccttcaagattctactccacagcttcttgtcttgaggcaactaaaactctgcctgtgagacaatctctaagagatcagtaatcttcataaccttaatcttgttatttgcagcagaatctcagatttaaagtttctcagaactcagaaaacgccttcgctagaatcaccggagtaacataaatcaaagcaccacatagcgtatgaaacatgctcatcttgatgtattgctatgacaaaactccattactcagtagatctctgctttcaacgccacaacttagaatcagccacaaaggattgattcccaaaatcgaagaactcttgaattgaacctttttcatcagttttgatgcagagcactagcgaggtagcagaacaacccagaaaattataaatttgggtgaaaaattccacaatagtcagacgaagccacaggagaaaacggatcacaatttgggtttacgatttgaaggatatggtcaatttctcaagacagatccgaaacaatacaaacctgcgagcagccaattttgagagcaatttcccatcaaaccacaagaaaccagaagatgatatttatatcctttagaaaatctcattctcaagttttcagaacatctttcagagctaaaatccgaggtctgaagccaaagaaacgaagatgaaagaatcaaccctgagaaccaaaactgtctttgaaatctgaaacattcttctttatcactctttctttgagttacttctcgattcaaagtggcatcaaacttcttcttcatcattatggagcttattcttcttccccatcattactcttctcgatccaatgcctttctctttatgatgcagtttaaatcctctccaccttcactcttcccctgactgaaagaccttaactcatatcttcctcaacttgaaacagtctgataccttagagaactccaccatcaacatgttccaagaaaccataaaactgtcctcagtagagccttggagcaatataagtccgagtataccacaacgaatggaaaaatgcccatcttaacaaaatcttcatgaacatatgctgtcacgttagcaagttatcaatgatttcccaagacagatccaaaatgttataaacctgtgggcatgcaactttgggagcaatttcccatcaaactacaaggaaccagacgacgatctttatatcattggaaagatcttgctcccaagtttctagaacacttttcgtagctcaaatccgaggtctgtagccatagcaactgaagaagaaagtagcaacctgagaaagaaaaactgttcttgaaacccaaaatcttcttcttctcatcattctttgatttcttcacagataccagcgacatctttaagaaccatattccataggctcatctttgattcatctttctttctcatgtcaagaaccatttgtcaaattcttttcaatgcttgcagcggaagcaaaacaaaatcttcaagaagtagacatcaaagctaaactccacttttcgactttaaaagatgtcgacttcatttctgtgtcttgaggtcacagtgggaacacacaaacatttccacgcctagactttgaagagcaactattgggaatcatcgctggcatctttatcttgttggtttataccatcaacgacgatcacgaccagccaccacttccataaacctgaaaaaccagttggttgaatcttcatctagctctgtttgatttcgatttctgaactcgtcaactttctctaccataagatgatcaagaacagctagccactgagtcttcttccctctgacttgtgctgacttgtcacacttgaataaaacttgaataaagcacactaattcagttccagccttcttctcctttcttctatcaatgttcagacgccttctcgtttaagcactgacatgatcagttttgtgtctcatcctttttcactaagtatcataagcaaaagctcaaccaagatttaaattctacccaatcaattcatgagctttcttagactcttcaaattctctccctccttttatttataaaacttagtgaagaactcatctactgatatgtgcttaaacgtatgctaccataatcttggtgaaatggtcttcctcttcaaccaaacaagaacttaagaaaactggttcacgtatcatactctaagccttccatatgaattacttttgatctttcctcaaatcgccaaatcaaaaacaagcttcaagagttgtcaacaaaacgcaaccattcttccccgttgaggaaactgtaaattctaaatttccaattctttacactagaaacttatgaccttttcaattctctcctctatccggaacctctcgcactttctctcggtggagacgactctcaaattctttctctgattttctcaatcagttgacaagatttccacttttgaaaacccaaattttttcccttcagtgaatctcaatctcaacggagaagaagatactcaaactctccctctgaatcttatagaagcttccgtacactttaccaaaaatttcaacccttgaaaatgaggaaccaaaactgtagattggcttaaagggaattagctcatcttctgatctcaaggttctaaccaaatctcagaggaagcccatgagacagctttgacacgagacaaccgaagctcgtttattcaccatctccagttactttgacaaagctttaaagagcaatgtcttcagtgaaaaactcacacatacaagtgtcttctttctccgataactgcataatcacggccatttctttaagactgcaaattttacctgtgaactcgacgactgcgaatctttcaccaaagccacattcacttctttcatctgagatagatgctgacattgtagttccttttcagtatcaaattgaaaccagagaataccactaaggctcaaaatgatttcagaatcacacgtctcttccacgggtaagctacaccatcacaaattctcttcacgtttattctagacatgtgactattttagccctcaatttcacgaaattgacctctctttgcttcaactaataactccagacatgacatcaatcctcaattttaacagctcaaaaaatctcttaatcttctgcagaatttgtgactctctttatctaagtatcatattgaagaacagtcgcaaactaaccgatttatgaaacccaaaaactgaacatatatcttcatctcgctgattccagattgagagattaaactccacctttcaccaattcaattcaaaacccccaacacgatttttcgatttgtatgatcaaacccgaagttaacccatcttctttcaagaaccgaaaataaccaaagatgaacgagatacacatgacctttgattttgtttctcttcgtgaagtttgcagaaccattgaattgaggaaagattatattatcttcttctgattttaaccggctaaaatcaccttatatcttcttcatcgagaaacatcttcttttaactctccaagtttctttcttaaaacaaaactcatgattctattcagcccatcgatttttcagattttggaattctttttcaatcttctgaatgctgagaaagacaaaaacatgtttagacgaactgctccttgagtgaacaacccacattcaacacagttcctcgttaactcctctacgaagcaatacaagagcactccagaatcacacacttcgattttgttcacactggagaggacaccagaagatagacccaaaacccaacatgtgtgtctattaaactaatctgagtcaacctttgctagcaatttttctccatcgtggaacactgcttcaaaaaacgtcttccttcgcgaggcctagaaaagaatcattattgggccaaaagttccaaaagcaagcccatgttaggaaaaagtcttcttctcaaccgttcccgacgataatagaaacaagttgtgttcttccttcatacaactcgatggatagcacaaacctttcttaagagtttaagatatattccacctctgtcaaaattcgaagatattcatcataccgtaactatccttttcgcttggtttcttcaaaatcacacaactccgaatatacccttgatctttttctctatatcttcgtgaatacacttccttctcatctgcttccagttcgcagttagccacaaatccaggatcatacccgaaataagaacagatttttgtcgagcacccgctctgataccaattgtaaacgcatatttgtggctaagtctaattgttcgagtacgtatatgttcaagtacgagtatgtgtgagcataaagtaaacgacacaaagagtttgttaacggggttcggtttttcctacatccccgggacctagtccagaacaaattcactagaacaagattgcaattacaattgcgtatgatatcaagcactactatgcctatcattcttttctagatgaataaaccaccaatagatcttacatcatatatggtggggcgacgccacacaccttgtgtgcatctctcgagaataccctgaggcgcgcaagtcttcatgaagcgccctcttggtatttataacaattgctcaaccctagagttgacaattttcctattctacactaataggaatttcctattctacaccaaaataggaattgacaaatttcctttttctttatggacaaggaaactttgtcttcacgttctcatcttgaatatactattcaagatgtttatccagctcagcagacatctcttggcttgtccaagtcgtccccaaacttctgtactccaactcttcaaagcagtgtcacaactcagcttcctgtattaatgtcggaactagttcaagaactatgtcagacatcagatacatcctttgatatatcagactgctggtttcttgattcaacaccatatattctctggtttgtgtcaatcacagtcacttcctcaattcatcaatctcatgacattttagatggattataaaactcagtcaacacaacatcttcatgcacttgtatcgtttggtacttggttccaatgatcaaggaacagagcagaaacagaggatctacttacgagacaaagaagaggaagaaactaaatatcgaaaacagagctgctcctgataaaagtaaaacccggtgacgaaaatcaaaattttctttttgtgaatttattttattcgtttcatctaacatttcccttggtttctttcgttctttcttctctgttttgtccatagttgttaattttgagacaaaaagatacgtaacttcttcttctttttttctcctttctctaatgctagtgaaatgtaaactattcaaactgattattttgttggtcatggttcagtgtttcttgattcatttgtgtacaactttcgtctaatcgatgatctgtaaatggaaatttttttactttggagttttgatttattgttgtttggaaaacctgtactatttctttgttttatttattactccctccatttcagtttagttgtcgttttacgatttaaattttgtttcataatagttgtcgttttaggttttcaatgcaaatgtttggtgaaaattccagttttatccctacagttttaatgttttggccaatgaaatattttataaaatatatctctatactattaaaagagaagtacaaatgaaaatgggtcgggttaaaatcagaaaattgacccgaaattctgaaatcggatctttgaaatttttttggaatataaattcgaattaataatgaaaaatcgaaataaaatcaaatatttatgaaaatcaaataaaatctgattgtacttatggtaactaataataaaagcatattccaaacaatattatacattaattacgtataataaatttgttcatatatttttgggactaattccataacaatcaacgtttttgtcattaatttcgctcattttagccaattatcattaattgaaagatattttatttgcttctaaagatttctagaaaatttatcacaaataacccatctgttttataaattaaattgatatttttattttggtcgtgtaaattaaatagatatttttattttggtcgtgtaaattaaatagatatgaaatccatgtaactaattttaatttaattagattaaatcgaaattatgatattttcatacctataacttaccaaagaagtttaattttcaatttataaagatttcttgaatatgattttagaattattcaacaagatgataagtatttattaaattttgtgaatcatgaaaaataataattaatttttaatcattatacttcatctttcaatctctcatctaacaaataagatacatattctattattactatgtccaaacttcattttgttgtacgactaaataatattcccattagaactgtcaaagcgagttgattcgtcccgttaagtccgttttgcgatagacaaaaaatattttgacttgtagttagtcggtccgcacgacccgcggatagcatatatgaaatacaaacccgtcccgcgaatatatgcggatttgcgggattgtccatggattttgtttaaataattttaaagtaaccaaaatttaaaatactactaaaataaataaataaatcaaaatactattaaaagtttgtttaaattaccacatgttgaataaattataattttatcaataaatactaatatgcgggctgatccgccaacccgcggacgatgaaaaccgattaaacctatgacccactacgaattaatccatgtggcccgcttatttgcgggtttaatatattttctcaaatctgccccatagtgagatgatgtgggcttgacccgcggtttttgacctattttgactgctctaattcccatgaatcgtctaattttagaattttaaaacacaaaattctattttgtaaatcataattaataccatgggtatatttataaacaattttacattttctctacaattcgttattatgaatatttataagtatactacacgattcgttctactaaaaaacacacacaatattaaacgcaacgtatgtaaaccaatattctcccgcggtggaccgcgggtccgatcctagttaataaagagtaaaacagaaaatttaatgctttcttaatttgtgtgaaaaaaccttaaacgacaactaaaacgaaacggagggagtactaaatatggatccgtgcgttgcacgggttaccggtcaaaattatcatttttaacttttaattttatttttgtaagcataactaaaattatataaacatatatattttaaataatgcatattgcatagtataaaacactatttgtagttatgttatactaattattaaatcatctaataaaaatattggcctatttataaaattatataatttttttgcttattacaacttatgaagtcataaatgttcataggttgtattattgacttttaataaattatttacatccatcggaagaatgtattacatcttataattttaatatgggttaacctgagtcagatccgaccaacttcgaagacttctttcaccataaaggtttgactcgagttcatttgttttgtcgggtcaacctcggattaatataaacacagatttttactgcaatttgaacaatttttaatcacaattatagagaattattgatttggttaattatggagaatttaatagtttagatggaattaagaagtttaaaacaagtatagggtgaattgggcagagttcgaaaatacaggtagataggaattgaaacgctatagtataggtgtaacgctataggcaacccttttttttttttctttcaaagtttctttcaaaacaactactatacaagtaaatggcgtccttttttcatacaattgtataatgatttatttaatatcaacaaggaatgatttatccaaagagagcatataataaatgtgtgtgtttttgagaaaggctgattcataccaaaacggttaatagtccattgataaaaagagccagagccagctggtttttaattaattacgtggcaaattctaaacaaaacaaataaaatttatttgtcgactaaaatatcatcaataaatatagaaacccacatatatatacgattgcagtcactggttttctctgttgaggtttgttgcaagtcttttttcaccgccggtaaatgcctctcgtctctccttgtctcttgattattactccctccgttttcgaatagttgtcgttttagagttttttttttgttttaaattaattgtcgttttaaggtaataatataatttatgccaataactacccaaattaccctcattttattgaatacaaattatttgtaaataattacttgtcatttttatgaggttaatatagtcattgtataccttttcttaatttgtccaaatacagttaaaatgacaactttaaaaaaccagagggagtatttatttttcttttccgatatgaaaagaaatctgcggtttattaaactgatttacttggtttttagacttttagtttcgattggagatttcaaagatgaacaatgaggcaaaagaaagattggtcaaacaacttggcaggattgggatggcatgcttcagtttctcttttctccacaccagcttgagaggtttcgagaaagacccaaacaagccattttcagccgccgttgctttcttctccgtgggttacgtcgtgtttcagctcgcggacgcgtttgctcaggttaagaaccctagatctgcggttttcgactacatctctatcttctgtggtgtcgcagtcatcttcattgcgctcgtaggtatcttctgcattgtctttttcgactaaaggtactgagtcaaaaccgagttatggggtttatttcgaaataagaacaaatctgtgatatgtgtttcccctactttgagtaatttcagttttttgttgtttgtaatgagtctatggattatgtgtttctttttagagatttggtatggattttgatgatctcgttatggaaagcaagaaagacttacgtactaccgttattatgagaaaagccaaacaaaaaaaagcgtgatgaaatttcctacgctaaacgacagaatatatgataatggttaattgatctgcatttcttttaacaagcttaaactgcatgcatgcatacgcaatggtattaccagtaaattactgacaatggtatcataactcttatcaattatatgcttcacggaaatcatgattatttcatacaatttggaaaatgcagtttagtgtgttttaattagaaatgaatttttttaattaaattcgttaattaatggttgtgtgtccaactaataacgatatatataatcaaagatttttgattaaaaagcagtttattttgaacgaaagaccaaaaaatgaataacgtctgtgtgacagtacgagagagagagagagagagagagagaggggctgattcgcacggtaaagcataaaaaaggaaatcggttattatcctttggtaaccaagacaaaaaaaacccagctggtttcgattattacgtggcaaattttgtttttgttcttttgttcacatcaattaatatatactagtgaaagtcgcttgctttctcactcgttcagcttcattgcacacttctttcacctccggtaacttgtctcttcttcttccctgtctctaaaatcatgcacatcttgatttttgtttttcatttcgtttctttccgattaactgaaacattttttcctttttgtttgtaatccccagctgatcgagaatgaacagaaacgaagaggaagagcactgcaaaagaaac

SEQ ID NO: 5286 - DNA, 12012 bp, Arabidopsis lyrata
  Intron number 3 from transcript 489781 (locus 489781) deri ved from phytozome v7.0 (chr-ID scaffold_6; pos 19032426 t o 19044437 reverse strand)
gaagaggtaagctctttgaccattagatctagtcttatgccaccttatctaataagtttccggtattcaaatctttggagaagttctttttgaataccttatgttggtgtcggatcccgcaccagaagtacgagaccaaccaaagattgccacgtgatcaagataatgacccataaaggatggagcccattggacccgtgagccgaaggaacggtcgaagtggttgtcaccatttcgagaatccgaagtgactgcactatgacacgagttcggtgtagaagacacgggtaagtcggttcaaggacacttgggccgaaagaggcgaggcccatgaagatcagagtcaactcaaattcaaacgttgagcattaaagccgaagaatcaaaacggacacatttaagaagaaataattgtgcttaattactcattttaatgtcgtttatcggtgtataaatatagaggccaatggccatgtaaaggggatcttcctctcaagagagaaatactatagcagttttcgtatcaatttataagtttttacatattcatttttgtccctcaagaataatctttcccacttaaacaaaatacttgagtgtgtgaatccgacatccacattttggcgccgtctgtggggatattaggttcttgagtggtcagattttttctttatcacacttccgagataagcaacaatgtccggaagagatgccgctgagacatcattggccgaaaccctcaaagctatgcagcaaaccatggcggacatatcacaaaagttctcggacgtggaaaaggccgtcgatacatttcaaacatcccaggtatctcttagtcaaaacgtcaatactatacaaactcgtgttcgctctttaagtgcaggaaacccggtgggaatccgaagagggatattcaactcgccaagttccgctgcacgaaatgaaaccagcggacaaacaactcccggtgctactaataatgtagctcagacgtcggaagaagagacgcaactcggggatgaagaacaacttgcagctcagtacgagcaggagaacctcgaccagttcgagaccatgaggaaggttagccaggaattaaaagaaatgaaatcaaaatttcaccaggctacaagttcggagccagacatcaatcgagtcattgaagaagctaggcgaacacctttcatcccgcgaatcgcgagtttaaggatcaaagattcccggaaactcaaattggacccttacagcggattggaagatccaaaaagctatctcgcagcctttctgatcgccgcaggaagagtcgaattggatgaagctgatgaggacgcaggctattgcaagctattttcggagaatctatgtggccaagctctaatgtggttcacccaattagagccgggttcgatcagcaatttcgacgaactatcagccgtgttcttaaagcaatactctatccttatggataaaagcgtttcggatgccgatctttggaacttaacgcaaggatctaatgagtcacttcgagttttcatcaccaaattcaaaggagtgctgtcaaaactcccaagaatctcacagcaatcagctttatctgccctacgaaaaggattgcgacacgattcaaggtttaaagaagacttaatacttcataaaccagacacaattcaggatgcactcttccgcgcaaacaattggatggaggtagaagacgaaaaagaaagttttgccaaacggaataaacaagaaaagccggcaatcaccgtccctaccaagaagttcgagcctagagagagcaaaggaccaaagaagtttgggtcgcaacccttcaacaattccgtcgggaagcaattccaagggaaaggaagatcaaacacttgggtccgtgatgaaagtctgtattgcgacattcataaagtaaccggacatttaaccaaggattgcagcgttcttaaaaagcacctcgcagagctttgggctagtggcgatctttctaaattcgatataaaagattttgtgaaggaataccacgaagcaaaagaaaactccaaagatcaagattccaaaagaccaaggttatccaacgaggaagaaccaaggagttcgaagggtaagatcaatgtgattctaggaggttccagattttgcggagattcaataagttccatcaaaaagcataggcgaaatgtcttactcaaagcaagtttgagcgaagaaattgattttcaaggtgcttcaatatcatttaacgaagaagaaacgcggcatctcgaaagacggcatgacgatgctctagtcattactcttgatgtcgcaaacttcgaagtatcaaggatccttatagatacaggcagttcggtcgacttgatctttttaagtactctagaaaaaatgggaatcagccgaggagacatagtaggacctccgtctccattagttgcgttcacaagcgagtcagccatgtctctcggaacaatcaagctaccggtccttgccaagaaggtatcgaagatcgtggacttcgtcgtcttcgataagcccgcagcttataacatcatcctcgggactccctggatttatcggatgaaagcagtcccctctacataccatcaatgtatcaaatttccaacatcaaatggggtggaaacaattcggggagatcaagaagcttcacggacgtgctacctagctagccaccgtatgaagattcaatagcaactaacgaagcccgtaaaagaaggactaagaacaaaatttcctagcgggcagaagaaagatgatgtagtaatcgaagtggtattggaagaagacaagccggaccagaaaattcgaattggagcaactttgactggccaaataaaagaagctttgatcgaactcttaaggaaaaacaaagcatcatttgcatggtcagcagcggacatgcctggtataaatccgagtataatttgtcatgaactaaacgtggatccaagcttcaaaccggtaaaacaaaaaagaagaaagctaggaatggagcgggcaaaaatagtaaacgacgaagtggataaacttttgaagatagggtccataagagaagtgcaatatccggagtgggtagcaaacactgtcgttgtcaagaaaaagaacgggaaagatagggtttgcatcgattttacagacctgaataaagcatgtcctaaagatagtttcccgctcccgcatatagatcgacttgtagagtccaccgctggaaatgagctgttaacgttcatggacgccttctcgggttataatcagataatgatgaaccccaaagatcaagaaaagacgtcatttatcacagatagaggtatctactgttacaaggtaatgccttttggtttaaaaaatgcaggagcaacttaccaacggttggtgaacaaaatgtttcacaatcacctcgggaagactatggaagtctacatagatgatatgttggttaaatccttgaagaaagaagatcatgttaaacatttggaggaatgttttgatattctcaataaatatcaaatgaagctgaacccggcaaagtgcacatttggagtcccatccggagaatttcttggctatatcgtgacagaaagagggattgaagccaatccaaatcaaattaacgcctttctaaacatgccatctccaagaaacttcaaagaagtacaacggttgactgggcggattgcggctttgaaccgttttatctcgagatcaacagataagtcgttgcctttctaccaaattctaaaagggaacaaaggattcctttgggatgagaagtgtgaagaagcttttgggcagcttaaggcatacttaaccactccaccaatactgtccaaaccagaagtggataaaaaactttacttgtacgtatcagtttcaaaccacgcggttagtggagtcttggttcgggaagaccgtggagagcagaatccaatttactacgtgagcaagtcaatgacggatccggaaaccaggtacacaatgatggaaaaactcgcactcgcggtggtaacttcggctcggaagctgcgtccatattttcaatcccatccggttgaagtattaactaaccaaccactccgaacaatacttcatagtctaagtcagtccggacgtttggcgaaatgggcggtggaattaagcgagtacgacatagagttcaaaagccggatcagtatgaaggctcaggtcttagcagacttcctgaccgaactaccaatacctggaacgatagagcaaccggagaaccaaacttggaaattacacgtagacgggtcttcaacaaaacaaggatccggggtgggaatcaagttggaatctccaacatcagaaattctagaacaatcattccgattgttattcaatgcctccaacaacgaggcagaatacgaagcccttattgccggacttcgactagcacaaggagttggagctaaggaaatattggcttattgcgattcgcaattagtagttaaccaatttaatggagactatgaggccaaagattcaagaatggaagcatacctcgaagtggtgaaggatctatctaaaaatttctcgaaatttgaattaatccgtatacctcggggagagaatacaactgcagatgcacttgccgcattggcgtcaacatcagatcctgagttaaaaagagttattccagtagaatgcatctcggagcgaagcattcaagacagcaaggaaaccctcgtcgttacaaggtctcgagcagcggcacgcgaccgtggcgaaccagagatcgaaccgccacccaacaaacgaaggaagtcaaagggatcaaatacatctaacaaggaacccgttgtcttagctgaagaaatgattccagaaacgatgttagagaccgagccattactcgaggagaatattcttgaaccaaacgaacatcccgaaccagagccacggatatttcacaaagttgaccaaattccggctaaagactggggggctgactggagggagccaataaagcactacatcacgacaggcgagctcccaaagaataaatggcaggccaggaaaatgaaagtcgttagcgcgaaattttgtctatcaaaaaatgcgttatatagacgaggtgttagtgacccttacctattatgcattttcgggtccgaagtcgaaatcgtcatgagcgaagtgcatgaaggattatgtggaagtcattcatcaggaagagctatggcttttaaagttaaaagaatggggtacttttggcccactatgatcacagattgtgttaagtttgcccaaagatgcaagcgctgccaactccatgcaccattaatccatcaaccgtcggagttattctcctccatttccgccccatacccgtttatgaggtggtcaatggacatcattggaccattgcacaaatcaactcgaggtgtacagtaccttttagtccttacggactacttttcgaaatggattgaagctgaagcgtatgttggtataaaggattcggcggtgaagacctttatttggaaaaacattatatgtcgacatggagttccgtacgaaatagtcactgataatggaccgcaattcatttcacacgagtttgatgccttttgtatggactggggaattaaagttagttattctactccacgatacccgcaaggaaacggtcaagccgaagccgcgaacaagacaatattaagcaatctcaagaagcgcttaagtcatctaaagggaggatggtatgaagaactccaacccgtcctgtgggcctatcgtacaacccctaggcgacctacaggagaaactccattctctttggtttatggcatggaggcggtagtaccagctgaactcaatgtgcccggacttcgtcgaacagaagcaccgttaaatgaggaagaaaattcagcaatgcttaatgattcactagataccataaatgaaaggcgtgatcaagctctaattcggatccagaattaccagcaggcagcagcccggtattacaattctaaggttaaaagcaggcctttcttcgtgggagattatgtattaaggcgcgtctttgacaacaaaaaagaagaaggtgccggcaaactcggtattaattgggaaggaccttacatcattaccgcagtggttcggaacggtgtttataggttgaaagacttagaagacaatccggtcaagcgaccttggaatgtgatcaacctaaagaagttttatgtttaaaacctacatgcattgtttatgtacatgaactacgatttggcttgatcccgaaatgggtacgtaggcagctcgaaaacgagttcagctattaataaaatttttgttttatttctttattaaaggaagaaggttcggctatgcgaacatacaagagattgaaaataaagcgtttgttcaaaaaaaaaaaaaaaagacgaagtgtcccacatcgtacacttcgaactacaaaaaccttgttgacgagcagaacacttcaactccttgaccagcaagatcgaggattggcatcatgcattccggaattcgagcaaagtctgaaattccaagttcaatccactctccggggtgagattcaaggatgtgaagatctcttgacaccgtagtaagcctgcgttgcatccggttaatcctcttccgaagtctcctcttttccgacataagcttccggtgttgaagttcgagcgcctctatgaacgccgtcgccgttccttggtctctgattgggagatccctgatcaaagcacatggggctcggatttgagatctcaagaagccgcgaagtggaggagtctgcctgttgggctcatttggaacatcttcgttcatcattccgattgtggagaagtcaggcatagattctgaacagcgtagattgaactccatacctgctaaaataaaaaaaagaagggtgagaagtaaagggaaattgaacctataatttataggaaccccatatccttagcaagctgcggattccatccaaggaatggagtaattcgcggagagattcatgccctcgaacagatcctgcattaaaagatgcatctccaagaatatttggaaaaaaaggaaagtagcaaatatttccataaaattaaaaagggccgaagcccattacgagttttaaaaaaaaaaaaagagagaagaagtgaagaaattaaggaacatttatgggagaggctcaggaacaggctccttcatcgccggtttagttttcgaagtggacgccttgtttttggcatccacttcggaacgatcgtgaacgcgttcccggcagttgctggcctcctcctccaagtcctcttcctcttcattgtcggatggaacggcgaagacaggggcattcacgggacccgggactcctctagcacggagatacatccgaagcatcttcgggatctcagcaacggaatcgaagttccgccactcccactgaaagggatcactctccaaagcccgtatcttcctttccacccgagcgatacgagcctcgagcgtctgccttttgagtcccagccgctgcctctcttcacacaggcgacggtgcttgtcggcgacctagcataaaaatgagtgaataaggcaaaacaagaagttttaaatcaaaaactttaatatttaccttgtcgataaaatcgcaagcctctttcttctccttcggaggaaagtgaaagacggcgtgagggaagagaacgccggccggttcaaagccgtcgccggacaagaaaagtgggctgccgggattgatgggggctacttcttcgttttccattcttaaaatatttctcaagtgagattctatagtcatgtttaataaagcctaagaggtaggtaagcctttatttataatgatttagggtttgtcttgaaaccataaatccattaatggtagcgtttccgagtgggttaaaccatttttggaaaatcgagaaaaggcaattattgcattaaaagacgagccgttttctttaagaagggaaagagcaaccgtcgcattaactgtaaaagtttctaaggcccaagcccaacaagtttaccgagttgactaaactcgaagtggggaactcgctttaagccgagctcagctctcgcattttaaagagaaaggtctgatcagcctaaaaatctcgaaagcattgccacaaggccacaaaaggttaaaagcggactttgcaaacccgcatataattttaactaaacccccttgggtcacaacctagaaaggtttaaaagcctcctcaggcaaatatcttgttcaaaagaaacaataaaacctccttaggccaaaaataaattaagtcttaaagataaagggacaatccccaatttaaagtggacacagccactacggagcagcagccacctcggaatccggctcaacaatcgaagcttcattcgcgtccttggcagctgcttgatcagatgaagctccttgaccaccctccgcggtacaaccaacctccggagtgacctctggtaccattggagctgcgggcgggacaacgtcttccgtctcacttgaacctagaaataatgattccagtcaatcaaaggtacaaggtaagaaaaaggtaagccacaggagccaagcgttacctgcccagtctaaacccgattcactgataggaggtgattcagtaaagaatgcctcgaagtcaagcgggttgaagatcgaagtgggaagagctgctaagcgactccgtttctcagaaaggttagtcgacagctcggtcctttcttgctcctcggagaaatctgcttcatggatttggtccagcagaatcaagttgctttcgtgctccttgatgtctgactccaagtccgacctagctttctcggtttgcatgaagcgaatggccccttggatcaattccatcccgcgtcccttaacctcctttctggccttcgatgccgaccttgccaactcagaatcacgcaacttggctagcgccttgtacttcgcgtcaagctcgataagttggttgttcagggtgtcggcggttgattcggattcgtgaagtctaccctgaacaccagacagttcgtcctggagtttgtaattctggtcatagtagtcttgcagttccccctttacctgcgccaactctgacgtcaacctatcgaccttatcctccagatcgtgcttagagccagcagaagagttgaggtcagcctcaagagctgagaatttcttcttccacatgtcaatctccttctcccgtccaatgaccaacccttcgtaatgttcgatcatgtcgttaaattcgctctgagcctggcattatacatgaaccagggatggtgagtcagttcgcagaatggcaatgcaaaaaaaaaaaaaaaaaaaaaaaaaaaaaaaaatggaactaacccgagatgagtgatgcgcgtgaagcaaatagcgttcacgaatcgcagggcgccatttgtcgaagtctggcaggatcgagcccgatcgggtcttgaagcatcggaagacgctgccctctttctccatagctgcgaagaaggaagagttgtaaaaattggaattttaataaagacaaaaagttgaagtatgtaaatcaccaaacctgaaagcgatttgacttgagggacaagagcaggttttaacctcgaggaagcatctcgagattcagaatctccctttttcggagacgcactccgggcagtctttccactatcaggctgggaggaggaagacatatcaaccggacgtggaggacccattggttcaagaggaggagatgatcgaggtgagcggtcagtccgggccctcgacttttccctctgcggagaagaatcgctgcgagaggacttgtctctcttccggcgaaccaagttcttaattggctcgttactaaaatcatctcggggaggacgaggtgaatcacggcgaggagattgaaccctccgaggagaacgtgagtcgcgatgatcgcgacgaggagttaatctgaagaaagcgacagatcgagctccctcggtgctgccatcatcaaccagcaaggttctactgtagtccttcttgtctatagaagtcgcgaggaactttttcttctcctcgcaagcctcagccatcggcttggaaagcaacttacgcttggccgcaagggcccgagatgacattccttgagttgaaggagggggaggaatttggtgaagatgaccaggcggactcatcctgagtctgtggttagcttccaggaatcgttcaagagtgaaggaattccaaagggtttccccttcaagaattattttgaagaattcgatgaactcttcagatgggaggttggaagcgatgaaagctgcgaaatgaaacaacggtgttagtcaataaagataaagaaacaaccgggaaagatacgggcaacctaatcactaccgggtttcgcagaccacttcgaagggagaaaatcagcgagatttccaatcgaagcgggggttttcttaattagaaaccaaggatgatgccaattttcatccttgttcggaagatgtgaaatgatgttcctgttgggattaggatatgctgagaaatatcccgttttcttcgatgaacttctcacgctcagaagctcatttagttcagcaactccgataacataaccggcctccgccgcgattgttataattccaagaatagtacggagaagattgggggttaattgaggaagagcgatttcaagagccgctaggtatagaactagggcttcgggaagaggaaaggacagcccgcaacccttgaaataaatctcgtacacacagaagtaaccatcgcgatggttctctggggattctgtgggggaagctatttgagcttccgccataatttccggcggaatccggcaaagctctttcaaccgctcgagggattgaagagtacaagtggacctatagtgcggaccggcaatatcatcagagcgggtgcactcgtcattgctagaacgcctctcatcgaaagacggagactcgggtctatcgaaatcggaagccattgggaagatagaaaaattcaagatccggcgaagaagggttttggtgaaagaacgaagagagaggttttttgattaaagtacaaaagtaaaaagaagagagtaatggtgaaaagaagttacctcaagctaatgatgaaaccgcctcggaagtcgtgtgggaagtgggaaggtttttcccgttttaatagtaattaaccaatatacggtcataatgatgacagatgtcactcggttaaaaatggatagtgccaaaattaaaggagtgatgagatttttggcgggaaatcagaaagattctcgagcgcaatctttggccacttgagcatttaaagtcctccgaactggaatagcacttcgaagaacttggggggctaattgttggtgtcggatcccgcaccagaagtacgagaccaaccaaagattgccacgtgatcaagataatggcccataaaggatgaagcccattggacccgtgagccgaaggaacggtcgaagtggttgtcaccatttcgagaatccgaagtgactgcactgtgacacgagttcggtgtagaagacacgggtaagtcggttcaaggacacttgggccgaaagaggcgaggcccatgaagatcagagtcaactcaaattcaaacgttgagcattaaagccgaagaatcaaaacggacacatttaagaagaaataattgtgcttaattactcattttaatgtcgtttatcggtgtataaatatagaggccaatggccatgtaaaggggatcttcctctcaagagagaaatactatagcagttttcgtatcaatttataagtttttacatattcatttttgtccctcaagaataatctttcccacttaaacaaaatacttgagtgtgtgaatccgacatccacaccttagtgtttgaggtcaagaaatttcttatttaaggccaatgaagtaactaagttttgtttgttgtgtcaggaaccattgcgcccgctagtcataggaggagacca

SEQ ID NO: 5287 - DNA, 7867 bp, Arabidopsis lyrata
  Intron number 1 from transcript 320627 (locus 320627) deri ved from phytozome v7.0 (chr-ID scaffold_4; pos 12536612 t o 12544478)
aacttgggaatgttgtgtcgtggacagcgatgattagtggtttcttacagaatgatgagaagcggtggatgtatattggaaaatgaagaggaaaggtgttagactgaatgaattcacttattttgtaattctcacagctcttccttcaatttctccatcagaggttcacgcacagattgtacaagagatcttcaactgttggaatctctcttttatatgcttatgtaaagtagatgaggctgcaaaaattttaggcattgttgataaagacattgttgcttggtcaaagatgcttgcaggatttgctcagaccagagagacagaggcagctataaagatgtttagcaagctcacacacaaagggagggataaaaccaaagttcacattgtctagcattctcaatgtgtgtgcggctaccacagtggctatgggacagggaaagcaattccacgggttcgttataaaatcaagactagataattatctagtatccatgtgttagtagtgttattataacttaagaaataacacagaaaaccttatcttcagattcaacattgacatgtacataatgctctgttaaaattgaccattctgtttggatatgatgtgacaaaataccttccttattcctctgccaacagcctcactgtcgtcgccctcattaactagagaaaaatgcaagccttaaatctcaaaggtgtaggaagaagcctctgaaacaatgtcactgttagagaactccagtagctcggtaagtaacgaatccatgcacttctctacctataaaatccaagagtcaacgaggtgtccatgatgaggtctctcgcaatcaatttaaagcatttagggaagttgagataaatgtaaattgtgaaatctagttagggactaatcaatattatccacatgggtagtagtgagttttatacataagaatactcagaattgtttagagagaaaaaggaaaagcatttataaaggagctaaacatacagactcacagaaccagtgagagccgttgaacaaatataaaaggcaactatttcaaagacttgtcttacataccttttattaggtatgatccattatttccactaataataaggagattacatgtcgaccttgggctgaagtgcctctagctttgagtacactttcaatctccgcaatttatgaaggaattttataagcgagagagctccatcagacttgggcactagtgtagtttccactgaaggaggagaaatatataaattttctttgaattcaatagaagagactcccgtccacaatgagtatccatcataacttaactgataacttactagtgatattccaaatacaaggggggagctgcaccagacttgaacactcagcaagaaatatcttgagattagggatatttccaagagaggtggggatagtcaacaggcttgagcagtactcaatatccagaatcaatagattaatatcgcattcccaattgaagagggtagctccaataaccttgagcaatgattgagatccaaactcaccagattagtggcggttgagagatcaggaagctccttcaggtttttggaataactcaaatccacccacctgagattttgaagaggctgccaaaaaaaaaaacacacaacatacaaggaaattacaatgagtagtgaatatatgcataaaaaatactgagacaaaacatgcttctatgccatcaagttttaattgactaaaaaaaggtgagtgttaatatcacttgttttttttttttcatcaaattttgacaaaaggtgttacaaacagattgtgcattttgaaataaaaccaaattcaaattatacgagagaaataatttttactcacttgaactcctttccacagcttcttaagtttgctgcaacgcatgtttagttcgacgaggaactccggaataaaagtagaaggcaaacatgtcattggaaaatgttcccaatgcagtaatctaagttttggagatatatatttcagactttgtggagagtacaatctacaaccattataattttcaacttttctgtagattcttaagaattggagattccacattctttcgaaacatttgccgctaatatgaaatttaccgttgatttcagataagtcgagatccatgcctacaagactattactaccctgaaaattatcagatgaaataagagttatcaattgaatttagtttggagggaacaaggcaatgaaggaataatatgaaaacttacagtttccttagtgagtacttcacagatctctctagcattgataataaaagattttaaaagattgttaaaaagttttatattatcttgatgatttatttaccaaaatcttgtaaagtctttaaaacttttttccataatcttgtatactcttgatgacttttccaaacttttcctacaaaatatttccaaaatcttgtccaatttttattaacgtctagtgaccatcttctatcttctatataacatgttctgtgtaggcctggttttcttctatatactaggttgtttatcagagttacagaggtacgcttcttctatcataatactcgcttatgaatttcgtgtgtcgatcgttagattcttgtatgttcatataatatttaattgttttcattgtctttggatcttttgattctctagcaccaaaatctataaaatttgcaaaagtcaagtgatgtgatacgtttggtttaataatatatacatgcggagatttgcttatgctgtgatacgtttggttttgtgacaagtcaatggtcttttttttttgatacgtttgatttgcttatcatgatcataataattcataagtgtagatgtgatacgtttggtttaatattaggatgtttgaatgtgaaaaaaatgtcaataagatttgcttagtcaaagataagttgtttgaatatcggacatccttatgttttatattcatctgtaacaaatgcttttagtcaatgggagattcccaaaagagtaaggaaaagggtccatacaatcaatggggaccagaggagacaaaattgttggtagagttacttgttgatgcagttcaccgaaattggcgtgataatagcggtatctttagcaagctaacggagttgatataagtttttatttaccagagagttgtactaatttggttcttcgattttgcggttttgagtcttgatagtcttgtttttgcttcatcttcttcctttgatatcttctgattcagacctcggtttggagatctaaaagttgttctgaaatcttgagatcaagatatttccaaccgtataaagataagcttctgattccttgtgagtcgacttgagaaaaagtttgaagttggtgcacttcagcttcgtcgctctgttcttcggtcttggtagattggtcataactttcagaccgtgacagcaaatcacgttccgctttttcctgtagcttcgtatatctctctactatttttcaacaaagtttcatatttttctgggttgttttgataaccctttcagtctttgaaccagaacacgtctgttctgttatccttcttcttcttttttggttttcttgttttttgtctttgtctttgtcatctatttgtccaccgcttcatcctcttgaatattcgcaatttggtccattcattcaccaatcaaacacaaacccaacaaatagaaaactgtttattaagcgaagacaaataaatgaccaagacaaagacaaaaaacacaaacagatcatatcatctcataaacagatgtctttgtctcctccattccccaattttggaacttgaaattgctggagaacaggagaagcagcgacggagacgattccggtgtcaaagattgctgacacatacaaagtcatggactctattcacaatctctctattttatgggagagttttcatgactttttttatgaagaaaattatataaaatcctaaaccaataacataatattttaatttatcaacaatccaagattcttttgttttaattgaataacacaaaacttttaatgactctataaaactcttaatccaataacactagatttataaagattttagattactttttataaatctcaaaccaataacaccaaattgtaatagagtttttaaaagtcttgattgaataacaacatattctacataacttttaaactcattaaaagtcaatgaaggaataatatgaaaacttacagtttccttagtgagtacttcacagatctctctagcatcaaccaaaaattggcgtttcccaggcagattgattatgaacaatttctctacctagttctactaacagattaggcatctttataaatccatgttcccgtgatatgagtgactttccagctaagatttgaatcccgtgactcttccaagaacgtattcgcaagaaaatcttcaagtgtctgaatacttttatggttgaaaaagcaagctatataaagaaataaatctttatcttcatcgcataaggcgtcataactgaatcttataatactcttgatatcttggtgaagcctagttctcaaccttggtagtgcatcgatccactcctgcttggacattccccgaaaataggagcccattacacttaaccccatcgggagattcccagaaagttgtgtaacttcccatgcaagctcctcaaaaccatctttaggggacttttgaccaaaagcattcaagcagaagatttgaagtgcctcttcatcaattggataatccaccttgtaattatgatcaatcccatgtgccttcaagagttgttggtcttgcgttgttatgataatccgacttccagaaccaaaccattgagttgttttcgccatagcatctagttgtactaaccgatccacatcatcaagaacgagaagcactttcttatttttcaacctttcccgtgccacatctaagtgacgtatcttcaaatccttttgatttaatgtctcagacaaaagttttccctgtaattgcaacatgtattcatagtagtcgcagttttgtactgtatagactccttttatactcaccataaatgcagtatgagagaagttactacgaattgtttcatataaggctctaacgatggtcgtcttaccaatacccgcatgaccccaaacccctaccattctcacttcatcacattctaggcataacaaagtcagcatcttttccatgtgagcttcaatcccaaccaagtcttcaaagtagtttgatgggcaaaaattatttagtgcatttgaaacgttggtcgcaatattttcgatcatgtccgcttcattaaacctaaaaatgaatatattaatgttaaaccattttaaaaagattttgtgcgaaagaaccctctaactcgccaatatttgcaactttatcatcaaccacaaaaaaactgcaaattaatcatacgaactcaaaaatgatatgcaatataactcttttttgctaccatcaagtttgtaaaattgaagccctcgcgacgataaattaaactatgtctttagaattttgaaaatctaatgtatgtgaccgtgaaaatgtttacaatatacgtataaaggttatattacgtattattttatagtccgtatgattaatctgcattttttttgaagaaaagtataaaattgcaaaaattggtgagtttgaaggtttgtttacataaaaactcccaaaaagtatagatctatgggtcaattatataatataagtgaccgtgtatgcgtcactaataatcatttacattgtaagggctacaaataatcatttacgactctagttgcaagaatctatctttgaaaaaagtaaaagtggagattaagaaagctaaccagttgcttgaatgatgaccagcaattgttgccacttctgccaaagcctctttccatcttctaatgtcttcttttgttttaccctcacaagtatttatgaagaccttcccaaattttccagtttgcttctttacatcagttggatccactttatagaaaatggtcatcacggtttgaccaaactcttttctacaattcataacctccaccaattcattcaggcaccatgtcgaagaagcgtagttcttcgagagcaagacgattgtgattttcgatcctctgatagcttctacgagttctggaccgatcgatttgcttctctcgatatcattatcaatgaatatgtcgattccctttgctttgaactccttgagaacgtgactgagaaagttgttgcgaacatctgctccgtggaagcttgggaagacatcgtgtatccaactgcgagacgaaggataaagagccatgaaatgaataggattcgagaggttaaaagtctttttagaaaccaatctgcataatgaaatggaaaaggttttaaatagctgcacaggaatattcaagtaaatttccggtaagagcctaagaggaaatagtagttctactaaatttgttatcatccctttactttcgatttcttacaaattatcccaaatataaaattacacaaaacatttatattcaaattggcaacagaccaaacagaaacatttcctaagtgatcaattttattttatttttgtatttaggacattaatctcaaaccaaactaaatcaaacccaaaccaaacttgttttaaacaaaattcttatcatttacaagaacttcttggatgttgaaaagagctaaatttgttacaaccaaaagatattgggacattgcgataatcccttataatgtggatcaagtcagcgatcaaggtccgacacaaaagagttgacttgtgagatagcaatgtgaaaataaagggaaaagtaaaccaaagaaaaagtctatttagacaacaataaaagggtgttaatatattagagaatggccatccagcaatatataattaaggtgaatagcaatatattctagattagtaagtagcacattttgtgctaatatctatagcaagttgattaggtatttaatggaagtattcgcacgaaaagaaacagggtatttgatggaagtcaacatgagcaatgacaatttcacctttaatctaatgaataccaaaccaaaacggaccaaaatatggattgaaaactacaaaacatcttttttttttttgctttctccactacaagaaatatgatcattgatagtacattataatagctcatttttcaaaaccgctattaaagatgaaatgttggatgatgttatcatatgatagcatttcaaaaatactaaccacgaaaatgagtagcggaattaaccatatttttagcgtaatttcagaagatgtgtcgttatcagctagtttagtgtccgaggttattatattgttaagatgaggctttaattttcccttaagttataataataatattatatcatcgatcgatatgagaaacaaaaaaaaaaaaaaaaaaaaaaaaacagaaaacgacttttacgtcgaggtgtatattaggccacacgcagtggtgcaaccactcggcgggtgtgagtattaaacaatagagaaataatgtaaaaagttgcttttcaacaaaacttgagtgtataattgcattcgggtgtgaggctttttaaaaagggaaaaaattttattttctctatctctctcctctctctctccacatgccaattctcctcctctctcttcgataaattttataataaatctattattaacacctatcctcatggataatttgaaaacaccaacaaaatttcggttcgttatcttcaataccaaatgcgattcgcaacgacaacatggagaccacaatctctggaaaagttgaaacccaattttcgaatttattgctttggcgc

SEQ ID NO: 5288 - DNA, 4759 bp, Arabidopsis lyrata
  Intron number 12 from transcript 478245 (locus 478245) der ived from phytozome v7.0 (chr-ID scaffold_3; pos 3698319 t o 3703077)
ctagctttcccattcattgctttctctagtgttagggcatatgcaacgtgagatctttgaagattgatcttagattgaaaatattattaaaatattataagagctttagttaagatcttttgtagagtaattgattaagggtagaacatgtttagatcttaagaaataataatttaataatcaaaaactttaaatgttatttaaaaattgaattttttttttaaaaaagtaagttatattaaaatagagatggaaataaaataaaacacaaaatactattcgaattagttattacacaaaaaaaaaacattaaatatataaatgaaaaacattaaaaacaaacaaacatattaattaaaggttacaaacattttatttaattaatacaaagtttaaaaaaattattcattaccaaatgtagtccatatattctcaatcaaatcctcttttaattggtgatgtgcttgtctatcacgaattcttgtgtgaccatcacctagaccctcgagatttgtaggcatttcgactgaaaacgtatgaatctcgtcttgttcgaattcttctttgtcatatagagtgtatgaatatcgttcatcttcgacaatcatattatggagtatgagacatgctctcataatatatgctattttacctttcgacaaaaaccgacatggatttttaatcatggcgaatctagattgcaggactccaaatgcacgctcaacatcttttcgtgcaccttcttgatgttctgcaaacaaacaatgtttcgggtgttgtggtcgttggatggatttcacaaatgtcgcccattcagggtaaattccatccgtcagatagtaagacaaattatactcccttccgttgacatagtagttcatttggggagctcgaccgtaaataatgtcattaaatactggggattgagcaagaacatttaaatcgttacttgtacctggcgctccaaaaaaggcgtgccatatccagagatcttgtgaagctaccgcctccaagacaattgttggtttctcggtccctcgtgaatacattcctttccaagcggttgggcaattcttccacttccaatgcatgcagtcgatgcttccaaccatcccaggaaaacccctcttttctccataaaagagtagcctttcaagatcctctgttgtgggtcgacgtaggtattcagtgccaaacaaatcaactattgcaacgacgaaatgttccaaacatttacgtgccgtcgtttcaccaatacgtacatattcgtcaaccgagtcggccgcaaccccatatgctaattgtcgaattgctgcagtacattgttgtagcggtgatataccattccggaaagtggcatctttttttggttgaaaatatgacacttctgctgcgagacgattcacaatacgcaggaacaatggcttgttcatgcgaaaccttctgcgaaataggttctccgtgaaagtcggattatcattgaagtaatccttacacaactgttcgtgcccttcttcccgatttctttctatataagtacgcttcttcctttcggtcggaataacctcttcgatcccatcacatagattatcaatttgtgcgtcgatatattggtcaaaaaaatcatcatcactactagatgaattatgaaagtcaaaattgttggaagacgatgccataaaaacggaatggttgaaatggtttatatggttgaaaattgtagagaaggagagaagagaagtgtttttccaagacaggagagaaaaggatttttgtagtgtttatgagagtaatgggatgtttgattttgatgagagaaacgaaggtaggaatcacatatatatgttaagaaattttgttactcttgctttaataatacaagccgaacacatgtgactctcgctttaatactactatccaaacacatgtgactctcgcctacaatccaaacctgacatgtgactctgttgacattacattttcgattacaatttgcaaaagttagcttacatactcgattgataccaaaaggaacaaagtcatgtgactcacaatccaaaagttacattaccaaaggtccacaaactggtgaatgggcctccaaagtaacagctatcagcctcctcttcagagccatagaatcaagtcccatgtcttcttgaacctgaaaccaaacctcaattaacataactgattcattataaatataagcatagaagttgaacaaggttcagataggttacatagaagtataacatttacaaacacacatacttagctaacagaaacatatgcataatgaaaaacatagttaaatcagacatatcagacatagttaaatgaacttagtttttccctaatttaaaacagctcggccattagcttcttcttaagaactttttcatcttcatccagtgattcactccttgcaaggagagtcttgtaaacagacatcttttggagtttttccctctgagccatatccttctctttcttctcccagatgttatcatcagtcgccaaagctggtccaaccttgcctttccctttgttcctcttggctttcatggcctttattcctggtggcctgctctcttcctcaaaaacatttgatccagcagatggtggagcatcatcggcttttcttttgttagagctggttgtctttggagtagggttcataggctccaagttcaaccattttggttcgtagcgcagcgcattccatgcatactccaaactgaacttcttcttgtacagctgatagtagagttggtgagcattgttgataatgtccaaatcattcatgccactagctttctcactaaatgcttcagcataaaatccacagaacctggccaccatcttttggattttttgccatctttgcctacagtggtcagggagccttggctcagccccatttagtacatgagtactagaagcataatactctcctatgcgcttccaaaaggcccctgacctttggtcattcccaattatcacatcctttgatgtgtataaccaaccgcttataagaacaagatcatcctggctggtccaaatccttctctcccttggtgtcttttctggttgacttgcagcttgaactggtggtgagctcggttgtgaactaaaagaagggatttgagagaaggaaatgtttgcattggaagaaaatttgccgtaagggaagttttggagactatagtatggttgagattgacactggttatttggatggtcatttgaatccatatccgacagcttaatagaaggaagagaagtaaaagcttaggtaaaaggagagattcaaagaggagatatgatagaagaaaagagaataggagagaatgaatttaacatacctctggtttaatagaggtaagttaaactagtagttattagtcttaaagtatcattacctaacacaatcaaatcaggtataaagacactttcaaaccaaaaaagctttaaagtagcaaactcataactagagctaaccttgaactaccaaggtcagatcagtatttattataactttccacaactagaaagttaaacagactatactagtctgtttacaaccaagaaagctcattcatcacatccaaagtaaccagccaccatttcaatcatcaaataaccagtaaaacaagtaaaggaaaagttcagtaaatttgaatgttatcctcccaagtaacacacactttcgttaacttcaaagaggaataggtttcaccacttattaacaaagcactactcaactatctaaaaacaagagacatacaacatacatactccagtttactcaatcatcagaaaacaagaacaagaactctaaactagaaacttcagcagctaatcacaactatattgagtagggaattaccttatagttggcaggaaatggttgttggtgttgctactccgatttaaacttcagagctacctcacctacatgtctcacaaccaaaacaaacacttgtggtcagtttaatcaagcaaaaaagacacgatacacataaaaaaactataactctcacagtttaactcgaatgtcattgttatttgtaaacctaattttcttctaatgagaacaacaagcaacaaaacccatatactaaacccaaacctaaacctacatcgacttcaaaaaaaatcctctaaatctcagactttcggatgaaacgatgaaacgataaatctcagactttcggagaacacgtacctacggctttgggagaaagaggaaacgatgaaacaccagatgggtgaggcgaaatcaatcggagaagtcggatgtggcctcgagatcgtcggagatctttgtcaccctagagatggtgtatcagcaaaaagaagaggaaaataaaaggaataacgagaagggataccagagaacgaagcaaagatcgattaggctccgattttaccggaaatcggtgcgaaatcggccaactatcgacgacggcaacaatcgccgcgagagaggctggagagaaacagaaccctagtgttgaaacgattttgccccaaatgaaaaaatattttcgatatcaaaattcttacccaatccgcgcatgccacgtcacagcgagagcgggccaagaactgatccagcccaagaccacttcgcccgatcttagctttcaaaacccaaattctagtcattttaaaatctaagaacatgctctcagatacagcgataattatggtcttagtttacaacttctactgttttttttaaataacttat

SEQ ID NO: 5289 - DNA, 1957 bp, Arabidopsis lyrata
  Intron number 2 from transcript 900333 (locus 900333) deri ved from phytozome v7.0 (chr-ID scaffold_4; pos 10529559 t o 10531515 reverse strand)
aagaaggattctggtttcatctgtctgatttccaggttatccaaccagagaacagaatcagatatacaccatctctatttgaaatcaggtttatctcggaaacaggaatgtggcctgtgaaacagagatcatggagtaacttctttgagtttgtttttcctattgaagtccagtatgctatggaatcgaataaagaatttgtgactggtaaagatttctagaaatttttttaatgtggaatccatatattttatattacactgattatagttggtttttattgttcattttttgagtttagatgctattggtgtgattgctggtgtcaatactgatcgaagatttccttatgtgtgtcctcggggagggtcagacaatgagtcaagatttgtggcttttaagataaaggacaatatgtaagtttttctcttaatatattcttttctatatgtaagatcaaagatgttttttgatattttcagagcatataagcataatgcaattcatgaaatatcatttaggggtggaataattgagtgcattgctgttggtacgtgttgtgatttctttatgaccaactggtctgctaaggtcgactcggttacttataattatgaaccaatcgtggctgttcttcgcaactggagaattacagagtttgatggttagttctaaaaattctttgtttccttctgttaattagactatcttatgtgtttgaaatagttattatttctaaattatatattttacaattgttctataggaagaaatgtcttgatgagtcaatttggttgttcccgtttgtatcttgatccaactttctatgacttggatattccacaatacgtgtaagtgtcatttttaccaattatacaattgactattaatgttacaaggagacacactaatttggtctatgttatttcacagtcttagcttcactgatgaagatgaacatgaagatgatgatgactaagagaatctgatgatggaagttccattgatgttttattttcattggttttatctatttaggttgttatgattcaaatttcggattgataaattttttatttatgtttcaaacaatgttatcctacatttgctatcaagttattctcatgaattgctctttaacattttaatttcataactctttataatctccttaactctttatattccattggtttgatgttttctaaattattatcataagagctactaaacgacaaagtatatagatttcttttgatataacagttcactcaaaatcttctcaaaaccaatcaaaagccttttggaaaaatatggatacacaatctataaaatatattattagctactatcgaaatgatttgtattcatctatacatataatataaatacttcattgggaagtaaaactaataaaatcctatactgtaaaacaatagtcatcattcaaaaccggatttttggcttttgatatacccaatgtctatcatttctagctgacataaaacgtaaacaaaacacttgagtagttttttgaaaggaatgttatacttattagtatttgtttaaattatcagaatccagactatcaaaatttttaaccaacttatatttattttgtttgctctctaattctcttctcttccattaacaagacaaccgtgaagtaaaactaaacctaaatgtcaaactcttcctatcccatggattttgtttctgatttgaacaacgagagaatgaactggaaggttcatttaaagatcttgagtatttggaatcttcattccacaccaaattcgagtatggttacaagcatgattttggttgatgagaaggtatgtgttacctatgagttatagtttatttttagttttatttgttttatcacagacttagttgtggacatcttacaatatcacaactcttataaaatctcttatgtaggcaaacaaaatcg

SEQ ID NO: 5290 - DNA, 5723 bp, Arabidopsis lyrata
  Intron number 5 from transcript 486975 (locus 486975) deri ved from phytozome v7.0 (chr-ID scaffold_6; pos 441940 to 447662)
ttactttagtgccatcgggataccagcatcccccgacactaaacccaccagaggcttaatcgtctacgagggtgccacgtcgtccttaccagcgaagcctttgatgcctgccccgaatgacatagccaccgctcataggttttcctcgaacgtcactagccttgtgggtggaccatactggacaccagtgccttgtcacgtggacgagaagatgttcataactatggggcttggcttagacccatgtccttcggagaccaagtgtattggaccgttagatcaaagattagctggatctctcaacaatcgcacttttatgttaccggagagaatctctatgcaagaggcttatttttacaacattactggagtctacaccgacgattttcccaaccaaccatcgcttaaatttgattacacaaaattcgaacaacgtaccaattctgacttcgaaatgatgtttccggaaagaaagactagcgtcaagacaataagatttaattctacagtcgagattgttttgcaaaacacggctattctctccccggagagccaccccatgcaccttcacggcttcaacttctatgttttgggttatggatttgctaactatgatcctattcgtgatgcaagaaagctaaatctacttaacccgcaaatgcacaataccgttggtgtaccaccaggtggatgggttgtcctcagatttatcgctaataatcctggttagtaacatttatatatgtttagtatctacagttatatattaatggatggattaatatgaatatatgaaattgtatttttgcaggtgtatggctgttccattgtcacatggatgcacatttaccattaggaattatgatggctttcatagttcaaaatgggccaactccggaaacgagcttgccatctccaccgtcgaatcttccccaatgcactcgggatcctacaatctatgactctcgggcgactaatgttgatttgtcttactaaaagtagctacgttcgttttaaaaaaatacattaactgttgactatcaatcgtagtcatagtttccacatttttcgaaataattgtttcttaaaattcagtatatctttcttgtgtttatttacgaccatgcttacatttctgtagacgttcccaatccaagactccgacattcaaaacattactctgaattagtcaacttaaatgactcttttgcaggtatagtcttttgaggcagattgtttgatggaggctgtcaattaatatatgatttatgagtaccattaattcaaatttgcattgtttgaatatacgtgattcttgaatataagagagagtgacacttacagacataggtcttttgacattaataggacataacttggctcgtttctttaaaaaaaaaaaaaaaaaacttggctcgtttatgaagtctagaaagagtcgccttaagaaactttatacttggcctctcttcaggtgtcactcttcaaacataaagctatgtataattagttctgtcctgtattcatcagagaactgaccatccagagctgaatccattagcaccaaatagtttttaccttggaacaaatcaagtggctgcacaaaataccacattattaacatatattgaagctaagaatcagtcaaaaatgcaactcaatttgcaacttttgttacatggtttggaggaatatgtctgccgctcataagatccaataacaaggttccgaagctaaatgtgacgctctccggtataacagtatcaaggcgcaaatactcgggaggagcaaatgctaagttggtgctataaatcttcccttcatggctattcttcatgagaccaaagcaagaaagcttaggattccctatctgtcattcaagaacttgaagatgagtttttttcaaatcaagaaaaacacacaaaacaaaaggagctgcttagcaataccttatcaaagataatcctgtaaggctcgtttcgggaatattgatgatttttttcttctttcttttaaagtgtaaatgggctataagtacgcttttggacctaacgggctaaactgataaaaatctgccgaaatataaaatatatcattttagccctataaggctataatcttcagtcaaagcaaccgtggcgaaaaatgttgttatagaaacaaacaaaaattattttcttatcattagctaatccattgttatctcctggccaaagtcatctcagcaattgattgaatcattgattaacattagctaatgacatgtccgccaatattaacaagaaaaaacaaaaaatctttacatttgtttatgaattaatatataagcggtacgtagttaaagatgcttggagacagtgatcatatgccactggcattaagtaattgatttcactaatctctcaagtctcaactaatcacgcacaaaggacatttttgccttttaaattaattcgatctcgtgattcacatggcagagttgcttagctgtatcatcatgtttatgtgtgtatatatgccattgactcgagaagataatttttttattcttttaaaaggtagaagacgaatgtaagcttcaatgtgtgaacggaaatatataaacgttgaattcattggaaaacaaagaaatgcggattatatgtaattaattagatatcgattcgtgatcatgagaacaatagaattagaactttgaagcaatcattatttggtttcctttagtagtactccctccgtatcaaaaagattgatttttgaagttttatttttgtatcaaaaagattgattttatataaatttttatcaattaatgttaataaattgtaaatttgaagaatcattaattgaaaattttaaaatttgatgaattactattggttaatagctatgagaaatgggttggtatgattgtatgaataagttgtcatttataactaaacattaaatgtttttcttaattagtgtgaaaactctataaaatcaatctttttgatacggagggagtattagagatggacatttgattatttgggtccgttcgggtcataaatgattacacttttgttatacttatacataataggggatgatcataaaaaaaaatggaggtagttttaacatgtgacatcataacctaaagaaaaatatctaatgactttggaaatatcaattacaattaatgtttgggccatgggacgaaatcttattagagcatgggcagtggggcaagcaagtgggtgtgagtcttgggatgtaagtattaaaaaaacaaaaaaattgtctctcttttcatacccggatgtaagtttacactcggatgtaacattttttctttctatctctctttctttctctttctcttatctcttttgctttaaattataatactaaaaaaatacttacatccatacaaacatatttgccactgatggtcttaaatctcgactttacgacttcaccaaagaacacgtaaatagaagataaaataagagaccacaagaggaaacgttttacacagcagataatatacatgcactaatcgtttggcatcgtttttttatttttttttggttggtcaacgacgtgggcaatcgtgttgagattgccatttctggcagattaataattgaatagtaatataatataatagtttcgtaaagtttttattaaaacttcggcccatctctctccattagttccttctataaatacgtgtacgagtctctcataaagtcataagtggggcaaattatcatttttcacttcctcgcatcaacaatgcctcgacttcatcattatctcccaaatcaagccttcctcgtccttcttctcttctcttccattgcctcagcagctattgtcgaacatgttctccacgtatttactctaataccattttctccttctttctttttctttactctataaattaaatataattttcaaaaattacctattaattttattactgtggaaactatattatattaccatttttcattatatatactagtcaatatttcttaaaattggaaaagttggtgggtggtatgcacgtgcttgtgttttcttttcctccattttaaaaattcttaccgtatttgatggagatctagactgtgaacccgagttttagtgtattttatctctagattatataaacattgtggtttattacgaattaagcgtagaatgttctctttttgtttgcatttgactttagcgtatatatttattgttaactgatttaattgtttataatataggcatattaggaggggaaaaatacaataaatacacacattaacacaacgcggttaaacaaatactatttttttagtttttaactttgccattaaaaaaatatttaatactaacgacgtctaaccaacaggtccaagacgtggtggtgaaaccgttatgcaaggagcaaataataccggcagctaacggaagtcttcccggcccaacgataaacgttagagaaggcgacactcttgtggttaatgtcattaacaactcaacttacaatgtaaccatccactggtaattaagtaacttattgatcatctcgatatcattttatatcaatattatttcatcaaataattaactttttaggtgttaataaaagtatttattgatttatatgtaggcatggagtttttcagctgaagagcacatggatggacggtgcgaatatgataactcaatgtccgattcaaccaagtaacaacttcacatatcaattcgatatcaccggacaagaaggtacattgttgtggcacgcacacgtcgttaatctacgtgccactcttcacggggctctagtcatccgtccccgatccggccgtccttacccttttcctaaaccctacaaggaagttcctatcatttttcgtaagtatttcccttttttttttttaagtcgaaataaatttgtgacgcgacgatcctcgattatagtgattcaatataatagtaaaagaaatatttgtccaaaaaatattggtttttcaaacagctgtatttcacaagttgatacatacaactttctcgatctaggccacattctgacgagtatgacgaagttggttcgaatataataaacatccaccaaatatattatgtatatgaagatattatgatataatagtatttaaatttttaattaatttgtttttaaaaaattgattatgcaagaacaatggtgggacacagacgttagacttctccaattacggccagctccggtttctgatgcttacctcatcaatggcctcgccggagattcatatccttgctctacgaatagtaatactcaatctttacttgaatcgaaagttacttttaattgtaaattgtttacaaaaaacatatattaatttttttttttggtttttttggcttcgataggaatgtttaacctcaaagttgtacaaggaaaaacatacttgctaaggattataaacgcagcactcaacactcacctcttcttcaaaatagccaatcacaacgtcacagttgtcgctgcagatgctgtttacacgacgccgtatctcaccgatgtgatgatcttaacgccgggacaaaccgttgacgtacttctcaccgctgaccagcccattggaaagtactacatggccaccgtcccttacattagtgccatcgggataccaacccccgacatcaaacccaccagaggattaatcgtctacgag

SEQ ID NO: 5291 - DNA, 939 bp, Arabidopsis lyrata
  Intron number 3 from transcript 481882 (locus 481882) deri ved from phytozome v7.0 (chr-ID scaffold_4; pos 13683528 t o 13684466 reverse strand)
acaggtaactaaacatttttactctcacactttaatcatgttttctaattaaattctgttaatcttagtttagcactttagcttaagtagatttggtttcaaagttaaggtcgaatctttcttttagattctttgggttgtgaatttctgaggctgcaagttgatgcatagagtcaaaagtaggcgcagacctcgatgatttttctattcactagtggggcagattgtggaaaatcataattgtcataataatcgcatcagcagaatataaaccataccaattcttttcctctttgaggaaaaacgacataacataaatatctaacagggaataaataaagaaaattataatacacctctcagtcagtgttagggattagttctagccaatgagctttgagtgtatatatatatatatattgttttcgttaatgagctttgtgtctttggaggtttagtgatagtggagtttacggttgtgttttaaagactccccactataacccaacaacaaaagtcgctgcctcacaatttgtcttctagattttatctcccaccctatttaattaacccatgtttttgtcattggctttattgtgttagttactatttctagaatgtagcattcttttgcaatcgggtttaacaagcattattgattttattgacaagatatttattcctaaccaatccttcttgttaataggactaatattggctaaaaaagacaattctatcacattctacaacagttaccaattcatctttgactaatatggaaatttaattttcacacgcaacacttttggcgttattcatttcatcattaatacgttccacatgtctttacatatttctattgaataagttctcacgtgatttcatgtgataattgtgtaaacagagcggaagagtacttcaagagagcggtaggagtgg

SEQ ID NO: 5292 - DNA, 1237 bp, Arabidopsis lyrata
  Intron number 3 from transcript 474468 (locus 474468) deri ved from phytozome v7.0 (chr-ID scaffold_1; pos 28492798 t o 28494034 reverse strand)
aaattaacaaagaaaaaacttgggactttagcaaggtacgacctttgactttattaagtgtgtttgtatgaaaacttgcttctaaaattgtcaaacttttgaatcaaaagtttgaaaatctcagggttttagtggttatgttcacatcttcaggtctcataatcattttcaagctctctttggtttagaccaatgaactctgttcctagggtttgtagatgagaaatgtcttaagggtctgtttggttagctgcatagcgagtagaccgctgttgctagtgcgttctagagtctaaaaccacagtgagacattgtgggtcttgtgtctgattgtactaaatgtatttggtgggtatgtcaggctttgaaattgtcccgttgtttcaaatggttaataatcagttttcacccatacatttggtttttaaggtttgtactgttttcacattagggtttttaacatactaatatagatttgttctgtttctttaattaatggtagtttttagagaggtgaaaataaacaaatatattctactgaattattctgcataagtcatgtgttttttgcagagattattatttttttttttgtgcaaatgcagagattatatgggtgcaatttttttagtatttgtttgattctgtagcagcacattttgactaaatagcctcgcagaaagagcaaacatattcacataaataataagaaagaaataaaaaaagtagattgggtttcattcatataaagaaatggtatacacacaacttgcttatttttttattccttctcttataaaaatagcattttctaagcatgaaccatgaactcttcacaactcttgatgaatattttaaagatgtatattcattgtatatatgtatctagatatttatgtgtagttctctcttttatattttgatcactattagtgaaacattcttttaccttgagccttttttcatatagttcttcactagtttctttgataaagcaagtcctatttagagatattactaaaaagatgcttggccctccattaacggtccttgatccaagtattaaagcttgttcctctttttctttatgtatcgaaaaaatcatcattacaagtctgattcactctcttctttccttctctttttaattccttttgtggtgattcttgtcttatttgttactgtgttcttgattctgttgtctccttactaagctctttttgtaatggatctgcag

SEQ ID NO: 5293 - DNA, 644 bp, Arabidopsis lyrata
  Intron number 3 from transcript 897034 (locus 897034) deri ved from phytozome v7.0 (chr-ID scaffold_5; pos 9470064 to 9470707)
acaactactaccacaactaactgaaaacaaaaaaggtatgtctcagactccatttagttaatgcaatagacaactagtagttggagcagctcgtgtgaatgtttgcagtggttctttgtgtgttgtatagtactgtcttcatagttttgatatgatttgagtgtttcagttgtaagggttagtgtattctaacaaagttttccttgatatcactgtgtggtttctgtgatttgagtggtaatggtcttgtttcagtttctgtcataactgaaaagttaaccatttatacttttaattgaatgaatctggtttgtggtacttggtagctgagttggtgtaaattgtatttacacctgatttgactttggtagttgatagttacctaaacacttactactaaaccacttctccttttaaacaatcttctatttatctcttctttgcacattattctttccaaaccaatctgttttaccatcttccatctcttctttcatctcttttctttagtgattgatatggattcaaataatggtccatacaatcagtctcccggttcctatgttagccttcaaaactttccttatcattcattttctcttgctgtagcttcagaaatcccttcttttagttcacagccatct

SEQ ID NO: 5294 - DNA, 20852 bp, Arabidopsis lyrata
  Intron number 2 from transcript 480008 (locus 480008) deri ved from phytozome v7.0 (chr-ID scaffold_3; pos 12336164 t o 12357015 reverse strand)
cccttcaagcttcttcacttttaataaccctgttgttggtcttgttgcttgtggtccccatcagattcaagcctttacgcagttcaagaacgagtttgatactcgtgcttgcaaccatagtgaccctaggaatggagtgtggtgcgataactccacgggcgcggtcacgaagctacgactcggggcctgtctcagtggaactctgaaacccaacagcagcctcttccagtttcatcagcttcgttacctttctctccctcaaaacaatttcatctcctcttcactcccttccgagtttggaaatctcaacaaattagaggttttatctctttactctaatggcttcctcggccaagttccttcttcatttagtaacttaagcatgctttcctttttagccctttccgataacgagctcactggtagtttctcatttgtgcggaatctacgcaagctcacagctttagatgtttctcataatcacttctctgaaactgtaaatcccaacagtagtctgtttgacttgcaccacctctcttaccttaatatcggtttcaacaacttcacctcctcttcactcccttatgaatttggcaatctacacaaactagaggtattggatgttacctctaatagcttcttcggtcaagttccccccacaattagtaacctaacccaattaaccgagttgtacctttccacgaacgacctcactggttgtctcccacttgtacaaaatctaaccaagctctcttggctggaactttcttataatcacttctctggaaccatcccttcttctctcttcactatgcctttcttatcatatctttcattaggtggaaacaatctcaacggttcaattgaagcttctaactccttttcgtcatcaaggctagagagtttgtacctaggcaaaaaccattttgaaggaaaaatcctagagcctatctcaaagctcattaaccttaaagagctcgacctttctttcctaaacacaagctacccaattgacttaagtctcttctcctctctcaaatctttgttgctcctcgatctatcaggtgactggatatctcaggctagtttaagttcagattcatacatcccatcgaccttggaagcgttgcgtttggagtactgcaacattagtgatttcccaaacatcttaaagacccttcaaaatttgaagtatatttcggtatccaacaatagaatcagtgggaaaattccagggtggttatggagccttccacgtctgagctcagttctcattacaaataatttgttaactggcttcgaaggttcatcagaaacttttgtaaattcatcggtgcagatcttacttttggattcaaatagtttagaaggagcacttccgcatctgccactctctatcagctacttctctgcaaaaaacaatagtttcagtggcggcatacctctttcaatatgcaacagaagctcgcttgatgttcttgatctaagctacaacaacttcaccggtcaaatacctccatgtctaagtaacttcttgattttggatctccggaagaacaacttgggaggaagtattccagacaagtattatgccgatgcacctctacggtcactcgacgttggctacaatcgattaacaggaaagcttccaaggtctcttctaaattgctcagctctacaatttctaagtgtggaccacaacgaaatcaaagatacatttcctttctcccttaaagctttaccgaaactgcaagtccttatcctccgttcaaacaaattctatggtcctctatctcctcccaatcaaggtcctctgggatttcctgagctgcggatacttgagatagctggtaacagtttaaccggaagcttgcccccaaacttttttgtgaattggaaagcatcatcactcacgatgaatgaagatctcggtctatatatggtatatgagacggctgtttacggaatctattaccttacctatctcgaagctatagatttacaatataaaggtctatctatggagcaaaagagggtcgttacttcctcagccaccattgatttttctggaaatagacttgaaggagaaattcctgaatctattggtctcctaaaggcactgatcgcactcaacttatcgaagaacgccttcacaggccatattcctctatctttggccaatcttgtgaagctcgagtcactagacctatcaagtaatcacctctcagggactattcctaatggattagggactctctcattcttggcgtatataaacgtgtctcacaaccaactcaatggtgaaataccacaaggaacacagataactgggcaaaatagatcgtcctttgaaggaaatgcagggctttgtggttttcctcttgaagaaagttgttttgggactaacgcgccaccagcacagcagactaaagaagaagaagaagaggaagaagatgagcaagtgttaaactggaaaggcgtggcaatagggtatgggcttggagtgttacttggattggcaatagcaaaactcattgcttcatacaaaccggagtggctagcttgtctagttaagggcagaaaccgtttagcttgtctagtggctaagctgcaatgtttgtcaagttgttgttggtattgtattgaagcatttccttacgtttgttgtatctttatctgatgtttttgttctgttttgttggtattgtattgaagcatattcatatactaaatagacaactcatctaacactgaaacagaatataactaattgcttaagtctcaacaagacttgttgatcttcagcctctcagttccactatgacacataccaaaactataatcccctacgttccacaactgtcccaacctatacaccataactatctcaccaataactatctcaccaaccaagtcacaattttcttttcttttcaacctttctttgttggctttagcagtgttaagacataccttactcctagtgagaggtctaaaaagtcttgatctgtctccaacaacttggcacacacaatttccatcaagtcattttctgggtatggaagtcttccttaccactaaacctgtcatcatcatcaacatccttcagtttccatggtaaatactaaaactaaaaagtcattgccttgttccactttttattctttgcacataccttttgatgcattcacatttgtctgaagctaacaaagaaagtggggagcaaaggaagggccaattacggtcatgtctttcttctttctttatgatttttttttttcattcgtcgatttttctttctttggagattttcttcattagtctatttcatccctttttctactttgccagacttttccaagtaaagttattgcatcgacacttgttttaggtcgtcctacagacaaaaaaaaaagcaattataacaaccaaatagaaagaaaactttaacataatataataccttgaatgtctaccgtctattcgaagacttagacctcctaattccaaagagatttcccttcggaaataaagtttcagataaacaatatataaaaagaaaccttaattttcttttccttctttcaactcatacaaaaccaagacttggaacaaaaaccattcacctaattctcatctatcttttacctcttcgtccccattctcttgttaaaaaaaaaaaaacacaggagagtaccatgattaatttttctctgtctctgacaatcatagggatgctctttgtgatcccctcttgttttttgtcagttgataagtgtcacaaacactgcacctcttggtttaaatgctgtatgaggagatatctctattatcccttttggtcgcttcaaagagaagagtgcggtcacccggattttaaagtcaactgcagcggcgatttcccatagctaagtatatcctttgccaagttccatatccttgagctgaactattttgcaatgattttataagactcgccagaatggattattacaacaatctttgtcccatataacctgagaatgcaacaatcaaccaacaaatccttccatttcttcaagacaccgagctgcgtactttttattataactactctggtccaaggtagacatacttaccattggttacattagacagcctgagtgtaaggcaaagttactttgtctacgatcatatttcagtactaattcaccatatttctttatccctaacaaaatcaaatgaaaatatataaaaaaagagaccacgaaaacagaacgaaaaaagaaggacatataccggcagagttcccctaaacgtattctcctgctttcaagttttaagcacagttgaagccacgacaaaccgagaggaggatgatgagaattaatgcgatgatgataccaaggactatgagcttaatcttcatgttctgaaaccacatctttcttgtcattttcgttcctggcgctctgaaatcttgtgcctgtagatatcagaattcaaaatataagagagtgacaattagaaaggagatatgtttgtatcaaaaagctaacatatgagtgaaaggtaagttactaacctgtgaacaaaggttctcggattttgtccactagaagctcaattttctcaccacggtcaagagcctgcaagttaatgaattacataaagcacatgcagtttcgcagaagtgggtaagaagcagagagaattcaagtcatttatgacatatattctcaaattaatgatataaaattgtgagattgacatggatatgattcagaccttctcaatgttctccgtcataacacatttcacttcgttcacttgatactaaatcagttaaaaaccatattcacagacacttaaatcagttaattttttggttttccgtattctgatggtagagccaaaagtacccaaattctttgttcaagctgttgagttaagtagtggtcatctttcctttccaccactatatctcttgttgaagtcttctttaactcgctccaagaaggccattgaaatctgctgaaacaacgcaacaggctgcacaaaaaagagagaatctattgtcagactcagatccatgaacaaatatgagagaattataagaaaagacactaaatgtctttacaaatacgaaaacaaaactgtagagttattcctcatatatcacctaacttcaaatacaagaggcaaagcaagctaaaggcataaccacatgcaaaacaattcatgctaaaagtacatgtattgtttttttgttttaaattttagtttggttgtattaaaggaaattttcacttccatttaaccaaagtctcaattgcaatgccttctcagttctcacaaacaagccaatacataagccgaatggaatcagaacaccaagagagaaaattctaatccatcaatggaaaccttaacagaagcaaaacgaagtcataaatatacacatgaatatcactgggaccgatagaaaatgagcagatagatccattgaaatcgattgcaacacgaacacaaatatacatatacgtctaccaaatagatcgaaagtacgccttcaagagagcgaaatctaaaactcatatttacgcgaatccaagcataaagagaacgtgttccgattgagaagggagactcactgaagccactttcgacgaggtaattgacggtgtcaccgtcgcaattgtattcgaagaaggaagcttctagaggcactgcgaagtgacggaagtgaaattcccttttgaatttagtattctctgtgagaatcaccaaatatttttaactgagatttacctagaatgactcataacttagaaaaaataacttaaatgacacccatttgatttattagactaacccatattttaagtaaaaagtctaattaaccttcttgagtaacaataataacaatcatgccattataaattaaatcaaaccaaataaataaataaaactagtatcgtaaaaaaacaacacttgggagtgtttataaaattgactgatgctgaatacacatgggctgcccaaaccgttcattacttcctctcaaatcagctgcgagtcgacaacgatcacgagatttggtgtttgattgatcaaatgccaatcagattttctctttatgaatttgctgacgtaacggggctcaattgtgatgttattgacgagtcagacacatgtgaagttgcttaccatgagttctggaatgaaatgggtgttggaacgtccgatggtccgctgtttattgagttggagcatgtaatggatattagcaaggcatggagtaaagagaagaggatgatggttggtaagttatgcttgttatctgttggagttcatgggattcatcacggttctagaatcccgttgtcaagtgctaaaagagttcttgatccagtagcttttgagaaatatccttggggtcgagtggcatttcagtctctacttaagtcagtgaagatggttgatttaaagaaatatacttatgtgattcatggatgcgtccacgccttgttgatatggatttacgagagtgtgcctggattggcagcaggatatggatttaaaagggagacattgacaggtactccattacttgattggagatcttctcgcaaacgtatcaagtttaaagactttattgccaatgagaagactgcccatggacaggtattttaacatgctgcagcgtttctctctaatgttttatttacttatttggcttcagttttttctctagtataactggttaacatgattatgtttttaaataaagactgagacttgattttttttaaatctgaaactgttttgcatttttgattatctaaacaaatggtttctgattacttaaatgttgtgtagaggtgcgtgtgaggcatatgatgccagtcactgaggaaaacatgtatcctaagtggagtgacgcggctgacaatcaagatgggctgcttgacaacttgctgaaagacatcatccacaatcgtttacaaaatgatgcgtggaaacatgttagagtgccaagaaagaaacgtaaagtttctagaaacgaggatggagagagtagtatcattcctaaggaaaagaaaatgaaggagtcaaaggctagtgatgatgaaagagcaaaagtatctaacaagaaccataaaccaagaaaagaacatatggtggtccactatattattgatagtgattcaacttaaaccattatatgattgatttcaggttgatgaagaggagaagactaggttgttggatatttacaagatgctggagaatttgaatgggacagtttcagagatgagcaagaatcttaccagcagaatggatgtattggagagtaaagtcgaatctttagatcaacagcttattaagaggtttgaagttgtggagacagatttgaagcttcttaaggcgtctaagcccactgttgtgcccgatgatttcgtcgccacttccaacaacgttgaattagatgaggcaaatagtaaatcagctgtaagtttattttgttgttcaagaacaattctttataaaactttgtctgtttcccattttttgtatgaattattttgctaatgaatcctatatctgattgtttttttcagtcttggatagtagaggagaagccagggtctcaagatgggctgcctgttaaaagagtagttaagaaggctgtctttaccgtgaagacaaagaaaaagaaggctggagaagtgtctgaggatcttgttctatgtgaaaagaaacctcctacaaagggacttacaaggaagaaagtgacaaacgtgcctaataaaggttttaaaaagcctgagcagaagaagatagctgctccaaaaggtgtgaagaagacaatgaggactgttgaggatgatgttgaggatgtaactgacaaagtaatggctgataatctgaaaatggtttcaagttttgaagaaaccttctctaatcctcaagatcatatggctaataagactttggatgcagcattgacatcaattctacaaggagtacagagtttggacggtgggattactcaggggagacgtgtgccacaacttgcgggttctcaaaaatttccatatgttggaaattctacagtgaagcgcataatcactgatgctccaccttcttcatcattaccagaacatgcatcttcaaccagtttctgatgagaagtttgaaagtttaactgattggctagaagaccgtgttgagtaagtttctctttactagaacatccacattttctgtttgcttttctcattttctgttttctgtttcagggacgaagaaccacttagtaccagcaatttcaatgccagattctttcgccagattattactccaagagatagttggccagatgaaaaatatggttggttaaaagactatgtaagtactgtatattgttttcagatttgtatattgatttcagctttggatatagttttcagtttatttcctgttaatgaaatgtttttaattcacgtctctaactttgtttttgattttactgcagcacatgggagctgtaatgtctatgttccgcagaaggttcttgcgtgatccttcaaaataccctaatcaacgcatcgctttcttggattcaataaagcatttcttgaaccacttcagatcaacatttatgacagcattccgaccttgactactaatccacaactggtcgagcaatgcatgtttttaaagaggatgatcccagctatgttgtcggcatttgttcatgtacacttgcgtaagaagagctacgcaaggttgggagttaggagaattgaagacatccccaagaatgacgatgcaggtgattgtgctatctactcgataaagtacattgaatgtttggcgcttgggaagtcattcgatggcttgtgtgacaagaacatgcagtccatccggactaaacttgctgcggagatgtttgacgaattaggagagtatgccggaacacttggctctgatgttcgtcgcacgtacttccctatacctcagctcgatgattcctagtagctttgtttctgttttctcagacttttttatttaggttatgtatgttgtttcagacttttgcttttttggaagctttggttatgttggttgtttcagctccatgacatttttatgttcgttgtcacagacttttctttgttacttatgtcagacttttatataagttgtcacagacttttatctcacttatctcagatttttatataggttgttgcagacttttaaataggttgtcacagacttttatgttacttatctcagacttttatacaggttgtagcagatttttatataggtagttgcatacttttatgtatgtatttttatataggttgtagcagacttttatgtatgttgtctcaaatttttatataagttatagcagacttttatacaacctttctaatgagccaaactactgatacaatcacaaccactgaaacacaagaaaataatccatctaatcaaaaattcaagaataaaaaacgaaaatgtaattaaaaccagaaactaaaaaacatccttaagcagaaactaaaaaacatccttaagcagaagctaaaaaccttaagtgtaattaacttttagaattacaaagtacttaaaactagaaaaaaatccttaagcagtgcatgtcttgcgattgtgccctatttgattgcaattaccacaagtgtgctgttttcttggcttcttcttatccatagcaatctccaatgaagatttaattctcgatttctttggtcttcctggttgttgtcgagcttctggtggtaaacaaatcttcgtcgcaacatcatctagaacaggtttaccaaaatccctaggcattatggcgttagcatatgcattgcataaataactcttatgatagtaagaatgacacattgatatccgagagacttttcttttttcacccgcagcaatcgcatgggcacatgggatcttctctagatcatacctgcgacacgtacattttttgtctttcatatttacaacatggagagatgctccaaaagtaacttgtacttgatgtgcatctatatcttgcacagttagtaacttggcgtactctacacgaccctgcaaaacaaaacaatattgttagtgaattatgtatatacgtttaaaagtgaaattgtatatgattagaattagtacctgcaaaatcttctcaactccacgtgtaagatatgtagacaaattcagtgcatcattccttcggtctgaaaaccatcttgtcatcatgaacctaatttcttctaacagttgtacaataggataacttctggcgggtgacatgaccttattcattgattcagcaatgttacttgtaagcatattgtacctatcaccagggaaatgtacacgtgtccactgtcgtacatccgctctttgtaggtatgcatgaaggtcaggcttcgaagcttcaatttgagcaaatatcctttcaaaatcgaccaatctaaaagcatttgctgccttctttaccaaaccaaatgcatctctgcctttgaagcggactagtatattcttgtacaaatgatatgtacaaattcccctggaagatttaggataaaccgtccgtatagcttttccgatggattggtgcctatcagaaataatggcaagactttcgtcatctggtatgacaatgctgagttgtttaaaaaaccattcccatgattcatcattttcagtatccacaacgtcaaaagctatcgggtatatctgaaaattaccatcttgcgctgttgctgtaagaagtatccctaagtattttccctgtaaaaaagtaccatctacaaccaccactttcctcatgaaaggaaatcctaaaatacttgcaccaaacgcaagaaacaagtacttaaatctgtgagtttcatcaacttctagtcgcgtgaaggttcctggattttccctccttagcatgtacaagtataccgggagctgctcgtatccactttctggactacccctaaccaattctcgagcagatcttaatgtccgataagccttccagtaatccatctaaccaaatgtaatttaaatagttatttaaaggaaacaatgacgtgtaactagtccaaaaaaactgatcaaagtattggtaatcgtaccttgatttgccatcgtttattcaaagcttcagcaacgtgcattggcagaaccttgggtccaatcccacctacgtaatctttgtatagcattcctagtatatcgtgagtagcttgtcgggaacgtgatgagcgatctgtaacagaacaagtatgttccgaaacaaacactcttacttgaaactttggatactcgtcaactggtgttgctcgcaccctccactgacaccctttaacccagcacttgacaattaataatgttggagtcgatttagcaacatcaaagtcaaacttctgtaaaacggtaagtatcttcaaacgtgtctccaagtcttcttttgtttcaaaacattgaccaaccgccaattccaatgaggacacttctagcgtagcataagtagcttcttccttttcttcttctatgtatacacctaaactcctcttcttgattggtaatttaggtttttcttcttcttcttctggtggaatcccatagaggctaaagttctcatcatcagagtcggtgccgtcagaatcatcacagtagtcaaatctactttcgtcatcgtcaccatcttcagctgcgttagtcacttgttcttcttccacgtgtgtatttgttacatgaatattttcctctaccataccgtatacattacgtggttgtgtattcggcaaattgcagttaccgaaaccccctatgtcttcctctattgattcaacaagaactttctctttcacttcaacacaaagtcgaacagtagcattcttcgtttggcccaaaaaagactgaaactgtctattgttgccaataattacgggtggtgtatctgctggtaatttctttgaatttgagatcttgtaactcaaaataacttcgactactctgttatccaagccgtagtcctcatacaccattggaatgaaatcatcataactggtttgactgttaccttcgagtacgcgacaacctttactattatcaacgacaaaaagccacttcgttttctcaaagatccattttccacacacgagaatcacctgatccatgcccaattccttggacttcgatctcacagcaatcaaaaggaagaaaaacaaaaaaaaatatagaacgacactcaaatagaaggagagggatgaaagcgtgagggatcaaaaagagaacagaaacaattgaagcaaatttgatcccgaaaaggaagaaaaataaatgatgaaatcgtgggacagtgggtaagcgtaaaagaagaagacaaaaacaaaaacagtttctggagcaaaagccctagaagaatattccttctctaaatattaggaatttaatgcattaaacgtcaattatggcaataatttgcataaatctgtcgtaactaaaagcaatcaaaccggtttaaacatacaagcaaaccggcaagatttggagttcatgtcgaatttgagcctagatattaaatctcatgtaacaccattttttgaaattttaaaaacaaatctgccaaccaaaagtctgtcaacactaaaaaggttattctagttagaaacaaatctgccataacatgacatgagaaaatctgttatgcttagggtccaaaaaacaaaactgtcataactaaaaacaaatctgttatcactatgcgactgtttagtaattatattttttaaaaaaacctgcgagatttgtcaacaaataaagaaaatctgtgagtacataaaacaactctgtcatcattatatatcaattttttgtgttaaaaaatctgttatcaaacgacagtttttttttcaaatcctaaaatctgttgccaaaataaagaaaagtctacggttggaaaacaaatctgtggcagatttattttataaccattcaaaatctaaaaattttaggaaaatctgtggatacaacatacaacaaatctgtcgcgaaaaaaaaaatctgcagaaaaatataaaactgtcattactaaatcaaacaaagtctgtggtacaaaaaaagtctgtcgaagaaagtctgtggtggatcaaatagtctgtcgtactaaataaatctgtcgcaacaggagccacagatttaacaaaaacgagagtggcagtatcgtaaataaattgtatttttttgccatgctggaattaaatattaatggcattcctgtaatatgttttttctctacaaagcataacaggggcattttagtcataaatattactcatataactcatatttttggtatgccattctagtaattaaacataaattatgggtcactctagtaaatttccctatttttaaagcccaatatttcctcaaatgatatggaattatgtatttatgtggataattgtctatagatttcattacaagtaacaaatgctaaaaaattcagtttagtaaaaataatttgaaagtgttataaatcacatattggatggactccataaccgtgggcctaatccatatcctagaaggaccatgtccatgttcttgaagattctccttatgacggcctattttatacttagtggacttttgggctttagggtttactagcccaatgggaatttgtctcccctcatcatgtatatatatgtatcgaaacctcattcattaatcaatagaacaacaagttttataacacgtaatcagcacgagtttgctcttaacaaccctaaccctaaaaatcgcggtactgttcacgctgacactgatcatcgccgacactgttcatcgccgacactgttcatcgccgacactgttcatcgcggcacagttcatcgccgacactgttcatcgcgacactgttcatcgcgacactgttcttcgcggcactgttcatcgtggtactgtttgcggttcgttgcagcagcgtgagttaccgaggtctttagctcccggttctagtccatacaaccccataaggtgaaaggtaacatcaaaaccctaaagctaaagagccaacaattgaatttgaaagttaagcaaagagaaaccctaaaacgaatgatgattgattaagtgattgctttgcttgtatgattcgattgtttgcttgatccgattgcttgtttgctcgattgtttgactcgtttaggttgctagaaaaagttgattatcgcttaagctaaactcgcctaagttgctagagaagttttaattatctaaacctaaaaatcgcaaatcgaaaatacctaaactaagaccgaaactttaaaagcctaaaaccctaaaactaaatcagaactaatccgaaaattccataagtataaatcggcttgtttgaggttgtttaggttgttagatttattgtttcttgattacatgcataagttgttagaaaccctaaaactaaaatcgcatgaaccctagaaaaacttagaaaagataatcctaaaagaaaatcttaaaaccctaaaacttaaaaccctaaaaataaaataggaaatattaaaaccctaaatcctagggataataagaaatcttaaaatcctaagtaaaaataggaaatcttaaaaccctaaatcttagggataataggaaatcttaacaaccctaaatcctaaataaaatagggaatcttaaaatcctaaataaaataggaaactttaaaatcctaatagaaagcatgaaaacctaaataaaatcctaaatcctattaaaccctaaatcctaattaaattaggaaattcataaatcctattcaagataggaaaaccttaagaaatagaaaatttccaaatcctaaataggaaatcttaaaaatctaaaattataagtgaaataggaaaattaatcctaaagtaaagaggaaagtaaatcctaaaaggaaaaggaaaagttaatcctaattaaaagaggaaatctaatcctaagcaaaagaggaaatctaatcctaaagcaaaagaggaaagtcaaatccctaagtaaatcgattcatggttcggtctcaaataccgcatgacactaacgattacatgattttgactcaaaacttttccttgtagatgttgaattacaacttgtactttactgccctaaatctcttaggagataattatttaaaatgggcaatggatactaagattatcctaaagtcaaaaggacgtggttgtggccactataactcatccggccatgggaaccactataaccgtggatgtagacccaattccggccgtggtcgaggacgaggacgatgtggtatttccaaaccacaacactcgaccaaatgagtatgccatagatgtggtattgaaaggacgtggttgtggccactataactcatccggccgtgggaaccactataaccgtggatgtagacccaattccggccgtggtcgagggcgaggacgatgtggtatttccaaaccacaacactcgaccaaatgagtatgccatagatatggaatgggaaacaattgggctaagatatgtaggacttccaaacatcgttgtgacctctatcaagagagtgtaaaagggaagaatcctaaagcccatttggtatataaagatggtgaacatgatcaagatgatctaatagagtatgaaacttctgattgcataaaagaatcaagttgataaatcttacttcgacatcaaaacctctatgtttttctttgcattttatgtgtttattgattgttatttgcttgaatttattttatattattttatgtttataacatgattcttgtccatataagaaatggccgaggacaagaacataattgtggtggatagtggagccacacaaaagataagagatattttcctaaatctcataatgaaaaatgtcaatattagcacttagcgggtatagcaaatcttattgagggctacggccaagcccatattctattaccaaatggcacgcatcttgaactaagtgatgccttatattcacccagctcgaagaggagcttattaagtttcaaagatataagattgaatggtttccatattgaaacaaagggtgaagggaacaaagagatcacccaaggacataagaaagtcctagagactatacccgcattatccactggtctctactatgctaaaatcgataagatcgaagctaatatggcaatgaacaaagagttcatcgagaaattcactttatggcatgaccggcttggccatccgggtcaaaacatgatgcgtaaattaatgactaattcaaaggggcacaccctaaaagagaaaagagttatccctaagaatctcacgtgtgaagcatgttcacaagggaaacttattataaggccgtcaccggctaaggtaaataaagagaccttaagttttctggaaaggatacaaggagatatatgtggaccaatacacccaccatgtgggacgtttagatattttatggttctcattgacgcgtcgacaagatggtcacatgtttgtctcctatccactagaaaccaagcgtttgctaggttattggcccagataataagactgcgagcccattttccagattttccgcttaagactatacgtctagacaatgccggtgaattcacgtcccaagcgtttaatgactactgtatgtccatgggggtaagtgtggaacatcccgtagcacatgtacatacacagaatggattagcggaatccttcattaaacgaattcaattgatagctcgaccattactcatgaggtcgaagctcccagtagccgcttggggacacgctgttttacatgcatcagaacttatacgcataaggccatctagtgaacatagatattcaccatcccaattactcatgggtcatgagccagacatatcccatctaagactttcgggtgtgccgtatatgtaccgattgctccaccacatagaacaaagatgggacctcaaaggagatgggaatatatgttggatttgattctcccaccattattaagtatctagagccaactacgggtgatctatttaaggctagatacgcggattgtcattttaatgaatccgaatttcctactataggtggagagatgaacaagctgggtaaagcaataaaagaaatataatggaatcaaacatccttaaattggcaagatcctcggactctggcatgagaatcagaggtccataagattatacatttgaaaagctagctaatcaattgccatattcctttgttgacccaaagaaagttacaaaaacgtacataccagcttgtaatgcaccagtacgtattgatatccaaaagggaatcaatgaaattgctacagagtctaacgcacgtaagaaacgtggtagaccaataggttccaaagataaaaaatcctcgaaaatcaaagaaaggtgcaataggaaacgaggttaaggaaaccatagacatggccgcggcagaccctaaggaaccgaatagagagatttgggacgccaatcctcatggttctgaagggatagataataatgagatctcaataaattatatcatgtctggaataaaatggaaccgaaaagatgtcgacatcgatgaaatatttgcatataaggtagcaattgaaataaatgaggatcatgaacccacgtctatattagagtgcactcaaagatcagattggctaaaatggaaagaagccataaacgtggagttaagatcagggataaaaccagtaggacacaagtgggtctttgtgagaaagagaaatgagaataataaagcgtgagatataaggcacggcttatagcacaaggattctcacaaagaccggggatagattatgaagaaacatactcccctgtggtggatgctaagacatttaaattttgctaagtctggctatataaagaaaaagacttgatttgcggctaatggatgtaatgcctgcatatttatataagtccactggataatatatatgagattaccagagggtattgagctcaaagataaagataagaaagggtctcgagaccaatactgcataaggctgaacaaatcgctttatggactgaaacaaagtggacgcatgtggtacaatagattaagcgagtacctagtcagagaaggttataagaatgatcccatcagtccatgtatcttcataaagaaatttgcaaacaaagagtttgtgataatagcagtatatgtggatgatttgaacatccttggaacctctggggaaatcgcccaaacagtcgaatatctaaagaaagaattcgagatgaaagacctaggcaagacaaaattctgtttgagattgcaacttgagtacgtgaataatggaatccttgtgcatcaaaaggcatatactgaaaaagtactcaagagattcaatatggaccaggcccacccattgagcagcccaatggtggtgagaagcctcagattggatagtgatccatttggtccaaagaaggacgaggaagaagttctcggtcctgaagtgccatacctcagtgccataggagcgttaatgtacttggctagccacactagaccagacatatgttttgccgtgaacctcctttgtctaaatttagttcatgatcaacccaaaggcactagaaaggtttgaaggaaggtttggttaaattttaaattctattcttcctatgtttgtttatttgggttttattctatactgatctaaccaaagaaggtctagttttgctttggtttagtttgttttgctaatgcaggtaagatcagattatggcatggtcaataaataggaactacgtgtggcttgatcccttccaagggtacgtaggcagccttcttcaaggcgcagctactacaacatcaacgaccatcatatgaggagacaacacagcctgtatcgctcagctcaaggacggctacatcaagggagatcggacgaagcacattctaccaaagttcttcttcacgcatgacttgcaaagggatggagaagttcgagtggtacaagttcaatcctgtgacaattcagccgatctattcaccaaggcattaccaacatcgacattgaggaagctcacgcatcagatcggaatgcggagacttaaggacttacagggatgaccaaatcagggggagtaatacgtgttgtactctttttccttcaccatggttttgtcccaatgggttttcctggtaaggttttaatgaggcagcatccccaagcgtattactgagatcctttggcatctacacggttatgtcatccaagggggagtgttataaatcacatattggatggactccataaccgtgggcctaatccatatcctagaaggcccatgtccatgttcttgaagattctccttatgacggcctattttatacttagtggacttttgggctttagggtttactagcccaatgggaatttgtctcccctcatcatgtatatatatgtatcgaaacctcattcattaatcaatagaacaacaagttttataacagaaagctcttttagtttttttattttttttcctctaatgggattatcaagtttttcttagatatgtctttcaactaaaagaacacaaatttagatagacacaaaaattaactaatgtgtacactaatctatacatttaggtaaataaatattttaaggaattaaaaaatatacaagtgggaaagtgtctttagttaagtggttaacggtctacttttccccaccaaagttcgactccaacaaatcgtgttaccagcgtagtaaggattgaggtatgcgtccgattttgtcaacccaatgatgtcaaaagaaatatatatatatgagtagaaaaataatatagagtaaacttaatacatataagaataggaaaaactaaatatttgaaaatatgtgaaaaacaatcaattgaaaatcgaataataacataatagaaaaacaaaaataaaataaaactgttaagcgtttctcttgatgctctcgcgtcaacgtttttaatctcaatcttttttttgtgggtggtttataattttgttttccatattttcaaattttttttttcaacggttataaaatattactaaaaagcctaatataggaaggttctaatgtaatcttaatatctatacacttttatatcttactatacaatttttaccctactgtatgtgctcttagacgtaaacaaaaaaataaactctatactaaccagcccctaaaagctactaagctcaattcaataacaccactaaagctccagtgtctcgaaacaccaaatcaaaactctcgtgacctctctcccttcctcacgtcacaaagatctaaaccaaggaagcttcctattcagttagctgatggtgcagcttggtgtgtaacacatgtaggggtcaatatcagttggaaatttgtggtaggatcttgactcaccaatatcagcttggtgtgtaacacatgtaggggtcaatatcacccccattattcatgtgattttgaacatatatgtgagaaatgtcaaagtgatgtgattccaatccaaattatacattagaaaagtcatctaacgttgatttcacttcaatgaaaacttcacttagctccaactttttccactatgcaaaactacatcctatccttatttatttaaactcatcccctcccacatttctatatcaaaatccattctttcttaaaaagttttcatcatgtctgaaccgcttttgcgtttgaattttctctcgctactcttactctgttgtgtctccccttcaagctccttcacttttaataaccctgtagt

SEQ ID NO: 5295 - DNA, 25297 bp, Arabidopsis lyrata
  Intron number 3 from transcript 489339 (locus 489339) deri ved from phytozome v7.0 (chr-ID scaffold_6; pos 10896059 t o 10921355 reverse strand)
agctcccaaatccactctactacgtaccttcttaagcatctatctatcatcatggctttgtccccttgtatccgcttcatatctatgtcgtttcgtttatctttgtagccgttttggcaccggtgcataaataaaatgtctatcatatcttttttttttcttgttatcctaaattaattagagttcaaaaaagttattcgtaaggaatgttgtttgtatatgtgatatcctatcgtaacttaataagtacaaagactttgtactaaatgttgtttttctttataggaagtatttaatcaactggccatgacaatttgaatttaataaaaagaaaaaacaaagtgaattgaaaaaaaataatttagcagttaatagttaaataaaacaaaaatgaatttcgaaaaatttggaacaaaaattttgctataattttgcaatataggatgtaaaatatgtttatgatgtatggcataatgtcacaatctcatagattaaagtaaaacacgtttaattattgtacagtataaaaaataagaatatcactcgttgatgttgcacgggagaaatatataatcctacaaaaaagtaaaactcgaattgataaccatttttaaggaaaaaataagtaggaatatcatgttcctctttgttcttcaatatgttttacaatttgtaggaatttttgtttcatttttcagatatgtgggtcctacactttttctcttcaataataaaacaaaattattaattaaaaagaaataaatatacaacaaaaacaattatttaaattattgccattgaatatatttttttggataattgacaaaatagcacaatattatattttatttccaaatttagcaccaaaattctgaaattcaacatataacacaagtttatatctaaccggcaattttcaaagatgcgttattgagccacaaagaccaaacgggccacaattgacgaaattgccaaaacatatctcaaaccgccagattctcgttgccataataatgacctaaaaatcgccggattctcgtcgcttcgccgggttctcgtgctcgctgttttcgttaccatttcacattctcgcccgattctcgcaatcatcatcttttctacacaaaacctataaatctttttcaccctctctcactgcaacctaatcccgtcatccattttggatttaaaactcaaggtaagctctgaaatttggatgaactcagaaccgtatttcccaaactcagaaacactgagtattactttattagaaatctggttaagaagatacaactctcttaactggttttacacaagacctaaaattacttttggcttgtcacctgagatttctaagactcacaagagaattacaagaacacactctctaatctctcttgcaactcaaacagagtaaagcttactctctaacagaacaaaaaagcttgcgatactttttttgcttcagaaacggctaaccctagcaagagccttagcaccccttttatattcacgaggtcttcagatcttctaggtttagtcttctcgatcttggatctctccaaatctccatcgaatatcttcttgccaaactgaacttatcctgttgtgatcaccacgtcattcattcatttggcgcctattccacgtcagcgacaattacttagtcattactcctgtatccaagaacagcttcaatcctgttccggcaacttgtgcacttatctgagctcctggtatagagtgcacttacaatctccccctttttgattcaatttgtcaattcaagccatcctgcaatgattctctcaagattcacaagcacacatcatatcaacgaaaaacaaggcacagcggaattattaaaattaagtcttaactccgaaaaatattcagacacaggatccttgttcgcaagatactgaaaaacagagaaaacatggcatacatacaaaaacaatccgaagtaatgccaaaagttaagactccccctaaatcctagaccactcagtctccaaaactagtctatattatcctgactgagtgtcttcaaacccttcttcattgtcaacatccaatgaatccacaaatgaatccgaattagagttctctgaaggccagccttcatcaacgggctcagcataagagtcatcagcttcaggttcagaaccttgagcctcggcatcagcattcacaccctgagactgatcagaagaaggctgtactaacccataatctccccctgcttgtatgacacaattgagtcaaaaacaaaacttctaccaggattacacctatgcactcaagactccagtaaagaaacttgaaaacgtaccttccaaccgaacagccatgttcagcaggagagtggatgcgtgtctcaggtctcctgccaatgaggttccaaacacatactctcctcgacgtcttgggtgatctataccacctctcacttctggattgaacttctttggaggtggatcaggtttttcaaagttctccaaggtaatctccctctgaaacataagtacccgatagatcaagttcgggaatggcagaatgtttagaatctgacctggaaagcgagcagctctttccacttgatcatataccagcttcccataattgaaagggattttctcattgataagatacaaaagcttagcccgatcaattgtcacatttgaattgttctttgatggaagccaattaatgcagcaaatcaagtacaggccagccagatgtgtaggcatcacaggagtacgcaggtccttccaggtaacaactttaccttctgacagatacttagccaaggcatgcttcgacaatgcagctctttcatactcagccttggcatgccacttgatagcaggagtacgaaacgctttgttgatcatctgtggtgagaattcgtacattttcccttgaacaaacacaggcgacttcttggttacctcattgaatatgtggaaatttgagtaaaattccagcacaacttctttgacatacggatcaatctcactaacagtgtcagacaggtgattctcctctatcaatttcatcatctcagtagtactagcaggaccacgcggaacatacctctggtcatgaaattcacggtgtgtgaaatctttgtacctttcaattccctgagatgtgaggaagcgaaagttcatcggagcatagggcagcttccaaatcgaagggtcagccgcatccctctttgcctgatgatagcggtgcatgctgcagcggtctgatgagtcgtacggaacgttcccgcgggtcttcatgaagttcttcagcagatctggcaccggatcgttgattgggggatgcgaggaggacggtgcagatttgtggccagccgctttcgaagaagatggcatcgatttgtctaacggagcagggccggagtcagccgcagcatctggtggcggagcagaactcgaggatcgaagggctgctttcgggggaacttcctcaattgagctgtcggaatcattgagctccaatcgatcgggatgagagcgcttagcagcagcgcgagttctcgccatggctagggtttgagagaggaattgggaacgactctcaaagagaaagaaacacaaaaacttgtgatatcccgcgtgttctcctgttagacaaacaaaaaactcaaaaccaaaaattagtgctaaccgggtataaaaccggtttaatcaagaatcaatcagagaaagcactaaaagaaacacacagagttcttaatttttttaaaaaaaatttttaaacacggtacctctgaagatccaactcaattttctgacgcaagacagtgattgacatagaacaagtccctatcagtgtactcagaacagcaaccgtctcttccacatgttgacatctgtgcagtcccaaagctaattgtacagtgcgaagctccttttttttttttttttttttttttttaaaacacataatctgctgttccaacacatatgagaatgttgattcttcaagagtagtcttcacactgtcatggatcagagagctagcgagtcctttgacaaggaatgtgatagactgtgcagcagcattcaggctctatgtaaccacaaggctgagaaagcgtttcagaccttgtgaatgtgcatcttactgctcctttctgcagtgagagaagattgcaaccagaggacaacagttccttttttttttttttatgacaagactgcttttgaacctcttttattttgattgatgtttgctcctctcacatattgttaggtaaacaagatttctcctttgttccctcgggttagtgacaagatttctcctttgtcccccgtgacttagataagctcatgcttcatcttatgacatgaaatgctttttctgctcctttctgcatttcacgccttcctgaatgctctacacacattgtccatcacacaatttactgactttgcagctccaacacatgataggtagctctttctcttgatgaacttttcagcaaaaaattttaaacaaaacacttgtgaatcacagaaatattttgaaaaacacacttctcactgtacaaccaaccctgtttcagcacaaacactcaacgagaagatagtcagagttcacaaacacccagggacttttgcaagttcacaaacgtgtcaaagtctaaaggcttagtgaaaatatcagcaagttggattccagtgggtacatgttctatgataacttgtttctcttcaactaattctctaacaaaatgatgccttatctcaatgtgtttagttctagaatgctgcacaggattcttagagatgtcaattgcactttgattatcacatttaacaagtaaaggttcaggaaatgaaataccataatccaggcccatttgtttcatccagaggagttgagtgcagcagctgccaagggcaatatattcagactcggctgtagacagtgctacagaattttgcttcttactgtgccatgagatgagattgtttcctagaaaaaaacaaccaccagtagtactccgacgatcatcaagattccctgcccagtcagcgtcacagtagccaactagtgccagactagtatccctggtgtaactaagcccgtagttcactgttcctttcacatatttgacaattctcttcacagctgctaagtgagaagccttgggattggcttgatatcttgcacacagtcctacgctgagacataagtccggcctacttgcagtgagatagaggagacttccaatcatacctctgtatgccttttcatccaccttttcaccagcctcatccttggagagtttcaacgtagtactcatgggagttctggcggacttgctagaacacattccaaaccgttttacaagattttgggcatatgtgctctgtgagatggtaatgccttcatccgtctggttcacttgcaaccccaaaaaatacttgagttctcctaccatactcatcctgaactcagttgtcattgcctttacaaatgatttgacaagtttgtcggatgttcctccaaaaacgatatcatctacataaatttgtatgatgatcatcccatgactatcccttttgacaaacagagtcttatcaacactcccacgtatgtatccttccactgtcagaaaagtagtaagtctctcataccatgcacgaggtgcttgtttcaaaccgtacagagctttttccaatttaaacacatgatccggaaactcaagactctcaaatcctttgggctgctctacatacacttcctcctgtatgatgccattcaaaaaggcgctcttgacatccatctgctgcagtttaaaccccataccacatgctgtgccaagaagaaaccttatgcattcgagccttgcaaccggagcaaaggtttcatcgtagtctagtccctcaacttgagtgtatccttgtgccacgagcctagctttgtttctgatgatatttccttcttcatcacttttgtttttgaagatccacttagttccaataacattcacttttggaggccatggaaccaaataccaaacttgatttcttgagaattcttctaattcatcctccattgcaagaatccagaaatgatcatccaaagcttctttgacattcttaggttctgtcatggaaacaaaacatgaaaacatgatctcttcaaagcctgcaaacgaagccatttgtctgtagttctgttttatccctcttgttactctttcaccattcagatctccgattacatccccagcagaatgattacggtgtacttggattgagtgaacttcctcatcagattcttcttctgattcatttgcttcactgacattttgattctcatttccttccacttcttggatccttggagttaagttgtgagcttcaccactattacttgcaattatttgcaaagtgggcatacttccatcatcaaagacaacgttcattgactcttctatctttcccctcctcttgttccaaactcgatatgccaaactgttggtagcataaccaagaaagaaaccttcttcactgcgagaatcaaattttcccagctgatccttatcattcatgatgtaacagacacatccaaatactcggaagtaacttagatttggcttcttccccttccagatctcatagggagttttatcagaccctatcctgacatacactcggtttatgacatagcatgcagtactaatggcatcagcccaaaacttctcagggactccattcccatgaatcatggctctggccatttcttgaagagttcgatttttcctttcaacaacaccattagactgtggagttctaggtgctgagtattggtggaaaattccttgagactcacagaagctgttaaaggcttcacttagaaactcacctccgcgatcacttctgatttgttttattcccatcttcttctcatttttcagctgaagagctaagatcttgaagctgttggcagtctcagatttttccctgataaatcttacccaagtataacgtgagaagtcatcaaccaagacaaaaacatatctctttccggcaatgctttctgtctgcattggtcccattagatccatgtgaatgagatctaaaacttgagtggtctgcactccctccaccttcttgtgttgaactctaatctcttttccttggttgcaagcactacacacgatcttgtcaagatgctttaactccggtacacctctaaccatttccttattgaccagcttggacatgcttctgacattcatgtggccaaggcgttgatgccataagacagggtcatctttttcagctctaagacaaacttttggttcttcccacatgtagcagttgttaccggttctaacacctgaaagagcattctgattcttctcatctgtagcccaacacttgactctgttgaagctcactgttgatccttcatcacatagctgacttacacttatcaaatttgcagtaagtccctccacaaagtaaacatttgtgagttgcggtttctcagcttcagtcaagtctccttttcctctaattcttcctttagctccaccaccgaatgtgactttactctccttaacagtagtgtagttgttaagattagaatgacttcccgtcatgtgtcgagatgctccactgtcaaagtaccacggccttgacccacctgcttcagctgaaatgtatgctacatgacagtacagatcgtccctcttaacatacatctttgaagctctgtgttgatgtggatagagcttaccttgtcgtttcagctggtttaccttagctgcatatctgtagcagaatctctgaatgtgaccatgtcgtccacagtagtagcattcgtaacctgtcactgacctgtgatagtgactgtgattgaagttctggtactatcgtcttgctggaacagctccagtctggttttgaaaccctgtctgacgataattgtagttctgatactgttgtcttgctggaacagctctggtctggtttctgaatcatgtctgacttcgaacaccaggtacagctttgcttcgaacaaaattcgtcttaccacttgtttctcctccttgataccccaatccaaagttggattttcctgttcttccagaagctaagatgctatccaagtcctttgttccactgttcaacatgtgtatcttcttgcgggtatcgctgagttcttgagtaagcactctgacattctcctcttccaacccgagtttctgaacgagttcactattcttctgattctccagagccaagtcagctttcagtttttcatttagttccaaaattgctagcttctcttccatccaagcaatcttctctttactcagaagacaccagttgtcatacattttcctgaactgtccatcaatatcaagatccttctccatttctgattcatcatcagcttggacaatactatctctgtcttctacatcactgtcagagttttcttctatgattcctataaaggaaacgaaacctttcacatcatcatctgaatcgtcatcttcagattcactatcaaccagttaagagagttgtatcttcttaacaatgtatgatctcaacttagttcagatgcctgctctgataccaagtgaaatttggatgaactcagaaccgtatttcccaaactcagaaacactgagtattactttattagaaatctggttaagaagatacaactctcttaactggttttacacaagacctaaaactacttttggcttgtcacctgagatttctaagactcacaagagaattacaagaacacactctctaatctctcttgcaactcaaacagagtaaagcttactctctaacagaacaaaaaagcttgcgatactttttttgcttcagaaacggctaaccctagcaagagccttagcaccccttttatattcacgaggtcttcagatcttctaggtttagtcttctcgatcttggatctctccaaatctccatcgaatatcttcttgccaaactgaacttatcctgttgtgatcaccacgtcattcattcatttggcgcctattccacgtcagcgacaattacttagtcattactcctgtatccaagaacagcttcaatcctgttccggcaacttgtgcacttatctgagctcctggtatagagtgcacttacaagctcgatttcataataagattttctaaccgcttcattgatggaagctcttttttagttttggtttcgatactaaaacaaatcaattcccgatcgggatgtgaaactcttattttgattttggtttcgatttaggattctaaaacaacagaagaaagagtttttcgggctttcatttttctcaaactgtttcaatttgtggtaaaaattcaagtttatctccaacgtgatctgtaacaaagcgcttattaattcaagttagtacccattttttctcatctttcattttgtgtcgatcttaaagtagattgattgcttagcataattgaatgttatttttataggttttgatttcatgaaaatgcaatggtttgtactccaatgacgtttagattctgatttcatgaacaatatgtttactacttttgtttgtgatactatattaaacgtattcccatttgtttatagaggagattagtttatacatatcacgattattagacttgtttgtttgcttatgttatagtttatatattaaacttggtttggtgacttggttaagatttgttttgtcttgtaaatgtgttcagaataagattttgctattgctcgttgaatttatatgaacatatatggcttgtttttgataatttttggcgattttaaaattcaaaaagaaaaaaaaaaagaactccatataattatggaaggtctcccttaatcttgtctcatacatttttggagggtagcctacacagctgtggtccagtggtagttgggaattggagaaatgtttgaaggaactaacccaagttcgatccactctgaaaacaaaaagcaaatctgtgtgggaagtcgcttgggccaaaggctcaggcagtttatctggtagtccagtaacaggcgatctggctacccctgccattagtcggaaaacattctaaactcgggacagacagtgtggtggtccttcgggaagaagtccactctaaagcacttcggtgcatttctatcggggctaaccggatccgctgataggatttataaaaaaaaaaaaaaacattttggcatggtaaaacatggggattattttaatctgatggttccattgccaaaaagttatatgatcgtgggaaagaaccaaatcaacatatgtggaggaagtagaacacgtagttataagatacaagattgaaggtttcacttgacatctatacatgctaaatgaggttgaagtattttgagtttgattacttgttttcatatggtatttattgttttcttattagaatcttggatatcaaaaatattttgaacggttttcaccacaaaacttgttttgaaatatattcaagaaggttttgtactaaatatttggatattttggtaggtagctatgttttcatcggtaaacatataaaaatggttcgttttctaaaaaaaaaaaaaaaaaaaaaaaaaaaaaaaacatataaaaatggtttgaattgttctgaaatcaaacatttaggtagagtctaaatcaaaggctttcattaaaaagcttgtttaataacttggaacaaaaatggatctagatcaaacattcatgatggatttctcgaatttgaggaaggctttcatcaagaggaaaaagctatgtgatatgtaacaatgtaaaacattcagacgtattatttaacgtctatacttgcatacctcacatttcttatcttaccgacatatttcatctcgtatgattcaacctacacaatacacgtacctatctcttgttgcccactgcggaagctgctgccaattactcgtttatcaaatatcacgttttgcactattggctttgccaattatcaaaaaaaaaagtttaaattatttccgcaaacatgagttatactcacatcaacaattcaacatattcagatatatttttctagtaatgtagaacaacttcatagtattctctaacgaaactataattcaaaatttacaagcacaaaagccaaagataagaattaaaataaacaacaaaacgccaaattctagttttagcacacagcctcaacgtgctctaaaaacgagtggtgtaagtgaaaaatattgtcaattataaacattatgggaccagtagcatttgttgcaccaatccaaaacatacacgtacacttatctcctcatctcccacctgtcgtcataaaagtagccatacctaaccctacttcattataaactagatatagaccgtgcgttgcacgaattgcaggtcgagattatcattcttaacatttttattttatttttgttagcttaactaaaattctataaacatatatattttaaaaaatgcagcataattatttctaaatataaatttattagcataatacgcaatatgaaacattatttgtagttatgttatactaattattaagtcatctaatataaatgttagtctatttataaaattatataattctttacttattataagttatgaagtcataaatattcatatgttgtattattgaattttaataagttatttacatccatcagaagagtgtgttacatcttacaatttcaatgtgggcaagataaaaacaaaacaatgacaataagaaaaaataaaactatatagttacgtaaatatatgaacgatatatataatacgtaaacatatagtatgagatacgtaaatatatgattttgtttagaaaagtttgacgtcataataaaattgtgacaataaaaaaggataaaatatgagaccgtctatatccatgtgatttaactttacttgataatatgaaatatcctcaacagaaagagaaaaccttataaagaattaaaaaatatacactaaacaacttaatactaaaaattttttaaaaaaataacatcatactaaatattatctatttgctagatggcttttgtcaattttttggctcatattattaatttcttcgttttctcttctttctaattttcaaatctctatgtttctctcattagatttctcctatttttgttcgaattcctctttctttctctttctctctctcgtctgattttttcaccaccatatctttatttttttctttttcctatctacatttctcgcatttgtcggacatcaccaccgagtctcactactatgacccaccaccacagctaaatctcactactatcacagtcaccaccaccaacaataccgaatctcgctaattccgactcactaccttcatcaatatttaccgccgctaccaccaccaagcttaaaccaccatcatcaacaccaacaccacttaccgtctcttatcctcttttcccaactttttttattactccatcttctttatctcttccgacattggaccaagcctctccaacaataactctagtctatgtctatcgcctttcatcattattagtttggctcaattgccatatattcattagttctaaatattacatgctatttttagaaaatcatcgtgattcgatttttttttttttataattgatatgatataacattgttaagaaattagtttgcttgatgagaaaatatgagacaatctatttatttattcaaaggtaactatttacaatcctttttcttataggattaataattgattgtataattttcttaagatttttttctatttttaaatttttttcttggaaaaactcttatggaaatatatgttcaatttctttaaaattagctttctaaaaacaaaaattttgtttgttagatggtaaaaactcttatatggaaatatatgtataattttcttataatgagctttttacattttaaaactgtttaaatttataattttttataattatcttttaactttttctttctttttaaaaggaaaaatttatttgacacatgtcaaaatctcagataaaaaaatttgacacgtgtcacgatctcgtaagttattaactttgaaaactatactttatataatacgactagatggacccgtgcgttgcacgggttaccattcgaaattgtcattttttattttttatttttgtaagcttaactaaaattatataaaaatatgttttaattttagaaaaggtagtattttaattattttttaaatatagattaattatgaataatgtgcaatataaaatactatttgtagttttgtttattatatgttacattatgatatttaataaattctcctatgtgtattattgaaatttaataaattatctacatccatcggaagagtgtataacactttataatttcaatgtggacaatatggaaacaaaattgtgacattgagacagtctatatccacatcatgtaattttacttgataatatgagaaaagctcaaaacaaaaagacaaattcagaagaaattagaaaatatggactaaataatttaagactaaaaaagaattaagaaaataatataaactaaacaatgtctatttgctatatggttattgtcaatttttggttcatattactcatgagttttttgttgtctcttttttctttcctcttgccggcaagaagtctcaaatctttcttttttatctcattaaatttcttttatttttgcttgatctcctctttctttttctttctctctatctcgttggatttcttcgagaccatattttttttctttttccatatcactgtttatcttcatcgtcggatatcaccaccgagtttcactactccgatccaccaggccaccaccacaactaaatttcacaactatcacaatcaatactaaatctcgttaattccaacccaccaccttcatcaatatttaccgccaccatcaccaagcttgaaacaccgtcatcaacaccaacaccattgttaccgcatcttcccctcttttcccaactgctcttatttatccaccttttttatctcctccgacatcgggtcgagcttttccgacaacaattttattttatatccatcgccgttcataattcttaatttacctttatcgccattaacttgtctatctatctatttgtttatctatagaattctttttcttttatttatatatagatatagatgaattatatattaatatatgtgagtatttagaaccctttttcttctacgattaataattaattagaaaaaattttaattaccatattatacaatgtgattgtataatttcacaaatcttttttaataatctttttcttttagaattagtagctttaaattataattagtaaataattttttaatttttaattttagttaataagatacatatattttccttataattatcttctttacttttaaattttttttataagatatatgtatagttgccttaattctttttttcttaaatttctatttttatttcatatacatctagtatccttatatttatctttttaaaatttttagaatatttttatataagatatatatgtataacttccttataaattatttttggttttacacgttgataaatttgacatgtgtgtatagttttcttatattattttaaaaataaataaaagaaaatttttgtttcacacgtgtcgaaatttttgttttacacatgtcaaaatctaagatcgatagatttgctacgtgtcaagatcctatgagttattaactttgaaaaccatactttatataataagaaagataccaccctttgtgtctagacatgtcaactagggccaaagcccgcgggctagcccgacccagccatgaaaaacagggggctcggacttcaaattatatgtctagaaaaaaccgagccttttgggctaagcccgttcgggctaagcccgttcgggctaaagggttttctaggcttagcccggccgggctcgggctagcccgaaaagccctctaaaaaatattttgaccctttttttttgttaatattttcgtttaattgtaagatttgttgttaaaattttttttaatagagttgaaaaccataaacttagtttgtttgttgtgtattactataaatcgaaaaagtaaatattagctctactacctaatttgaattattttgattttatattttatctagtataagtttaaacaatttatttagattatttatttgattttaactttctttttaaaaaactaaattagcgttagtggttatttaaattttgattgactcgtttcatatatagattattttttaagagatattagaaactataagtttgttttctgttatcggaagaaaaatccggaaaagccatgtagccctgctagggccgggtcgggctcaaatatgtacgggttttgcgggcttcgggccgggccgggccgggccgggccgagctagcccgattgacatgcctatttgtgtcacacaaataaacatcacaaattaactaaacaataaaccataccaaaaaaaaaaaatgaaaatcctctcactctcacttctcttgctcttggccgctacggtctcccacgtccggtcttcggcatccgttccggggctcatcgaacttctcgaatcgaacaccatctttggggacgaagccgaactcttagagaaagaaggacttaccatcagctaccccgactgcagaagctggcaccttggtgttgagacgtctacatcataaacttcaagacggtgccttcaaactgcaaagactatgttgaagactacttgaccacttcacaacagtatcgttacgactccaaaacggtgtgcaaagaaaagaagcttactactacgtcaaaggacttgccttaaagaacgacacctacaatgtttggatctttgacctagacgagaccctcctctctaatgttcccttttacgccaaatatggatacaggtatacatattgtattattaattatgcctaaccaccatagtttgtattcacacagtgtctaatttttaatgaaattctaatatgatttcttgtaaatatcatttccgtatattttaaaatatttagatgtcaacataatttcgatttattgtattgaaactatattttgtttgtttggttttttagaacagagaagcacaacccggagacattcaagaagtggttggtggtcggagaagctcccgggctcccagagaccttgcatctttaccaaaacatccctgaaatcgggattcgccctgtcttacttactgaacgattccaagatttggaggaaatcactctaaagaatctcaaagctgctggattcacctattggaggcatgtcattttcaaataagaataatcaaagtaggtttaatcatatataataattaaaaatattagttaaagtagcttaatcatatgtgtgactgaatcgaaagatatatgtatatgtgtaaacacaggccaacaggctcaaacaagaaggtatcgagcttcaagtcagaagagaggaagaagctagagaggagtggccacactatcattgggaatattggagaccaatgggctgatttgataaaggaaagtcctggtagaaggactttaaagctccctaatccactctactgcaagatctaattaagcatcttgtcgtacactttcacgtctttaatttgttcccatacatgcatcacctcatatgtgccactgctcaaataaagtgtccatcttatcacaactcaataaataaaaggtcctcgtattaagtgtatagttgctataaaaatcagggatgttctatttggaattttgttagggttatttacatttttgattttgcggtttatgaataatggtaccattatcgtgtaacccagtgcttgaaaatggtcaaaatactttttcaaaaaatacgcaatccacttattataaaagttcatcattcatcaatatccttcccggtatttcagaataaccttcatgttgtatggctaagtctttcataatccatgtttgactttatgacaagatatcatctcttctttcatattgcaactcgccgttctggccaatttaatatcctatgtgctttgttatgaatgtttggttcctctggtttagttattttgcatcagaaagagtcatttctatatccaatgtcagatggttaatggttcttccaatttttatttattaaagaaagaaaaattcaactatatataagtatatgaacaaaatctcaattcttatgtttaattaccacatcgattaaagttttcttactgtaggactgcgtgttacatgtgttaacacaatattataccaatctcgttaatcatgcatacagtataaattatctttttccatgaatatatctcaccatttatttacgttctatgacctaaatcgaaataaagatactatatttcatgcggaaactactattccactacaagttaggctttgattggtgaacaaaaagagagtactacaagtggtactaatcacaagaataatatcaaaacctcaaaaaaacctttattttctgtacagtttttttgtaatattttttttaacatttttgcattattccttaacagtttaccgttccaactaactcttaaaaaactttaccaatcagaactttaatttgcaaaactgttcgttaatatataaaatataatttctattaaactaatttaaaatatatcgtcacgaggtggtatgcattaaatatatatatatatatattgttggaaagcacaatcatcgttgaaactatagctatcaccaagatacaactttttgtgggaaatcttgctgacaaagagtgttcctaatcacgggcacgaaaattattattcaaatctttatcgagaactagtgaatagtgatacaactatataggtatgtttgctaattattgacttattttttattacgatttaagttactgatttctccaattttttatatttgatgtttaaagtttttgtacaccgttaaaaaaaacatttaaattttgtttatttttaacctaaaagttatttattatctatctaaacacgattcgatctataataaaatttacaaaatataaatcatcataacccagaaaaaaataactaattttgtattatagaaattgaaaatattatctattttattaaaataactaggtatgaattaccgcgatgtcgtgggagaactcattttcaaaaaatatatttgattgtatttatgtattaaattattatgataacatattcaaaatttaaattattacataaaattagctatgttttaaagttatatcgtaaatattttccaaagatgttaaaacaatttatgaataaaaatataaaaaaaataattataaaaacacttatgaaataatttatatgaatgtaaaattatttataagtgacaaaatacataacgaagagttataatatagaaatgaaaaattctagagggtgaaatccaaaaatttggatggagtcggtacatagcacgacttgtgggtgactaagaacttcgtccgagaattagtatttttttgtttgcttactttttttaaataagaaattaatatttattttatgataatattcgagaaaatataaaattggatgacgtaaattatatctataacaaacaaataaatatttacaagatctcataaataactaagtaaaaaaacttattcctcgaatattcctagtaatggagatgatttctggattactatatataccatttaaaatggtttatttgacgcttaccacatttaaagcgccaaatcacaagcgtcacatgaggatgtcttctcatattcggactttgtaatagtgctaacttagcatcaatatttcgttgtatatatacaacccatatatattgccttaagatagaataaagtgatacaggtcaaattaatcttaaagcctactctctcatattaagaggtcgattgcagcacttaagggtcgatccacaaagttcttttgttcacacaataagttataagtctcgaaattaggctaaataaaattattaaaattaaaataaaacaatagcaaacaatgatttcaggtgaaaagatcaatagattaaagtttcaggtttagagaaattctcaggaaataaactagtaataaatctagcaaattaattaggattatttaatgaaccgttcttgaactcaaatcactaatgaatagctaaccacctctcgatgcgataactaacaagcctaataccagaaattccacctctcgatgcgaattcctaggtctagactagcattaaattcaggtttgatatgttcaccttagtagataggccgattcttattacacacctataaactaggctcatctaaagtagttccagtaacatgtgccctctcggatcaaatacctattatcctacgatcagctactctcgaacaagcattaataacaacctagatgaagaactctatggattcctaacagttaatcgatttactagttcatctaaatccttagtgagaatccctaaacctaatagggtgattactcagacatgattaatgaaacagaaaacatgttgaataaattgcaaatctatattattaattgggaagcattggataataaataaccttataaaaggtaaagaattacaaaaaatgtcattggtttttagtgtttttaaataacttcattaagggtacaatagtaatcacaaaattaatatatttaaataaaaaatagtttaattcttttaaatacttattaatttccaaaaaaataaactaattttctctctcttattaattataaacgaaaatttgaaattaatttttttaaaaattgttaaccaataggaattgaaaaactaagatttgatatccaactaagattttttctaaaccaatcctaatagactattctatatcaaaaatacaaataaaaataatatcattttaattcaaaattaaaaaaaactatcatttaaaaagatttatcaatggaggattttaagattgaatttgaaatttggtaaaaaaattaaatgcaaatattttaatattcagttttgttataatatttttattacaaattttgaaatataaaacgaaattttatttcataatttctaaaaaaccatattaaatattaacaaatatttatttttactatgaaataaactcaaataataataaattttaagtaattatcataatggttttcgtttagagcaattttcgaaaaaatctaaacaatataatgtacatattaattttgaaatattttgtgttttatttttttcttttcaactcagatcttccttaaataataactagatgcaaatattatttaaggaagattttaagactgaatttaaaatttggtaaaaaaattaaatgaaaatattttaatattcagttttgttataatatttttattacaaattttgaaatataaaacgaaattttatttcataatttctaaaaaaccatattaaatattaacaaatatttatttttactatgaaataaactcaaataataataaattttaagtaattatcataatggttttcgtttagagcaatttttgaaaaaatctaaacaatagaatgtacatattaattttaaaatattttgtgttttatttttttcttttcaactcagatcttccttaaataaatccataatatattgcacacggtttttgaaattatgtaaactaattatatattttgcattcaacacaaattatgcagcaatagcatatcccttttatagatgtatctaaaacttttatttttagtccaaatattgaactaattatgattaaacaattaaaagaagaatatgcaaaatttagctaggaaagaaacattaataaatttgttaaaatatttgtaactttaacatcatacatactaatccgcaaaactcacagtatgtattttatggtattttaaagtaagcaaacaagaatttggaacatggttttaatggaatgaaatgagaataagaattacgagacgggatggcaggagaacataaattaaaaatcaaacttaatgctcaactggtatgagtttgtgttatgagcactatataaaataaatttgtttacacacataaccttatacgtacgtttttagttacaatttatgacagatacgagaccataatatttttatttcacgtatacgagacgggttatgagacgaaaaatttatgaaatatacaagacgggataggtttcctgttccaaaatagttacgcctagctaatatacatgaaataatccaaactaaaccgaatatgtatcctatttaacacatgtaatcaaactgttagaaatattttgaatagtttagaaaataaaaacgtaacatcacttaacttttgcaactaaataatatcttaattttatattaaatacaatttcacacgtacgtgtaggtccgaatcttaaaatataactatgcactaacgcaactaaatttcgttcattattctaactttataatatctatattattacaaagttcactaacacatcaaaatattttatatttttaaaatctatataaaaatttctaaaaaaaatatctctacacgtacatgtggatctagatctaatacactaaaatatacatcataaaaacaataaaataatctatattatatgaaaatttgtaagaaatgtttttgaaatatgaaaccccgcacgtacgtgcgggtcaggatctagttaagaaattaaaagaagaaaagagtttagaataaatcttctctctaacaaggtataaaatctctgaaaagttgctctctccaattatcttccaaagggttcaagctcagagaattacaaaagccaaagacaagataatcaaatagaaaaccttaaaaattatttataaagtctcaaaaacgtgcagggactaaaattgcaaatagggaagtcttatgggtaaattctgcgggctttattactctaaaccgtcgagatttcttgctggaccgcgtatggtgtcggtcgacaccaatgccttggttcgaatccgaattcgtctcttcagctccaaatattctgtttagctccaaaatgattcatttcctccaattttgtcccgaacttgcaaaaacctgaaaagacttgaaaagacactagaaacaacaaaaaaactctaaaactgacacgtaaatcacggttaaaaatcggtaaaatccgtgatatatcagaaagcatcattgttaccatataaaatagttaaataaaaaattactgtataatccgtccaattctaagaaaaatattgttggtatcttcatttgaattttacatttaaagttgattaaaacttctccattttaataatcattcttcttgagaagaatttattaatattaaaatgatatatgtttaaaaatagcttagagaataaagaatttgaagctattttatagatttttttttatcatgaaacaaataatatattttaaagaacaaaaattcgggaactacttaagaagaaagacaaatatatagagttcaaaagtcacgaacatttaaatagacaactattcatacaaaaagttgtgacgaaaaaatgcaatgaaatatattgaagagacgtaactttaaatgaatagatgcaactataaagacacaaccgtaaactgaaaaaaaatatgattataattgaacaaatagaactgtcccagaaaaataaccgtcaattttttaacgaaaagatgcgataaaaaaagacacaacttagaaaaaatatccgtcaatattttaacggaaagttgcgataaaaagacacaaatgaaaaaagttaccgacaatattttaacggaaaattgcgataagaagacacaaccgaaaaaataaccgtcaacaaaaaaaagtaactgtcaatattttaacgagagttgcgataaaaaaatacaatcgaaaaaaaataaccgtcaatattttagccgaaagttgcgataaaaatacacaaccgttcaaaactgcaaaagacatttattgagattgctattatatatagatttttttttctctccaaatatgaaataaataaaaacgaaaggtgtaatatttaacgtctatacttgtcatggatcatgaaaagaaactgataaatattcaggaacagggtggttctgcacatcaccaaacggagagacgccaaccatgggagcagccaatatccgaagaagtctctcacctctacataccaaagtggaagctcttttctgggcaatgaagtgtatgattggatactacacccaagatgtagctttttatacagactgttcagacctggtgaagatggtgtccttcccaatcgaatggccggcattcgcagtgtatttggaagatttcaagagcgacaagaaagaattttcaagcttctctttatttttaatccctcgtagtgcaaatgtaaaagcggataatttggcacgaaaaattcataccaaaccgcatcatattacttatgtaaacaacattcttcatgaatgattcttttaaattttaattaaaagatgttgacaaaagaaaaaaaaaaaaacgtctatacgtgtatacctcacatttcttatcttatcgacatatttcatctcgtatgattcaacctacacagtacacatctatctcttgttgctcactgggaggctgctgccaattactcgtttattgaatatcacgttttgcattattggttttgccaattactctatcaattatttatcaaaaaaaaaaaagtttactctatcaattatccaaaaaaaaagtttactcacatcgacatattcacacacatttttctagtaatgtagaaaaacttcacagtaagatctctaaaacgagactctaattcaaaatttacaagcacaaaagccaaagataatattaaaaataaaacaacaaaacgccaaattctagtttagcacacagtctcaacgtgctctaaaaacgagtggtgtaagtgaaaaatattgtcaattataaacattatgggaccagtagcatttgttgcaccaatccaaatacacatacacttatcgcctcatctcccatctgtcgtcataagtaaccatacctaaccctacatcattataaataccaccctttgtgtcccacaaataaacatcacaaactaaacaataaaccataccacaaaaaaaaaaacatgaaaatcctctcactttcacttctctttctcttggcagctacggtctcccacgtccggtcttcggcttccgttccagggctcatcgaactcctcgaatcgaacaccatctttggggacgaagccgaactcttagagaaagagggactttccatcaactaccacaactgtagaagctggcaccttggtgttgagacctctaacatcatagacttcgacaccgtgcccgcaaattgcaaagactatgttgaagactacttgatcacttccaaacaatatcaatctgactccaaaacggtgtgcaaagaggcttatttctatgccaaaggacttgccctaaagaacgataccgtcaatgtttggatatttgacatagacgacactctcctctctagtatcccctactacgccaaatatggatacgggtatacatattattgttattagttctacctacaccatctccattgcattaacaatattatcttcatttgaaaatgtcatatatatatggaaaaacacgtttcatttgacaaatctaaatagtttgatacaaactgtttttcttttgtagtccatatctactttgtgatttcattttaaagtagatttgtttttttttttttttgggattcttaggacacagaacacagccccgggggcgtactggtcgtggttaaggtccggagaatcaactccaggactcccggagactttgcatctatacaggaacctcttagaactcgggattgaacccatcataatctctgaccgatggaagaggttgtcagaagtcactctcgataatctcaaggctgctggtgtgacaaaatggaagcatcttatattcaagtaagcttaataatatacagtaagtaagtatgatgtatatgcaatttaatcgaggattaattaaatatggcaacgcaggccaaaccattcgaaattgccggaagtggtgtacaagtcaaaggtgaggaagagcctggt

SEQ ID NO: 5296 - DNA, 19783 bp, Arabidopsis lyrata
  Intron number 1 from transcript 472102 (locus 472102) deri ved from phytozome v7.0 (chr-ID scaffold_1; pos 7910989 to 7930771 reverse strand)
caaagatcgacggttacaattcgacgtttactggttcatcgtttaccgaagaattcttcgacgaatataacgaccagtgtcgaagcaaagaagacttgaattatttcttaatggaatcaggaattgaagacgacgatatcgaatatgcgatatcagagctaattttctatgtttttgaagtaattcttcccatatgtagtaattataatccgagtggtgatttgttagtagtgtccttgtttctttctcctaataatatcagtttgagacccgcaagcaagtttgtggtcaagtctttagccaggaagatatacaagaagactagtagttctactagtgataggtgcacaatttgtttggaagagtttaacgatagaagaagagttctgactttaccttgtggacatgactttgacgatgagtgtgccctgaagtggtttgataccaatcaagattgtcctctgtgtcgtttcaagttgccatgtgaagatcaacgaacttgtttggtgctgtggccggagtaacctcgttcgtaacacctttttcggttttttttgtcagcaatcttatattaaaagatcgtgtcaaacacccttttgagttggttagtataatctatatctatatataataatatttgagaagtgtttttgctgacgtgtcggactctcggctcttgttgagtcattgattttacgtaattacttaattacccttaatgaaatctaattaattttggaaaaattaaattgaatttcggatatttaagatgataatgtcaaatatagttataaatcttaattagttatgttattgttccataacaaataatttaaaaatatataacttcctttttgtagttattatcgtcaaaaaaaaagaaaaaccctaaaaaaatcctacaccgcctcttaccttgatataaataccttgcatgtttacactttcggatcatcactaaccttgattttttgcattgattttttttagttatacatcttattttcgttactataaattctaatggttttttttaacgattgtaggttttggatgagtgaaagcaaccatgatgcataaagaagatttagtgatgtttcaattgattaacgggtaatcttttatctttaatgtctcgattttcttattttgttatatttttatatgatttacgttacatatctaatgtatgtcagactaatcaaggtgcggttcagaaatttatgttccaaaacattgttacaaatcgatgggggaaaaggtttgatttatatttgttcctatctatatgatattgtgattaatttatgtgtttttatttgttttaccgatgcttttgtggaatttcaaaatattgaaaagttatggctaatctccacgagcatgtaatctctcatataactttgatcgtttttttttatgagtcttattttttgtgtgataatcaatgttattgtcaaattatctccacgagcatgtgatcttccatgtatttttaatctactctttgtttttcttgtttgatgagttttaattttgtgtggatatcattgttgtgatgtagtcaaaattccaataatgagataccaatatttcgactcttttaggtatcacgtacgtttcccaactttatatttgatacgtcttcgcttgttaacagaaaatttgaaacatcgatctccatcttctaaaagtgattgaattaaaatagaatgacaacgttttaaaacctaattcccaattaatatttgtggtatatgtttttatgttttattccactatggttgtgggtcgatgatatcaattatgaacatgtaggtaattttataatttagtcctaatcagttgtctgtttttgtgaaactcctaatctattatttttttattaattaacctaatagactatagtcgttgggtattcttcttcctcttattctcttcaccgtatcttctcagggacatattccaaaatctgatacacatggtctacagtgtcactcaacgtcatgtggtgagttttagttttatacgttcatgtttaatgtttgctcttctgaggatttattctcttcatgcaaggtctgtctattcaattgttcatcttttattatctgttaaagagagtttgttgcattaatgtatcgtgctctacatttcgaattgtcatttcgttgttacttcctggtgtacaaaaaacggcagtgatatggatttgtgctttgctaaatctgtttctcagttctctgatggcattgaagacagagttgtggtggggagccttgatcttaaccaatgccgttggcttcctgatgaaattgctggaacaaaaccagaggtatttgtgtcgccaacaatgctgaacttgaatctgatattggacaaattgagaagcctaagagtattttatgttataggggattggtgtggattttgcgagagcatacttaagcaacgtctgtgttgcaaaagagctgcatcgtaatggagttggttacaaactcattgataagtccaagagagtggggtaagaatgtttaatcaaactccttagacgtgtccagttggagttaaaaaaagagttgtgaatatggttcaagcataacggatatgtacgtgcatgtgatggtagccaatgaagcagcacataggctatacatgaaaagcggaatcgagcaagagactgctgagcagcgtggcaagctcgatacctcaatagaccacaacggctcctcctctggctccgcctatcttcttcttccctggagctgatcctcagctttcttcttccaatggacgctttgcgattccttcctcttctctcttgtaagtctctctctgaaactctctgtttttttcaattacatttctccgttctcatattttggttgaagttttggattaatgaacagcgtatatactgttctgtctcgtaatttttgtaattcgtgttctgggtttgcgatttctgttgctactcgccactaaattctctgtttttcctctgagcttctaagagcatctccaatgggggagttctctccatgagctctctcaaattttttattataaattttgagaaaatgttagatgagaacctttgataatttttttaatttttttgtgtccaatggtaggttctctagtagggttcttaggaaaaaaaatatataaaaaattgtatatcataaaaattaatttattgcaattcataaaaagaagattgttgaaaaaaaaacaagaagaagaatagcaatggtatttaggtgatcataaaaaaaaaaaagaagaacaatggtttttttggttggtgctaaattttggagtaacaataaaaaaagaaaagaagaacaatgtggatttttggttggtgttccttgtaaattttggagtaacaagaaaaaaattaagaagaacaatggaattttggtgagccgtagaaaaagaagaagaagaagcacaatggaattttgttgagacgtagaagaagaataagaacaatgtttgtgtgtgtaataataagaacaaggatgttgttatatatagcaaagctcaatcatatggatgcatacaaaaaagtgagacttgtggtgtttatacataaaaacaaaagcatatgcaacataaagcaaaagcaaatgcaataggtccgtgacttgtggtgtcttcagtccttgattctttgtcttctttccacttatacatcccaaagactaaactacacggtgaaaatcatgggtgactgtgactataactaactgatcaaaagaatgacaagcagattacgattatcatattaccaaaccagacacggtgtgatgatgttcacttcaaagttgtttacctgatttcaagccaaggtcagagatagtgaaggaggggataacattcttgaactcctgaagctgcttgaagttcatccattggggtcattgctacttctgtttctctcacttcattatttttcccgggcgttgcagcatcagatgttttagcagacctttgaatagacgctcttacatcctcaaacaaaacaaactcctgactattctccacagtgcagtcactttgaaatgtagaaatggattctgtagatctattaatatcctctagaatggtaggtaaagctttctcccactcttgtgattgttctccatcatgctggacagttcttcaggttccaaaacacctgatatattaacaatatatctcagcaaaagtaagtaacacatacaaactacaacaaatctaggtgaacttaccagcgctagtgaagaattcattgtcccaggcaagacttttgcgcaaattatactatcctttcttcatcaccttcttaggctcaggcgactcatgaggttgaagtacctcttccttctcttcaattgtagaaaccaatatctcatcatcacaatatagtgtatccctcatgaaatttagatctttgtcatccttcaaacaattttcatccttatctgcctctgaaatgtaaaacacaaaattcacaactttaaattaaaatccaatgccagctcgctacagtagtaagtaacaatggatctaagttctaagaaatcaataaaccctacattgaaacttgtccaagtaatcaatcaaatcaagcaaaatcaaaatcctctagtaatcaagcagattaacaaaaacccagaacccataaatccaaaatcaaaggagagatattgaagttcaccggaaaactcgtagctgggtgggtcaggaaaggaggagaagagaaggctatcgtcttcagaagcgacatcaatcaaaccaaggccatcggcttcaacctcgctttttttttgtcgcgacagaaattaaaaaaaatgattttttttttcttttgttataactctccctccaatagaacactgacacgtgtccggctctctcaaattctcaaaactctctcaagagaatcgattctctcatcttaattcagttttgaattatttttttcccaaaatcagatgagaactcatctaaatatggaagagaacctcccattggaggtgctctaaaagcataatccattttgcgtaattgagatttttctaattgtgactttgatttcttctctgttggatccacggtttttaccctttcaattgttgttttctatgagtaatgcctgttttctttcattatgttttggatccaaatgcaatcagtgtacagtttatagtctggaagcggattacttccaattggatctgtttcgttccgcataatcacacttgtgctgtgaatctttgctcttgcgttttgaataagtttacttactggtaccgaattggtcgttattctattcatgagataagcattcctgttatgctgcatcgtgtatttctttatttgtctttcttctcttacttacataccctgtgcttattccactgccagcgttatttcttctcttctttaatgacatttgtttatctaagttggtagtaagatcatgaggaagaagtatctaggcttagttttaccataaagtcttttgattcttttcatgtgagacaacacttcatggtttcatccaattcagtagtcattgaccaaaattttatcattgcgtttgataaatagataacttccacttcagtcacctgagcattgtgttaacatcaataagtccatggcaaacacagtgttggcagataagacaccactctttggttcctttggtgtaacaaattattttcactttaatgttggtagatatggtttagtcatatattaattacatgctcaaatgatttaaattataatacaaccaaaataattacgtcatacatttaattaatatgattctgataattatttaatatttaactgcataaaatttgaaataaattttcaaaactatttatgtataataagaggggaaattaatcaatcatatttctattttgaagataaatacaaaaaataagacataactaataaaatttggtgcttaaatgaataaaatatacctaaactaggactgggcataaaacccgaaatccgaaaaccgatccgaaaaatctagaaccgaacctaaaccgaatagtccctaaaccagaacggataataaataatcctattcgaattatccgaaccaaacccgatccgaacgaaaaccgaatagatatccaaaaaccggaaataaacttatatatccaaaaatattagttatatttagttgtaattttatagcaaataacaaaaaatatcctaaataacctagattccataatttttttagttagatttgttaaaattataaatatttttgtaaaatttaaccaaattttagaaagattaaaccaattctcatagtatcttgcccatgttatgtctttaagacgtcaatactatcctgcaccctataattctaaccaatgaaaagaacaaatatttattaccttggatacagagttgacgaagaaaccttggataaaaactcgacgaagaaacttgtaagtgttaatgtatgatgaagcttccatgaacgtgaattcgtgatcataatgaagaaacgtgtgaatggagacggttgatggtttttttttcttttttcttttttttttttttttttttttttttttcttttttaccttttgtgtaaacagatctgtttcataatttatcggaaaaggaattataccaaaaaaaaaaatcggaaaaggaaaatatttattataatattgatatatttaagatgataatgtcaaatatccgaaaattattaatcggagcattaatataaacataaaagaatactattctaaccttactcaaattaataagatttagatatccgaaattaatcgtaaacggctattaattgttaaactaattaaaataaagatcaaacgtaccggaatagatgaaatttttggtatgatcgtcgtgttcgtcgtcgtttcaatctaaatatttggaaaaaaaacgaacaaaaaaaataatatatagatcaatgaaagagaacccaccaatttagaaacggttatcacgccatcgtattggtcgtcggatgattataagtctctaatccggagattgacttgaaccctgacaaaaacatatattcatagcataaaatcgtaaatagaaggtagaagaccacctattaatcggttgtaaccttgtgcaaactcgatttaattttgacgaatgaaatgttggtgtggtgtcaaaactttcttagggagactcgaagatgagagagctgaagtcagagataggcagagaggtttttatggaaaacaaacctgcattcataataaacactactattaattattattttttatgcaagaattaaatggcagtataaaaaatttaatggttagtgccgaaaaaaaaagcaaggattagttatgatatcaaatcaaaattaaatatcaagcaagatatttacataaaattaaggcaggggaggatctaagaattttttatatgacaatatctacaactaaacaaagaaaatttatatatttttaaaacagaatcattatttgtttttttggtaagattaaaaccgaatcattatcatattagtaaaattatcatttatttattactatccacgttaatttaaaagtttaagagaatatctgcttttttctcataaaaggatgggataataacataactcttttagatttataactatatttgacattatcatattaaatctattaagataaatatatttctttttgaaaaatataaataaaatgataatataattattatagatttacaattatattattatccatgtcaaaattttaaaacattttacttttttctcacataggaagatagaacaataacgtaacagtttaagatttacaacataaaaataatatcagaattggaacgccaaatcataatcaacacaattaacacaactctaataggaaattagagttatcttgtgattaaaatactaaacaaacaaaactaaccgaaacaaaacaaaagtcttcctttcaaaatcattaacgtgacggattgctgactgattaagttgaagttttaggcatttaaagatctagaaagattattaaggttaaacatttttatttattttaaacaacgtttgaatgttgacaaaaaaagaagaagagagtgttgggaccatcgggagagacaacgttgagcagctgcgaaagaagccaacgttgtctattatgttcctcacagtgtttgatttgacttttgatgacattacactcctatccacttgttgtctcgaaagttcatgcaatgaaaaattattaaacaaaacaatttacttttatgtataaatcctagggaagaaccgatcaagctaagatcaatggttgtggttttagtaccgtatacttctcaaatatacccgttgaataacggaaatccgcaagacggagaggagacgaagtcaacctagctggcaaaggagctaacccagctcctttggtcttatttatggtcatatgtatttagcaaaatatggtatacaaaccgaaccaatcaacaacaaaacctggttttaaattgttgtatatttctcaaaagtcaaaacccataataaccaatggaacagaagaagctaatgcagagcatacttacgcttggagtaaagagtgatgcaagcttccattggcacacccaaaaacgcatcagagcatggaaagaaacctaaaaaccaataaattaaacaataattaaatcttagtgcatggaaaacgaatcctatacataccaaagtccgaatctcagtgccttagaatgacctcgataccaaaaactttaagttactacttccatatatgtaatattttagtttggggagagagattggcaacgaagagtaattcctgaatttaacagccaagtttgttatccctaatctaaagagaggaatacttaaattgtattaacgacaaaaattagcctcctctgaagattcatccctgaaataagtcatctttctgactttgtggcaactgtgttatcaaaagttgagtgtttcttctgagaaaagacatatttgaaaataataagaacatgtacctcaacaaaatcaggaggtacctcatctttttacaacaaaaataaacataccaaaccatcgatgattaccttctcaaaagttgaaaccaaactttttgattataaaaattgattagtggtgaaaatagtgaaaccataaatacaaaaaaaaaaaaaaaatcaaatttgtacatataaactataagatcacctgtttattcattgaattaggtccaaattttccatacaccagttcacatcgtctcctccatacatccaccctacaataaaaagaaaaattaaaattaggtagatgcaaaaaaaaagtttgaaaaaaaagaacaaaaaaacaagggttagttatgatctgaaattgaataccatgagcaaggtatttatattgaataggaggcggtgcatgttttagagtttctaaatttttcgacgataaatacaaaaaaagaaaagaaaatttacatattttaataagcaaatcactatcataataataaatatttgtaaaactgccatttattcattgttatccatgtttatttaaaataatatttacttttttcggtaaaaatatggaataataacaactattttagatttactactatatctgatactatcttataaaatatattaaaatttaagggaaaattcctttctgtttcaaaaataaggcggaacaataatataatttttgatttacaatagatagacatgcatggtatccatatgcgtcatgtcacgctgatccatatttttttccaaaactcgatctaattgctattatgtgcaaaaatcaccaccgttcacgttcatgttcacgttagcactccataccttaattcacatgtaaacctctctgcctatctctgacttcagctctctcatcttcgagtctccccaagaaagttttgacaccacaccaacatttcattcgtcaaaattaaatcgagtttgcacaaggttacaaccgattaataggtggtcttctaccttctatttacgattttatgctatgaatatatgtttttgtcagggttcaagtcaatctccggattagagacttataatcatccgacgaacaatacgatggcgtgataaccgtttctaaattggtgggttctctttcattgatctacatattattttttttgttcgtttttttttccaaatatttagattgaaacgacgacgaacacgacgatcataccaaaaatttcatctattctggtacgtttgatctttattttaattagtttaacaattaatagccgtttacgattaatttcggatatctaaatcttattaatttgagtaaggttagaatagtattcttttatgtttatattaatgctccgattaataattttcggatatttgacattatcatcttaaatatatcaatattataataaatattttccttttccgatttttttttttttggtataattccttttccgataaattatgaaacagatctgtttacacaaaaggtaaaaaagaaaaaaaaaaaaaaaaaaaaaaaaaaaaaaaaaaaactatcaaccgtctccattcacacgtttcttcattatgatcacgaattcacgttcatggaagcttcatcatacattaacacttacaagtttcttcgtcgagtttttatccaaggtttattcgtcaactctgtatccaaggtaataaatatttgttcttttcattggttagaattatagggtgcaggatagtattgacgtcttaaagacataacatgggcaagatactatgagaagcttgactattctgcttcgacagatcaacaggtgaaattctatcactaaattattagatctctgttattgctatgaatatatgctttatgttaggatttcaagttttgccttcgtttagaagaattatattcacacgacgaagaacacgatgaattcaattaaagcttcctaactggtacttcgttgttcctttttttttttttggttaattatcatgtgtattgtttccaaaattattttttcctggttaattccgaaattcaatttaatttttccaaaattaattagatttcatgaagggtaattaagtaattacgtaaaataaatgactcaacaagagccgagagtccgacacgtcagcaaaaacacttctcaaatattactatttccgattttttttttttggtataattccttttccgataaattatgaaacagatctgtttacacaaaaggtaaaaaagaaaaaaaaaaaaaaaaaaaaaaaaactatcaaccgtctccattcacacgtttcttcattatgatcacgaattcacgttcatggaagcttcatcatacattaacacttacaagtttcttcgtcgagtttttatccaaggtttattcgtcaactctgtatccaaggtaataaatatttgttcttttcattggttagaattatagggtgcaggatagtattgacgtcttaaagacataacatgggcaagatactatgagaagcttgactattctgcttcgacagatcaacaggtgaaattctatcactaaattattagatctctgttattgctatgaatatatgctttatgttaggatttcaagttttgccttcgtttagaagaattatattcacacgacgaagaacacgatgaattcaattaaagcttcctaactggtacttcgttgttccttttttttttttttggttaattatcatgtgtattgtttccaaaattattttttcctggttaattccgaaattcaatttaatttttccaaaattaattagatttcattaaggataattaagtaattacgtaaaataaatgactcaacaagagccgagagtccgacacgtcagcaaaaacacttctcaaatattattatttccgatttttttttttggtataattccttttccgataaattatgaaacagatctgtttacacaaaaggtaaaaaagaaaaaaaaaaaaaaaaaaaaaaaaaaaaaaaaacccatcaaccgtctccattcacacgtttcttcattatgatcacgaattcacgttcatggaagcttcatcatacattaacacttacaagtttcttcgtcgagtttttatccaaggtttctttgtcaactctgtatccaaggtaataaatatttgttcttttcattggttagaattatagggtgcaggatagtattgacgtcttaaagacataacatgggcaagatactatgagaagcttgactattctgcttcgacagatcaacaggtgaaattctatcactaaattattagatctctgttattgctatgaatatatgctttatgttaggatttcaagttttgccttcgtttagaagaattatattcacacgacgaagaacacgataaattcaattaaagcttcctaactggtacttcgttgttccttttttttttttttggttaattatcatgtgtattgtttccaaaattattttttcctggttaattccgaaattcaatttaatttttccaaaattaattagatttcattaagggtaattaagtaattacgtaaaataaatgactcaacaagagccgagagtccgacacgtcagcaaaaacacttctcaaatattattatttccgatttttttttttggtataattccttttccgataaattatgaaacagatctgtttacacaaaaggtaaaaaagaaaaaaaaaaaaaaaaaaaaaaaaaccatcaaccgtctccattcacacgtttcttcattatgatcacgaattcacgttcatggaagcttcatcatacattaacacttacaagtttcttcgtcgagtttttatccaaggtttcttcgtcaactctgtatccaaggtaataaatatttgttcttttcattggttagaattatagggtgcaggatagtattgacgtcttaaagacataacatgggcaagatactatgagaagcttgactattctgcttcgacagatcaacaggtgaaattctatcactaaattattagatctctgttattgctatgaatatatgctttatgttaggatttcaacttttgccttcgtttagaagaattatattcacacgacgaagaacacgatgaattcaattaaagcttcctaactggtacttcgttgttcctttttttttttttggttaattatcatgtgtattgtttccaaaattatttccttttttttttttggttaattatcatgtgtattgtttccaaaattattttttcctggttaattccgaaattcaatttaatttttccaaaattaattagatttcattaagggtaattaagtaattacgtaaaataaatgactcaacaagagccgagagtccgacacgtcagcaaaaacacttctcaaatattattatatatagattaaggtatggagtgctaacgtgaacatgaacgtgaacggcggtgatttttacacataatagcaattagatcgagttttggaaaaaaatatggatcagcgtgacatgacgcatatggataccatgcatgtctatctattgtaaatcaaaaattatattattgttccgccttatttttgaaacagaaaggaatttttccttaaattttaatatattttataagatagtatcagatatagtagtaaatctaaaatagttgttattattccatatttttacggaaaaaagtaaatattattttaaataaacatggataacaatgaataaatggcagttttacaaatatttattattatgatagtgatttgcttattaaaatatgtaaattttcttttctttttttgtatttatcgtcgaaaaatttagaaaccctaaatcatgcaccgcctcctattcaatataaataccttgctcatggtattcaatttcagatcataactaacccttgttttttttgttcttttttttcaaacttttttttgcttctacctaattttaatttttctttttattgtagggtggatgtatggagaggacgatgtgaattggtgtatggaaaatttggacctaattcaatgaataaacaggtgatcttatagtttatatgtacaaatttgattttttttttttttgtatttatggtttcactattttcaccactaatcaatttttataatcaaaaaatttggtttcaacttttgagaaggtaatcatcgatggtttggtatgtttctttttgttgtaaaaagatgaggtacctcccgattttgttgaggtacatgttcttattattttcaaatatgtcttttttcagaagaaacactcaacttttgataacacagttgccacaaagtcagaaagatgacttatttcagggatgaatcttcagaggaggctaatttttgttgttaatacaatttaagtattcctctctttagattagggataacaaacttggctgttaaattcaggaattactcttcgttgccaatctctctccccaaactaaaatattacatatatggaagtagtaacttaaagtttttggtatcgaggtcattctaaggcactgagattcggactttggtatgtataggattcgttttccatgcactaaggtttaattattgtttaatttattggtttttaggtttctttccatgctctgatgcgttttcgggtgtgccaatggaagcttgcatcactctttactccaagcgtaagtatgctctgcattagcttcttctgttccattggttattatgggttttgacttttgagaaatatacaacaatttaaaaccaggttttgttgttgattggttcggtttgtataccatattttgctaaatacatatgaccataaataagaccaaaggagctgggttagctcctttgccagctaggttgacttcgtctcctccccgtcttgcggatttccgttattcaacgggtatatttgagaagtatacggtactaaaaccacaaccattgatcttagcttgatcggttttttcctaggatttatacataaaagtaaattgttttgtttaataattttccattgcatgaactttcgagacaacaagtggacaggagtgtaatgtcatcaaaagtcaaatcaaacactgtgaagaacataatagacaacgttggcttctttcgcagctgctcaacgttgtctctcccgatggtcccaacactctcttcttctttttttgtcaacattcaaacgttgtttaaaataaataaaaatgtttaaccttaatcatctttctagatctttaaatgcctaaaacttcaacttaatcagtcagcaatccgtcacgttaatgattttgaaaggaagacttttgttttgtttcggttagttttgtttgtttagtattttaatcacaagataactctaatttcccattagagttgtgttaattgtgttgattatgatttggcgttccaattctgatattatttttatgttgtaaatcttaaactgttacgttattgttctatcttcctatgtgagaaaaaagtaaaatgttttaaaattttgacatggataataatataattgtaaatctataataattatattatcattatatttatatttttcaaaaagaaatatatttatcttaatagatttaatatgataatgtcaaatatagttataaatctaaaagagttatgttattattccatccttttatgagaaaaaagcagatattctcttaaacttttaaattaacgtggataataataaataaatgataattttactaatatgataatgattcggttttaatcttaccaaaaaacaaataatgattctgttttaaaaatatataaattttctttgtttagttgtagatattgtcatatgaaaaattcttagatcctccactgccttaattttatgtaaataccttgcttgatatttaattttgatttgatatcataactaatccttgctttttttttcggcactaaccattgaattttttatactgccatttaattcttgcataaaaaataataattaatagtagtgtttattatgaatgcaggtttgttttcgataaaaactagattggatttatggaagcacgtcattgtttccagtgcgaggaaacaaatgtcgtatcactgctgttgtggctctttagtactttcgtttctgtttatggctttgcttcggttgtatggttagtcatcaatcattgatcttctcattgtttgaatattgttgcataggaaaaatcttccttttttatgaatctttcaaaagttgggtccatgctattctcagtgattgattacgtttattgaatatttgtgtgcttcctctgctgatattctaattcatgctttattcgtcgtctttgatacactctgattaaccattgtggacctctagagtctaatttgcaatattaatgcaagtctctttaacttacggattatgaagagcatcctaagatcgtttaatttgattcaagctttatgtggctaatgtttggtcttggatgtgaattagtctatcatgtttcttggaaggtaggaagcaatcttgatgtttaccaaaatccaatgtgctcttttgtagctcagttttgaaatatgtactaattattgtagagggaacccaaaacaaagagaccatatgtatgattttatatgcgaagagaagctccgaatttgaaatcgtctccactccggtgatatgtggccatggtgtgaaggagtctggagccatggttatttcagattcggacataaccgtaattgttaaactaataaaaataagatcaaacgtaccggattgatgagaatttttggtgttcttcgtcatgttcttcgtcgtatggatctaacaaaacaaaaaaaaaatatataccccaaaattttttttttgtttgttaatagagagaacccaccaattttgtagcgttgattgtgacattgaattgtttgtcggatgaatataagtctctaatccggagactgaagttgaaccctaacaaaaacatatattcatagcataaaattcataaataaaaggtagagcatcacatagctttttcttcaaagccaacacatctctctttgtagccgaattactctccagtttggtatatactcaaattttccaatgacttccttctcgaacctggagcgtttttgctttgccggatatttttaggatatggctcttatgtatctcttgtgagtcacttgatatgttgtttaggtaaaacttttggtttgaaagagaatgatctacgacaagcataatcggttatttgttatatatgtggccatgttcatattgctttctccacaagcaattttccagttttgtagcattcgatatttaaatttaaaagcttcaatacgttgtatacatgtgtatgtatgtacatatatgaattattctcagttgcacacagtggtttctaagggatagatacttgctctctgtaaccctctcatttttagtacctatcttcagtgtttactttgctaagagcttcttgataggcatacatctttgcaatctcagatcaatatactacaaatacatatacgatacagttaagaaaatgatatttctcttacaactttttatatggtttttataaacaagagatcaactaaagggttacgcagcgaccaatggcgaaggtagagacaaagatactacaatagggacgataaatatgacacgatatatacaaaggagatgcctgtttctataccattgaaattttacgtacataactacttcaaagagcaagatgacttacttgataggtaagagatatggtaagagattatatttttcaattatttgtttccaactacgaaaaactccagtgacatacaatctaaaagcatgaatatgtcataaaatcaagaatacaacaaaaaccaggaagatgggcccaaattaaagtccgaaactggacgtggggaacccacggacagtggcggtcggagcgttacaaatatgaaagaaacgaggaagcgtgaatatgtcataaaaccaagagtactacaaaaccaagaagatgtgctcaaagaacgaaactggacgtgggaacccacagacagtggcggtcggggcgttgctaatatgaaagaaacaagtaagcatgaatatgtcataaaatcaagagtacgacaaaacaaagaagatgggcctaaagaccgagactggacgtgggaacccatggacagtggcggtcgggacgttgctaatatattgttggtttaaatatatagattttttatatttaattctattatatatatcaagatataaacactaataattgtttgtgattcaaaaacactattaattgttgattactaatattatatatcaaaagttatagcgttttaccataattctatattaatgtcgttataaaaattagactcttgacaaaattaattcaataaatatccctaacttgataaccctaaatattaattattaattctggtcttaatcaacatacaaccccgcgctgggcgcggggacctcccctagttatctaattaaaattctttttttgttaacaacttcaacttatatcaaatgacgcttttttgttaatatgtaaacatttttatttgttcattatgcgtaaatatatcaataccaaacaagatatatgcctttttataatattttaattgagttaagattttcttgcttaactaaatataatattttttaagctaattcatttttatttttcaatgatttcaaaatattaatgtcaccgatcaaatgtttatacaactttaaaatgaaaccgtcgattacctaaatatataatatttaattaatcatggattttacttttctgaaaaataatggatttacaaaataaaagtattgttcatatatatgtagatagatttgcataaaattttaagtctatcttgctgattttagcaatagaaactgaatataaattaaaaaccattaatatagatcgttgaattaggacttaacttcaaatcctccatgggtatttcttttttaaatcctataatgtgatatacaaaaaaaaaaaatggtaaatcagatttatagtattaaaaaatgaaaaataataaatatgttcccaaatcccgccagtaaataaaatgcatgcagaatcctcaatcctctataaataacgttgtggcaacaacataacccgcacacgaattccatcaacattttgatttcttattttattatttcatcatcgtcttctttcttcaatcaatcatgataatagatttgtaccacaatatcatacgcaatcatcaaccagaaaacgccggcacaatcacaatcaatgcaaagatcgacggttacgatttgacatttacgagttcatgttttgtcgaagaattccgcgttgaacaacacaatctgtgtcacaacaaagtagcgtttaatgatttcttggtggattcagagctaattaacgaagacgatatccaatctgcgttatttgagctaattctctatgtttctggagtaacttatccctcaagcggtaactattatccgggggatgatttcctagtgtccttgcttcttttccctgacgctgatccgattgaagaagaggatgagattgaagaagaggtttcgattgaagaacaggatcagattgatgaagctgtccgagtttcgttggaggagaccactaatatcagtttgatgagacccgcaagcaagctcgtggtcaagtctttagcca

SEQ ID NO: 5297 - DNA, 41005 bp, Arabidopsis lyrata
  Intron number 1 from transcript 475495 (locus 475495) deri ved from phytozome v7.0 (chr-ID scaffold_2; pos 7661158 to 7702162)
cttctcaatctcctcctctttcgccgccgtgactcctcctctcttccgttaccacctgaccctaacttcttccctttccttggatcccttcaatggctccggaaaggtttagatggtttcaacaactatgtccgctccgtccatcaacgtctcggtcctatcatcaccctccgcatcacttcccgccccgccatcttcgtcgccgatggttcccttgctcaccaggctctcgtcttgaacggtgccgttttcgccgatcgtccaccggcggctccaataagcaagattgtttcgagtaaccaacataccatcagctcttgtttatatggagctacgtggcggcttcttcgccggaatctcacttctgagattcttcacccttcgcgggtgagatcttattctcacgcgcggcgttgggttcttgagatcctttttgatcgatttcgtaagaacggaagtgaagaaccgacccttgttcttgatcatctctactatgcgatgtttgcgcttcttgttctcatgtgttttggagataagcttgatgagaagcaaatcaaagaggtgaaatatgttcagacactacagcgtcttggctttacgagatttaacatcctcaatctctggcctaagttcaccaaattgattttgcgaaagagatgggaagagtttttccagatgcggagagagctgcaggacgttttgcttccgctgattcgttctcggagaaagatcgtggaagagaggaaaaagagatcattagaggaagaagacaacaaagagtatgtacaatcatatgttgatactctgctcgatgtggaacttccagatgagaataggaagctgaacgaggatgaaattgtgagtttgtgctctgagtttctaactggtgggactgatacaacggccaccgcgttgcaatggatcatggcgaaccttgtgaagaatcaagaactccaggagagattatacgaggagatcacaagtgtagtcggggaagaagcaaaggaagtggaggaagaagacgcgcagaagatgccgtatctaaaggcagtagtgttggagggtctccgacgacaccctccgggaaacactgtgctcccgcacagtgtcacggaggacactgtcttgggagggtataaagtaccgaagaaggggacgattaacttcttggtagcagagatagggagggatccaaaggtgtgggaggaaccaatggcgtttaagccggagaggtttatgggagaagaagcggtggacctaaccggaagtagagggataaagatgatgccgtttggagcaggaaggaggatatgtccggggataggtctagcaatattgcaccttgagtactacgtcgccaacatggtcagagagttccaatggaaagaggttgaaggtcatgaagttgacttgacggagaagctagagtttaccgtagtaatgaagcatccgcttagggttgttgttgttcctaggcgaagtcactagtgaagctgcatgtctatttaccgtagtaatgaagcatccgacttttctccaccgatttcgtatatttcactacttcttttcttcggtttattattcaaaatgtgtgcaattggtcaactattgaactatacgtcggaataaatcgtacaaaacttgttaaccagatgtattaaactgtctgttggccaccttaatatacaaaagtgttcaaacccattgggttaaaagattgcttttttttttgtaatgattttgtaatagagattgttacataggaacttctaaactcttaagacttaggaaccctctaatcctttttctaataatttggtgttccgtacattttcgaagattcgctatcctaacacaatggtatatttcttaatcagtacttcattgataaaattcttcatatgactaatccaataaatttggatttcgaataaatttaacaaatactaaattcaataaattaggatttttatacattttagagaatcaccgatgttcattttttgccatagtgtgccatcccatatacatgaaacaaaaaaaaaaaagatgttgacatgaactattttaagcaccaataatgaaaatataataaactgttttacgtttatacgaattttagtattgatgcaatagagaacaaaaaacagaagtaatttgtgaattttttaaaaaaactttttcttcttttgatataaaaaagacaaaaaaaagtaccaagcatttaagctcaaaatgtaattcgcagcttataaaattttcactttttttttctgatgagagccaaaagaagaaattgttgttgtgtttcaaagtataatcatctttgctttttgtttcctaatttaaaaaaagagaaacaaatcgagatgatcatctcctgccaaggacatccatacatgtataaataaatataacttggagaatgtacttgtgatagtgtgtgaaggtgttttaggttaattattagtgaggaattaattagtattataagttaattattagcggttgatcggttctttagattggttagtgagcaagtagtggatttgcatgtcccacgtgtcatgaattgttttttttttgttcttattagaaaagttaattatgatttgacaacttcagaagacatcgagtttttatatagtaggtatgagtttatattcacccggtttttatttgattcaaatcaattttaatttgtttgtttctccctctcttttgtaaacgaaacgaccctctcgaatcccaatattcaaagtgttgatctgaattaccaggccagtttggccatatatagttggtttaagcccgagcatctttaaaaatgtcaatgaaacatgacatgaggaaaagcatcgacgcaaattaattagtttgtacgtgtatagtcaagtttcgtgaatggtaatcatagactcatagctcctattttctttattattcaagatttgtagagaaatcttatttaaggttaaacttgatgttggatcctgaatttgatcttgtagtattgttcccgtgcatttggaaattgtgagaaaatgtaacacatcaaaatttataccaaacctccaaatagtttgaatatagtttaagaaaatttaacacatcaatatgtatacttttgatataaaattttccaaatactttgtacatattgtagtttctgaaattttaagctgacagtctctaatgtgtttgtgttaacgtgagtagcagtgttcgattttttcttcttgtgtatacttaaggttttaataaaaatgaggtagcatacgagttcaatcgggaaaccttgttaatgaatttaatgtcaaagggataaagagaaaaaaagaatgttgtgtcttattcatatcaaagaaagaatatatatacatgttacaagaaatcctaaacatacttaaagatattaacataaactctggaaattatactatatttacatataactccttaatactccccctcaagttggagcatgaagattatacatgcccaacttgcgccgtaaataagcaaattgttgagaacccaaagccttagtaaagatatccgctggttgttctgtagtggtcagatgtgtagtaaccagtgaaccatcctgaattttatctcggataaagtgacaatccctctcaatatgcttcgtccgctcatgaaaaactggattggcagcaatatgtaaggctgtcttattgtcacaaaacaaacgcatcgcttgcggatgagacacaccaaaacatcctaaaagctcacgatccatttcaactctcgagtagtaaaactcatcgcacgatattcagcctctgctgaagaaaacgacaccacatcttgtttctttatcttccaaacaaccggagaatcactcaacataacaacaaagcctataaccgatctcccagataagaaacatgtagaaaaatctgaatcacaataagctgtcaattgtaaatcagaatcaacactcaacacaataccttgacccggaaaacctttaaaatatctgacaacccgtataactgcagcccaatgtttggcacgaggttgttgcataaattgagccaacatatgcacattatataaaaattctggtcgggtgaaagtaagatataccaaacgcccaacaagcctcctatacctctcgatatcctcatgaaactctccttcatcatcggacaacttatggttctgctcaagcggagtagacactggttgacatcccaacaacccacattcagttacaatatccaaaagcatacttcctttgtgacaagtaaaagctatcaggagacagagatacttcaatgcccaaaatatatttcatagtccccaagtccttcatatggaagcattcactaaggtatcccttaaactcctgaatacctttaacatcatttcccccaatcaacaaatcatcaacatataccaacaaaaagacttacatagaaccacgcaccaaggtaaacagaaagtaatccgctacttgctgttcaaatctatagcctttgagtgctttcgtaagcttagcaaaccaacatcgtggggcttgacgcatgccatatagagatttcttcagcggacaaacttttgatttatcttgagaaacgaatcctgcaggtaatctcatataaacctcctcctcaagatccccatgtagaaacgcattatgaacatccatctgatgcctcccatcctttgacagctgtaattttaagaaattctcggatagttgtagtcttcacgaccggagcaaatgtctcatcaaaatctaaaccttcaacttgtttcttacccatggccaccagacgagccttgtaacgctcaatttccccattcgacttacttgatagtaaatatccaatgactgccaatagctttctttcctggtggaagatcagtaatatcccaagtatcatttgcttccaaagcattcacctatccagacatcgcattgcaccatttcttatctttaacggcttccgaatatgacttaggaaccgaaatagcagtaatatccgcaagaaaagctttttgtgaaacagaaaatcggtcacaactcacataattagcaattggatagagaaccgtacttggagaagaggacgctgattgagtgggtgccggtgagagtgtgggttgttcaacggagcaacgtgtagtatgtagtacataatcacttagatgagccggaggttttcttttccgttcgctttgtctaactttaatccctctaccagtcaaattatcttcccctaattgactctccctttcctccaaagcagtatctgaagtcttttaattacctttggaccccgtaatatgaacaccggacgagctagatgctggatcgatcgatcccggtgccgggatcgaccgttagtggctgatgtctctataattttctccggatcaatcgatctgggcttgagatcgatcgatcgctccttcactggttgcagctcgtcacatgtcagtagcctgggatcgatcgatccacctgccggattaagcatatatatatgaaaagagaaaactaaagagtatgtgaaggatactcgaggaggctggattgtaatggaccgacgggttcatatacaagtcattaaccgctgacgagcaataaggggaaggatcgagctacagactgtggtcttccataagtaggcttgagtagacatgatttaaaagaggctcgagtatccacaagttaaagctacttaaaactaaaaatgaaagtaaaatatctgagcaagacgaacgtatgtttgtttgattgatagaccttctgaatctatgctaagtaatggttgttgtttatgtttggaacgtgaatactgtatgtccagtggacagagttgatctttttcgaggttagtaagtttcatgagttgcggttgaagtttgttctttggtaaattttagagaaaaaaaaacgttttggcataaccggatgaataacataccgtcccatcctttgtggcgggacggatgtcacatttttttcctagggttccgatttgggtttctttattttataacccatgtgattttgttggtccattagccaaagaattcgttctgtgattgaatattatgagaaaaaaaaaattaaataaaaaaaattaacaatactaacatgtagagtgtgttctaggcttctacctagacgcatattattattttatttttaaatgacattattgatttaaatatgaaaagtcaaaacgatatttatataattaacgttaccaacgaacagttaccaaagtttctcaattgcgatagcccaacgaacagttaccaaagtttctcaatcggatttttgcctttccggcggctccgccggatcttcttgtttcctttgtcaatttctttccacattaactaaattttccctcgatgtctcctttgccatcaatttcgtttttagtgaaaaattccatagatgtttccttccgtcaatcagccgcttctctcataattatcagatcctgtcactggtgatttcattaagtttcaccgaacaattgggtagaaagataaagaggttatttcggcttgttcacggtgtcttctctcttacggagtaaatttttccagcaaaagcacgtcgatattggcgtcgtcatgttgttggtgtctgtccggtgcagtccatgcccggtgtttgtcttccatcggtaaattccagcggtggttgtgttttgctattttctcgtcgggaaaaatgtcgatttaaaccgaattggccatggaataggggtctgatagtgatgctatctttttttctcctatgaaagtgccatacggttcgtaaacacacaatggtggctcatgttgtctaataaagaaaaaaatgcaagaataagattgaagtggaattcctatggagaaacaaatgcaatcaaaggtccatattttgaggtatcctctatttttttgaggtatcctctgtatttttctctgtggatgaaagaaggtggccatatctttattggaatgttcggaaggagaattggaaatgctgattttgtggggaagaggaagatagtgttgattgtttatattgaagtcaggttaaggtttatgatatttttaaagacactgatgcggactaattggcatcagatagtcgtacttccaagactagtatcaagtgtaatgggttttacttatacgattcagaatctgcctcaagaaaaagaaaggcaaacgaatcgtacaagagcaaaagggtcgaataaatattacgaatatgtgttttcgttagcgagtaaggcgttttcgaccagaacgcatcgtgaatcttattttttgtactttttccagaagatggcgcacatagttgtttgtgtaataacttaggttatgtagtcttgtatgactctaacatcataacttcgatataatggaatgaatttagttggaaaaaaaaaatagaggtgtttaatttcatttaggtttagttctgattctatagtgctttcactattaattaatttggaattaagtcgtgttacatgcttgacaaaagtcattgaaaaccctatcttttaaaggccaaatacccttaaggcctaaataccctatctatctaaaattttaagaagcacttaaagctctggcaaaacaatcaacgacgtaaaatccaaagaaaaaaaataaatattaatttaaaatatactatatggtagtagatcactgttttttattttccactattttgcactttcatgtgtgtccattgtagtgcctatataattttttaaagcttggaaaatattttggtaaaatctgttagtcattactattttttatttgttgctgataaaattaggcatttattaagtaatggacgaaaacttaagaagtgaaccccttcttcaacaacgcattacaccggactctcggaggatatgatccggagcttgtaatcatgcaggcacaatcgcattgactatactcttcattcggtaatgatttcaagccatggataccatatttggtgtgaaggaatggtcgtagactcttatttccatgtcgttgcattcaaagaagcctagaaagagagctttatttcaagaaaactaagtcatgaatacctcaagaattttttatatatagcacaaaacatagtggttgtttttcaaaatgacagtttaaccgagtgtcaatagcttaattggaataatatccaagaaaaaaacatattaaatactcttgtttctggtctgagtggatgtacggacctacgtccagaacctttgtcattaaaaaaaaaagtattaaaaatgacaattttaaaaaaacttgattaactggttataaacgaacaaaaaaaattaaagaccacaataccatatttggtgtgaaaggaatggtcgtacacatcaactggatcattactcttatttccatctcatccatatcattgataagccgattcatgcaagtatgatcttgacttagagctcggcctcggaggcctgttacaacacttgactaattttaatcatagaaatcatcttaatgaatctaatatcaatttccaacaaactataaatctagttatacacataccaaactataatactttccaaatatcaattattaccaaactataatattttcagtgcgtttacctggcctctttaaagaaggtacagtagtttagtcatatcatcatcctcttcaagctgagtaggttttacccaaaaccaaataccaaatgatgaagcggaagcttctagggatagaactagatccgttgattctgagaatacccagaaactagggtttgagaatcctcctctcagggctttcgtactctcttccatgttttggaaacaagagaaatgcctgcttgtgctaaggcttatgttgtggtcataacttcttccaagatttttaataagctcgactattatattcgtttgttaatatttcgaaatctatgctatatgggtttattaatattgcatagattaagtaaagtttgggtttaattttaattttagttacaaagattccatatgttttttttaagattacatttcttttatttcgatatatcttgttttcttttttctttattataatattttaatatagaaagtaattatgtatatttacatttttcttgtgattatatatatatcatatttcttgctacccatgagaataaatctgccattgcttttggtaaagggctgggatctacagaaaaacaccgaattactcagattctgggaattcataagacagaaggtttttggaagatatttaggcttgcctgaatttgtgggaaggaataaaacttatgctttctcatatcttgctcaaaggattgatctgaaagtggatagttggtataacaaatttctatcacctgcagggaaggaagtgctactcaagtcaatccttacagccattcctacgtacagtatgtcatgtttcttgctacccatgagaataattaatcaaattacaagtgcgataagaagattttggtggtcaagttccaaagacaaacataagattccatgggttgcttggaggaaactaaatgaccctaagaaattaggaggtctggccataagggatttaaaagatttcaacgtggctctattagcaaagtagagctggagaatgctaaatccgcctcattcactaatggctagggttttcaagtccaagtactatcctatgcatacgctttttgaggcaagagttaagaaacaatctagctacgcctggaaaagtatcacacaaggtactaaacttctctcatatggatttagatatatggttgggaatggtaaaaatattaatgtctggcatgatcattggttatctttagacccacctagaccagcttctggtcctggaatgtgtatctatcttcatatgagagttagtgattggttaatctagggtaattggaatgttagtcttcttgagcaacttattgaccctcaagatatttctcatataaagcatctcagaccttctattacaagggcaaaagacactatcaattggctgcataccaaagatggaatgtactctatcaaatcagagtacaatttactgcgtaagttatctcaaagttctctaaattttccatctattaattcagccacccctcagcatatctttgcaagtatacggaagcaaaatgtcccaacaaaaattaaacatttctggtggagatcagctcacaatggaaacaatggctagaaagccactatgtgagaaaataaaacctagaatgccacctatctaattttaatttcgtgaaaaaattaatttaaatcaaataaatatgaaaagacaaaaaacccttaccctaatctaattattacgtatacttacccttacttttatcaatccaataacataactactcttcttcttcttcttctttcacgcctcctcttatttttcttctccttctttactttttctgggttttttagatctttcattctctttttctccatcatcatcatcaataaaactctagatcttttcttcttcatggatctctcttcgcacttctttatagatcggatctctcttcatgcttcttctccatggatttctgagatttaaaaatcatggatctctcttcaagattcttctccatggatttctcttcgtgctttcgtcatttgtagtgcacaatcgtttggtgagagaagacggtccacaaacttcgacgaggaagggtgatggtgataatcggcgacaacgatagtgaacaaagcaagaagagacaaattattgagtgtgacggcgctagagtttagaattagggtttagaattacaaattgctttgtttcagtagaaccatttgtaccagttgtccataactatttgtaccagttgtaccgatttatagttataccatttgtaccaattatactattatctttcatttgtaccatttgtaccagttctcctattatctctcagttatactatctgtaccagttgtactattatctcttagttgtactatcatctcttagttgtaccaatcgtctgatatttcattaagggtaatttgggaatatcacatttacagtggcattcagattacaaaatggcatgccggattcattttctccattgagtggcatactagcctgggactcctcacaatgccttgccaactgcagaaaaatttgaagaagaaaagactccttaattagtgatgatacatgtcaaagatgtggggagcatcctgaaacattgaatcaccttcttttccaatgtagaatcagtaaggagatttgggagcatgctccaattccattatactcaggtgcatttcttattacaaactcttttactcagaacatgggtgtgttaaatagcctaaataaaaactaacaaaaggatgtgagtttattcccttttattggttggcgtatctggaaaatgagaaatgagttggtatttaacagtaagaaatggtctattccagataccataaataaggctatcttagaccaacaacaatgaaaagaaagcttaaagctaaaagtggagaagccacgagtagattcagttcatagccatcacattgttaaagaaagtttaaagccatgctctgtttttagaaatgtcatcaacatggcttgtgattattgttgcttcgtggatggttcatggatctctctggctaaccgtacaggtattggatgggtactctacaacaaaaatgcaaaatttgttcttagaggtatggcatctattagcccgttgggtactcctattgaagttgaagctgaagcgttaagaatggccatggtacatctgaagaggttagggtatcatcgtgttacgttctgtggcgataattcagtccttttccaaaacattaacgtcctatcagatactcaacaacaacagtgctgggagtactcctctatttcgacacatctccaagatatccagtacttagcacaatcttataatcaagttagtttctttaaagttcctcgtgttgtaaacaatgttgcagatcggttagctaagtttgctaggttaaacaatttgggccttgtaatatcatggaacgatgtatcttaagtttgttataatgaaaagttgaaaatatatatatatatatatatatatatatatatatatatatgtatatgtgtatatatatatatatatcatttttaactaattaaaaattaaatacaagatcgaaaatcaagaaactagtggctaagtttagggttcaacaacatagtagttaagatactagccatcgaagatatttacaacacttgctgatcacgcaacttacgcacagtgaggggatgaaattctgaacacgcagcatttagggaaatgacccatgtggatcctggccatttccctgatgaaggctttgggaaaatcagctatttttgcaacttggaggttattgataacaacaacagtctccagtcaatcccaatccaaaagttggacagaagaacaaccaatcctcagtgctaccacttacaacatcaaggatgtgaatatagaagattggaagacctatttcttctagtactggtgaccatggtttaggctcactcgttgagaagcggttcccatggcacttggcttaccttctctcttttttatttgtagctttttgtattatcatttatttactgtataaatttttgttgtaaaaagatggtttatgatgaatgaatggcttttacataatcaattatagtatctcattagtttgcaatcgacaaatccgatttgttaaatagttactaagaataaaaacaatctattaaacccaaaaccaatcacaatcacctatttttataaggtaaaagtaacatgtttattgtcctgacactatctagagggaaacagtctatcaaacatccactagaaacaatttggaccaattaattaatccaccaacgtttcttgattaattaataacttaattttccaaacatccattcattcctaacttaacataacttgtttgtttggcttattaatgccatttttaattagattattgaaccggaacaacaaaatggcgaactaaaattaagtaatcgtaaacataaattttcttcttgatatatacacacacttaaatatatatatatatatatatatatatatatatatatatatatatatatatatatatatatatatatatatatagtgtgtgttttttcttatatatgccacacatatatatgttatttcttatatttgcttatattttgcttttaatttacttatattttgcctatttatcattacattgttttcttttttcttttcttcaagttttaatgactataacatattaatagacttgtattcaaaaataatttatcattaaatgacttttaaaactattagggcggtaaatgataaactataatttgaggaatacttgtagaatgggtagaattttggtgtaatagaaatgatgttacatcatttgaacatgaggaattggtggaataataatttaagaattgctggaatagtaattttaggaattcgttgcattttaaaatgtactagatcataacccgtgctatagtacggatgtgaaattttttttataaaattaaaatataaattttgtattaaaaagcaaataacagaataaagtcaaatttataaaatttatttcatagcatgattaattttatttctaaatagtattaaatgttgtattatattacttagttgggaaaaatgttttcataatataagaggagataatattttagtgtatatagaaatgttgagagtctaaataaaattgtatggtttgtttgtatgtttaaataatttacttagaaaatttaataattaacttatgcaacatttatttatttttattgtattattagtttgtgagagtttattttttgggccaatttgggttgaattttaacaataggcccaatctttaattaagttgctttggtttgatttttaataatagcataaataatttaaaggaaacagaaaataatgtctaaaaaaaacaatctgtcgacgatgtcttaaaaaaaaccataatcaagaatatgcttctgcttcgatttcgattgctgacaatggaggagaaatcggaattattataataaacatcacccgacgatttctctgtcaattcttcttacttcagatgaaagaatgataaatcatgcaatttcattagtctcaaacaatttcggaattgaagaaggaattcaattagttcatcgattgtgttccggagcagtggaattggaaattcgacttaaaggtacaccaaattctcaaatttaatcggatatcttatacaaatcgatgaatttagttcttcaattgattagtgattgaatcgttatgttgtaagaaattcaacaaattatacagacaattttgaaatcgtccaatgaaataatgaatggctctgccaaatctttgtttgatctaatcttatgactgtatatttgcattgttttagatatagattataaactatatgatttgcaatcttaaacttttatcagattccgaaactgatatcaaattaggatcaagctttataaagtacatctataatctgaatataaaatgatctgcaggtttttggtacagacatgtatatggagtaagagtaaatcaatctaatgaagacaatctaaccaagaattatcagacggcatgcaattacctctgttgaaacatgactataaaggttagtacccgatacataactcattaagcttttcaaaacataactcattaagcttttcaaaacatgttgatttgatgcatttgattaataataaaataaatgttcaatgaatttaaaaattaagcagatttatagaaaagtttatataatataaaagtttctatcgaactctaaagaattaaacaaatttgcaatgagtttgtttccaactcttattcatgaaactattaatgacttttcttctgtgttatcgtttaagcactgctatgatgttcaaaacctgcatatgatagaaataataaaatttaattcctaaatgcataattagttagttttgaactgcacaaaatcattagaatatctaaaatacaaaaagaagttataattagtggtgaaagttacctgaatgaaaagctatcaaatcttctcttttccagtactggcctactatagtaaatgtcgagtttagagtattatctttatgttaataaatgaaattcaatccgtactgtagtaccaaattcaattagattttgtaataaatgaaattcaatccgtactgtaataccaaattcaattagagatttgtttgagctaattacggaatttaccaattattcacataatcaaatatgttatgaacatatatttggtatataataataccaaattcaatctgtgtgtggagtctatattttcattttacaatctctatgaaaatattgcggcacaatctattatttattattttcaaaatgcttgcagaatcaaatttttaaatatttagaagtgtcaaaccttatttaactcatctcatcataaatcttaaaatgctgtctgttataaggatcataactttctaccatataatacattacatttaacccgccgcctactataaatattttaaacatatctttttagaaaatcaaattattgtatttataatttttttttatctttttaatctattaaatatttatgatattccttaatatattaaattaaacttttttaaaatattccaaattaaaatctttaaaaccattttatcgtagtatgtaaaattatgaattttaaaaaaaatgatatgaaattaaatataaatattcaaatagttataaggatcataactcatttcagcatataatatattatattcaacccgccgcctattataaatatttgtttcaaaaaatcaaattagagtatttatacttcataaatttttgatctattaagtttgatgatattaaaaaaaaaagaatatattactcaaatatgaatttttgacccgttaaattttgttctttcatacattgaataatttatattcgtttttaaaaattcaaatcttggtatatgcggaaaaaaatttactttttgtttattatatagatgatatactgatttatttatttatagaaataaaatcatttaaagatgagatgtggagtataatgattaataacaaattaatatggtaagttagatatcaaatcttatatgttcatttcgattggtcattttttaaaagaaattaataatagattttcgtttttataattaaattaaattaattaaattgtataaaatagtatttgacttttttatccttaatgagttgaattaatttactctataaaattttattactaatggcattcttaagtaattttttacaaaagagaaggttagttaagggtatcttataaagtgtactccccaaataatagtataggattcatttgagtgcttgttttttcttatacaggcaagttataaattatgtcaaaggaaaacatgtaaactcttaattgggcttcaattggaaaatattgattatgattcaatattgagagagtgatgttcagatctcattattgggatacttgttgcttgatggaatagagttttcagtgtaaatggccttaacacagacatttttggttgttaacattaacatatgttgtaaaagcattcaattagctggaagtgtcttcggtgtttttgtgaaagttataaaagccataaagtttgtcatgttttttttttctgtaaaatcatgataattttgagagtttgtttctcattttcaaaaagtctactagcgaattatggcttatcaatttcggtacttatggattaggactttgagattacacgtgagcgtgtgttaaaaaattggcgggatagtttcaacatgtatatgtgactgtacttatatttcgggtatattcaagtacttgttcggatttagcttcgggtcatgttgagtttgaatttttggggtttaaagtttatgacccgtgataacatgggattttcgcccatatttgttattgtttatttgttttgttttcttatgttttaggaagtgtttggtgtgatttcaaggctaaataggagatcaagtgtttatgaagtcaagaaggttttaggagtttacaagcaaaacggaccaaaagacaagcaaaacccgtttcaggacaggttcgaagatccagaagttaggcgtccgttggagaccttcccatgaaaaaaaattggagatcttagactctatggaaagctggaagagtcaagattacaatggaggaagaatcaactcaatcccagctgcaaaacagaaggtacaaccgattgaagtcagcctgttagagaccagtcgcaaagcgtgcgatcggtggtggaacccttgttgccaccggtcacaataccacgtgaccgggctgaggcctcttgtggagcacggttatggatcctcgtgatcgggctaagcctcctcgtccctgcacttatcgaaactaggtagttttgccgataaaacactaaaccgacttgttacttcccgaggcctataaatacaagttattaaccctaattagggtgtgtcttcgaccctatcaccagaagcctcctagagaaacgaccagagaagccgtcgaagctccctcaccaccatttgcctccattgccgccgttgatgccgccgatcatcaccaacctttctcttcatctcttttctctgttctctacttgttcaaggaagaagaatcctaaactggatttccagagaagctttctaaaccctttttctatactcatactcttttatacaatttcttattcatatgatgttgtgttctttgagtatgtgtgagtagtttacttgttgggtataagggtttcaaaggggattcatggatctgttttctagggtttcttagatatatatttaggtcatctttgttcttcgttctaggtttgttcttaatgcatattgcttgaatagctaacttgcaattgatcttaggtacactacaagaaaaatgagcatcggtaacacacgaaaactgctactaaaaggatttcgtagcgaaactacaaacgctgtataatgaggagctacggtagaccccccctaccgtagcagtttttacgcgctattgtaaattgacctattatagcgctattactcagctatttaatattcttaactagcgctttatttttgctattatgttatttttaataacaaatatttcgtgctgtgtaacttgtaatgataacacactatatgtgctggtggatattattaactagcgcttcactcgtgctattatgtttgtttttatagcaaacattttgtgatgtctaacttgtaatgataacacattatatgtgccggtggatattgtttcgtgacattttgttaatgcttgttaatgctgctgtaatgtatattattatgtgctatatttcaattatttgaaacctatattgcacaaaacatagattgcaaattgattcataaataaaattaatattatataaaacatacattttacaaagaatcattctatcaaatacccaaaagatacaaagaaggcttgaatcaccaaccaagtcataaagaaaaaaacacaagtacatttcttcaccaaaccaagtcataaagaaaccgaggcagctctagtagatctccaactcataccatttaacagccaacgccattccttgtcttcttttacagttgcttcaagctataattagtcaacttaaaaagttgagtgcataacttgcagattaaacagtgcgatcattctagactaagtgcataacttgcagattaaaatatagagtgtgcacataccacaaagatcgttgatcttcttggcgagctctttgatttctttcttcactttcttttacaggtgcagtaaggcccttgaacaccgtgcaatgtatgatatgatccattaacaagcttttttctcactgtgataaaatacatgggatgcactataataacctgagaataaggaagctgcaaaatatacaaacctaagagatatcaaataagacaactttaaactccaatacccactcagagctatcactgtagggaatcaaccattacctcttcataatcaacaagttcaacacacacatcatagatgtctttcctgtttgaaaattttcaaataagataagctaagcaatgtggtcacgcaatcaaatcatacaatagaaaacaacagaaaaggattactagttatgtagttctgaagtttgtcaaggatcaaaatgagtttaaattctcattgaatcatagacaaaaaaccagattgatgtaaatgcttaatatatctgaacaacaatcctaaaatatcttccatatgctctgttttaaaacagcttcaagacaataaacccattgaggcatttaatcgaacaggtggtgggcgattgactataacatgaaactcaattagtgacataattactagaggaatagcaaacacaaaacaaataaaaaatactcgaagaagcaaaacattaccagaataaagtttactcacaaaatttaactcttaacacaagcagatccgtttcatgctcttagaagctaaaacttgtgattcaaatttcaatgtaaaccctaaaaatccagaattaactcacctgagaaccaacatcaaaagaggctcgccaaggtggtggtgaaacgtcttcgatgtatcgctggtggagaagaagaagtcgactaggtaatgagagaaaaccattgcgttgacaaattgagagactaatgttaaactcagaagaaacgaaacttacagtggagtgagaagctaaagcagagagattctcgtaaatcgtaatggaggagaggaaaaaagaattgagaattgagaatatgtgatgaaaacaagaagaagagaagaagtatgtgctgaaaggtgatgacctaatctgaattaattttttcctgagatcagccaagagaagacctaatctgaattaattttgttctgaattttgttctcagtcgaggcgatgaaaagatgaaaggatgaagagagcagacgccaaagcctttgttgggcgatgaacggatgagatttcattaaacaacagccgccaaagccttatgaaaggatgagatttcgccacgtcatgtatccgagtattacttattgattggtttaggtaaattgatcatgtattagatccgatgaatggctgagatctcgccacatcagcaatctgagtgaaacatgatgattggctaattttgtttatagacataaaaatgtgttttaactatttatataattttttaaaaattatatattgaagaattaatatgtttatgagttatttacatgattatataattttttcacaattaaaaaaaatatattttgcaacgtttttagaaatttgaaggtaacacatatgattgccttagaatacatgtacactaatcttcttattgtgtaaatcatattgttgaaacacattaatgatgttataattaataaaatgaaagaattcatttatgttataatagtatactttatatcattaatattagctactatttaaaaccctaaaactaaaccctaaaccctaaatcctaaaccctaaaccctaaactatttttaaaaatgaattttatttatgttattatttgttataattaaatattattactatttcaaacaaatataatccaaaaacctaaaccatacatttcataccctaaaccttataccctaaaccctaaaccctataccctaaacgctttgaaattataattttgttattatttatataattattaatattataattaaatatttatgtttttttgagatatttggttatatttgtttatatttcatttttttataactttttttttccaaaattcgaaaatcatttaaaaaatcttaaaaatcttaaaaatcatttaacttgaaacctaaagtacatgccttaaaataattaattcaattttttccaattaaaatgttttaagtatgtgtttttgtgtttaatatatttttgccaagagataacatataattattaacatgagaaaacaaagtcaagtgcacgtaataaaagaaaacacaaagtgttcatttataaatccgtattttttttataaatacgttattttttataaatacagtatatttttataaataaaataaactctaaatcgaaaataaaaatctataatgaaaatagaaattattttaattaccaacaaaatagtcttacacatgaaaataaacaaaaaaattgtcttaaagtttctaaacataataaacctaattgtgatacataggtctctggtggtgtctttgcctttgtctgtgcatgtgatgattttgaaacgattttggaactagctgtcaaagaatcatcaatcactgtcctctgtcaactacaaccacaaaaataaatcatcaagatcagagaacagatcagtgttttgaaatcatgaccaatatgtgatttaagaactatagtacagtacctaagagaagatgttcaattaaatatggacagtactgtcatgtataatgtgagatgaccctaatcaaattagatttagcaactcttactggccactgtatacaaggcaagaaaagtaaaactcaagtcgataagcaacaagttcaatgtggaaccatgagtatcagtctttatagcatacttaaggctgctaaaaagtccactcctttcaattgtttttagaagctattagcaccaatgttacatcgactagagctatggactggtaacttacggggacatgagagtcacaggcgtttctcttggcgtcagttgctgagaagactgtgtatacaaggacgaatgtgccaatgatctcagctccaagaccacttcacttgttgctttatcttctttatctctcttgaatcatatacaaatggaatgagttcacgcaaagaagctaaaactaatctcaattttgtcaaagattatatagctttatggtctcatctctccacctgattgcagtaaaaaaggcatatacatatgtactcttatcatttgcatatgtgatttgtcagaccgttctgcataataaccaaaatgagatgaaacaaggatgaaactagactaaatgagacaaggatgaaactagactaaatgagatgtaaatacatggtaaaaactagtgaaatatagacatatcaatactcaatgagattcttatcttggaagcctaacacatgctttgtcaatattacaccaatacgaccatagctccacaccaccaattatacaatttgtgataataagttcaaaggatcacactcaaataactcacatgcatcaacacactagaaagaaagtaaagaaacaaagagtagtaacaacaagagaggtatcaattaattggccattggtcaaagttgtttataagagagatgtcatattacttatttacttacatctgagcacaagaaaagcttcacaaagttctgtgcaagttgccagagagtttctccttcttgtggtcttaaaacagcaaaaaaaaggttagactagtttagcttccagctattatcaccaacacaaatcctatcctggaaaatgttaataagtagagcattcttaggcaagaatcacttgcaaggacctgttctcatttgtatcgaatactcacatcagacacaaaatgtataacaaaaagtaaagaaataatatcttacacaagtaaaagaacaaggtaggaacggacaagaagttaaggaatcaagattctgcaaacaaaagaacgacatggattatcagaatcattacaacataactcatctttaattgaacagctacaaagccgtaaataccttgtagttcttgtactgaacagctacagagcggcaactacagatccacaaatccaactacacatcagaaaaagaaacatgagacatcaataatcatgagagcagtggcagcgaccggtaaggactagagacaagagctaggaaaccaaattagcatatacgagagcaataaactttttcacactaagcattatctcaagatacagaaaaaatagagtctaaactcagacaaaaaaatcaatcgaaaacactgattgaaagtcaaacacccaagctcacataagaaagaaacacgattcaaatcaacaaacaaaaatccaaaacccaattacttcaacggagtcgaagagagatagagacggagagagacggcagcggcggagagatatggcgacggaggagagagacggtggcggatctgagaaacaacagcagagaaagaaggagaaagacagagacggatagtggagaatcgatggagattgtggtgttgataatcgagacttcttcaataggaatcgagagttcatgcaatgggtattcagatttcacaatggaatcaaacactttgagattgaattgaaattttggagaaagctttttttttttttggagctaagtgtaaaagataagacttttacacttgagaaatcgagacttttttggtttggagtggggaacccaattgttttgcctccaaaattatacatttccccgctataatactgagttaagttcccgtttaatgaaaactatatcctagcattaatatagtgctgcgaaatacttgtcatccgattttggaacttttagtagcagttcgtaaattagcgctacaaaggactgctacggaagctcatatttcttgtagtggtaggtttatgcatcacaagtgtatagatccgcgttcactagcctaaatgtgagtatagtgttagcacacaccacttagttatagggccttacgaactaaaatcgaactcgttaatcatgctggctaaatctcgtcgttgcatgcgttagtttagtaacggagttgttagacttagatagtcgtttgatcataagccaaacggttttacataagtgtttcgtagttcatgaaccgtttaataagcataggtttacttttgtttaaaaccctagaataacccgatccgtgataccttgaaacccaacttctcgtttattgacatctttcatcgtttaattagcttttattttctgtttagttccgtgacaaccacccgtaaaccaaacccctctcttttgtttgtcttagacatattcttttccatgaatttgtaccgtacttataagtctctgtgggatcgatccttaaatactacatctgattaactgtgcacttgcagtatttcgtgtagtctctaagggaaaactttgagacaaaataaaacacgcttcaacccgttcgggtattttaaaattctgggttcgggttcgggtcggagtttttgagtcgggttcgggtcggttcctccggtttggatattatgcccatacctaatttttgctaaggcttgtgttgtggtcataacctcttccaagttttggaaaccagagaaataaaaacttatgctattggaatatacaaaaataattgatctagtttcatgaaatatgttaatattccatctcaatagtaatagccatctcattaacttatttttaaattttattaatttatgataaaaatttagactaaaaaatttgttgaaatataaaaaataattcatattagtgtcaattaatttgttcattgataaagccataaaggtcccaatcaaagcataaattgataaataagaacatacaaaccaacacaaaccttttctttggcatttaaaaaaaaacatgtggacgagaaaatatcaaactgaaaataatttttgagaacttgaaagatatttagatcaactaatttacaatttttaaatagacataatgatatgtaaatttgagtcgaaagtgttaacaaatattcatgtgaaaaaactactttgcagaatctcgaaaccgtcttgtcgaagtaaaatgtagaatatttaattgatatcacatatttatttacttatgggattattattgaattgggcatttattgggtcaaaaatttcagatataggattatttgcctggacttcagttttaggtatttttgagatgcacgaaattatgcatttacccttgtcttctacatctcttcttcctcctctccccaagcacaacccacgtttctttccccaaaccacaacctttttttctgacgacaaccatcatctctttccccaaccataaccctcttttcaattaatcaagtgttgaataaagaaaattaaaccctagatagtatagactaaacccaagggttctaatcttagatattgattatatcaagtaaaaacttcaattttccttcaaacgaattagctcaaatttttgatgctttcaaatcgaataaatcttcagttcatctccaattattttcctagtcaaaggaaaattgaaaacgacgacgacggcaaagaacggccaagtaggtagatgatcgatttgtctccttcttctccaactacgctatttttttcaagaacgtaaaaaaaaaattaataatgccaggaaaaatcaaaaccagaggaaaaaaaacaaaaaaattagaaaaaagcatttgtttagaggaaaagtggagagatagagattggcacctgcaaagcttgggcaatcgtctttctgaaccagagctcgaagatctctccggtctttagaatcatgcttatgaagcacccctcgtaaccgtcgggtagaggttttcatggccggaaatgctatttctccattcatcttcaattctagcaattcatcttcatctccatcttctatattctttggagatcattctcttttgcctaattgagttgaaattgatttaatttatagtttagatttttgtttttttgagttaggttgctgcagttttgaagggtaaaatcgtccttccatgataaaagtaatgcctaaaacgtgagtcccgacgatctgtcccaaatctataatttctgctggaataaagcccaatccggtaattgactctttaattatacataataattagaggtgtcaaaattgttaacccaactcaacttaactcattatccaatgagtttagagttaaatgggttcatgggttgagttgagtcaacccatgaactcattttatttgatgggttagaaggttaaatgggttgacccattaacctaataatgtaataaataaattaataattaaaatataataataataataatcatcaacaatactattatttggcagaaaaatcacggatttacgtttttggcgggaaaattacagatttacgtttttggcggaagatttttacattctcatttttggttaaaaattataaaagaatttggcggaaaatcacggatttacgtttttggcgggaaaatcacggatttacgtttttggcgggaaaatcacgaatttatatattgatggaaaaattgtgtattcacatatttggcgggaaaattaaggactatattcaatcggtttagacgttttggttagactcaaattgaaatcggtttagagatttgaattggtttgattcaatttaacaaaaattgatgggttaaatgagtaaaccattgaaaccattgacccattacaacccaactcatttgatccagcaacccatttgactcaataactcattagatccatcaactcatttgagttaaaattttcaactcattagagtccatggattgatttggattgacccatgaatcttgacccattttgacactcctagtgataataataaaacttataagaaattttcaataatagtttaataaagaaaactatcaaagatctttttgggatgaagtatgtttgaattgaaaaaagggtgaacaaaatattaaaccatagaagattagatattacaagatttgggaacggaaacaacataattaattatctctctcttctgacacacagaattttgacgaaaacgcccctacaactgacacaatctctgtcgcaagataacatgtttaaacgacaagagttcagagcattaaatgctcgaaaatctctgtggcaagatcaggaaagattgcgccggcgttatggggaagagaaagattttgagaaaagaaaatgattacggagatacttctcggtttgtggaagtagcaagcatatgggttcatgtatttattaccgaactagcgccgttgccaagaccagaacacaaaagcaccataaaagttcagataacaagttaatgtaacgaagaacagaggagagattggaagattccgggaagcattaaatagcatcattaaatacgataaggtataaaactgtcgtctactaacaaatctcattcctcatcgtaattgttaatgtggtaaaaatcatgatactcggtgctaacaaggttattactccttttccgtaggtaagttatggctatggtggtgcggttggttagaggagaatggagaaaagacgatgaaggctgttacgaacatgtatccgctttggaaggttttacgatggcggtttggctgagggagacatatgggtataataaagttgttaatgcggtaaaggaaatattggcgcttcgcgatacagacgaaatcgagctaagttatcattggccgcagtggatgatgggtcccgactggaaacgagcagacctgatacacatccttaatgatgaagatatgatgcagttcatggcgataagggctgatcttgaagaggtgcatctgcgagttaaggtgataaggggagggctggagacgaatgttaattctttcaaaagccatttagatctgggaggattgacatcagaggagatatctgataagtactggaattccgcggaaactaggtcagtttgggatagtgcgttgacccggttgttaacgcgacatgcaggcgtggacaagcgtagtaccagcgaactccagcaacaaggaaacgaaacgattgaaggaccaagaagaataaacccgactagggggtaaggatacaggagccgttaaacgcaacacctataagaacagcagtacccaggcaggccgatagcagagagaaacgaaaagcaacagcaagcgagaaaggcaaaggacatgttaccgatgcagcagagttacaaaaaactcacgctaatggattagcatgtaaagaaatgtttgaggcagctcaaacctctacagaaacggattttgaggcttttagaagaaactatgtcccagaaatgtggcgggatgtgtgtgctacagagatgactctaggaggacagcaaggtgggacagttatggccaacgaggtaaccaagacagcgagagaattgaatttcggggtaacattgtcacaacaaacccctgctgaagaagaaagcctacgactcaccctttctggcgcatccatggcaacaaaccaacgaacaatcttaatgttgtcgtcatcagactcgtcattcggcacaccgacttccccttcaaccagtatttcgttctcaaccgaggagccaatggatgcagagataggaaacgtatctcctaccggcgtaataggttagttatctgaaaactagtattgaatatggataagattcaaatgaagagatggtgattatatgctatcatttgccaggtccaccagcaatggaggactattacacagaaccggatggaccattgtgtttgactccaagagttcccatagctggggggataacagtaggtacgccggtaatggaaaagggatctggttcaactcaagggaaagaggttccgtagggagacagacaaatggtggtaagagagacgccagtcccgaaagtgttgtatgatcgggatgcacctccgtattttgatgacccgggagaagaaggtaaacaagcgataataatattgttattgggctaatatttatatatcgtgataagtttttttataacacgctaatgatggtgtgtggataacattgacagattaccttcaacgagcgcttaaagatgctgattatgaaggggatgacattttcatgggaaggttgttcaaaaacaaggatgactgctgcacaaaactagctattcatgcaatccgacaaaagttccactttatacatgctaaatcttgtccaacaatggtgatagctgtttgcgtcgggaccacatacccgtggcgggtttatgcgacaaaattagaagacagtgagcggtttgaagtgaggacggcaatactgcagcacacctgcagcgtggacgccagaggcgacttccacaagcaagcatcaacagcagttatagggaagctgatgaggacacggtacgttggggttggaagaggacctaggcctaatgagttgcggagaatgttgaggcaagaattcagtctcaatgtttcttactggaaagcgtggagagcaagagggattgcaatggacaatgctctgggctcggctatggggagttttgcattaatccaaccatacttcaaacttctgatggcaacaaatccaaactctattactgcgctagaaaccgagacaaataacttgggagttaccaggtttaagtatctattctttgctctacacgcatcaatcaaggggtatgcttacatgagaaaagttattgtcatcgatggaactcacttgagaggcaggtatggaggttatctagtagcttcaagcgcccaagatgcgaatttccaagtttttccactcgcatttggaattgttaatagtgaaaacgacgaggcgtggacctggttcatgacgaagctaactgaagttgtcccagacgaaccagacctagtgttcgtctcagacaggcacgcttccatctatgcaagtattaggaaggtaaacattggtagataacatattatttaccacaatatcagtctctttaacgtataagaactttgtttatatttaatgaataattgtgaaaatgaaatgttgaaacaaatacagtaaaggaaatataaatggatatgggttatctgataataacatttttatttaatatatggggggttaccaaataagagaaaataaaaaaataagagataactaaatacataagtttttaatgcaaactagaaatgagatatgctaatgttatcatggcccgttaaatatgttgcaggtgtatccaatggcatcccacgcggcttctgtggttcatttgaaaagaaatataatcgcaatcttcaaaaacgaagccctaggaagtatagtgtcgagcgcagccagggcctaccgcctatgtgatttcaacaaaatctttgcggagattcgagcaatgaacgggccatgtgctgactacctcaccggaatagggtttaagcattggacccgatctcattttgttggggaaaaatataacgtgatgacaagcaacatcgcagtatcgttaaacaatgtgttgacaatggcaagagactatccggtgatctcaatcctcgaatcttggagaacaactttggttacgtggtttgctctacggagggaagcagctcgtatggaagaaaacatattgcctccaaaggtaaatgatatggtcatagagaactttgaaaagggggcaggatttggagtgttgaaaataggggatgggctatatgaggtgagagatattgtggactgcgggtacaccgtaaatctttgggatcgaacatgcacctgcagacagtttcagcttcttactataccatgttcccatgcaatagctgccgcaatcagagaagggataagagttgacaccatggttggagtccaccacacaattccacaactacggtcagcatacaaagaaatgattatgcatgtcccagatatggcaacactagcaccatcaccaaatgatatcggaggagggaagctagcaccaccatatgttagacggccaccagggcggccaagaaaaaggagactcttttctcggggagaattcaaggtaacttaatatttatttgctatttaaataatggtaaatattttgttatcgggatatctaatattttcctgatgagttatgtttcagaggacgtcgggtaagcgctgcacacgctgccgttcactgggccacaatcgagcaacgtgcaggggaccaatgacggtaacaaatttaaattatatttttaaactaaaaaaacataagaaaaccttgttaccgaaaattgtgataacacacatgagccgtagaaagcaggggaagctagttttttgggaaagaagaacggatggaagacgttgggcaaactaaaatagctcgacggaatgttaaataaataaagctgatgatgccagtagaatgattttgatgtatataatgcggattctagtggcctaatatgtataattattgaagaaaataccaatccgtcggttactgtttaattatttaatgaaggccagttaatgtttaattatctaataaatctgttggcattgtatgggaagttgggactacgcgtaagaagaatgttatcgagctatcattgataaaatgataacatattcattacgaatttggtataaagaaaaatatatgggaatctaaaaaaacaacttacatacgaaacagattaatgcgataagagtttgtttagaccatagccaactgatttagaggataggaaacaaattaatgcaagatctatggatttttgagggaataggtgggtacagattctcaccatcaatcaagataacacattggttatataactttgtgagatacccttatatgaagtctaaaacaaatgatattgttaatattactgagttaacaaaatgtataaacagatagactactaataataaataatacaaataatcttttaaaataatgaacaaagtaagttagttgttaagaaagaagttatgtagtaaacatataactaatttggatgtttctttagaggtacagaaatcgaatttaacctctcttgttgaaaccgagggttccatttcacctctcgttattaaaatcgatttggggaaactaacaaaattagggttacctacctctctccaaggacacttcacagtctcttcttttctcactattgttcagcttcctctccggttcttcttcactcgcttctgcttcgttttgtttctctctgaaacaatcaagttatgagtcaattttctacttctggttcatctcaactcacttcgagaactactcgcagaggtgttccgagtagatgctggtgtggtgacgagataactaccttcacttcgaagacagatgaaaacccgtatcaaagattctacagatgcgttaggggcgttctggtaatgaattggttttttaaatttatgaaaaaaaattttgctcagtaatttaagctttcgatttggggctttttttaagataaaaaggaaaaacacctattcatttgggttgatgatgctcttctagaggagattagaatggttgaaagcaagcacaaccaactcttagaagacgtcaatgatttaaagaagatgatcatggagaatgtagagcttcaaagtaagatggtgaaggagatggaaatagagatgaacaagatgaagaatgagataattgagcaaaagctgaaggtaccaaaggagagtacggagaaggcgagcatgaaatcagtttgtgtactcgtggttgtggtagtttcaatggcgtggctttgtcgaaaggttctgtgatctgttttgtatgtggatgtgtcttgttaagttaagatttagacgctaaaagaatgaacaatctaaagttatcggttaatcaggaagttacttggatgtgccttgttaagatttagaacttttaaagaatgaacaaatataaagttagtgtctaagcaagaagttacgtggggaacatattacatatttagatgtttctttagaagtacaagaatcgaatgaaacacagataagaatgttttaaagcaatctgactaacatgttagttaactatcattagtaattttatagaacctataatttgttctgtaattaaactaacatatatacgtaattaattaggtatttcaaaacttcttaaataacagaacgaatcacttgttctgacttcatctcttattcatataaatataagtaacaaatggtttactccgataaaacattcctttctgttaaatgttatttttcggaataaacaaacacatatatgtaattaataggttatgtctgtaactaatacattaactatattagtttatcgttgttgataacaaaaagggcaaatttaatagaattaaagggataataataatgatccgaaacgaagtaagttcaatataaaggacaatagagagtactaacaaatatggaatagaacatgggaaatattatatgaaaagaacatagtacatactaaaacaaaacaaggggagaactacgggacaccagcgagaatgatagcagagacaagttttttggtttcagcttcgatgaattcgggaagaaattcagcacaatcatccataccaccggcagcatgcgcatgaatgagaaagatagtcatcaagccggcatcaacatgagaggtaacctgcgggatgcaaagagacctttcaactgaaaatggagtaggtaagagctggctcattattggattagatgccgcctgtctgaagagaataggaagcattttggagagaggctcgatatccgccttgatgctagcatccgtacgcaaatgaacattagaatcgagaacagtaatcttggcgcaattaagatcaacaaataaggcaacccaatgttttttgtcaaagttgaatggcagataaaggtagtcaacttcagtaaacagctcagcacggtccagctccccaacaccagaaacagcatcaaccaaggctgtaggaaactagaaatcttgaggaacaggggctttggtgaacttcggatataggcggcacaattgagagataaacttggtatcaagcacatcaacacaaagttttccgcaatccacctcgtgtgtacggagaatgtgcttgctgaattttaacagggcgtccatgacctacaataaaggaatccattaaaatgattatcggataactactcaagttaacccgtaactcaaggacatccttgctgctaatagaaacatcggggcctaaagaaatagagctacaaaatcggtaccaaattattaacaaataaagaaattatctatctaacataacaaatgccagtaagaaaaaaaaagataagaaaaaccttatcgcttttagttttttcaaggaaccgttaaaacgctcttcaggatctaaacatccactagtattggcgatgggagaagggtgtcctaccaaaagcttcgttttcttatcaaactgaaaccgaccatctaacttggtagatctcgttctaagccttttactccttcctccattgttaccaacaacactagtctgagatggaacatctccctgcataagataacaaaatgaaactgccattttgaaaataatgcatgattggaaatgcaataaaaggaacaaaccttctctgggaccaaaactttgtttgactcacaaacagaaattggggcaaccacaagaacagggggatcctgaaaagcaaaaaggaatcaaaatgctaatgatgtaaccctactaaagataatgactaagaaatagaaaatgaggaagagatttttcaaacctgaagagggtcaattgccatctctggagcagtttcatttcggataccctattaaccgataactgatagattagaaaaaaatgacttttaaaaatggggtatatatgtcattaggaaaaaaggggacatttaacctgagtaggttcacaatccttgggtgcaatatatttactccctcccacctgcagcagataacaaaaatattagttaaataatattcacaaactccaggacaggatatagttgaatatttagacagacctcataatgacatcctattaaccgataaataattgattagtaaactaaaaatatgtttatgtaatagataattatataacaaggtaagaatagttagaggatttttaacagacctcttcatctccttcattatcgccttcagtttgagaatcctattaacagataattaattgattagtttcctaataaaaggttaactgggtaagatatgagagtcgaaaatgagagagacattatacctcaatagattccctgtcttttagaagagcatctccacttgattgtttctatacccgataagaataaagttatgaaataagtaattatgtaacaatagaaaatacttacagagattttcaacaaacctcttcatcccctttagcttcggtttgcgagtcccattgacagataactaattgattcgttaactaatctaatgattaatgggtaagatgtgagagtcgaaaaatagtcattatacctgaataagttccctgtcttttgggaagcatctaaacattgtaattcctataaccgataacaataaggttatgtgctaaataataatatagcatggtcaaatagtaagagatttttattacagacctcctcccctttatcttcaattagggaatcctattgatagataactagttggttagaaaactaataaaaggtttactagataaggtatgatatttcatttcttaataaaaggatattgtacctgaataggtttcccgtgttttggggaagcatctcgacttgataattcctgtaacagataacatcaaagttatgtgcaaaataattttataacatggtaaaatagttatggatatttattacagacctcgtcacctatagcttcaatttgggaatcctattgacagataactagttgattagtaaattaactaaaggattgagggataagatatgatatgtcgttttaaaaaagcagggatattgtacctgaataagttcactatccttgggggcaatatcttcaattgctaactcctgtccagataacaataaagttatggtttttgtaatcatattacctccgaaagaagattggggaatatttttaaagacctcttcatcatctccttcagtgtgtgctgcttccttatcggcaacatctcccatttccgtgtcctgtaacaggtaattattaggttatgaaaatattattaaagttacctagtaaacttactagagtggaaaattcgaaaacatcttcatcgactctagaagagtcggaattgacgctaacaccggactaacaatgaaacccagcaacaataaaagtaagagaactaagcaataatgattaaaaaaaattgaaaattcttcaaacctcagaagaaacaacagtggcagactgactgtcgacctcctggattgcctgaaagaaatatataaattaactcgaatgacctcacaacgttaacaataacatctcaatgttaacggctaacctgttggtttccgactgatgcggtaatctcttccagtgcctaaaccaaaggaaaaaaatataacgaaattatggtcacaatttgagtactaacaactaataaattgccaaaaaatttaaaacaaaaacaaaaaataatatataaaaaaaaaaatttaaacgttaacgtctaacccgcacattatccaccggatctccgatctcatgatcaccctgcaacagataggtatatgttataaaacattatatctaatatatattggcattatatccagaaaaaatataaattacatacggtaacaataatattagagacgtgaagatggctatattaaaagacactaacctccaagttatcatcattgttgtttaccgcggtattaccattgttaccatctttggtggacactttgctaccttcctttaatgactgcagggagaataatttcgataatagttaggggataacatagaaattaacattttcgaatgatataggaaaactactaaccggattagaaaataaaatgtaaagtcagatcatatataggcaacatggtaggacaaatacgttattagagatacgaggcaaaacagataacaattaatttagctactaacctgacaattaaccaaaccgttttcttcaacatcaacatgactcgctagaccatccgctgaccttgacccactgcaatcgccagataaaaagcggttataataagaagctatcccttcaacagaattgttgagtcccaatccctcgtcgggcacttgggggacgcgatgggcagctttgccaatgcgagaagaacgacgactcggcggatggaagggaaagagagtgtcaaaatcatcgtctccatcggaaatgtggagaggattagactggggaacaggaaccttttttcctttcctcttctccacagaaacttctttaccattctcagcaggaacatcttccccattctccgcagaaatcaaagtatttgcaataaaccaatcagaaacacctttaatgatctttttgtactgcgcattcaatttagcatctaacatccgagataacgcgttcatatcaaccaaaccaacaaattcttcctcattatgcacagattgttgagtccttcgaatcccggttggatttttttggattctgccctgctttgaagatttcctgacacgaccacctttcaaacttgcagttcttttttgttttttgggggctacaacaacttcagatgggatgcacccaccaggaaacatatcattattgaacttgaatccttcctccaccaactttaccaaagtgtctacctgcggatctacttcgtcatctgaccacgaaacatcttctgcaggatcaagaagaactccgggatggatgataggatcaacgtgagtctgaaaagtaaacaaaatccttaaacaattatgaagggaaaaccgcagttaacagataaaacgataaaattatttgagtatcaggtaagaaagaatttatcaggtattaaaacgattatcacctggcacttcgtgtctaaaacttggcgtcccacgggactacctggcgaggagtcagttcaatagtatctttatcagactcagacccgactgtctcctctgacataggaccttcttgaatagcaggagcggcttgaagaacaacaagatgtagggcgtataataggccttgcacagcgacagaagtagttgcaagcttttcaagttctctttctttaatcgaattcatcatcatctcaaaagtcaatcgaccccacagataagtgagaaaagaagtcaggttttccgacatctcagcgtgctctttaataattttgggatgatgggatgttggcaggagatatccatcaacaagcgcaagaacagcataacgaatacacaatgacggatcatcagtaacacgttccacagtaacatcggactccagcccaaataatgtgctataaaacggaatctctttgccagcagtccccttcctttttttcttcggaacatcaggatatcgcccacaagcaagtccggttactagatgaaactcacgaagagaaaatcgaactggggtaccagcataaacaacccagatctcgttggtaatggctatgtccaactggcgaccaagcagataaagaccgaaactggccgaccaagctggtttgtttgggaaatccaacaacccgccgagtggagaatctcggatgagattgatttcagtagcatcaagcgagtcgataataccattaagaattttcatcttattatacacattaaccctctccccaagcggttcttcaccagcggcgattagacggtgcgggaggtcaaggtcctccatctacaaaacccagaaaattttagaatttgataagaaaaaaatatggaagggtccataagaaatgaacaaaatctcattttaatgagatacttacttggacgaattaatcgaaaatgaagcgcttcaatcggaaaatcgatttgactatcggagagaaaaaaaagtaaaccgcatagagaacagagggaacgaacactaagaatactaagaggcaaaaaaatgcagtagaaatagacacacacaaacgcaactcttcgaacaatttgaaccgttctcatgattattaatgcaactgttcccaaaagaaatctcggaaatcacattttttcaagagatatgatatctctctattctgacacacgcctactcgttcctcatgtctctctcttacaatctgataggcgggtaggggttaacaggtcattattttgctacagaaccttcccaaacagtgtaaaattgtgtcagttaaatacggagtcgtctatggtcatcgattgtagattcccttgaaaaaaaaaaacaaaagtaattattagtggatatttaaactccaaaaaaaaaaaaacaatagtccaccaaatcttttaaaatttcttgagaggagtcactattaccatgttgaggagatataggttttagaacaccaagaaaaatgtcctcgaacattaagatgtccgtttgatatcgtggaagtccttgaaccctacgactagtctatgatgaatttgtttgtagggagatacgcttttgactcaactcgagtccaattgtgatagaaagagttcaacccctcttaatttgaagatgaaaaatttagtatgagttatgaaaaatattctttcgagaaggatatattatcatgtattatcatgtttttgaaacatattgtgcaaaatcagtttttatgctgaatttttctagaaaatggcttgttttctctaatctttattgagctctgctccaaattttctttcctaatttatcgctttgtagtatttttcgtttttcgtgtgaaagtcataagatcttttctatgaaatttcatttgtaaacatatgaaaatggttgtttagtaatattcggataaaaatcatgtaaatttttagagaaaagtacttatccactaagtagtcgacatctatccaaattttagacaatttctcaatttcaaaatttccacaaaaacaatggttcagttttgggtcaacgtcttcatgtttctttcaaggaaagatcttgaactcatcaaaagaaaatacaaaacaaaattaataatgatgaaaagaatcctaaatatcagtaacatacgtaattgatgatgtcacaaaaatctatggtagctgttgttcacttgtttgtactctagtaatctaaagcttaaaagaagctaaaagatcttatgactttcacacgtagagcccaaaacccgtccgagctaagtaatgtcgtgacgtgtgagatgcaacaaacatcgcacaaaattgttttacctgattttcacgaatttcaaaatagagttttttttttttttttttttttttttttgacagccaaaatagagttttattccaaaaatttaaaatagatatggactgattaaatcctctaatcatagggatatccagattcaaatctggaattggagctgtaaaaggcaaaaaataataatatattagaaacaaaatcaaatattatggtaaaatcaaattttattataatattcttaaatgaaaatctgatatactatcttaataatatttaaaattaaatttcatatatctttcctatgtatcacatgttatttaaaaaatttatggacaaattacatattttataaaaaatcagaatagatttcggattggatcccccaaataataattctacctctagaaaataataatactgcctaattataaaattaatttatgcttgactaacactctctgataataaattgttacacataggttgactaacaaaatcctgttacacgaatttagccacacacgtgtatataataaacacgaataaacggaagaagaagcaatgaaaacagaacaaaaaaaaaaatggagatatggttacttatcttgggctctctcttcctctctctccttctcaatctcctcctctttcgccgccgtgactcctcctctcttcccttaccacctgaccctaact

SEQ ID NO: 5298 - DNA, 2977 bp, Arabidopsis lyrata
  Intron number 2 from transcript 491799 (locus 491799) deri ved from phytozome v7.0 (chr-ID scaffold_7; pos 5239942 to 5242918 reverse strand)
ttacctttcagtggtgtcaatatatattatattcataattatgttttgttttcttctttggttcatgttaccttttaatataatttcagtgtactaatcttacgaaatcactttgtacttataaattaatgtcagcttacgaatattattttgtgaattgatactcttctaaaatacccattgagatagtggacgcaaaaaaattgttttgaggaacaacatataaaactatctcagaattttagaagagttaaatttcatgattgaatatgtttgttttataaaagatggtaacaacttctttttgaatccttaaaaatttctaattacaaaagtataatgctgtatctatcattttccttagaccgaccataagcataacaaatagcaatagatgccatgagattagtctaattgcaaaagtataaaggtgtattatttcaacttgagcaataatcttcatggtaatgagttaaaagttatgaggttcgagaaagtggggtttgctaaaaatagttaaaggttgaaattttgttgagaattgagacataaaagtgatttctctgttctgttcacgtcatcttgtgtggacatgtgatttgatactttgttattatttatggtaaattttatttgttttgtatcagtaaaatcacgtgtaacaaattattaaatgtagcatatactattttcccataagtaaataatgattatttcttaaaaaagtttcaatccataatccactcaaaaaattatctgaaactaacttaagaaacatagaatcatatgaactttgaatttatgagttgtgtagtaagcttattttcgaacaaatatatcatacttttaagttcaaactgatctacccaaagtactcatttctgaacaagattcaatttcaaagacaaagagaaaatccatgtatatcatggacttgagtattattagatgtttttatattgtcacaatctcacacagtattcaatgaattaaattatcacttttgtgaataaaattcccaatttttgtttgtttcagtattcataccatgaatttgtgactaattaacactactgatttttttttataaccattctttagtatagtattttctacaagactactaaagtaaccgtaactacttaaaaagcaaatctgttttgagaaatggttcatgagtcatcatgagtcttaatgacggagatacagtcataatctcgtttatattcttgcgtgtgcatgaaattatttacttacgtggtaattggtaaacaccattttaaaagcattcatatatacacacatatcacatatcagacaattttaaacacatattcaatatcagatctgatatctaccaaaataattctctatgctacaatctaccgacggttgaactagcatatattttacaaataaacttcttaatttttatctacattactattcaaaccattaaaatgttactactaaataaaagttaaggactattagtcctcatgacgttaaattttatatatattactacactcttcattacattacttttatactaactaaaaaactaaccctaattactactttgtttaaaaagctagttcatgaatgttgatagtcacaatcacctttttttaatcttgtagttcacacactaacgtattgtttgcgtctacgaatgacctaaacacgattttaaaaagtacttgcacaataagctcacagacacaacacatctatataaataggtaaagacctaatctcacttctcatctcatctctcaacataaaatctcaaaacacgatcctaaatcagacagagaaaatggcacaagatcagtacaagtttgttttcactgccaaagaagcagaatcggaaggcgtcaccgaacccttcagacttccaaatctgatcacaaaggcgatgtcactcgctcgggctccaatctccaaatacaaagtcggagccgttggacgcgcaccatcgggtcggatctacttaggcgtcaatgtcgaattaccaggtcttcctcttcaccactccatccacgccgagcaattcctcgtcaccaacctcgcactcaactctgagaaaggcctccatctgttagccgtctccatctctactgacgtcaacgacttcggcgcaccgtgcgggaactgccgccagtttcttatggagatgagaaacgcgcttgacatccaaatccttctcaaatcaaagcatgaagaagggtcattcaggagccttagactcctccttccggacagattctccccctgttcccctctccttctcgagaagcacgataactgcctcaccctctcgggttctgccggagagatatgctcatcagattgttcccatttgaagtgcaaggctctagccgcggcaaacaactcgttctcgccgtacactaactctccgtcgggagtggcgctgcaggataacgatgggaagtggtaccgtggatggtacattgaatcagtggcgtcaaaccctagtttgggaccagtacaagctgcgctggttgatttcgtggctcgtagccgaggcaaagggttcgataagatcggcgaagcggtgctggtggaaaagaaaaatgcgagggtgagtcaagagggcacggcgaagatgattttagacactatagcagctccgaactgcgatttcaaggtcttccattgctacgaggatatcgtaaaaaaaatgaattatattacaataccggaggtagagaacggtaaaaagggatacttagtaaggaaaataatacgccagtaggggattacactggtcttcgttattaaactattttattatcctatcaaattatattgattattctttgttgtcttcttggttgggttcgttaaaccttttaataatgtcagtgaatcataattatgttatatatgttttctacttcggttcatgacttcatgttacctttcagtggtgtcaatatataatatattc

SEQ ID NO: 5299 - DNA, 3684 bp, Arabidopsis lyrata
  Intron number 2 from transcript 493323 (locus 493323) deri ved from phytozome v7.0 (chr-ID scaffold_7; pos 12763891 t o 12767574 reverse strand)
acaaccgccaaagcctcttacttgtcggcctttgtgtaagagcatctccaatggtacaatttttccatatcttagcaaaaaatcttagattaaatgtctgtaaaataattcaaaacaaattaaatagctaagatttgtgtcttagcttagaggttttcttagttttaagaagtgttcacgtgtcagaagatgtgtggaagaaaaaaaaagacaaaaccaaaaaaaaaaagttgtttcgcgtaattttttttccttctcatttctctctctcttactcgacttttggcgataaaaatgaggctttgcgaatctcttcaattctggtggatttgttgaattgagaagaggtgtgagtcgaaaatcctttgcgaatctcttcatggtttcgaaattagggttttgggaaattgggaatcgatgcaaaattagggttcttataattaggattgattttaacaaaattagggttctatgatccgtttgaggtgtataacatattgatgtggtcagattgagaatttgaaattgatccgtttgatttgtcttagagtgagtttgttttattttctgtttcttgatctctttatctgtttcacaatcttccctacaatcacaccattgatttgcaggtttggattctgtttctcagtttgacattctcttatatatcaaagattttaaagttatctaaatgctttgattaggtaaagaatttctatgtgtgatcaatgcttgaatgatattgtttagttaatagtaggataagacttctttaatcgatgcttggtagtctttattgatatagaaatggttaaatttgattgcattttaaattatgtcttcctgttgcatttcaatttatgtctttctgtttttaagttaagtctttagcttgtatgaacttgtttgtttttttttttttttggtaggcgaggggaaacaatgtctccctcaatttattaaaataaaattaaaaaaattacaaacgaactcgacgcggatgttttgaacttgtttgttttagtctatgtgaagatattgaatcattgaatgagtacatcttgtttgttttagattaggtagagatattgaaatgctttaatttgattgtccacatcatacttattgtctagttagtgttaatacttttttttcactgtcataagttattgatttcttttgtttcaggtgttaatactatagatggctatagatgagaaggaactagatcggagtaagagctcatacaaggttaaacaatcttcctttctctttcttatatcattgaacttctgattttacatgatttagattaggtgcttttattcaatgctttccctgtgtgatcttttgaataaaattgaacctctgatcaatgcttgaaatcttttgcataaaaactgcgattttaattggaaattaggctttgatgatgctgtcgacatcagtctttagcgcaccattaacacacctttaagtttctctgttctgaatgctttaactatgctcattaactatgtttaactttgattgtctaaatcagacttgaagtcattgcttttgcttgtttaacttcatctctctctgttaataaaaacctaaccagaaactatgtgtgatcaatgctttgtagttgtaattaattgattgcttgttaattaaaacacactctctttccgtagcttaacacacatcactaactctacttaacccagaccatcgcacaccaaaaacatatcctctctaacttaacacattgaactttaacaacttgtggttccaaagctcattggttcttgctttactcctttatgaactcgttgaatttgaaacagtctcttgttctgctaaaattgagactttggagaattctaatatatttgatttatccacttgtgtcacaggcacgaaccgcattggagttgttgagggagaacaagaacaagtttgatcttgttatatgcgatgtcgacatgccggacatggatggtttcaagctgcttgagcttgttggtcttgaaatggacttacctgtcaatgtcataagtatgaagctttccttgttttagctctgtttgattccatcaaacttttcatagttcctagagaaagttttgatctttagacagacttgaatttggttctttaacatgattccttgtatttgaagatattgttttgtaaaaatttgaattttttttctaagatactctctttattcttaaccattggagcttatttttcttaagatattttctatcttttcttaactcacaaaaagcaaaatttagattataaataatgctaagatgtaaagttaagaaccaaatggctcttaaccattggagatgctctaagtctctctttttctccctttcacacacacgtgtggctcgcattaaggtttcgattgtttcttagtcttataaattcacttttaaaaacacataaaagaatttcaacttttattcacagtaaatttttttgtaaaagtgaatttcttatataaatagtaggattttttttttctttttctttttgagagctcagatattcaggcaggggtctaaacatatctccaattttttccgtttgcctaaaacgaaaactttgatttatgtacaatatgtttatgaacagtagatttatgacgggaggcttgcactccaatttatatgcaaatgctttgtaatgttatttatattaaaactgcaaagatgcataccaaaacgcaaacgttctattttgagtagtaagcttgaaaaacaattggtattcggctggattgctagataacaaaaaattatagtaaaattgacaacaaaaaaaaaagctagcatggaaaaactataaatataattggtcatttgaagtaacctgttttatatccgataaaataatgtaatatttaaaaaataagtattaacatgtgttatatgtacgaaatatggttctttcaaaaataatccctataaataaacaaatttatttacgtttaagaaaagtcagttatttatgatttaacctatttctcagatgaaacagtcgaatttggttatatagtgcacattctcttaattagtattacatgtcgtctatttagttgaaaataaaacataacaattacggataaactgataattaaatttgagacgtagaggtagtgagataattgattagacctttccggttggttgcatgcgggaaaggactgctgaactaatattttgcataattaaccttcttatatctaatgggtccgtagaccatatagagtattcataattaaatgttacacataaatgcataaataataccaatcaaatgactggtatacagtaaattttgtagttaatcataaatgtccaactaccaaaactgtgacacaacatcaatgttggcccatagccaatttttacctgacatttttccagatcttatgttactttaaatttagtgtccaacagttcttagctggcatgaccaagagtgcatagcctgcatatctaaataaattttgtaaacgaggaacatgaatttagactaattgctggactggtacatatttttattttactctttcatggcaaaaaagagaggatctcaggaataaaattcatagataagtaacgtgttacaaatgttgtaggtacaacatttctgcaaacgcgatagcttgcggtt

SEQ ID NO: 5300 - DNA, 962 bp, Arabidopsis lyrata
  Intron number 1 from transcript 928231 (locus 928231) deri ved from phytozome v7.0 (chr-ID scaffold_3; pos 2420219 to 2421180 reverse strand)
gcaacctagacactgtaatttgcccaggtttgattctgttttcccggaaaattcgattgtttcctctgttcttactcagtttctgccacttggtgttctttaattcatgtttgcacttaaaacagagtattctttggaaaccaaaagggttattgaatcttagagaaatcagagctttttaagtttcttctgtgttctaggcaatttctgccatttggtgtgaaattacaaatgaaattgtgtttgttttctatagagtttagttattggaatggagattttggtgtagtcagtaatttctggtagatcaaaagtttttttttgggattgagatttatcaaatctttggtctatggagaagagaagtcagaggttctttaagttttgttactttcagctttgatgtcgttttctatggtctcttctccagttgtccgcaagttacggcttaggataagcataatctcgtgaaactagtcatcagattttgctattaaagccagtggctctttttgttctcttctcttgatttgatcttttctatggtcccttcttcttccatttcccatttacatcaaacagctatttcttcaccaatcaatgtgtgtgctctttcttttttataaaggcttttgttttgtattgtatgaacccgtgagttaaattggaaagacaggattggttaccaaataacatgtatgcacaatagtttgtccgtgttgtttcctgaactatgaactatatgtctaggatttgaattccaccacgatcaagcaaagtatttgacagtggttttgtggaatagtttgagtaaaggtcaattcttgtgggaaacttgattgcagatatttataaaagagaaagaatcaattctgaaagaactttcaaactcttacgaatttagttttgtctttgaaggcactactttgctgactctatttttctgttttgaattagatttg

SEQ ID NO: 5301 - DNA, 12723 bp, Arabidopsis lyrata
  Intron number 2 from transcript 891488 (locus 891488) deri ved from phytozome v7.0 (chr-ID scaffold_7; pos 21317510 t o 21330232 reverse strand)
acagcaaaattaagaagctctggggaggaatccaggtttggtattcgatattctttctagtgcttctaatgattcaatttaaataagaaatatttctcatttaacatgcagtcccttcctaatctcaagatcatagatctgatgtgttcccgtcaattgaaagaaatcccaaatctttcaaaatctactaatctcgagaaattgacacttaagggctgcaatcgtttggtggagcttccatcttctattaagaatctacaaaaactaaagattctagatgttggtttttgctgtatgctacaagttattcccagcaacatcaacttagcatctcttaagatactcaccatgaatggttgctcacggttgagaacttttccagaaatctccagtaacatcaaggttctcaatctcggagatacagatatagaagatgtccctccatcagttgctggatgtttgtctcgtcttgatcgcctcaacatttgcagcagcagcctcaagagattgacacatgtaccactctttataactgacctaattcttaatggcagtgatatagagacgattccagattgcgtcatatgtctcactcgtctagaatggctttctgtcaaaaggtgcacaaaactcgagtcaattccgggtcttcccccctccctccgtgacctaagagcagacgattgtgtatcactcgagagagtatgcttctctttccataacccaaccgagagactcagtttcagaaactgttttaaactggataaagaatcgagaagaggaatcatacaaaaatcaatttacgattgtgtatgcttaccaggtaaaaaaatccctgcagagttcactcacaaagcaacagggagatccataaccatccctctggctccgggtactctctctgcttcctcaaggtttaaggcttgccttctcatttccccagttaaagactacggatataaacgtataagctgtagtataagaagcaaaggaggtgttacagttcatagatgcgagtgtccacatctgtctttgtcttttcggtcagaacatctgtttatatttcatgatgatttgtttccccaaggaaacaaatgccatgaagccgatgtgaccatgagcgagattatatttgagttcagctgcgatttcggcgatgacaagattattgagtgtggtgtacagatcatgagagaggaagttgagggtagcaacatcagggaattggacagccatgaaactgagagtagtagcagcgaagtggacagccatgaaactgagagtggcagcaactgtttgaaactggataaagaatcaagaagaggaatcatacaacaatcagttggcatgtataaatggttaccaggtaaaaacatccctgcagatttcactcacaaagcaacagggagatccataaccatccctctggctccgggtactctctctgcttcctcaaggtttaaggcttccattctcattttgccagttgagtacgccggattaagaactataagttgtagtatcagaagcaaaggaggtgttacagttcatagctacgagtttgaatatctgtctttgtcttttcggtcaaaacatctgtttatatttcatggcgatttgtttccccaaggaaacaaatgccatgaagtggatgtgaccatgagcgagattatatttgagttcagcttcaatgtcggcaatgccaagattagtgagtgtggtgtacagatcatgacagaggaagctgagggtagcagcatcagggagttggacaactatgaaactgagagtagcagcagcgaagtggacagccatgaaactgagagtagcagcagcgaagatggaaatggagatgaaaacatcaaaaccagtaaacaaataggttttaggagttggcttcagaatttttttggtctaaaagagaagaagatgaatacgacagagtggagttctgacaaaggggacatctgtgaaactgagagtagcagcagcaaagtggattattaggaaactggaggtgacgataatcacctcacagatggatatgaagttggagatggagatggagactatgacgcagaaggtttcaagttctctgaaattgaaaacatctaatcaagtaacccgaaactcgtgacagtgccggctcttcccctgtagctcaagtccttaaatgcaaacgaatgtgtataaggaggtatggagattaattgggatttacaaaaaaatctgtttgtcttgcaaaacctttgtgagtttgtgaatttgaatgagtcacacctcttgtctataagcttagtatatgactgaatgagttacacctctttttctttaatgagtgaatgagtgatacctcttggcaaatctgttaagtatagacctcttgtctttaagctttgttattgtggatatggtaacacgctaatactcttagagtagagaaattagtaggagattaattgggatttacagaatccatgagcaaaaatctgttttgttttgcaaaacctttgtgagtgtgattagtagtagacaaagcatatcccaatattgtcgctacactaggttctgtacgacagtatgagttataccgttttggtttaatagacaaagccttgtatttatttcttaattagctgtttaagtactaagaaaagtcttgttattttgtgatctagttagttagctgtttaagtactaagagaagttttgttatcttgtcaacgcattcgagaaaacttgtgaaggacatgaagcaaagctttgactgatgagcaaacataattgtgtacatttctgattatccaaatgaccaaatctgtagagagactggaatatctgatcccctagctccaattttcttaattcttcacagagagttgctttcattgttctgctacataggcttattcagaacaattgcaaactctgtgataactttttcaacatctcttttactatgaaactaatagtagcagcaaccaaaccaaaccaataataaacagcaaatcttaacgaaatcaaaccttatggatggatggggtcctcaccgactttgggggaaacattttgtttttgtatttttctatacaaggaggacaaagtcctttgaaatatcagttccgtagatagcttatccaaaacagttgtgataccttcatcgtccatatcaaagcttaccatatctttcatggcttcttctccttcttcgtcttgctcgcatcaagagatggtgatgcacccaatttggcatcactatctctactccattaaaaattgacgtttattggcatctccgtatctcggataactccaaccaaccaatttggaaacccgaaatatggaaatgccaataaacccgaatttgatccgttttaaactaatagtagcagcaaccaaccaaaccaacaataaacagcaaatctttacgaaatatggaaatgccaataaacaccattttcttaatagaaactgaagacattctcaatgtactaggaaacggaacagtaagtttttacatatatcttactgaattttgatatgtccaagaccaagtagtagttggtttaatttagtaggcgagcctttgaagagaaatcatacaccatttgaaagccaaatatgtctgcttacccggaaaagaactctctgtggagtacactcacaaagcgagattctgttcgaattcacttgctcagataacaacaagattattgagtgtggtatacagatcttgaaagaaggatatgatgaatatttggactgtgaacctgaagccgtaggcaacattggctaccaaaatgttgagaatgtggataacgctaaacacacaggttgttggtctaagaaaaagaagacaaaaagctccaccgtgaaacatcactttatttttcacactaagttgtcccagaaacacagaagaatcaaatgcgattgaggatggagccgctcggatctctaaagatgaaaatgtcacaagcagtaaatatgtcagatcattgagtgcagtgcatggatttgatggataaaactcagagtagcagcaacgaaaagtcttaaaaagaacgtagcatccacaaatgcagaaaactctgtgtcacatatcgatcttttggagtccgttgagtgtcgaaaatgtaagcaaagtgtgaatcattgaagagattctattgttattcctgcaactgtgtgaaactagacgaatcaagaagagtaatcccgcatgtctttaatcagatgtgtcaactcgttctctatcagaacatctgtttttataatttggtggtgacttgtatcatcaacaaagcataaatatttaacgaagtggatgtgaccatgagcaaggttctgttcgagttcacttactgggacaatgagaacaagactattgaatgcaagcagcaccattgcattagggttagttattgtcttgtgtatattttctttccaggtaagtaagaaactactgttgtattcaatagatggcttattcagaaccattgtaactctgtgataacttctcttttactaagaaactgagtgtagacgtagtagcaaagaacagaagctgagaccatagaacattaagatatatatagatcaagaagaagcaacatagggttttgaggccaaacctgaaatgaagatcctttatgatttaaggatcgatcaatcgagcatacaaaagcctatcatacaaaaaccaaaacagagtaaatctccgacctgatcatccaaataaacaatctcaaattgaaaaaattgatgaagacaaaatcaaccgttgaaaaattggttatgtagagtgtctctcaccgatcaatacaacagattcaaaagagaatttgaaagcaactgaggatcagaagaagaagaagaaaaaacggagttgtgtttttcccctgtttttgtgttcttcttggttgctaagaaaatctctaatttctttttttgtttctaaccagaaaacctaaccagaaaaccaattttgatcgaattgaaaaggccggtttagtttttcaaaccaaatttacaattggatatcgagagttttaagatccctaattttgaatcatgtctggttctttcttcttcctccgatcatcttctcaccgagtctcatgcttcagctctgagctcatctctacgaaataaaattccgattgccaaaaattcaaaaccttatgaggttctcaagaccatgaggaaacactcttatgggtcatcgacgactttgagggaaacattttttgtatttttctctacagagagacaaatccctttgaaatttcaatcctctcgttacgcgttttcttcaattatataagcgagagacttgttttctactccatagattgcttatccaaaaccattgtggtaccttcttcttcaatctcaaaatttaccaatctgtttcatggcttctttttcttcgtctcgtatgaagagattccatgtcttttcgagctttcacggtccagatttccgtagagggtttctcagtcatttacactgtcatttcgcaagcaaaaggaatcacaactttcaatgatcaggagatcaagagaggccacacgattggacctgagctcgtacaagcgattagagaatctagagtctcgattgtggtgctctcgaagaaggtacgcttcttccagctggtgtttagatgaattggttgaaatcttgaagtgcgaagaagcagtctcaagggcagattgtgatgaccattttttacgacgttgatccgtccgatgtacggaaacaggagggaaatttcaggagcgctttcgagaagacttgtcaagggaaaactgaggaggtgaagctcagattgccggggaacactctcttaattggtatgtaaatcgtctcttaatgaacttaattatcttttggaaatgcttcactttaaggaaatttagactccttaacatgattttgtttgcatgtgttagggctaatgaagcagaaatgattgaaaagattgctattgatgtttcaaacagactgaatgctagaccgtctagggattttaagggtatggtaggaattgaagctcacttgaataaactggactctttgttatgccttggatgcgatgacgtgaagatgattgtaatttggggtcctgcgggaatttgtaagactaccattgctagagctctatataaccaaatttgtagcgagtttccacttagttgttttatggggaacctcaaaggaagttataagagcataatgggtgttgatgactatgattccatgttgtgtttacaaaaccaacttctgtccaagattttcaacaaaagggatatgaggataaataatttagatgcaatcaaggaatggctacaagattcatgagtgcttatcattcttgatgatgtagacaatctacagcaatttgaggccttggcagctttctttgtttggttctggaagtcggattatcattaccactgaagatagaaggattctaaaggcacatgagtttatgatatctaccctgttggttttctttccaaagagaaaaatcaaccgttaaaaaattggttatgtagaatgtctctcaccgatcaataaaacagattcaaaagagaaataaaaagcaactgagaaattcagaagaagaagaagaaaaaagagttttatttttcccctgttttttcttcttcttggttgctaagataattaagagaaaaacaaaaagttgcaggaaaatgttgaattttggtttggtgtgattttgatcgttgaaaacattttccgagttcttcggagtcccatatataaaatacactttttaataactgttaatcgcatatagtatcaatgttatggccttcacgttgcttgcacatcccacaatgttaggtgggatgataaaattttagcgcgatttagataaaatactgttttgaacggatttgttgcgagtaggggtgtcaaaatgagcttgcaactcataagctggttcagctcagctcgatttttcatgagcacgagctctgttttttagactcatttaataaatgagttatgtgatcgagctttttttagatcgcgagttatatgagcgagatttaatgaacatgagctcgactttttttagatatatatatatatatatatatatatatatatttatatatatcttttccatttaaattaaacaaaaatagaattattcttttagaaaatttgtgtctttttacatattaattttagaagataattaagtaatatagaaataatcctttaaaaaatttatcttaaacgtttcccaaaaaaaagaaaggaattatcctatttagatattatctaaaacgtttacttgtagatgaagacaatgaagatgttgatgtaggatcatctcaagagcaagactctaacacggaataaattcttgatcattccataattctattatctttaattaatttaatttaattgttaggatttattatttgagatttttttttgtttggcgttttgaaattatttttttcttggatttatttccattatttaacttcagaattaattatgttattaaatttattttaattttttttttttaaaattacaatatttttgttattatatttatttgttatgagctagctcctttaactcgtgaccaagatgatctgagtccgagtttatatattgaagctcatctaataaatgagctgagctgagttagctcataaaatatccgagctcatcatgaactgaaccgagttgagcgagctagcttattttgacacccctagttacgagtatcggaaaaccgaaatctcaggctcagcccgtttataaagttaagggcccaatatcatgtcctaaaatgtcaaattcgtaatttctttgataacttctcttttacttatgaaactgagtgtcctccacaccaatgagacagaagctattaaaatagaagccacacgttatttcaatacatccactacacacaaaaaaaaaaaaaaaaacagaaaaaacctaaattaatcatccaaaatcatcattcccaaaagcagaatttaattcgatattactgttattgaatttaaaacaaataaaagacccggtttacttttcaaaccaaatttacaaaatgtggtatgtggttgagctcattcgaaacttcgtgattcgtcgtctctaccaacttgactgtcggatacttgttactcctccgtattttaataagtgtcgttttagaatttttatttttttgaattggatgtcgttttcaaatttctatgcaaatttttttactttttaatgttttatgatatcataaaacattaaaaagtaaaaaattttgcatagaaatttgaaaacgacaactaatataaaggaagattctttatgatttaaggaacgatcaataatcgagcatacaaaagcatatcatacacgaaccgaaacagagcaaatatccgacctgatcatccaaaaaacaatctcaaattgataaaattgataaaaagaaaatcaacctttgaaaaattggttacgtagaatgtctctcaccgatcaatacaacagatttaaatgagaatttgaaagcaactgaggaattcagaagacgaagaaaaaagagttttatttttcctctgttttttcttcttcttggttgctaagaaaattaagagaaaaaaaaaagttgcaggaaaatgttgaattttggtttggtgtgattttgatcgttgaaaacattttccgagttctttggagtcccatatataaaatacactttttaataattgttaatcgcatatagtatcaatgttatggccttcacgttgcttgcacatcccacaatgttaggtgggatgataaaattttagcgcgatttagataaaatactgttttgaacggatttgttgcgagtaggggtgtcaaaatgagctcgcaactcataagctggttcagctcagctcgatttttcatgaacacgagctctgttttttaggctcatttaataaatgagttatgtgatcgagctttttttagatcgcgagttatatgagcgagctttaatgaacatgagcttgactttttttagaaatatatatatatatatatatatatatcttttccatataaattaaacaaaaatagaattattcttttagaaaatttgtgtttttacatattaattttagaagataattaagtaatatagaaataatcctttaaaaaatttatcttaaacgtttcccaaaaaaatgaaaggaattatcatatttagatattatctaaaacgtttacttgtagatgaagacaatgaagatgttgatgtaggatcatctcaagagcaagactctaacacggaataaattcttgatcattccatatttctattatctttaattaatttaatttaattgttaggatttattatttgagattttttttgtttggcgttttgagattatttttttcttggtttatttccattatttaactttagaattaattatgttattggatttattttaatttttttaaaaaaatttacaatatttttgttattatatttatttgttatgagctagctcatttaactcgtgaccaagatgatctgagtccgaatttatatattgaagctcatctaataaatgagctgagctgagttagctcataaaatgtccgagctcatcatgagctgaaccgagttgagcgagctagcttattttgacactcttagttgcgagtatcgggaaaaccgaaatctcaggctcagcccgtttataaagttaagggcccaatatcaggccctaaaatgtcaaattcgtaatttctttgataacttctcttttacttatgaaactgagtgtcctccacaccaatgaaacataagctgttaaaatagaagccacacgttatttcaatacatccactacacaaaaaaaaaaaaaaaacagaaaaaacctaagttaaatatccaaaatcatcattcccaaaagcagaatttaattcgatattactgttattgaatttaaaacaaataaaagacccggtttacttttcaaaccaaatgtggtatgtggttgagctcattcgaaacttcgtgattcgtcgtctctaccatcttgactgtcggatacttattataactctgtgctctctaccaacttgactgtcggatacttattataactctgtgctcatttcacatggcaaagctttaatgagtgattgtggtcctcgacgactataaagaaacacgtacgcttttgaaatttgtccccttctattttgtatttcttcaattacattccaatttcttcgaaatttctcttctctttacgcgtttttttgcttcactacaaaaaccaaaggagctttcctttgaaatttgtctattttgtatttcttcagtacattccaatttcttcgaaatttctcttctccttttacgcgttttttttgcttcgataaataaccgaaggatcttgcttttccaatcatactttctccaataccattctaaaaatactttcttcaagttcaagcatttgtgatctctcatggcttcttcttcttcttcctctggcatcatgagataccatgttttcccgagcttccatggcccagatgttcgtagagggtttctcagtcatttacacgatcacttcgcaagcaaagggatcacgacgtttaaagatcaggagatcgagagaggccacacgattaaacctgagctcgtacaagcgattagagaatctcgagtctcgatcgtgctgctctcgaagaagtacgcttcttcgagctggtgtttagatgaacttgtggaaatcttcaagtgcaaagaagatcaggggcagatcgtgatgaccatcttctatgacgttgatccgtcgagtgtacggaaacagaagggagatttcggaaccgcattcatgaagacttgtgaagggaaaagtgaggagacgaagcagagttggagcaatgctttgactcatgctgcaaacatagaaggagaacattctcttaattggtatcttgtttttatcttcttctttttttttttttctttttttttttgtctctgaatgaattagtgcttcaaatttttgtaatttcgacccaccaacatgattttgttttgcttttgttagggctaatgaagcagatatgattaaaaagattgctaccgatgtttcaaacaaacttaatcttacaccgtcgaaggattttgacgggatggtgggacatgaagctcacttggcaaaattgaactctttgttatgcttggaaagtgatgaagtcaagatgattgggatttggggtcctgcagggattggtaagtccaccattgctagagctttagacaaccaactctctagcaattttcaacttaaatgttttatggggaacctcaagggtagtcttaagagcagaatgggtgttgatgaccatgattccaagttgtggttgcaaaaccaacttttgtctaagatttttaaccaagagaatatgaagatgcgtcatttaggtgcaatcaaagaaaggctacaacgtcaaagagtgctcatcattcttgatgatgtagatgatctagagcaattagaggtattggctaaagaaccttcttggtttggttctggaagccggatcatcgttaccacagaagataagaagattttggaggcacatgggatcaaggatatctaccatgtggatttcccatccgaggaagaagctcttgagatcttatgtctctctgctttcaaacaaagctctgtaccaaatggttttgaagaggttgccaataaagtagcagagctttgcggcaatcttccattaggcctttgtgtcgtgggttcatctttgcgtgggcagagcaagcaagagtgggaacttcaattatctagaattgatggaagtcttgatggaaaagttgaagacattttgaaagtgggattcgacagtttgtcgaagaaaaatcaatctctattccttcacattgcatgcttcttcaacaatgaagtcgttgataatgtgatatctgtgctttctgatagtaacttggatgttaggaatgggttagagaccctagccgataaatctctcgtgcataaatctacctatggccgtatagtgatgcaccatctactacaacaattgggtagacagatagttcatgaacagtctgacgagcccgggaaacgtcaatttttatttgaggccgatgagatttgtgatgtactgtcaaccgaaacagtaagtttaagttcttacatgtatattgcctatttttagtgataacaatttcatcagtcattggcaatgttattttgtagggtactggatcagtcataggtatatcatttgatacatccaatatcggagaagtttctgtaagtaagggggcttttgaaggaatgcgtaatctccgattcctaagaatctttaggcgttggtttggcggcgaaggtactttgcaaataccagaagatttggattatttacctcttcttaggttactacattgggaattttacccaagaacaagtcttcctcggaggtttcagccggaacgtctcatggaactccgtatgccatttagcaatctcgagaagctctggggaggaatccaggtttggtattcgatattctttctagtgcttctaatgattcaatttaaataagaaatatttctcatttaacatgcagtcccttcctaatctcaagatcatagatctg

SEQ ID NO: 5302 - DNA, 5589 bp, Arabidopsis lyrata
  Intron number 7 from transcript 484159 (locus 484159) deri ved from phytozome v7.0 (chr-ID scaffold_5; pos 834676 to 840264)
gagaaacttgcgctgacgcttggattgaaaaggaggcaaggaaaaatgatctctttaccccaaaggctgttcaaatagacgggttttcgaaaatagttgttgatgtatcttcatttctgataagattcctgatattggtaggtggttgcgttgagagaagatggatgccctaaggtttgggttgtaacatctgatgtctgtcaacaacaagcagcacatggagcggtattgcatatcataacgatgttttaaacttgttatgctcatatcttgttactgattttggtgactaattcttgacagggagcttatatttggagtagcaaggcactggtttctgaggtatgatcaccaaagcaattgcctttatctttttttgtgatttgagagtcatgtgatcttgtgaaacatcatattgtagatcaaatcaatgcacaaggaagtagagagaatgatgcaagaaacaaggttacattggatttttcgcgttttttagttctgcggttggtggggtttttgaaatctgcgtttggagctaaccgaaaatctctggactactttttctcacataggtcaacatctttccaagggagattgctgaaacacaatcttgattctgaagtcgtggatgctcttaaagatctaagagacaaattatcagaaaacgagacaaagagatgacagcaaggcttggtctctccatgtaacttctgtcctaagtaagctaatctgacttataaaaaacagaggctgcagaggaaactagagagatagagagagagctcaaaggctctgttaatgttgtatttgtgtctgaattctttttgactaatctatagattcgttttctttagtccaaacatttggttatgagatgttccgaattttattcttagcttcatgcataaaaatcaccttaacctatgtttattatgttacaataatgtacatatgtaccttttagttgaataatgaaccaaatcgtttttctcttacattatatttatttatgtatatagtttttggtttatttaattatttttatgaaaaaaattgaaataaatacttcgaagtgggagctaaagaccaatcaagacccatagagaacaagagctttattaaacaaaatctttgacgtgaaagaagcacgatagtttcaaagacctataaaagaacaagagcttgacaaaaccaaatttctagaagaaataagctcagttaacaacaaaattatgacaaaaagaaaatacattaaattgataaaaaataagtaaaacataagcaaaacatatgaaaaaataaaaatgctaagaaaacaaaaattgtagataaagattagatatttcaaaaacggtggacatcggctgatgcaatgaggttcatatgatagaaacaatgtctgaactactctgaggcctgagctaagagtttttcgcaatcgcaggttgtttgactgttacactaagcggcggaaggagattggtccgccattctcgtcagccattatctcttctctgttaatctctgtgtttccgatttccgatttccgatttatctgtgattttaattatgtttgtcggtttgtgctttaatatgggattcaatgtccgaaccactctgaaacctgagctaagagttttttccagtcgcaggtagttacactccatgtcattagtttatggcaaatgtgactatgatgtatcaaactacattttggtttatatgatttagatctaaaagacaacaaattatcaaaaaactaaatgaagagatgaaaaaaatccagagacgcagttggataatactacgtcggctgagactctgagagaccagatacggtagctccgaatccatagtagatagtagatatgacggcgacggagaggcaggatatagtagctccgaatctagagtagatggtgaatatgacggcgacggaaagacaggatatgggagctccgaatccagggtagatggtggatatgaaagcgacagagaggctttcattatgttttttatgttaacctatgtttattatgttgtgaatgtgaccttttaattgaataatggacaaaatcgtttggttagtgtaaatcatttttactttttgttttcaaattttaattatatagtattccttctgtatcactttatgtgatgttttagcaaaaaaaaaaaattatttcaattatatatgagagattctgaaaacgatgcgttttaatttaaccgtaatccgtccaattttcatgataatatagacggaaatggatttacattaacagatttaaattaaaagttttttttattaaatatataattaagggggttatcaaacgattcattctgtaattgagggattttattactaaaaaccctttaatccattgcaaattctataattttaccaacaatatttaaaatatgatctggttgaactgatacaactgccatcagaaagaaattttggctattggttgtttcactagtttgacgccttttatttttttgaatatgttctttcatttttattcatgtacaaactaaattttaaaacacgtagatagattataattttaagacaaaaaaacaaaagaagaacaaaaaataaaccaaacagaataaggaaatctatatatataatgggagggtttctctccatctaaagtgtccacatcagcattcatgtcatcataatttattttttgtgggctccacatattttatttattaaaacaaaaacattaaaactaaactaattcacacattaaataaaaataataattgacaaaaattacatgaaatattatgaaaaacgaaaaaaataaatatacaacttaaaatatgaaatttttgaatagatattgaatatatataaattagatcattatattttaacatataatgactaaatattttaaaatagttagagatacgaaaaaaaaaaacttatcatatattttaatggtacaaaatttattttttaagagttgccattctttagtagagaaaaggaaataagggttaaaaataccaaatttaaagatttttacttaaaatagaaatcaattcatttctaaaaaatagacatttaaaatttgagtaccgattaaaaaataagaataatttagaacatattattctttataattataatatataagtagtcaaattaataaattttctatattataaatgttttctaaataaaaaaagtgaatacctaaagaagaaaaactaaatattaatcagtgtttttaggaaattcacatagattgaaacaaactaagggtgatttgaaataaaactatcctaaacatcacaaataaaaataaaataatcttatcgaataataaaactgtgtaataataatatttgagaatgttatttggaaatctatatatagtaatggtagattgaagagtttttcattagaaataaaaatgattttgttttgtttttctaaataaatgtattttaaaattagaataatttttatgagttcgtaagtgtcacattttataaaaatcaacataaagaatactatctaaaatcataatatatgttaaattatatatatagaaagagatttttgtattttccaaatggtcaagataaagtgcaaaatttcacgttgaaattctatgtttgtgaataggaatgagtccatatatgagatttgttttctataaagcaattttagatgcaccataacatggtaaaaaaatatcttataacaaacatctcctcagatttcttttctgatgttcactttaataaaaagatcatgaaacttataaaaaaaattgagtattgaatgatatgaaggagaaaatagaaacgatctaaggagaaaagagaatagatgtcgggagacgacgagtgaatcataaaagaaaacgagaaaaattgtagtaaaaaatgtgagaaactttttactactttggaaagataatgcatatgaattaaagtaaaatcttttaaaattcaattgattatatttatagttttatactcaaagaataaaagtttacaattaaattccgcgcaacgcgcgggtacaccctctagttaatttaaataggagtgtttactctttatgccaaattattgtctatgacaaaaggcattaccaaataaaagaattatatgacaaaaaaaaaaaacaatttgggccaggtccagatagtaaggatccaatgggtttattattggggttgatataatgttaaggagtaatacgttatcgttcagcaataaaaaagagtcagcttgggcttaagttctattagccttaccgggttatcggatcaaaccgctccatactttcaaattgaaagtttcaattccacgctgacaaaattcaattcaagcaaattaccgtcgccgccttctcgaattcgttctaccgccggttacttgtcgccgccggttactatttgatgtaggaaatgagcatcaaatgagaaggctacgtggaggacaaagattggtcgaagcgggtgagacacgtggcagaataacattggtcggagctggagaaagttgttatgaagactctttaaaacgcagtctctggactggcaaaaaaaaaaaaaacgcagtctctgcttcttttcattattatgcaaaatctgagattgtaatcttcttcttcatttaattctctgttgttcctgagaattctatgtaattctcaagctcttcctcatcgttttgctggatctctctttgagactcttgcagatgagaagtggtgttgcgttacttgcgaacgttgtatccatttatccttctttgtttatttgaaatccatttgatcttcctcacccgatttacgttatcactattactcgtttattcgtcgtctttcgatagcttaatcgttcctgtttactttcccagaattttctcgaattgattttgatggtgttgctcggaagaactaagttatgatgaaactctttgaatgaaactcaagcatttgtggaaaagaactttgctactacagtctttgaagatttttaggaagcaacatgattctttaaagatgaatctatggctataattcaagctgaacttggatgcctacaaggtgttcgacagaatgctggtgagaggccatagattacaacaaaggaggaggctaatttggtttgctaaatcttggatgttcatatacagatataggaagcaacctcacgtctggttacaaactgcgcataaactgattgttggaagcaatatcaagtacacacatccatgttcacaagtgctacagtttgatggatgaagaagcagaaacgaaaaaccatttgcagggtacagtcaatcggccttttaccgtctttatattgttttcgatatccttattactttataaactcaaaaaggtttctccttttggccagtgttgatgttattttctcaggagaaacttgcgctgacgcttggattgaaaaggaggcaaggaaaagatctcttgaccccaaaggcagttcaaatatactggttttctagaatcatctctgatgtttcttagtttctgataagatgcctgatattgataggtggttgcattgagagaag

SEQ ID NO: 5303 - DNA, 5851 bp, Arabidopsis lyrata
  Intron number 6 from transcript 494222 (locus 494222) deri ved from phytozome v7.0 (chr-ID scaffold_8; pos 142791 to 148641)
ttgttttatttttttcccaatttatttttatacatctacatatacatttttacagtatttttttgctttaattcttttggatccgggtttgacccggttttagtctattcggatcttggataagcaattttaaggatgttgtcttaatttcaaactaataaatgaagcctttattaatttcaaactgaaaaaatttatggcaatattaaaacgaaattaattcctttattaattcatatttgttaatttccttaacttctccccacacctaattattaattttctttaagagaatatgcgtataacaaaacaaataagttacctattttaatggtaaataatcttatttgttatatatatatgatatctctaaactaaccatatttgttatttaccttacttacttctaaccataattatctaactacttatttttatatagaaagaatatgtgattaaaataaatattttgtaaatattaatttggggacaaattcttacgaaaataatttgttttgttataaaatttaatgtttgttatttttctaaattatttttgaaactaaattacataaatactaataataatttgtctacaccataaaatgaaaatagttatttattttaaatttttatataatattacgtaatttgttttagttatattttctgatataggtgaacaaattattttcgtatttatgaaaattataaaatctaaattagtttaaaatttgaaataactataatcctaaattttaatctttatgggtaggtttttttttgtgaccaaaaatattcaattggatctttctttaaattttggcaatatccaaaacgaaattaatttataaactctaaaaatatctatatttttaactatttctatatctaaactctttatttatgacatatattcttcacgatttttacagaaaaagatataaaatatgatgagttaatgctaattaacaaatttgagctaattttttacaatctctcgacctaatttaaacagaattatataattctcatttcacttttatttgatgttatatttatattattttaatttattataaaataaatgtagttaataaattgggtatttttgatagaaataatgataatcggatatatgagtatttttgacagcaaaaataagaaaccttaccgaacttgtatggtaacttctatgtaaattattcaatttaaaatcgaatattaaatcaacaaatacaattccgaagtatatggtaacttcttcgttatttagtgaaaaaatttcgctaagatatatagaatcttctaattatcagattaaccatcaaatattctctacgatcttgaactatggaaagtcataaagttggtttactgcaaaattataaaaatcgcgaaagcgcaaatcaaatatgttaagatctttaacgatagaaactgaaattaatttcgtttagatattctgatgcgattaactatagcatatctacgctaattacttatagaatattttgcagaatatgcttttcttaaaaccctaataaagcaacctaattctaaacattataaatataggctctgctattcggcaaatcatttttcattcatccacacaaacttctctcagcatctatgcttcagtttttgagcaatctaatttttatttttcattgtgtattctctattttctattaatgatgttatgtttctacgattttaattctttttttttttgttttgatatctcagcatctatgcttcagtttttgagcaatctaatttttattttcattgtgtattctctattttctattaatgatgtaatgtttctacgattttaattcttttttttgttttgatatctgtttaatacaaacgcgtgcggcgtgtctaagtatatgttttcctaaaaacatagtattttccttacccctaaaacattcattaccaagatttcaaaattccattttaccgttaaatcataattaatatgacagatttttattgtaaacaatttatcattttttcatacactacacaattttctctactaaaaatatacaatattaaaataaatgtcacaacatgtaaaattaatatttccagcggtataccgcgggctctcaacctgaaaaagaaaaattaattttattatttagtaaaattataggcccgcggtgtaccgcgggttaatttctagtctatatatacatttttggtgaagatttgacctcaaaaatccttttacaatttcaatattgtacatttagtccctacaaataaaatctgaaaaaaatatatgtcttaatcaaatttacaaatcaataaataaactaactaaacattcctaattttttttgtttacgagatatatttaatatatggaaatcaaatatttaattttaaatactattaaacataatctcgagaatatctagcaaatgaaaactactaaaacaataaaatcgaaatcaaatctaaattagcattatataaatcgaaattaaatgattgatttagtaaatataaaaatcgtatatatttacataacaaacatatatttacaaagtaaatagtttcctattttaatgctacagattttattgtatttaacatttgtttcctaaaaaaattgaactatattaatttgatatcaatctcaactaaacgaattggaaatatcacataactaaacgattttatccttatttttgatcaagcatctatgtagcatattcttttttttgttacgatttaaagattttcaaagatatcaaattcttgctcatcaagattttgaatattctctaacctaaaaccttactaactatcaaaacactataaatactcgctcatttctccaatctctaaacacacaaaaatctactttttctccataggtaagtgatttgattgtggaaccttaatttgtcttagcttagacggatcaaattttttgatattagtatgtttctttaaatcgccgttgttgttagcataatattttcgaagtcaagcccgtgtgctctaaacaagacattcgaggtttataaagaaccagcaattgtcgatttttttggggtttctatatattcaagatgttaaatttctcatttgggctgctttgtatgttgttttttttgtttcaggttaaaagtacagttccgtttagtgagcctttcacggtagatcctgagaatcctccaccggagcaagactacaatgagtatttcaagaatctgaaagatggaatcaccggtaaagaagcttttgaacagagcactgtgcagtttaaaccaggttttatctacttttgtaactttgtgtttgcagtacttcatgtatcaacaagcaacaacaagtattgagatgaataaagtttttctcttctttctctttttttttttctgtgatggtatacaggaaattgaaggctgctaaaggtgctttcgataccagtcttgacaatggtattgattttttcgataccgctgaagtttatggttccaaggtaagaatgacaaatctgactactcttccttcgtatagtggtttgttttgaaactaattggaagcctcacattatcttcttttatagttttctctgggtgttataagctctgaaactcttttaggaaggtaccttttcactgtattttggaaacatgtatattagtgtgctttgatcctcatttcctcatacatgttcttcttgactgtctttggtgagattttaaacaggttcatccgtgagagaaaagagagattttacggagctgagatttcagttgcaacaaagtttgctgcattgccatggcgattgggtcgtgaaagtgttatcactgcccttaaagattccctttccctgctcgagctttcatatgtagatctctatcaactccattggtatgtaccctaattcatcttggagtaagcactctcttatatgattgtaagagtttactccagttcgtggaagctacaatgtcatattggttcaattgtggattggacatctttacttctaattatctctgttccttgcaatgacaaaatctaatcatttttttttcttttgctttgcagatttttacaagctacttgaggaagattaacttaaacagagtcttacaatcgacattatgctttcctctgaattccctgtaagttttttggcatgcaatgaaatttatgttggagtggcaggtctatatgaatttttttgataggggcacactgttttcagtgttttccttataaccaaactttaattgttctgtttgtgtcaggttgtatgattgaatggaattttctcaaacttgaggtgtgcgtttggattttcggtaaccacaaaaattaaaatcacttcttcatttagttcaagagagttatattagttaggttcaagagaaacatacatgacggcggcgtaagtgatcgtaaccctaatctaagaagtaaccaccgtggattgttcacacacgtttcatttgccgagagagagagatttgtgtttatgatatttcaaaactattggactgattcggagaggcgctgatttgttggagtggaaggtgaaatcaagattaagcgtgggtttggtttttgtttcatcttttatttgatttcttctagagagatatgtaatatctatgtaaaaaccgatgaattaattaatttgatacgtatttgattatgtttttataaggaaactaggatatgatccgcggtacaccgcgggttcatgttttttttaatataaaaaaataagtttatacttaaaaattgtattatttactaaatttgtattttgcatagtatgcaaatttttaaatttgtttcgttttgtaaaataatataggatatttagaaggttcgtgtatttttatttgtttgttgtatatacaaattaattatttttgtttggaatttgatcacatatacgttattacatgaaatttagctcataatatttttgtttgttttatgtggtatagatatattattgtttgtcgtatttacattgctattatgtgagatattctcatattatactccctccgtttcataatataagtctttttggagaaaaaattttgtttcataatataagtcgtttttaagtttatatgcactttatatattactttaatattttataattatttatattatgcagtatcttttatgattggctgaactttttaaaagtaaatcttcttaatctgcgtgcttaaaactaaaacgacttatattatgaaacggagggagtaaaattgttcttttcatttatacagcaatataaatacacttatttgtatgaaatatgaaacaacaaataaatacaataaatcttaaaagatataattcaaacagaattttgcacaaagtattttatattctttacacaaaaaaatataagatatcatatttcaatatttataacaataaacaaaatttacaaaccaacacaagtatttgcacatatatataaaatacttacacacttttaaaactatttaaatataaaacaaacaccataagatgatacataatttacacacgcggtacattgttgcttacttaattgtcatctcatttttctgtagaattagaattagtcaaacatacaacatccttattatacaataaacactatataaaattctatatatacattctaattacacatgtaaataggttatatacatatatttgttatatgtaacaaaaattaaaaaaaaatccaaacaaaagtatataatttttgaaataaaaatatcgtcccgcggtgtaccgcaggtcaatccctagttgtgtgatacaaagtatattgcttcttctttac

SEQ ID NO: 5304 - DNA, 6214 bp, Arabidopsis lyrata
  Intron number 10 from transcript 487406 (locus 487406) der ived from phytozome v7.0 (chr-ID scaffold_6; pos 2227765 t o 2233978)
agaagaagaggaagactaaaggaaaaagagcttgacatgtccataaaatacaaacaattttcattgataatggttagtttagttgggaggcttttggaattttagaaaagttagggactctaaaacaaactctaaattgtttgtgaggatttggctaataaccctctttcacgttgattgaaaccggcttaaactcactaaacccaaatatttcacctgttgtttacataatctacgaagagtcgacaagacaatactggttgatccatgatctaaataaccttggttatggttctcccaaactcatacagcccatggagctgagcttggggagaaggaactttgggtggccgtatgaggtagttgaggatgtgaaaaggtaagtagaacctaatcctgactccggaaaaagctcttcttcttcgaggtacgtttgatttttactctttttgctgtctaaatttcccgttgggatgttgacaaaccatggaaactgccagcaattttctgtccagaatttgctgattccgtaagggaaatatgtttacatggttcggtttacatggttttgaaattataattgatttctgttcggtttaaattggttttgagaagaaaacaaaaaaacattaataagtcacgcgatggaaattttggagagaagtgcgtcgatcgaaataggcatgattccgaaaggtaaacccctttaggaattgctctcactcgcgcaacgcgcactttgtgcgagtgggtgtgaaatagagccttctgattggcttaaaaactctaaaaaaagtgaaatagtatacatgttgctcctcctcttttatatattttgcttcttcttctctgttttgaggcaaaaacacgaagagctcacaataagattcatgctttcagatttagactggtgagtgctaaaatctatataaaccttaatcattgctaatcttctttgttcttatcgaatctacagttctggtatgatttttattcgtcctgttttgttttgactttgttgccgagaaatttaactaaaactagtaaagctaagctcgtttgtcatgtttaatttggagcaatgaatcgtttttcttcctctattggatatagattttttttataatttggaaccacggaagtagatatcttcaggaatcttcttggcttgattctgagtttttggaatttcaaagtttaatcatttcctacacttcttgcaaatagaatgttcaaagattactgtgatttggatccttttatacacttgttagtttgtgattttatctgaaattccacactcttagttaactttactaaaccatttgattgccaaagtatatatatgcttcatagtatgatctaatgataatatgaatgtctatttgtggcataaaattctatctcaggaaaagaaaattcagaagcttaacgagctggtccgagatccaaggaggcagttattgcaatgcagaaatgaaaattaggttgagttgacggagctagaaactgagatgatcagctattagtaacaggtgtttagctccatattacaggtacattcttttcccctagtacatctttctgtgtagtgatgcatgatttgaaagcattcattgacttaagagttactattgatggatacctcgaagctcgaaagaagaaaatggaagaagctcttagcagctttgatttcaaagaagttgcagcttcgctttctgatcccatcacaccaacattgactcaacaccagtctagtgggttttcaccacatgatttgttggctgaattgtgtgagagaattaaaaccttacccaaagctgaagtcaccaatatattcttcagatctattgccattgccttgctgagaggtaacataaggaaatataaattggagagaactagtgatactggtaaagcaactatcaaaagagttgctgcaactctagggattgaaatcagagacaagtgtcacaaaaagcttgttctaacaaacaaaactgtgactttctcaagaatgatagctcttatccctcacttggcaagccagctaattatctctaaggagagcctttttgtcaaaaagtttgctcctttcattaatgccattagtttcctgctcaaactcataagcttcctattgctatgcttcattctggatttgctggtctgattccgagagaaagtgatgatatagaaatgatagacctcatctgcatgtgtcactctgcttctgtggatgagttctctcttttgattactcctcaagaacatagaagttttcatgcaatgtaagagaatcggaaaagatataccgaggctgccctcctctcctatgttatttattgataaaggtttgtacttgcttcattttttcagtcaccggaagttcgaatttggtttctgatgggatctaaacaagtatcaaagtctagaattgctggatttagcaagtagactgctatgtcacagtcccagttcgttttcgtccactcaggtgaatggcgattccgctgtgtaggattcaaacactttgtttaatgttttatctgtggattattgacattggtttattcttgacagtagtccaagggaaatccaacaaggagagaagattgcatggtatgcagatggggaaacaattgtgaggaattagcataatcaatcaatagcttatgcatatggttagttctaacagtttgactagtgttcattggtttctgtaccaatcataaatgttgttatgtggaatagactgaagtttcctgcatcatgaatcaagacctaaactaaactagatgtcaaagtccaatctgccatattgtttcttaaaatttctgtcctttcttacagaccgtgttttcgggcctacgacgactacacgctatatctattatgttgctactcagcatgtcgttcatggtgctacggtggggatcaatggtatggagtaaacaccttttattggtcggtctagttaagacactattcttagaagataaaaagtagttatattatcaaagcttaccccaagctacaataacatgaacagtttgcatgagcattcatttagaaaacgagatctttgagatgccaaactgtatctagtgcttcttctagtcttaagaacaccttgagttatatttcttttgccaatttgattttaatgaagtgagtgttaatccaaccacagggaccattttcgcatatggagtgaactcacactatgcatgtaagattcactaatcatgatatttcttacttttcatcttattataataaaacgtattaggttactaccttgtacaatgtacttcaatgtgttatcccagacatgcttctatgtcagagagtcatttatctcgtccttcgttcctggctagtcttgtagtagccataacgatttggctattctctttctagctagtgttgctgttgaccttataaagccttttctttgactctagttagcatatagctgcattctttaggttagtgctctgctttacacacttttcaacctagtagaatttttctcttatggacacccatgatccgtacatggtcctgccctaatgccggatgatttcacacacttcatttcagggaccatgtttacgtttgaagatgtgcatgaaatagaacaattttatctcatgaagacagttttgtttggtttaaatgtcagagggaccaaagatctccaggtataataccatcagccgtgaaagatgctttccgcattatacaagaggtacttcttaggttgttgattagtcgaattccctggcctaagtgctagctattctacctgcttttcgtctctcctttcactatatatcctgttcaccagtggtgcaaatgatagtcagattctgcttttgatatatcttaaaatccataaggttcattttacttgaggttgtcaatgatttattgaacccagcaggacaaaatttgaggaatagagaagatgagcaggtacttgtttcagtatttgatcctcttattaactttctgttggtgacatgcatagtgcttatttcactgtcttatttgttactatagtgcttatcatagaatcctaaaaccttgcacaccatatttgtttaattagaggtgacatcttttctcgtactttcattttcttataaatgaaattctctgggcaatgtgaaaagtggcctgattatcaatatttgaatgttctaggttacatttcttattcaagtacactagaattgatcctgttgagtgttgactacttgtatcgctttgccctctacaattctgcaatgaatctctcattattgccgattgtagggaaattttattgaagggattgaagaagaagttggtctatcccttgctcatgcgctttctcttatagcagctggcacttccatgtaaatttcggttcggtttacaatggttttaaaattacaattgattttcggttcggtttatattggtttaaaaacgaaaaaaaaaaaagaaaagagtcacgcgatggaaattttggagagaagtgcgtcgatcgaaataggcatgattccgaaaggtaaacccctttaggaattgctctcactcgcgcaacgcgcactttgtgcgagtgggtgtgaaatagagccttctgattggcttaaaaactctaaaaaaagtgaaatagtatacatgttgctacctcctcttttatgttcttatatatttttcttccttctctctcggtctgaggcaaaaactagattcatgctttcagattttgactggtgagtgctaaaatctgtataaaccttgattattgcttatcgtctttttttttcttatcgaatctatacttctggtctgaattatttggtgtttttttgtcctgttctgattttgtttttggttgattttgtattgtcaaaggaaagtttctgatatttgtttacaggtgtggttccacatagtcgacttgttgaagacaaagaaaatgacaaatacaagtatcctggtgcctggtggtgtactcagtttatacacggagctgatcagtacttggatcagatctctcaggttagtatgtttttaagactcaatgttaaaaatatttgcatctgtattcacgtgaatctgatgttgctgtaattttatatgtacattagatgattcctgatatcagctttggtaatcatacacgacttgttcttgacattggatggggtgtggcaagttttggtgcctacttaatgtcttggctatctccatagctccaaaacatgttcatcagaaccagatacagtttgctcttgagcttggtgttcctgtaatggtggccaagccaagcttttgatttggtactttgttcaagatgtctaatcaactggactcgtgatggtatgcaaaactcttatgccaccgttgtttacttattacaaagttacagacataaatcttattccaatttggttgcacaaacttgttacccattccttccaccatgtttagttattattgctcttttgatttatacacaaagttatcaatctgtgcccccctagagctaagactgtgctctgctagctgatgtgtcatttaatgtcaaactttcaagtaataatgtgaaactgaacatcaagtacttctaagcttttactgacagattctcctctattgtcattgtttttcatttgaagatgggatcctgctccttgacgttaataggatgcttcatgccggagggtattttgtttgggcagcacacgcacaacctgtatattttcatgaaaaggccttggaagaacagtgggaaggtatcatccatgctgcttactatctcatttctgcgttcaggaagtgtcacttttgttatacagtacaagcattccaaccaatgcacttttggctgaaaattctcaaatttctagggaggaagctctaaaagatactatctacacgacactgctgaattaatatatttccatattcttggttcagtttgcctatcacaaggcatttacagcaagtttcttttggtctgcaaggatatagtctcttaattgagagcaagtttcttttggtctgcaaggatatagtctcttaattgagatcatgcttgtatgtgacttagtaagatggatctttttccgtttttgagagatgctaaaccttaccactagctgtgctgggttattataatgtttgttggttggtggccttgttcaggtgaaac

SEQ ID NO: 5305 - DNA, 1383 bp, Arabidopsis lyrata
  Intron number 1 from transcript 482381 (locus 482381) deri ved from phytozome v7.0 (chr-ID scaffold_4; pos 16299887 t o 16301269)
cctccttcgcctccgtcaccggcttcaccttccttgtcagtccttttatatcatccctctccctctctctattctgtctagctaatcattagttttctttcctgataatttattcttttacaacaaagtttttatgagatccgagaattattaggtatagtatatatagtatctaataattcatttctctctactaaaaatatttaaaaatatcgattgtcgttaatgctgcctagacaccaccgattactttgactattttcgtatttaattaataaaaagttaaaatattatttaatcagtcgagtattcttaaaaaaagctgctaattgctgcttaaatgcaagatttttgccgtcaaaagagaagggtacatttcgggtgttatcaatgcaaaaattaattcacagaaatcttagaaacctaatacttaaatctgcgtaagctagtatgataatatgctggtttaaactttacatgcagtttaaggccctgaatgtttactactagtttttaagtggtttttggtttttagattttggtttttggattttttttttttttttttgtcatccgaaattaattaaagctcaaaaaatttaaaaaaccagaatccaaaaactcaaaaaaaaacttttgagcttttgagtttttggattctggtttttaaaattttggtttttgttttttttgttataaatataaaaattaattaaaaatatcaaaaaattaaaaaaagaaacatgattacgttgaaaactaaaattttccccaaaatcctcaaaattgtggtttttaatttctctttcaaacttggaaaaaccacttaaaaactagttttcctaaattttagggaatctaatttttttaaatcttgaaaggtgaaaaaataaattttcccataaacaaaaatcaaaaaccacttaaaaactagtaaccattcaaggctctgaatctgaaacttgattgggtggttattttctccgtcttaaattaacatatgtcgaatgagacataaaataaaaataactgctgatatataattaatattcagctacgatgtacctatcaagccatcttgtctgaatttccaagttgcatatattctatgctactccattaggtacgagaacaaagacattttgtcatttttaggagaaatgcgaaaacaccaaaaaaaaaaaaacaagaaaaggtgtttgtatataaatatattttttttcatcttttttttttgctacccccacatgtctacattgcatggtaaatgatatatgcacagtccaaatttacaatcgaacgatgtgaactgaaggattacgttgaacacttacttgtaaaccaagaaatctaatcgtaagaaagctattcacctttgaacag

SEQ ID NO: 5306 - DNA, 7484 bp, Arabidopsis lyrata
  Intron number 1 from transcript 333104 (locus 333104) deri ved from phytozome v7.0 (chr-ID scaffold_34; pos 75102 to 82585)
cttacagctagtcttaaactcagtataatttggggggaaagaaaacattaacaaatgactcagttttgttataatattttcacaaattttgagagataaaacaaaattttatttcacaatttttaaaaaaccgatattatatattaacaaatatttatatttactatgaaataaactcaaataatgataaatttaaagtaattatcgttatggccttcgtttagagaaagtttcggaaatatctaaacaaaagattgtacatattaatttcgaaatattttgtgttttttttcttctcaactggatcttccttaaacaaatccataatatattgcacacagttttcgaaataatgtgaactaattatatattttgcattcaaaacaaattatgcagcaatagcatatcccttttatagatgtatctcaaattttaattttagtcccaaaaatcgaattaattatgattaaacaatgaaaagaaaaatatgcaaaatttagctagaacattaataaatttgtttaaatatatttgtaattttaacagtatacatattaatccgcaaaactcacaatatatattataattttgtatgatatttaaaagtaagcaaaaaagattttggaatatgattttaatggaataaaatggaaatagaaattacgagacgagatgggaggggaacatatattaaaaatcaaactaaatacccaactggcatgagttcgggttatgagcactatataaaataaatttgtttacacatgtaaccatgtacatacattttcaattacacatactctatttatgacagatatgggaccataatatttttattttacgtatacgtgacagattatgggacaaagaatttatgacagataccggacgagatattttcatgttccaaaatagttacgtctagctaatatacatgaaataacccaaactaaaaccaaattcatatcttatttaacatatgtaatcaaactgttagaactgttttgattagttaagaaaataaaaatgtaacaccacttaacttttgcaactaaattagtccggatcttaaaatataattatgcattaacgcaactgaattttgttcattattctaacttataatatttatactattacgaagttcactaacacaacaaatattttatatttttaaatctctataaaaatttctataaaaatatctctacacgtatgtggatccagatctaatacactaaaatatatatcataaaaagttaaaaacaacaaaataatctatacttaattaaaatttgttcaaaaattttaaaatatgaaactccgcacgtatgtgcgggtcatgcatgctatttctgctactgtttgacaagtttaaacataatgaatctggttattatatcgcttttatttatttttattatgacacttatgaaggaatgttttgtgtttttgtcgtaatgaaattgacatgtctttgcttataaaacatctgcactcacttgctagtagatgattaagcttatatattttgtgactgttactttgattaccctctgatcccaaactcttttttctactgcttgatgaatgtctcatactagtggccgggtaatgttgttttcgttctgaatatatgtgttgcaaaatgtctatatattcgtttttgtctcgtccttgttttcacttctaaacatatgaactaaaacaaatacagagtttgtctatgaaaaatagttttgtttttgtgttgcttgtttgtatattgtacattcttgggctctctcatttatgtatgaatagctaagttacagaaagaaaaaagaaaaaaaaacagggttttgttgtttaagacaaggcttaaatgttaatgttttgtaaccaaccaattaagaaatctccactgaaacaatttgacgatccttttttgtagctactttttattttcttctcaatcgaagaagagtaatctaagtcgcgaggacaacaacaaaaagttgataaattacttttccatgaggcccattattagatccaacaaaatcaccatttctaattttctatacttaagcccactattagaattagcctttcatgtttttttctttttttttttagcctttttatattctgtggatgtttctcaaagagaactctaagcagtcaaatccctaaaaatttcctctgaatttgttctctgcaaagacgaagaagaagtagaagaaatcggtaggttttactaatcaacggtgatttcgtcttgattaatctcgaaaatgttgcgccctaagaagaagagcaagtcgacgacaacggagatgaagaaacagtcgccggaattgactccaaatccatcacttcccgatgatttgctattgacttgcttcgcacgcgtttcaagattgtactacccgactctctccttagtctccaagagttgtcgatccctcgttacttcaccggagctttacaagactcgatctttcttaaaccattcagagacttgtctctatgtctgcttagagttccctcctgaccctaatcaacgatggttcactctctgccggaaacctaatcaaaccctaaccaatatccccaagaagaagaataagaagtcatgtgggtatgttttggtttcagtcccagttcccaattcacctcctgctcactgtgatggtctcgtggcggttggttctaatatctacgccattggcggatcggtcagcaatgagttctcgtctaaggtctcaattttggactgcaggtctcatacgtggcacgaggctccaagcatgcggatggcgagccataattacctagctgctaatgttgttgatggaaagatttatgtaccaggaggcttaaaagactttgattattctaaatggatggaagttttcgatccaaaaattcaaacttgggagtttgtgttgagccctcctactctcatggagagagatttatacaagaggttagtgattgaaggagaaatctacttgcttggggagtcgggtgtggcttacaagcctaaagaagatagatggagatatgaaggaaatttgttattagtatggggagattctcattgcatggtagataatgtactctatcgttattgtgatttaggcgggatcagttggtacgactcagagtcagagataggaccgtggatgaaattgaagggtttggaaggattgcctaagtttgctagatatagtacggttaaattggtggaatatggtggaaagatggcggttttttgggacaagaatttgccctctagtggtaataagagtaggtcgatttggtgtgcggtgatttcccttgaaagatgcaataatagtcaggagatttggggaaaggttgagtcgcttgatgctgtgcttacagttcctagatatcatcattttgtggatgctcttacggctactgtttgatgaatgccgtacgagacagacttgcgagtggtgcatctttagtgttttcatggtactaaatcatttgttggattatagtgttgccgttttttagctgaatgctatatacatcatttgggttgtaacacctttgatggttagcttattttgtgctgcttacgctgacagtctttttccgattttcagttatatacgtcttttgtcttctagaaagctctgaatttgttcaaaggcctgataaatgattttgcagttagagcttatcaaaacttccaatgcacacacatgtataggaaacagaggttctgagtcttacctcaatggtgagatcggttggtgtcagatctcagacgcttctatacccgagcttcgctgtagtaaactttgtcacaagtcacagaaacaaaaatggccgagattgtagaaaggtatattagaacatggaagatccaaagaaactcttgcgctttcgtttgtttatatgcttcactgtgtgcatcccaaatagtttaaagatgatttgaaagcctatgtgaagtcgaaaattatcaaaaccacagggaaagagtttttgtttttagtaacaatggtagcattactactgtgaatgtgtctcctgactcataatcatgtaacactggtcttgaatcagtttctagctacatcagcgatatatgcgctattaagctatggcttttagactcttatcattatgtaggaacatcaagccaagtgccaatactttatgcagatacttcctgaatacaaatattacacaatgatctgagtttcgtagaatatatcaatgaagagaagaaaacgcaccaatcgatggacttcaaagagactttctttggcgccttggtctagaaagaagatggtttcccgagttaaaaacatttatataaccgaatttgtactcaccggaccgatattcataaccaaaccaaaatttatttattccaatttctctacggtttacataaataactaaaccgatataaatggaaaatgtttgccagctacgcgaaagatacaccatcacatagtcacacatgcagactttaaaaatgtctcgttagctacacgaagtattgacattacatacgaacatccctgaactaacataagtcatgttgcaaacaccataaccatctaattccagtgattcagttgccggaatccggcattgaccggcgttgaccgatgttgtggcttacaagccaaaagaagataaatgaataccaattagagaccgtttgaatattgatttagcattattggttccgcattcttattgtgtgatagataacgtacattattgttatcgttcaggtcggttcaaagggtatgactatgatgatttaagagactggattgaattgaagggtcttgaaggattgcctaagattaatagttctagtactgttaaattagcggattgtggtggtaagcttgttgttttgtgggacaagtatgtgcctgcaagtggggataagaagaagatgatttggtgtgcagggatttcacttgaaaggcgcaacagtgaagagatttgggggaaggtcgagtggttcgatgaggttcttacagtccctaagtattataaattcgtgcatgctatttctgctactgtttgacaagtttaaacataatgaatctggttatatggcttttatttatttttagtatgacacttatgaaggaatgttttgtgtttttatcgtaatgcaattgacatgtctttgcttataaacatctgcacatattcagaactaatacaattgatagtctcatgagtttaggatcaaagtaacagtcaaaaaataaacaatgtctatttgttatccggtaatgtcgtttttgttctgaatatgtgtgttgcaaaatgtctatatatattcgactactatggtgaatactttttattagacattgttttcacttatagacatatggactaatttgtagaccgtttaagcatacaattactttgtctatgaaaaatacttttgtttttgttgcttgtttgtctattgtacatccttgggctctctcacttgttatgtatgaatgacaagttccagaaagaaaaaaacaaacatggttttgctgtttaatttaaggctaggcttaaatgttcatgttttgtagccaaccaaatcgccactacaatttgatgatcctctcttcttttagctactttttcttttcatctcaatcgaagaagagttgaagattattttttctaggcccatttgtatacttgaccaactattaaaactagcttttggtctactgtggatgttttccaagcgctcgagaagttaacagtgaagtgaagtcaaatccctaaaatatttcccttgaatttgttctctgcaagtcggagaagaagtctataggtttgataaacgacgatttcttcgcgattaatctcgacaatgtcgcccctaaagaagaagagcatgttgaagcatgaagcttgatcacagacatgaagaaaaggaaatttcagcttaaaagcaaatttagcattttagagaaagggagattacttgaaggaaaaaagaaattattcattagtcacctatatttacacagaaaaaagaaaatcaacttgaagaaaggaaattgacatggtttcctaattcttgtgcataacacttctataaaaggctagctattcccaagactcaaatcatctatcaatacagagagcaaacacgttttactgttcatcagagcttttggttaaagtttagactttagagatgttctaaacagtttttggtttttttatttactctttattagaaaacttccgtgtcggactaaagggtgttgttttagtgccgagtaattccgttaagcttgtgacgcttaaggtgattttaatatagaagatttgtttccatattttcagaaatttcagagcaggtcgccgacaacggagatgaagaaacggtcaccggaattgactccaaatccatcacttcccgatgatttgctattgacttgcttcgcactagtatcaagattgtattatccgactctctccttagtctccaagagttgtcgatccctcgttacttcgccggagctttacaagactcgatctttcttaaaccattcagagacttgtctctatgtgtgcttaaagatccctcctgaccctaacccacgttggttcactctctgccagaaacctaatcggagcctaaccaatatcaccaagaagaagaagaagaagaagaagaagtcaagtgggtagtgggtatgttttggttccagtcccagttcaccattattcacctattgcgtgtctcgtggtggttggttctactatctataacattggtggatccattgagcatgcaccttcgtctagggtctcaattttggactgcaggtctcatacgtggcacgaggctccaagcatgctgatggagcggagatacccagttgctagtgttgttgatggaaagatatatgtagtaggaggcttgaaagactttgattcctctaaatggatggaggttttcgattcaaaaactcaaacttgggagtttgtgttgagccctcctactctcgtgaagagatttatattctggaccgcagtgattgaagaagaaatctacatgtttggggagaatggtatggcttacaagcctgaagaagatacatggaaatctgaagtgatgtcagtaggggtagtttgtcattgcgtggtagataacgtactctattattattattattttgacgggatcaattggtacgactcagagataggacactggagagaattgaagggtttggaaggattgcctgagtttgctagatatagtaatgtttatttggtggattatggtggaaagatagcggttttttgggacaaggatttgccttctagtggttgtaagagcagggcgatttggtgtgctgtgatttccctagaaagatgcaataatagtcgggagattcagggaaacattgagtggcttgatgttgtgcttacagttccttactgttatagttttgtga

SEQ ID NO: 5307 - DNA, 6005 bp, Arabidopsis lyrata
  Intron number 5 from transcript 484071 (locus 484071) deri ved from phytozome v7.0 (chr-ID scaffold_5; pos 267221 to 273225 reverse strand)
attaatctgttgttgtttccatctgtataagcaactcaagtatgttttccttgatgatcatttcaatggcatgatcaagattaatatttgagacttttgtatgtgttcatttgaatatcttttttgagttttcgctttcggttttggattctctagttttgttgttgttttatgctttgcaatttgcattttcttttatgacgccgcatgtatgagatatttcagatgagctaacatttttaaattttcatttactttatcacttagtggactgttttatatatggccattttctttggtcttttttatttttttttctgtcgtgaatgattctttgttgtttcgatctgtataagcaattaagtatgttttcttgatggccatttcaatggcatgatcaagaaaaacatttggagaattagagacttttgtatctgttcatttgaattgtttttgagtaattctgtttttagatttttaattttcttcttttgttgacgcacggatgagatatttcagttggaccacaatttactttctaaaatctaaacggagggttttaaaaataacattcattgtgataatatttgtaagtttgtaacctatgccatttgaaaatcagtatacttcttattattattaacatggtaaaatccatttatatgctgaaaacatatttttgaactattgattttaaaaaatatttggttccatatatatcatattcgaatttaaaagaaaaacgacgattctatgttaaatttagacggattcattattattattatttttttttggacgtcaaacaaacattttaataattaattaaccatgcacaaaaggagaggttgccatactcataatttaaatgatgtacacacagaggagccatatatgatgatgatgatgataggtgatgacgatggttcgaaatggatttaggctttgacaacgtggtcgtccatgtcaacaataacgctcttgaggaacttcatggagttgctgggctcgggcgaatcatcggttcgtttctcccaaatcattgtgatcttgcatacgatatcatcgggcgacttttggctgaactgatatatgatatcatacactttaagctgctccatgacgtgaccttctagtcctctgaacgtaatcaccatattctcatcgtctatctctttcctttccttgaacacttcctgtttcccgtctgcacatatatatatacgtacatgtgtgtttcattcatgaagttagcaccatgtatgtgtttctatttatgtatacactacacagtctacacttaaatttcaaggtaaagagattcatgcacacatattttgtagacttcgaaaattagttgattttttggtaaagatttaccatttaccggtaaaaaaacagaattcaactatttaataatattctctctggattctctatctacatgtgacccgtgttaaaaaaatcgctaggtgctaatcggacggtgagggtggacctagcgcctagcaagaaaatgttgactcataaactttatcacaatatgactaggagtatgacgtagatacgatcctatcgtcaatagataatcatcgtaacctgacaatactattaaagtaagtatacatttatgggttatgttaaagtaaatgtatatttaccgcatgtggttccaaatcttgatggcttcatgagagtcccattcgccatcgtggacggtgacgccttggatgtggtggccgatggcatcggggaagaggtggttctcatccctccaccgcttgtagtgtttctccgccgatcctttcaatggaacctccgtcacatatgttcccgatgtcgccatctcttcgtgagtgaaatgtgtctgtgtgcgcttttttactttggttgatgactattttcacgtgtggtcttccttcgtttataaagagtgtgtaacggtttaaacgtaaaatatgtgagccaggttaatatatacttattcgatatctactgctaatatatttagaatgagtcgtattcacgttttccaagttcttatcataaaatgttattttttttttgttataatgataaggataggtttgacaaaatgcatataatgaagcaatgataaggataggtttgacaaaatctatatatataattagagaggtgtctctcctcttaaggtgtccacctcaccattcatgacatgataatttttttttgtaggttccacataacttatttattataacaaaaaacattaaaactaaaatcaattcacacactttttattattatctttcactaaataaaaataataatttacaaaaaataaataaaatattaacaaaaaatattattatttataattatagtttactaattttttctaaattaggttctaaaaaaaacaaatgaatatctgaaaaaaaaatatactggaattttaggaaattaacatagattaaaaaaataataaggtgatttgaaataaaacaaaaacctattataaacatcacaaataaaaatagaacaatctaatcaaataataaaaatatgtaataataatatttgaggatgctatttgaactataataataatggtagatagaagagtttttaattagaaataataagaaatatatttttttttttttaaatatattaatttataataacttcccgaaagggcttggcataaaaagccttacaagtcaatggcccaggtacaaaatagcccaacaagagagatgtcggaaacgaaacagaaagctcggaccctgctgatggacgactgcacggtggccggagcattagatccggtgaacccaagatacccagcttcacggcagcctcgacagatcgaagaacacaacgggaagggtccaaattccaaccacgttctctcaccaccgacgcaccagatccgccacttatctcccgaaaagctagccaccgcgacaaccgctactacggagtcagatcccgacctagcaatccgacccatagatctatccccttccctccacttccagatctctccgattagaccaagcaagaacgcctcgaccggaccggtgaacaccaaacacggcgaatccagagggtggtggctcacccaaacctctgaagacgaactccgcgtgagccaagcaaatccagaggagctgccgttaaccaccgcgtcaaaaccgcgaaacccaccatatcgccaccaacttccgccatagcctccactacaggaaaaacggttgagccgtggggatcctcgaagcacttcacggcgtcctcaatcgcgaaccacgacctcgattcaccacctccgttaaaaccagagcagcggctacatcggtggcaaaatccacaccgccgcagtcggagaagcgtccttactaactcctggaccataaactagaagtctcaatagcaacaattaagatcaagcaaaacgtaaaaacggagatctgaaaaaaaagctttcaagggagagaaaagctcgagaatcgaggcaacgattgtgcaattcgttccaatatattttattttaaaacgtattttaaaattagaattaggagttcgtatgttacatattttaggaaaatcaacattaagaatactatttagcatcaaaatatacgtcaaattatatttgtaaaaaaaaaaaattgtatttttcaaacagtcaagataaattgtaaaagttgacgttgaaatccaatgtttttgaatagaaatgagtctatatctcagatttgtcatcgataaagaacttttacatacatcaaaggataaaagagagaaattgtagtcaaaagtgagaaattttttactactttgaaaagataatacacataaataaaataaaatttattaaaattcaaatgaatctatttataatattatattcaaggattcgcattaattaaacgttttaaagtaaaatcccgcgcaatgcgcgggtatacaatctagtgcatatagtgaagcaatgataaggattagagttgacaaatgcatacatcactgccctcgtcacctatcaatttttttaaaaaaagataaatataaccttaaacaaatcatatgatgtgttccttgaatgccgaaaagtccagtgccggctcagatgggtgggcgggcggtgcgatggccaggggtccaattccgtagtccaataattaaagggtccattttctaaaatattttttaaaaaatattaaaaagttagattataacataaaaataaaatttagaaaggtctataaaattttttatttattgtttttagtattagtaattaatatttttaacaaaaatagcatataaaatttttttacagcaaaaaaacattaaaaaaaatttctaagaatccaattttttttttttgccctagggcccataaaaatgttgagccggcactgaaaaagtccaccagatgaagatacggtatagattgcctgcgaacggtgactttcattctggaaggaaatcactaaggcccctagctgaggacagtcacgacgactcacgattcctatatatggtgcaaactataaagctaagactgatggctcatgtctcatgatttcatttcttgtaagattggtaatgggaacctttgttactttggtatgatagatggacgggaaaacggtctttttcaacctcaactatttgctggcgggcttttccaacccaaactatgactcccagtcgatttcaacccaaacccaaaaataattctaaatcaaaacctaaactaatgtaaatgagccgatttcaacacgacgcaaaacaatgttagttcaaaagttaacagttctcaaggttatttgattttattttcaaagtttgatgaatgatgtagagagagaattacccaaggttgagcaaccgttaactttcgaactaacactgtttcgcgtcgtgttgaaatcggctcatttgcattagttcaggtttcgattttgaattatttttgggtttgggttgaaatcgactaggggtcatagtttggattggaaaaacccgcctgcaagaggttgaaaaaggcttttttcccgatagatggactttgtttggaaagctcattgactttaagggttataacttataacgttccaagtatttacagatttcccattgatttaaaagtaattactttttttattctataccaatgtaaaattatattcaataaaaaacctgagttacaataaatggctgggagttcacgagtgcccacagtgacaatgcataagcctttttctaccatctcacaatggttatgaacttatgatcttccccgagactctagacaactaaagatagaaggatgaagtaggcccccaaaaagactgcttcaacatcgcaattacctggcgccaaatcactcccttcttatcgaaaacttcagacattgaagacacgtgtcacgtgtggacacgtgtggtgaaaagaaattgtaacctagtatggaatgaagaaatgactgttgctatcaaagatcacaatgttactaacactaaaaaaaaagttctgttctggttttagggataacattattgttgttgtttattgaaattgttcagacaatgtttgattgggacaagttcacaggagatgacaaaatgggagatgcaaacattgacattcaaccatacctggaggctttgaaaatggggatggagcttttgaggctacctaatggatgtgctatcaagagggctcaacctctaaggcacaactgtttatcagatgagagtagcattgtttggaacaatggtaattaagattacgcaagacatgatccttagacttaacaatgtcgaatgcggcgagattgagatcatgcttgaatggcatgaaggtgctggttgcagaggtatcacttcctcttccaaaggtggaggctcttcctctacggctctacctaaacttattaatgttctttctttctttcttttgttgtctatgaatctgttgttgtttccatacgtataagcaactcaagt

SEQ ID NO: 5308 - DNA, 37074 bp, Arabidopsis lyrata
  Intron number 23 from transcript 472840 (locus 472840) der ived from phytozome v7.0 (chr-ID scaffold_1; pos 11646740 to 11683813)
ttttatttctctccttaaacattcattgacaatttaatcacatgttgtgaggttagtcgtaaacattagttttggagaaagtaatcgtatccactctagctagcttcttaagacccttccaaccatccaaaccttcaaactaagatacacctccttttgtgggattcagaatcttagaaatgagactaattagacgcaataaaagaattcctaactatatatatagttttttttttttttcaattgttcattattatgttattttaattttgctatctacagcctctgtaaggaagtctttgagactgcctaggccacttcaaaacttacacttataaacttatttgagaaaatattatataaatcttattattttcttacagtatcgttttagcttttaccagaaacaaagtaagtatttcctgcaactagcagagatagccgcttaatgttaagtcgtcgtacttaagttttgtctgatagcctaataatgcaaaacttgtgatgatcactcgttgatcattaatgcaatttcttctgtttcaatttggcaccatacttgttacattaaaaaggggtactcaaaaggtcccggcaagttagatatatctaacattgaacatgggtcccacaaaatcttctgcacagtggtaaatggaaacctagctacgaagtgtctctttggtctcacacgcttctttctcattctcacaaagtcacacaatacatgagctaataaccaaatcatttaaaagacttaacttattgaataagtcatcatcttagaaatctctatctatataaacaatcaaaacccgattgcaagttttataactgtcttagagaaaaaaaaaaaaaaaaaaaaaaaactcacaaaaaggaaatcatattttggtttcttagtgtctctaatggcacggtttgagccatataattataacataggtcttaatcctttctttgcacaaattaaccaaaatccagagctaataaatctggactcaccagcttctactccttcgagtttcatgcttttctccaatggaactttagttgatgccgatcacaataattctcacttctccccaaatttattgcatggtaaagaatttatagttttcttgtgtgggggaaaaactgctatattcatatttatgttcttagacttgatgaagctagaaatcgcaggtggtagtggtacgggaagaaaaggcaataaagaagagagtgggtcaaaaagaagaagaaagaggtcggaagaggaagaagccatgaatgaagaggagactcagaagccaaaagatgttgtccatgtccgagctaagagaggtcaagctactgatagccatagtttggctgaaagggtaattctacaaatacatatatactcaaaagtacaaaaaaactttacttttcttaaattcatattttcttagtacgttgggttctctgtggaatgcataaaaggtacgaagagagaagataaatgaaaggctgaaatgcttacaagaccttgttccaggctgctacaaggtacttgaatctccgcaaaccctaatttttgtttgatattacaagaaaatcaacaaaactctaaaaccaagcaactctggagaaattctacaatataccaatttctggtgctgtttatttatagtttaaaaactttattaaacatttcatttcttaaagataatttttaaagctcacaattcttttaactattatggtctttgtttcggctatgtatctttgaacttgtgaattaaggaaagaaaaaaaaaaagaatcatatgagtgatttaaaaaaaaaaaaatttgtatttcggaacaccaaaatcttttgtggtagcgtcactcacgtaaacgaacagattgttttgagtaatatagaaaacatttattttatccacagtaggtttattctctttaatgatactcaaaacgtgatggcaggcaatgggaatggcagtgatgcttgatgtcatcatagattatgttcgatcactccagaatcaaatcgaggttaggccattttagtcttcaaattaaacatcccattaactttttataataacccagtgataatatatatattaataattatctaaatgtctttctgctttggcctcgtgactacagtttttgtccatgaaactctcagcggcaagtgcgtattacgaccttaattctttggatattgagccaacagatatatttcaggtaattgtcacataaatataaacattttcatggatttatattgataaagattttgataacagggagggaatatgtccactgcagaagagatggaaaggattttaagagaaagcgttggaacacagcctcctaatttcagttcaacattgcccttttgatatataagacaaattttcagagaaattacattctctttttctataattaaactacataaaaataaggacttaccatatgtttatgataaaatgtgtaaccttgtgattatgaagcttatccatatatgtatgtaccttggaaatgagtaaagctatgttacaaagaaactctattttgaagtaacataagatattgatattacaagggaacaagacacaacaataagactattcctttaaacacatactcacaattttgacttgcaacactttttgttatgagtcactgaaggcaaatctgggtcaaagcatcggcgatatgcttcatcggtgggcgtttctcggggctagtactaacgcatgccattgcaattttcaacacggcgatgacctcttcttcaatctctgtgtcattaggcaccaaataaggatccaaaatgtctgccatctctttcttctcatcgatacacatttgtatccacttcactatctccatttccgatttacccacaaaaacaatcggtaatcttcctgttatcatctctagcaagatcaccccgaatgagtatacatcccatttctgagatggcttcactgttgcttttgtggcttcaggagccagataaaatgagctcaagtttgcagatgatccaatcgatgaggcggtcttgtttgatggtcggtcaactgtggttgattccaatgttccagcaatgctagagaggtgcatgagtccgaaatccgagatatgaggctccatatcctgtcccagcagtatattgcttagtttcagagatccatgaacatactttttggggctaaactcgtgaagatacaccaaccctcttgagatacccctcattatctttaaccgtactccccaagacaacggcttgaatgacaccattgcaggatttcctaacaatagacaaaataaaaaaattgagttttcaagacagagatgccatatgtgagtagtattatcataaaggtttcatagtttaccgtggagtgcattggcaagacttccattaggaatgtagtcgtagatgagaagcttctcttcaactgaccaataataagctttaagactaacaatattcggatgccttagcttcccaatcgcttcgacttctgtctgaaactccttgcatctttgggatcctccttctcccaatctcctaaccgcgaccgtttgaccatcttcaaggacaactttatacacaatcccgttcccgccttttccaagaacgaaagcagaagccttaagcagctcatctaaatccaaaaccatatgtttatccaacagaacaagatcctgttgtggctcaagattttccgaagaaggggactctgatccatctcttctgaaacagaaagaacctttcttttctttcccttctttctccaacacatggccttcctcatccacactattacgacgcgcacatatcttcaagtagcaacaagagaagagaaatcccacaatgcagattccaatgaaatcacagaccacaattgcaacaatagcagttttacttaaaccttctcctctcttcgaccctcctccaccgtgctcgttgttttcaggtacaaaagggtgagatgttggagaatctccggagtttgccaaacaaggatccttcaatggagggccacacagcctcggattccccaagaatgcagttggtcctctgttcaccaaagcaccggtttgtgggattggtccactcaagttgttgtaagctagattcacatacactttctcaggtaaattccccaagctagctggaatcgagccgctaaacgaattatgagacaaatcaagagttccttgcaatctagtcaaattccccaaatcatcaggaacaagaccattaagattgttagaagaaagatcaagcttctgcaaagaagccaaagcctgaccaaatccactaggaacagaaccagtgagattattctggctcaaatcaaagctcctaagccttttacacttcagaaccgattctggaatcgacccattgagagaattacgagaaaaatccaaaatttgcagaaacttcaagtcaccaatctcatttggaatagacccagataagaaattcccataaagaaccaaactttgaagcccttgagccttaaaaagctcaacaggcaagttcccactaagctcattgcttctcaaattcaaatgacggagattagtaagtaaaccgagagaagaaggaagataacctacaagtttcttctttgggatgctaagagagacaacaaccttgtgatcatcacaagtgactccattccaagaacaagggttttgattctctgagttccagttacttaaagaaccatctggatctcttgaaatagacttcttgagagttaaaagagcaaacccttcgtcgtttagagcattcaattcgccattgaagttccagataagaagaaacaagaataaaagagatcccaccgacatttcggagggatcagaacaagaaagtagcaggattcggacaagaatttactttctggtaagggaaaaatcaagaatgagaacaggttgcggagattgatgagagaattggagagagaagtggagagagtgtgaaagcatgaaaaggagagtgagagacgttgatagaagattcggccttgctaagttggacctttggacattggtatctatctatctattaataatatcccaattggtttttgtgtttttgagatcgacaattttttttgttttatttatataatagtaagaaatatgttttcatttattggtatagtaaactaagatcaatgttgaatactttaagaatgatggggaaatacaaaacttgagaataatgatgatgacaaatgtgcaaaagataagctcttgcggagaaattcatgcactttctttctcataacgaaagtgcacttacttatgccaatttttatatacttttagctccaatattattacaattttctaaaagaaagcctttaaagtatatacataataaaatactctctctcttttataatataaatcttttagataaaagtttttgtttcacaatataagtcgttttcgagttttcaagtacgtaagttgttttattttttattttcatattcacaaataggaatgaaccaatgaatcaaactaagccttagcaaataacccattaattacttgtaaatttatttaatatgattataattaccaaaaagttaagtaattattaaatatgattatcaactaatagaaaattttaagtgattgcatacaagatatatatggtgagctaacggttcactcgaattaataatagttgcagtagacaagagtaagctggagtagaaaaagtatctagttaattaaagttaaacccctacttcttactttattttgtaatgaaaataatagagtgattaatacggctccatgagtattccacattctctgtataactataaagggaacaactttatgaactatgatgtccctctttgtatgttttccagccgttaacacacacatttgtatcatcaattaatcaatttatagaaaaatgtgaatcattatgtctaattgtctatagttgtctagctactccgaacgtatatcagtactatttaataaatttaaaaattagttgatattcaatgtatgttgaatgtgtagatggaaatgtaatttgtgaaacttaattcaagctgattatagatatgctgataaaaaaaaaatcatatatagttatggtgatatataaagttccatatataaatgatatgaagttatagatgctgattcatagtagtgagattttttagaggtttagttttactagcagccattagaaacttatttcaaataattaaaatctcctataaaataaagcacatgaatgagaccaaaaaagtaattgcaggtccgataggatagaagaacagtgttgctaaaagagatatcatacattgaacagacatgcctggacctatagtttctgctttgctttcttagcatatcaatcatccataccaccaacactatatataattagtaaaaagtgaatgttctcagtctttataacaaaacaatactactacaagaacgtaaaaagtttacaatatcattttgattattagttttttaattagtaaaagtactttatagtgtggcccagtcaaagagatggatgcatggagcagcaaaatatgagtagactagagaatgacaatcatagctaggctccaactttggcacgtcggaaataggagcgtgtgttcgagaagttagccgttgccgtggagcactggagcgcatagatcatctaatatcattaccaaactacggaatccacatgtattacgcaataacatggtctcgctctttgaggagaattgtttttttttcttttctattccagttttctttaagattttcgaaacatttttagagatgtttattatctaaatagtgtaacgctattacaaccgattgtttcgatgatatcacactcatgtttagaaactattttatatactttttaatataaaactttgaatgtgaaatactaaattaagattaataaaataaagtgacttactgactcttacagcatcagcattggtaaaaattgtatgagtctctcaaatataatattttaatatttttaaatgttattttaaatttaaaattataacgaaaaaataaaaccaatcaaatctttatgtgtaaaaggagtctatagaaaagttcttaacgaaaaactaccactatggatgctcttatatgatgcttcttcaatcgtgatccaaaagttattgaaatcaattccacttatcaatatatacgggtgataaatttctcaatgtaaagaatgactttttaaaattttaaactatgaattttcatttatcaaaaacaaactagctcatacttaaattataaacatgtcacataaaattggtgtaacctaatgttgtgtaacttcctgaagaaactacgaatttaatattgaggaatgaattacccatacatatagacaaattaaataaggttgatttcaaaaaaagaagtactagagaagatcttggaaaatcagaatccaacaaatatgttgacgaagatcattccgcacgataaataaagttgtgtgcaagttcaatcagacttttttactgaaagatcaataagccgtctcattattgcatattatcctctgagtgagaatttgttaagttgtagaattaaatttttcggatatatatgctgtttaatgcgacaactaaattagatactatagatctctttgtgtgtttatttctttttatgaaagtcgaatctgaaatccaaatgttaagaggaggaggaacgagtggcagcacatcgctattatatttccttacatatatactttttcagcacaattttacaaagaaaacaaattcgagatagtttctaaaccggaagtctctcatgcgcaaatttgaaactctcttaacgactcggaggttctctaaaccggaaggtaccatttaaaaattattaaaacttaacatgactagattagatctttctcgaaaatgtttgaatatttgtgttaaacgtacgtagagaactcctgatgcttgtggagttctgagtaaacgagagtacaagagcctcgtgccttcgtaaggtcctaatgttgtcgtattctgtgtgtacatatcctgcattccaaaatctctaatttttaaaaccttaagacttaggtcaaaaaatggacacgttacatttcttggttatcaatatatgaaccttttagcatgattattggtagtatcttagaaataaatcttaggaatatttaagtaatatatttgtaaaagtgataggtaagagatagtatttttgggttaagatttttgtgtgattaatgataggttcttaacatgtggttctttaaaaaaaaaatactaatataaaaataaaacttataattatagaaaatttaataattgttgcaaattaaaaaaattaaaacatacatgagatataatttataacataaataacataaaacacaaaaaaaacttcttttgtttgattttttaaccaatcacaatgtgacaccttgcaacatcttaagttaagaaaaacatcttaacttagatacaaatcttagctttaagatgttggtttgattatttttaatcaactttaatcctaagatttatctaagatactcaacatttcaaccaatattcatgctcttagatgtccaccttatataaatataattttattaaagaattggtaacttagtaacgaagagaagcttttgtgcggcaaacgttgttgtttctcgtcatgagtagttttacatatctatccttttcttcctatataagtacacctttcaagtgcctgcgctaaactcaaaatctcaacaaactaccagtaaaggattacttaaaacgatcaaaagaatgaacaacgacgaagaatttcttcggcaatggtctgagatgctgaactcgctcgctaatccagaggcgaatagtgacttgcgtaagatcaacaacgaaggaggtgaagaggatgtaaggcaaaagaggccagctgagtcgaagagagaaggaaagaagaagcgagttaagagacaatgcgtgtctaaatcttctgacaaatctgatcatgataccttgttgaagaaggtaacgaataatagttgtattgttatgatacttcttccccaagaaactcatgatttcctctttttttctctcgttgaataccttagaagataaggcgggaacgtataagaagccaactagaaacactaaaggaattaacacccaattgcccacaggttcacaactgctgccttgttaaccgaattttttttcttgggaaatgtttttagttttgtcaatgtttttctttttttcgtgtatttttacagtcggatatcaacgccatccttgattgcgttatcgagtacacgaacaacttgcaccttgcagtactttttgcaggtaaaaaaattatatggccgtactcattctgatttgttcattcaagattatctatctgctggtttttaaatttctcttcatttgcagcgttacatgagttcgcagggaatatgtgacgactggagactgtttactgaagctggtgccgtttagtatgatatgcatagaagggttttttctttaagataaaattatatacttaaaagtttctattagctaagttgttttcattctctcagtcagtcagttgttctttgttggtttattataataaaattgtatgtttttggtttaaatgttacgagatatgttttagcctcagtcgttcgttgtttgtttgttataataaaactgtatgttttttgtttaaatgttacaacttgcaagatatgttttagcctcagttgttctttgtttgtttgttataataaaactgtatgtttttggttttgatgttacgagttatgttttggccatgagaccatctttaaattgcgttcggaacatcatactggatcttgcaaattagaagttatgatttgatcaatactccaacacttgcgccaatcttctgccattttctttgttaaaaccttatgatgtgttttggacatttggccatgcaaattttttttgataatcggacctagtgtgtgatccttgaaacaaggtattgcaattaaaaatttgaggttaaatgttaaatgaagtgatcttaattatatctaaatacttttatgtgtttatgcttaagagaaaatatttgaaacactgaaatttatgtttttaattttttttggaaaaatactacaaataccaaaaatgagaaaataccacaaagattttgtttatgaactttgtgaggcaattaattaatttttttaatatttggaaaataaaacagaaaaatttgtattttcgagaacacagattttcttgatattaagatgattatcttggatatttatctttttacgaaaaggtatttcttcttctaatttttacaaacagaaaatataacaaaaaatataaaagagataattactaactaaccttgttatcgtggcctcgaaatcacttacaaactgagctaagaagataaatatatatatatatatataaccaaatctcttggtgaaaacacagcattttgcattactattcgctgggtaatatttataaaaaatttccagttttgtgatgcagaatacttctagtactgtgtgccgccttaaggttggatataacaaaccaagtctgcaacattgttcaaaacttaaattggaatgaattgctaaaataaatcattatatgtgcccaaacaattgaattggactttaaaataaagtttcatattgaaaaagtttatcttcttgagagtagcggtgatggaacaaaaaatacattaaaaattaagaaaaaacaaaataatttaaattctttgtaaataagtaattcaaaatataggaagagttttatgtcagataacggatgtgttcattaaaaaactaactcagcaacaacttatatttggaaattatgttagaaatcaatgaggggaacttttttgataataacaaattcaattaaattcattttgtactagaataattatcaatccaataacttgtttttttctttgacattaaataacttggataaactaacaaatacatatagtgttaaaaattataatgggactaactacgtaatatttaaatactaaaagtctaaaactctttgtaaatctaaatatcctacctaagtatttagcaaatttatcaaaatccaaattttacatcaatccagtgcagatagttgttgtcaaaaggtcttgtaaaaaggttgaaacctttgatctcaattcgagccttgctgagggagaattatttacacatccgcatattttagaacagtggatcctggactggctggacagaagattatgggcctaagggatgagaggaagagaagctgctcccatgcaccagatcacctatattcaacccaatatttgtgttaatttagtttagaagacaataatctcatgatcatagagatgtactgtaagacaaagccttctttatcaaagaaaaagatcagtcacggtataaacaacaccggtccaaaagggatcgacctaacgtgttccttacgctatattctaacaaaataattcccaaactcaaaaggattgaaagataccttggcgtcaaagaaactcccttcaggtcgcgttttcctgcttttccggcataggatctaaccaaggagaatgttctgtagccggagacaatgcataagcagccactagataattaaccatatgtggctgcatctgccagactggtaaatagcagattatcaatggctgctgctgctgcggcaaaggctcttgaatgattggccgtggctggtcttgaatctctactatctctgtttctctatctgaaactcctcccgcatcatcagcgggggcagtcttttctggcggcaacatagaggcggacgttgtaggagccgcctcgtcctgtctccgattctcctctgccgcggttgcatcgaccttttcgctatggacaaactgtaccggaccattctttggcgagaaaatcgggctggaaagaacggaagatgaagaggtgaagatcggcgattctagacctagcaaccgattaacggtcacggattgtcgtgttaacccgacgtgatttaatgggaagaggaagagacggatacgccggaaacgtgtggaatcatactcggcgatcatgttctgtagatcatcgttatcggagacggtgatgagagagtcgaagtcgcagccagggagtttgtacttgagatagaaggagcgaccagagaggagcttgtcggagagaagcttgaagaagtcgagaaaagagatgtcacgtggaacgacgactaaccgcgtctcgccaccgatgtagtgaagggatttttccggtgggaagggcattatacggccaccgtagctacagaggagacggagcttaggatttaacgacggagcttgcggttccatgacggcgacagcggtttggagagttaaaacaacaataatcactagagattccaaaaatatctgaaattgattttcgagattctaaatgtgatttagaagtagacaaagtttgtaaacagaacttagatcggaaataagatagcaatatttgagaggatttagggttttcaatttcttatttcaatttgagttctacttaataatttaattagtaatatgattttctcacccaatttggtttggaattaaatattgcgcttatcttcttttgaaacgaattttatctttaataattaataagcttgataaacacagttctttattgattagaacggggacactagctaaacacagttcttcaagtggcggagagtttttttttttttcgatttttccactttttacttatagcagtgtgtatctataaattaaatcaaaattatattatttattaaattctataaattaatttataatattatgatagtaaaaaaaattttataatatagtacatgtaaacaataacatatatatatatatagaatttacgaaaaaaataataacatacaatttatcaacttttttttttctgtatccagaaagttccacaccatacatttttcgggttagaaatcagaacaagatttttttttttatctttggatcgacaatgctcaatccatagtcaagctctactacgcaaggtaacacgacttagtggagtcgaactccggtgaagaaggcggaatcgaatggacttaaccagttgactaaaagcacatctccagaatttagaacaagataaatctagtttttttttttttttttttttggcatgtcgtacgtatattcaaatcaatcgtccaagtttatctacaattacagtatacaatatattgatggtggtgttgaagttattttatgaattattcagtatttagggatttaaattattttccctagctagatagaaaaatatattctagaacggctatttaccctaccaaaaagaaagagtataaagggcgaatatgacattcaattcaacaacatatcaaaggagataagtattcttattaaaattaaggagaaacgtctcattagtcgttatatagtttcttcgactaagagggaatattacaacaggtaaattacgaacaacaacaaagaggagagttatataagctatgtggacgacatcgagatgacatcacttattatcccctttacaaacacattaacgtaaagcataggaaatgcatgcaaattacatatacttttatttgttggagcacggatgatcagaggctgatgaaagggccagtgacaaagttggcaatatttccgagattcgtctggacgacactgaccagagaagtggtggcagagacaacgccgtccggtgggaaaacggaacacgtggccacaggaagacgaaccctgacaatgcacgtagaggggtcaaagagagctgtgtccaaaattctggccacaatgaagaaggcaccggcgggattggtcagtgcttggccgaggttggtgcttgagccgccacatgttaagaagacggtcgcagcggaaatgggaggggcgttttggacaccggtaagggtacaacgcaagacacctcgaacttggattgtaccaattacgaggccgtttataacaaggccgtgggaaagggaagcgagagaagccattagaacaatggagaggagaaaaacatttgctttcgccatttttttttgctcaatttctttttttttttttcaataaggagtgcttttgtttttggttgtgtgtggcaaagaagcaaatggtgagggctatttatattggtaggaattgggaaaaatattattattataatgcaagttgtatcgtcattaaatcatttagatacgattttggtatggtccgcatgaataattccatttctgaaatttgactttgcctatcaacttgctccgctttagtaattttatttatgatagaaaaaaatatagataaaaattaaaaggaaaatttaggaaaattactgttgttataccaattttttaaaatactactaaaagaattttccattttatcaatcagttttataaaaatgggttataaaaattttatataacaaaaatttattaatctgggtttgtgatactttgaaaatataccaaaaatagtatcataaaattgtatttttgaaattctttcgatattaatggacgatttaaatcatgaaatattctataaaataaaaaatttataacatgcacgtgccagcagaaatttatagattttttataacatgtttacaaaaatttagaaatccatatttgtaatattttgaaaaaaatatatacaaaaaattgtatcataaaaaaattgtattttgaaattctctttatttaatggacgatttcaaattcatgaaatattctataaaatagtatcctaattttccaactactccgagaattatatatctttgttcaaataatattgtatttttcttagtgtttagaaactatattgtattttagtacttctccaaatcaatggtgtctgtaccattcatgtccaatgtttcttagtgcagctgtaaacaatgatctttgataagttttaatataaagtttttagaaggaaaaaaaaaaaaaaaaaaaactaatggaaatggctaacttagtttatttttgtaccattctcgatataatgtatgttgcaagtcatgacattatcaatctattgatatccagaaaaagaaatatagagtgattcccatttaggaatagtttctaatatatatttacccttttgagggcagaagatgacaaagataattaagaatggaccgcaaaggccatggaccagtaaaatttaatatcatccgggaagagtgggtaaccatcatcatcattatcactatcatcatcatcattatcattattttcatcaacatgaatcatgatcatggttatcattaacagcatatcttgacgtcttcatcatcatcatgacatcatgatcatcattcatcatcatcatcattgaataccatcatcatcagcttgtcatcgatacctccaccaccataactatcatcacgatcaccattaccaccacaacttccatcatcaccatcattatcaaatcatccaagttggcttactttattgttttgggaaaagacatgaacactttagtggtacatatttacatttttacaataataaataaaccaaatcaaatctttcaaaatacattcgatcccaatacatactagtatagagagagaagatgttcgttggtctcgaatcaacgctgtcgtctccgttcgtttgtccacgcaaaaggagcggaatgggagcattgcccgtgaagactctccgaacgtctcttggtgtgtgtacccatacttccacactgtgtggttcaaaacccacgccattgtggttccaccaaaccaccgctggttaatacttttgaaggcatgactgggttacttacatgcccccaattatttatgctgcctattgacactagacccattgtctgcgtagtcaaaagcttgttaaaatttgagaaagattatacaaatttttagatttgtaatgcaattttttcggttgggcttttaaaacctctcaaattgtctttcttttgtatgatggaccgtctaggttagatgtacaacactacacaagagatatctcgctttagatagctttctcttgaatagatttgatcatgtgcgtgaggcgagttatcatttagttagagtttaaaagtaaagttaatatagaaagttgagatatattggatatagaacgtttaaatgcaagttaggaagcaagcctagacttagttggaagcctgtcaagctaggagatccacatggtgaaactgtgaaagcatttttcggaatgaagagcaatctttgattctctgtttcggtcttaaagcatcccacgttggagcaatttgaaaggatggatggcttcgaccagctatgtcccaggtgtaggtatcctcttcgtcagaaggaagaggcagattaatgcttgaaaaatgactctgtagagcaactacttgagcagatcttggggccaaactaagccactggttgtggataaaagtgcttgcaacaaaggcgtgaatggggacctgcagatcacgtggcctatcaggtccaatgaacttgattaagggaccaaaaggggaccatgaatcaaaccagaagctcgccaattggccgttgcccaggttacacttcacaaaactctcagccaagattctcaacctaattaggaggcacctccagttccatgaaagatgagcagattcaggcaagtacctttaatgtgatgttggtggtgccaagcgacccagagagatccacttttagcaaagagaagccagacttttcccttctttttgtggcaaagctttaggttcaactttttgtcaaacctattaacaaaaaaagaaaaaaaaaaaaaaaaacttttatgtaaatcctcaacacttcatctaatgaaattcacagataaaaattgataacaaaaatgaatgtgcatttccatttgcattaatttgtaagcgaaactataatgcaagaagaataaatgtatcattcagaaagaaataaaaaaaactataatccaaaaacgtgatatcttatgattttatacataaatgtgaattctaaacgcaaagaaaaacggaagtgatatcttatgattttaacgatttttgagccttgtttaacctttaagttcttgcattttcatgtcatttaggttgtttagattgcatttgcatcaagttatttgtcttaaggtgtttggagtagagacatgaagaatggagttaaaagaggagttttggaccataagaacccaagaattgatcaagagagaagaagaagaaaagacctaaggaagaaaagagccatagcgaccaattgtagcatgatgtcttgcttgctacgaattcccctgaagatgaacgcctttccagagtttatatcaagcaaccatatggacgtctgctccttgctacaaatcatttaagcagtcaaaacccggtttgttccgggttgacccgcttcattccgggttgacccgcttcattcatgttttcctataaatactcttaacctaatcttaggttgtcttatgttttgtttagagatcaaaaacttctcttaaggtttctttctaagtttttgtataaatctttggttttgttgagttttgaatccaaatttctcttttaatctcttatctaccttctctaattatgatttcacaaagatcaaacctattgctttgtgtaatcatgatcatgagtgagtagtcatttagagttcttgggttaaagtagattaggatggtttagttgttgggttatgaagtttagggctagattgcttaagatccttacttattggttgattataaagctagattagccttgatcatgttgatttagactttaggaatttcatgcccggaaggtgttcgatgaaattcccgaaccaaaacctttaagtgctttacattccttacctttggaaattgttgactagggtgttaagtggctagatagacttgtttataatgcttgttagtcaattgattgcctttggaagaagttgatgattaattgattagtaaatggactaatgtcatggaaatgtgttagtgttgcttagtgttctatggcctagggatcattgcttattagaagttgtttgaagctccataatccacttcttaatcattcctaatcaattccctttaacccgagaattcgcctttagttatcgtttagtaactcgttaattttccgctttgtttactttcgaaacttgttagtcttttgtattttgctttcatttgttttgttttgcattgtttgattgttatttactttattagtcaagtttacaaaaccaaatcatcttattagcctagattaagcttttgcgtgtattcctagtgagttgatcaattgcaaattgtggttcgatatattttttttttttttttttgataaccgagtgtcctggccccaccgaggtggtccagactagagaccgaacctttacggcacggacgcacactcgatggtgggttatggccaggtaacggtcacggtctcgggcgccagagcaagtccgcatgtaaattccctggtggccactagtatgtagcaagggggaatcgaacccggacgtattgggattacctcctcaaccacgaaatccgtcctaccactagcccaccttgtagtggttgtggttcgatatttaattgagtaaaagtactacatcaggaagtataaatgcaaatgcaaagtgaaaacaagaatattgcaaattataaaactcctcagtcctcacgacatttatcaacaaatgaaaattctaaattcaaacgctaatgaaaacgcgatagaggaacgcacacatatgctaaataatcctatacaaaacaaattgcaaatgctaaagctaaacgcaaataataaaaaatttatacttattgccgggtagatgaaatgtcaatgctagtcttaaatgtaaagcaaacaaaaatcggataaatcttgtcttctatggtttttttcttctatatggtttgaacaatgtattcctcgttatgtttgccaattcaccaattagtcctaagttggctctcagaaaagaatttacgacatcaaatctatatatataatgggagagttctctctccatctaggctatccacatcatcatccacctaagcatgtatctaattaaaaattaaaaaatataatttatttaaaatgttcattcaatacatacttatttttatttattgttacttataattataaaatatttaagttaaatacaaatgaattaatattatatgtaaaaagcaaagaaatataaatttatacctaaaaatataatttgaattttagcgagaaaatgtttaagattaatcatattaaaaattttataaacatttcagttttataattgatatattaaaaatcaatatgatggatatttttaaaattgtatgaaagttgaaagatcatacatttattagctttcaaaaaaaaatatagtaatgaatcatgacatatttaaaaatcaatatgttgggtatttctaaaaattgtataaaagttggaaagacatacattttttagttttcaaaaaatatatagtgaattagtgatgaatcttatgacaatttactaattaaaataatagttgattagtttataaatgacagtaaaaaaatgttaaaatatagctaaatagtgtcgtgtataataattgaaaacaaaactaaaatataattatatatactattaatttttagcttatcataaatataatataaaattttatataagtaaatgtataaatgcatttgatagtagtacaaacattatgcacttattaaaaatataaaagattatttttaaaatatcaaaaataggtagaaataacacaattgcaacattggatttaataagatacaaacaaaaaataaaaataaaaataatagaatatgaaaatatcggaactgagtgacaaaattagtctcagaaagataaattcctaaagagaaagccaatatataaaataaaaaatatatattttcgtcaagaacttattttattaagttaacaaatcgttacacagcagttccttaagccatattggcggaatcaatgaatccggaaggaaaaacgacattggacaaacgaatttggctaaactatcagctacacaattacaagattgttttacaaaattgaaacttatatcactaaactttcctctccaaaaaccaatgtctcgcagcaggttctctacttcactatgactggaatttccattgattaagttgatcaatacttcacaatctccctccaagattacttgagtgaatcctcttaaccatgcttgatgcatcgctgtcagaagtgcttttgcttcgaccatcaacggagaagctgcaccattcaaatccaaagatccccatgcttttgcagtaccgtgatgatcccgtataatccatcctccacgagcttgcatagtgatttggctgaaactagcatcaaaattagccctgagaccaattatccgggatccgggatccgagatccgatccgagatctgctccgatccgctccgaaaaaccggatatcgggtggagcggatccggattcggataatgaaaaagcggatccggatccggataatggaaaatttcaagccggatatccggatccgggatattttatattataataatatttttaatattttattactattattttaaaaatttattaataaattttattatttttataagaataatattttctactaatatttttaattatttatattaaattatatgtttttaaatatttttcttcaagttttatattagtaaaaaaaattatataaaaaaacccggatccggatatccggctatttttacggatatccgaaatccggatatccgggtggaacggatccggatccggataatgaaaaggcagatccggataccctaaaaaagccggatatccggacccggcccagccctaatcaaaattacacttcacaaagggatgttccggagtggaccatatatatatcttttatttttgcttctaaatacaatagatataaatttggaaaagataaaccacatttaaaatagcacacttgagtttctataattatagaagaaaatgttatgcataagaattcatgtactaatatatatatatatatatatataatgaacggttataggataataagtcaaatgcaaaagaaaaaaaaacgtttaatatatgtagtatattataaataaacgtataaatctatacaattatcacttataatatttctattatatttatataaccgcctttttaccaatagaattacatatagttttcaaataatattgtaattaaaaatatttaaaataatataatttacaaaactataaaaaaattaaatatatattgctaaactcacgcaataaacccacgcaacgcgttccatttctagtaccaacaattcagtagtataatagcatttatataataaaataagctacttttttgatcaagatcaaatcattcaagatacattcggtccctatattcgcacggcattgagagagaaagtgttcagcttcgttggtcttgcatcaacgccgccgccgttcatttctccacggcaatagtagcggaataggagcactgtccatgaagactcttcgaccatctcttgttgtgtactcatacttccactgtggtcctagaaccacagtaggatcattttccggtcagaccggcaggtccaatccagttttaaacaccttgattatggcacagaactaagagtgcctcaagaagaaagaaaaataagatggaaacataaaccgctacctatcagggaagatgatgcaacccctgaaagaaagattttaatgtacaaaactaccctttgccaatccaccaattgatcctaggatggctcttataaaagcctctatgatatcaagcatcaactgtttactagtataataaagctgtatttttaaccaaggatcaaatcgttcaaaatacattcaatccctatattcatactggcacacggcattaagagagagaggaagtgttcagcttccttggcctccaatcacagacgtcgctgttcatttctccaccgcaaaaggagtggaataggagcgctgtccatgaagactctccgaccatctcttgtcgtgtactcatacttccattgtggtcctagaagccatgccattgcggttccaccaagcaagccaccaatctgaattcacccgagatgctatcagaccatcaatccaaaaggtatcggactggttagtacattggaaggcatgattgggttacttacatgtccccagttatctatgcgtctggacactagacccattgtctgcatagctaaaacttgttagtacttaagagagattatacaattttctctcttgtattacttaccatgtttagggcaataacttgagctatctgcattagatcttcatttccacctctgaccatctgtttgtgtcttataacaaataccgctaccgaaccaacctagccaaacaaaaggggcattcatttaacaaacttcatttgcatgagacgagtctaaaacaaaggcttatggttccacgagacttaccaatccgaaaattgcacccgaagcaccaactgatggcgctttgttgaaccagtagctcatagctgaacctagaactcttaacatgggttgtgtgagtcaggaaactcgaaacagagaaatataatcatccacatcaaagaaagtgtatgagtcgtcaattacttgcaactgcggatgtcaagtaaacggcaagaaatctctttggaccacctaaactctcagcagttggtccaatagaattcaaagaatagcaatttatctaaacaaaggagaaacagtttagccatacagacagcaaaacatttaagcagcattgattagatattacaaagctgagcgattggttagaaacagaccatgagatgcataggattcgcatgaagaacagaagctgtagccagtctccatagctgacctctttcgattaaactgtttatctgcattcatccacatatcaatctgcagcaagaaacaaactgtctcacattataataaagtctccgtatacggtaccttggctccccatgtcagcactttcccatcggatgcaacttgtgcaatacacattctggcatcattaacacaaaacgaaatccataagccttcttagctcataactctcaaacttgattataaaagcatccctctaatgaacagaagttacatacataacgttaatggcaaggaggacattagtccatctgcgtccgttaactgtgtttctcttggaagtctccgatccttgctcacctcctctagggttgatcctactctctccaccattaaagaaacatacaaatgacgaagatggggacaatcggatatcaactctagacttgagaaaattagccccattgaatagaatcactctttggtatcttgcaaactccattcttgcatcatcagaaaaatgctgcagtttctgtagaaacagagcatagtcaaagaaaatgagattgacccagaaatcagaagcgccaggtgaagcaatttaagctttgtgattccagaaattctactagaacgaagctaaaactagtcccaaattacggagaagagaggagtagtaggagaacctgaagggaagagcgaagatggaagccaaggcggaggtgacggctaacatggtggcaggcgtgtacggaagcggcggttgcgaaaccacgaaacgccgaagatccagattccggtggccagagattatgatgagataatgacattgataccatctcctcctcctccttgatttcccaacaatgggacctttgattttttattttttgcccttttgccttctcttacattttttttggctttttttttttatgtcgtactaaaaaaatttattacatttattaattcattacaagaaaaatagaggaaaataaacgaatatcggcatcttcaaacattaaacttcagatttgttccgttttcatacgagtatttggttttaatatttgctttaattcgtaaagttttggataaatcaaattagatgaatgcttttatggaaaacaacaaaatctatattactaattagaaaaatatttgagtactcaaataatgtagagagaatgacaactctgttattagttcactttcattcatgtgttctttttgggatattacttttcagacttgagcttaaagtccttgctgctgctgctctttattcacttctgtgaatatgttccactctgttggtttgcttatgtcatctttactgaaatttctcgtacaagattgagacctctagaagaatcatgtcgagttctgacacatgttgtgtgttctttcttgttccctgtgatttcttcgaagcacataatgttaaagactacctattaaatgttcaattgatttagaatagagaagatgatgttaatagtagacgtctgactctcacagtagcaactgagtagtattgagacaaattttgatctgcccaaaaaaaaaaaccaaaagcatagataaaagagagagacaagtgattagcatgaatgatgaaggaggtgagtggtttcttctattcacaagccagcttggtgtcaaagctgcttaagcaaatggcaaacgcctggaacgccgataacggatacctataatccattgtgaacatatctttccccactttaccaaactggagaatcaccttgtcttgctctgggtgagccggtgcagtggctggtgctgtgcccgtcccttgaggctgcgacggtcttgctgctacaagctggaaattcttaaccgatgcaactgtcacacgtccgcggaaatttaaacaccagcattgcaactgctcgtgccacctcggctgcttgtttttcagaatcaacggtctgaaactcgtctcttcttcgttgtcgttgcaggatattcccatttcagagaatctagaactgctgaaatcgagggagcggtggtcgaatgatgatttggagaaggagatgttactgcggaatgagtcgtcgagagagtatggtgccgggacgagtttctcgggttggttagggactgaaccacctggttcgagcgatgaagttgggattgagttcatgatgcagtgcattcgccgtggccctcgtgtgcccaacacgttgagctcgtaggttatttgagcaatgttgtagctgccagatgggactttaggagaaactcgtctggagtgaaacctacttcggcttgttcgatcagtgataagtgcgctcgaagatgtgtttggtggtggttgcgtgtcgtacaccaagaactttgtcccaaggaagttcgatctgagagaaagaaacctcaatgagcaatggataaacgaccacaaaattcaacagtagcaagctactatgtgttactaaaagttcgataaaaccgcaaattctttgaaatccttcaaagttaaagatacattttctaaacacaagaaatccaaaccgaacatgtatcagtccattcggtttatatatttgaaaagcaaacaaattgaaccgaatccaaaccaaaaccggattgagtactaagatgagatcaaggattaaaaacgaacctgagctttccgaggtaagagttgctggatcttgagatgttatcagcatccatggagataatgtactcggttcgagtagttctacgagttcttttagctgaaagaagaaatttcccattctcgactagtagagctgaaaaaacattattcaacttctatttagccataaactaagtaaataggaaatcaagtaggctagatcctaacaaagcttaccgggacttaaacagagaaaaaggtgaaatgttagctttgatttatctcttttaatgaaacactgaatcattgcatcacgaggccctggctggaaaattttacaacacaaaacaaaaaaaaaacttattcatcagtagtttgaacttaaaacaacatcaaatttgtaaaacagtagagggtaaaccgaacctgtttgagggagactgggaaagtgagcttcccacagatttcaggacccaaaacaatctcttggcacatagctctccaagaccgacaaaccgaagcacaagccacgacatgttttcttgcaggccaattactctcactctcttctaatcttttgatcacatcaaagagtaactctggaggaagattagcccatctgctagtctgaactatcacaggcgacaagaggtcacgggaagacgaatactcacggaaggaagaaccctgagctttccctttatgaagactggagagcctgaaatcgaaactcctcctcgacaagctcccaaacccatctctcaaatcttgaacaatgccccggaacgacatttctctttcttttttaatggattcttctcaacaagaccaaccctttcttgacaaccagaaatgctcaaatccaataaagagcttcagacttgagatgagagactccactcactgtccattatcataagcacccacaagaaaaaaaaggtcattcagctaggcaattctgagtcatcttcttaataagtaagaaataaaaagaaaagagccaaaaaagtaaagtggagcctaaaagagaaagaggttccgctaaagcttaggaaagaagagatatacaagtatcgcatgcccaataaagaaactaggtcatgtccccaatatagctttattttcttaaagacaataattaatcaaagagaatcttgatgataactcaccaaaaatgccccaaaattaagatcataggaggcaaaatcaggactcaatttgatattgaagcaataaagtcatatatattaactaagaatctcagatgatctttacttaaactggagataacagagtcgtatgtaacaaaatagaatcaagagcaataaaagtttcaacaaaaatcaggtatttctcaaaatgaaaattactcatctgatttacttcctacaaagtcaaaatcttagttaattttcagacaaaactgtttattacaaagatttgatcccaaaaacctgggatttggtgttagaacatagattctcactgcaaaaaaacatcaaagacagaaggagaaagagttaaagaattaaccttttagacaaactgatgaaaacccagaagaagcttaattacatcaatcttcaaagacaaatctctttaacttaagcttctctgaccaaatccagaagctcaggaaaagcaagaacagaatctgggtctggcttcaaaactcaaaatcctccggaaattacgggtaaacagaagaattagagacaagatcacagagatttaagcagatctgtaggagaacccataaagtcaaagaagaacaacaaaaaccagaaaaagataaagtcgtcttcttttttttcttgttctctgctttttttttcagtactcaggagcttttcttgattttactttaatagttcacgagacagcaagaaaataattaagaattataaataaatctagggactctcacaaatgcttattttcttctcttccttgttggatttttctaaatgacaatttttttttaattataattttgtgtttggaagaaagagagagaaagagaatgaaattgtaataagtggacattgtgaagcattattgtccacgaggccgcatgacctacgcctcgcatcaagcaaagacccaaccatagttttgactttttttttttaagttaaaaccttttttaaccaaatttgttactgatagagatttaacaccgttgaacttggagtcttttcactgaataatactacaaatcatttcaattttgattatacctgtatgtttcatcacatcaagtttttttgtctttagacaaaaaaaaaaaagtcaaattttgttagctatatatatcattgaattttaaattaatgttggaaatgagtaaatctgtgaagaaatgatacaataaaatatcagtataaaatacctaaccccattcaatccttattaataactttttgaaaattgtgtttatctaaatcttaaatcatgtactagacaaaaaaatttaggattttgacacttttctcaaatttgaatcttaacccagtttatatgcatggttcatcaaatatgatatcgtttcttttactaccggtttacaaatttctttttcctttagtttacgaacgacacatcatttatcaatctataattctttaagagaggttacattctaatcatttgaatcgatcaaaattggatcggtcagcaagccttcaggtcaaactgatccaacaacatgtactcctcagttccccatcaatttctttgaatcatccagactcattgaggaattctaactcatttgtgaccattgcttttagcaattattcaccatttctcatgtacatgaagttgtgttataatattaccatatttttaataaaacatttcaactttaacatttaagcatgcatgttgaatatttattaaaaatctaaaatcacacaataatccattatatagataatacaacagttgtttacactgatttatcaatttcccatcataagtataactgttttatttatgggtgattacacactgtatatcgtcggtatagcatatttttgtcatggtactaattcaaattcgtattatgcattaactttttaaaccatgaatctatattcctatattatattcccgcatatagaatattatcatgacaatctagatgatcatctagcagtacagttgtcattactggttaacataattatatctatggatcttagtgacttttaaagtttaggcacgagtctctcttgccctttcagctcctgcaattcaaggtacatcaacatcagttgcaagtccgcttatagttccactcagttacaaaaccaatcatcccacagcttctgatctaattctagtagctagacaaacacgtattaagtttcatccatacaaaatccggatttgttacatggtatatctgaccgcatagtaaaaccttaaccgactggttaggagtgcttctaatcaaacaaatatcatggatcggtccggtagggatctggtttcattattctactacagaattaaatatttttaccgacgacgaaagagaagacaagacgaaaaaaaaaaaaagagaagacaagacgtgagtaagccggttcttcttagtactagttttaggttgatactaacatgagatttaagttatagttgcaaactgatttattagatttcagtaagaccagctgatccggttctcaatacattttgaagttgattacaaaccagcattcgtactttaatcaaccattttagttgttattatttattggtttcaataactacatagatattacagaataagttttccagagatacgattatagagataagattacaacataattgaatctaaatgcatggatgttggtaagatataaagttcaaacaccagtccctcttgccctgacagcatctgcaatttaaaaacgtcaacattagaaccaaaatcccaccctctttttttttttcaattcaattacaaaaaacaactcatcccataacttataatccgaattcaatagacaaacactatgaaatatcagaaattccgatctgttgcatgcaaaatattctacaaccttaaccgaccggttaatcagggtttaacacaaatcagacaaacgtatcacagaccggtccagtacggatccggtttcataatctttacctgggccacaacgaatggagcacttgcgatcacatcgggacgtctttctagctgaagaaaagagaagatcgacaagaagttattatacaaatggaggagagatataccttgtggaggaaactaagaaagaagagagtactcacagtcacgttggacgcaggcggtggagcaaccgtcgtaacagtctccggggcctaattgagcctccgccaccatatccaagctggaagataaagccatcagaatcataagagccgccacgatcgtcacttgcttcttcatcattctctttctctccttggaatagatcttctttgtttttgtttttcctacttcttcgaaagtgatattttgtgggtatttaaagaaatgtcccagttgccaagtttgacctatatatagtccatgttcacgtgtcatgattcctctcctaacgttatctatccctttaattttactcaaaaattttgtctactgctttttcttttcttcgacagtggactaataatttgttctggcaataatggtggactattttttttttttttttttaaaacttatttacataatttacattagatcaaagtgaaaatctacggtgtacatggcatggaaagcacgtataatgataaatccactaaaaatatgatagtttcttagcacatgcaactgtgtaacattcaaacaattgatgttttgagttccaacctcgagccaaaaaaaaaaaagtaataaaacggtagataaaaaccacataggtcatgaagactaatcacttcaaaaacataaaacatgtaatgttgtggcggactagtttgtcataatttcttacgacgaatttacggcttagagccttagacaataaaacaaactagaaatagaaaatatcgcattttagaggtataattaagtatcaagttgtaattatgttttaatactgaaatcacgttgaaaaatgaaaagagatacttcaaaggctaattcacaccaattcgggcaatcagatagatcttaattttcacttatcgaccctatattctattttgcttctacggtagatctaaaatatttggtgatgtaactcatatgagggattcaggggacatctctgtttactgctgagagattaccaaggtccagttctttgttattcttatttgttacaatatggtctgatgtcgtagaggcactcttcttttccttcattttacaccataccactaggtatactcctcccaccattatcatggcaccgattatactgcaagtttcgcaaaataaaaaataaaaacgattaagattcacacatatcaaccacaagaatcaataggttaattagtggacacacgatcgagtttgatataccttcccaaatgaagcggttcctctaaagcaaatgatccgataagggctacgatcaccagccttataggactaaagaccgtaacaaataacggtccttttgttgcgatgcaccatgcaatcagaggcacgactattcccgataccacgattccctatacatcacggatgacaatataaatataatcgtgcattacacacatttacatatgcatttaggcgcatatctaactgatcattaattatatggtatagattgttttaccgaataaagcgtcgctaagaggttaatgtcccatcctaatcgccattcctcccagtcatgatccgaacagagagcaacaatcacgcacaccaaacttcccaccccattcattagacttgtgttccaataaagtcctccaagttccttgcctatttttgcctaaaccaagattttgcgttgtcttccaactttttatcaacgtacatatataataactaatagctctttattttgtcacttctagtttatactatgtttaaatttatatttgaataacaatgtgtacatataaatgaattacttagatctatatataaatttctttgttagaaatacagtaattttctacttaaacttggaacatcaattaaacaaaagcgaaaaatatcattagtttgtagttgattaatttcatccacgtatagtttacaatgttgctaaataaaatgatatttttcattaccaaacacagataaggcatctcaaacaatcaaaccctagatcccaagtaatttgcagtgggatccaaaaaaaaaatgcttcatttattaaactagccgaaggatgatatggtccatatggagagaggagggggaagtaacacttgcctgaaatagtaaccaaagtgatgttgaaacgttactgccaagaaccataagaacccctgggattgacatgtggtggttagtagtggctcggccagtattcgagcttttgagtaagtcaacgtgtgttgaccatatatgaatctcaacacctttgtagaatacaaacacgagagctccacatgcaccaagcagcgtccccaccagcttagccctcccttcgttcgatcccagtcttagagtttccatcctgttggctcaacgacaaatcgaccgaatgttagattagaattaaaagtctatttagccttttaagttctcatcagctagaaattattcaatttttaatcagtggaacaagtttacaaattagttaagcattgataatattcctcggttttcgaaagtttaattaactttttttgattaatttactatgcacgagataaaattattgactttgtacttatagtcagtaactcagtatgctatgttgtttaaagttaacaggaaactctataaaaatacgaaaacgtcaaatatataaaaattgtatatacaattttgagaattttgcctgcatatataagaaaaactaaaacatttaattccatgaaatgaagggaatgattgtacaatttcaaaaattaatgaaataaagttttgtgtctaacctaaacaccaaacccaaaaccaaggtgatcaatgggctaattatgctggttgcagctgaaaatgtcgctgatgttcgagccatacccggcaaatagagaatatttggtatcgccgctctgtataatagtcaaaaaaaatatcataatcgcaatgcaatgataattccaagggtgctaatgactggtttttgttgtaatttggcaatcccaacattcttcatttattcaaatttacacattgcaacactgttttatctatgaattgagattatttcagtattttctcgcatcaaaaaataaataaaagcaccaaaatttcagctaaaaactgatattgtactagttctgagtacccgagcaaccccgaaacaactgctattaagagcagcctccatgtaaattctggccgcttcttcctgatcacaaggaatccaaaacaaaacattataattaaaataaactaacatagcgtattaagtgattacaaatacacacaaatgacatggtgaggttggtagggtgattcgagtatgtgttttttcaattctctcttagctttttttgtacttgttagacccggcttttcgcatagagatgtataaggttatatatacattaaaaaatgcagaatgataacaataaaaatgtaagaaacagaaagtaggaaacctttggaagatgagggcaaggggaagcatgaaaagagtagcaaaggacagacgatacgccacaaggactttgagattcgttccatcgtcgactgttatcttaaacaaaatgaacattccagcgaacataaactgaaccgccaccattgcaactacactcttcatttctccccacatttctctaatttatggtttttactttgatacccactctaaccattaacgacccgatgctcctgagctcatgatgatcagcttatttatctagccaattaaggtgttttcgtctttaattctacccctatacctttttcattgtgctccacttcaattgtagatatcgtgaacaagttaagggatataggaagatgtgagcttcaaatatttgtttctggaaacccgttacaaaagtagcaaagtttggaaggattaaaccttcttggtgaatgtgtagaaagaatgaaaaagagagtttatgtgttggaatgtatattcatgatcaaagtgaaaacagaatgcgaagtgaagacgtaatgcaaaaataagacgaaagtgtttataatcgttataatgaatataatggacctccacaagctttcaagagcctttcactgcaaaataatctttttttttttttttttttttcatttgttttgcaaaagcatttgttataaaatgacaagaaaactattatacatttacatcgatgccaaaacttcttatacgaacggtaatgcgttttactatttgagccaaaatgacaatgcagaaacatgttcggtgctattaacttttattaaaacataattgtgaagttaaacaagatgtagataaatcataaaagtaacatattatataggttgacgttgacacgtgctaagcatgctttgtggctttccctcgatggctttgtcacacacaagaactccaaaagagagaaaagtgctcctaagtcattattgtcagtaagcaacatgcgtacgtaaagccatatacacttggtaaagatccaaatttggaagttttgggtttaagttctctttccattcttctactctctttcatgtgacttgcatactgttttaaagatgtagatccaaaaatgaaaactaagtatcgatacatacatataataacatttagggacaaaaaaaaaaagttttattcatactgactcgatgatgaaaaaaataaataaaaaaaaatcatactgactcgaattaatgatgaaattacctaggaaaaatctctccaaagattatttgtaaatttgttacaattgtttgcaaaaatataattaaaatgtcacacaaaataaaacctccagaacgttatgataccccaattgaatgtcattttctataattttcatttatgccagagatatcgacccaccatcaataccagtagcaacaataatctcgagcgatttttgtgttttgatttcccctcacggaactaattccactcatctcttgatcttttcccatagcacgatatatatcccacatacaatcaaggccggctctacccatgtgcagggagtgctcatgcacaaggtccatccaattttgttttttttttttttttaactaaatttattaaaattagagtccaaaattttttatttataaaaatacataagaaattatggccaattatttttttcagctcaggatccttaatttttttgagccgaccctgcatacaatcaatattgctccaagtacactgaattttgaaaatacttttagtgtatgcatgcatatatattttctcaaatcttaacaaatgtaattaatgtcttttactttcccaaataagcatttcgtccaagaacaagaaacaagccacggcgacaactacgagcatgagagtgttgaagatatatagctagctacaaagagtggacccttagtccaagaacaaattgccattagtgtcactactagtggttgttcccagtctttcgagcattcattcatatgatttataattcagtatcaactattaagaggtttaataagtaacattttttgaggtaccatttttaattgtttttataagatttaacttaagatcttaggtttttgacaaaaacaaaaaaacactagtattttattttaatttaaattatttttcaaattgtacagtaaaccaaattttttgaaaaatagttaaattaaaataaaatttatccgcaatcaagtatgtcggctaacagtctttgtttttttttaacactgtttattgatatttcacaagaaagtgagaaacattacacgcccacactaaagggcaagacgaaagacccaagaaacgggcacggttataaacttatacaaaaccagcaaaactcaattacagactatagttaaagataaaaagaacataagaccattattggttctaactgaaaaacataaaataagtggactgataaaacaaagaaacaagtccagtaggactgcagcaaagcacataaacataaaggcacgaagtgcccgaagaagaatctcaaaccagaagcttagattcctctgtgatgatttcttgaagccacattggcccctcgcgtgcaatgtaagattggtaccgatgatctctcgtgacacttgttgcgacttctttagccacccgattacattcatttgcagctataactacaactgaaaactcaaagacatccaaaaatcttctaatgtctgaaatcaagtgtcgaaagagagggtatctatgtggatattccacaactttttgggatgatcttgttttgtctaaggttacttaagctttctactgcccagagtaggctcaagagatctgcttcaaaacctgttgtaattttcgaatatgatcgacgacgatggaacagtctaaaattaaaataaaatttatccacaataaaagttatcagaaatcaagtatgttgtcggctaacagactaaaccaaattatccgcaaacgaaaaagtttccttttaaaaatcctaaaccatatgcctccaatgacaaaaagtttaggcccagatatctgataactataaggcctgaaacaggccggacccgggtcgggttgatttaggggtccaggttaataagaaaaaagacgaattaaagcagagaagggaacgagggtttcagtttcctgaagaaaaagtgaaaggagcttaagaaacagaagccgttcactttcgttcctctcacttccatacaacatttgaaacctcagctatgcctaaatcaaagcgagacagaccaggtttgagctcttcttccttcactgtttctgcttcttctattgtcttaaccattgtatctctgttaacttttgtagccgccgtcaaggtttttagggttttgttaggtttttagaggaacccttttgaaaaaaatcttaacttgttggagtttgtaatgttctttcatagtttctatggttgaatcgattgatggatggttatctaagggtgttttgttttctgatttttgctgcagttactttgtcgaagacgaagaagaaaggaagagagcataaggagtgtattgtgaatggaattagggaggctgttgatagatattcttctgtct

SEQ ID NO: 5309 - DNA, 11760 bp, Arabidopsis lyrata
  Intron number 22 from transcript 489126 (locus 489126) der ived from phytozome v7.0 (chr-ID scaffold_6; pos 9534190 t o 9545949 reverse strand)
ctccagtacctgatacgattcctcctcgagcacaggtatttttgtttgttgatttattacaatcttactactcaatatgtcaattctgctcatttatgtatactctactaagtgttgcaatttctttcatggttataggtgcaatctccacttgaagtgatgaacatccgccctagtagggatgttgcggttttggatttttcctacaagtttggtgccagcgtggtaagtactgcaactgtccttagcttgttttaatgaatgaatattttagtgtacctgacatgctggattttttataggtcagtgccaaattacggatcccggcaaccttgaacaagtttcttcaaccgctacaattgacatctgaagaattcttccctcaatggagagcactttcagggccacccttgaaacttcaggaagttgtatgtatctccacagcctctctgatcaaatatcaaattaaaagtatttgagtagtgcaagaaataagtcaaatgctcctacgaattttcttttcaaagaaattcatgaattagctttcttcataaaatccttttaatgaatgatgattgctctaggttaatcacaacacttacagagaacttccaagatttctacatgtgcttgttaatgcagcattacgttaatgtgttatataatctgaatctgcaacttttttcaggttagaggtgtaagacctctagctcttccggaaatggcaagtctgttcaacagttttcatgtgacgatatgccctgggcttgtaagtattttttcacgatctcattccttcattcctcatgcttgttgcacacatgtttaccttaaacttaacttgtatggttttctgttgtaggatccaaatcctaataatctagtggcaagcacaaccttctactctgaaagtacaggagccatgctctgtttggtgagatttcaaccaagtttcacttcctggttttggctcttgccgctcttcgaattcgtaaaatttcttgagacttatagttgacgtgtgacattgtctgtggtttgcgattttcaggcaagaattgaaacagacccagcagacagaacccaactgcgaatgacagtagggtcgggagatcctacccttacatttgagtatgatatctctgcctcttagcacaaacccaacctccaatacagttttctcttcgtttgcatttgttgacctcttttcacccacaggttaaaagaattcatcaaggaacaactaattactatcccaatgggatctcgagctctagttccagcagcaagttcagcaccatcaccagcaccacctgtagctcaacctcctagcccagcggctttagctgatgatccaggagctatgcttgccggcttactttaaattcattgggataagagatttacttgcacatgtcgaaaagtttgtttttccgttattgtagaatgtaatggcgaaaacatggaatgatgggagagtatatgtagagccaaggaaggggagaggggaaggttttaatagaaaagctagttttgattatattggtgcctattatccaaagcgggcggtttgagttagctacgaaattttgcattgattctaaacatttgtgatgtgaggtcagtggttgtatcagcttgttcttgtgcctatatattttcaatctgtttctccatgatttttctgatgggaggtctgttttttcgcaccagccttcacattgagagattctaatgtagtcatataggggggaaattgcaaagacacatacccaacgcatagcatttcacctgtaaaaacctgatctaatttgaggtttgatttattataggagatgaaatcaggagttggccagaattctgaaagtcgaggctactaatgaaaatgcattcacttgtagcaagacctgttacttgatgcagctctcttggcattactaaacttgtgtagatcaggttcatgggtttttcacagacaacattccatccagagaagcaacagctgatgcagccaattctccatttgtgtaatgattaatgcaagcatgaggttttaactgataaatccttgtgagtaatgccagcaaacaaatccgtctcttgcgctccacttgatcttcctaaaacaggaccgccagcatagcctgatgaagcatttgagagagagcaattcttctaaaattatctcaaatttaaatacagggaactggaaactaatttgagagctgtaacgtaagaaaaaaaaaagcaattaatgatgcaacaacacaaaaaaaaaaaaaaaaaaagatctttatgtgtataattaatgattttgtttaacgttaaaatatttgatctgacgcaattaccctgaggccaaagaaaaggagacattgtcccaaacgatgtcggtttccagtccaactttgatttcgattaactttcttgggacaaaaggaaacttatatttcctttttttctaagtctctacagtctatatattatccgatacacgaaccatacctctctaagtttccttaatttgatatccgaagttgtgagttgttaaccctaaagatcaacagaagatgatgaagaagattgcgattgcgattgccactgagagatctgatctccctcctttggtatctgctgcaattagagctgctaattcacaaaacgtttctgatgttgaacgttgctttgatgttcttcgatacatgaagagtttgaatctctcagtcaatgatctttgccattccaaagtgatacttcctttggagagtctaagagatcacgaaaaccctaagatacgaatggaagctaacgtttggttcaattcatggatgaagactctttattccagcggacgaaactcttctacttgcaacaaagctattccctaaaactgaagaaagttgatgttaaagtatgttcgcagttgaagaagaaagaagatgagagatctcaggctcatgaagccacagaggtgaaacaaattggtgattgcaagtgttttgcagcgaggactatccagaagacgaagctatcggctctaccaatgaaattttccgaaaaccctaacaattgtcttgccttgaagaagaactcaacggagatgttggagctgttcgaaatagcgaagaaatcagtgcagttaccactaaatttccattactcaaaagctaacaatgtagtgagagttgtgaatatatattataaggattttcacaatctctctctcttgtttcaagtacggtatgtttctatatttttgtttacgtgaattcatgaaaaatggagtttgactgatgcatttgttgtaatgaaaagacaataagtcaatactctttttaatttcttccgtaaaactaaaaatgttcaataagaaactgtaatggaaactgattcttgtgtgcttaatggagctcttctctcttttgttccatcgttatcatcagaaactctaaacagagtccgtactgtaaaccagagaagaaaagagaaaaagaacttgatgcctaagcaacacaaagaggaaagtccttagtagcaatgccttgatctatagccaagccaagcaacaacattctaggagcataccctatcgccgccaggcccgccactgctttctagttcaacaattcttcctgttcgtcgtcctgttgcttatgatgttgttatgagacactcaaaaacgagagtacgtagtcttaagtcctttgggaatagtccctgagagttaatatcttgacaggtctattggacattggacaaagacacactaatatgacctgtgaaggcatttaaatagagatcaatggtgctctatatgaagtattaagattgtatagtttaagtgacaatactttcctattcacagagtaatttggttgcaaatattccagcagaatatctagagtatctaaaatctttattcaaaggacttcataatatattgagtgaaattagaaaatgcgtataacaaaaaagaatcaaaccggtactgttgtaccggaatttgctgcagtcatcaaaatgcgtataaaccacttgattcgttgttcccactaatattacgctgggaccagccaaaccattgcaagacccgacatgactcgaattcataacccgattttctcatggtaaactgaaacaccaattgaatgcattgaccagcgacggaaaacagtcgtaaatgaaaaaaaaaaagtgaaaacagaaacagcagtaaataaatattacccaaaacggtaaaaggagacggttttttgacaaaataatacgcaaacttataaacactcgaattcagtccaaatcctagacgcgtaaattctgttttttgacgagtcgatttcggattttccaaattcaaaacagacgaaaacagaattatacaaaattgaatagtcaaaagttgtaaataaataaaaataaaagtcgtctcttcccgcaagcttgtctctctctcttctccgagatcatcagtctctccttttgaatttctcccattggaggtgtcattttccgtttctagattagggtttcgatctcagctctcgcgaattgtttatccttcagctgtagtctgcggttaatatcgtcgttagatccggttttgcgagttcggatctgcgccgtgtgaggcggcggaagacggtggatctgaggatttggttccaccatgaccggaatgagaggtctctccgtatttatcagtgacattcgtaattgccagaacaaggaagcggagagactacgagttgataaggagcttggaaacatacgtacctgcttcaagaatgacaaggttagtgtcaattatctccatttttgtttgtctttgttttgattctcaattgagaggtgattcggtgcccaagtaatatctgctgagggtttgtattgattagagatattggagatttctcctttgcagttacctatcattccgagattgtttcacctagactcagttacaatacaatcgaatgttagagctattaggttgaatagggagttagagaagaatgtagttgaaaccaagatgcagtcactggccgaatcgtttatcgggaaaaccgtagttaccgagtggatagttttggagagaggatattgattttgatttaacacaaactgtgtacctggacacacagtataatgcttccgttgtatagctaattcatatccttggatattagccattattctactgcttttaacgtggaatgttattaggcagtataatgtttccgttgtatctctagtcgatatgtaagacactgaatatacgatgataatgatatttaggatttatgaacttgaagaaaagaatggcctggcagtaagttcggttatgtagtgatggtctaaggaaagaaatcaaggtcggggaaaaatctgaatagcttttcattacgatgtagattaagatttattgctgttagaagttctggagtaataatctggttccatactattacgtagcagagctgtatctgacctgtagtggatccatttgtggccagttggaccaacaccaaactttttctttttcagggttcatgttagaaatgaatcaatcaagcactctttgattacttgacatgctgtgattacttgacatgctgttttatgttgcaggttttgacaccatataaaaagaagaaatatgtctggaaaatgctttatatacatatgctaggctacgatgtggattttggccatatggaggcggtttctcttatatctgcgccaaagtatcccgaaaagcaggtaagccaacgttttgtttgctcaagtaattaaatattgcttctaaggctaggaacagagaataggtgggggtgtttgctgaaatatattctagtgatcaagctgaaacaaagaaagtttcactgaagatcacggaaagttagatctagatactatttcatgcgtttgcaacttggcttgacctggtaaagtattgcagacaattacttataagcacgagttacttagtaacatcttagaaactcttaaccagaaccatgcattgtatctcaagggtttgtatttccaatttatattatttcatgctccttaactaatttgcacgtattgaactttttatccatgattacaggttggctacattgttacatcttgcttgctcaatgagaaccatgactttttgaagttggcaataaatacagtgcggaacgatattattggtcggaatgaggctttccaatgcctagcactgaccttggtatgtggtcttttgtccatcctgtattgagattttagagcatagtaaggttcttctgattataagatgctgttaaatgactgttttaatggaagtctttggatacattatgtcttttgtgctctatcatttcacgattcaaagccacttacttcattaactggtcctttctttctagctctcttaccttgccatgcttactttgtcctgtaggttggaaatatcggtggaagagattttgctgaatcattagcacctgatgttcaaaagctacttgtaagtgactcctaaagatgagaggttatgtttttttcccaatattagtaaacatattatgttatggggcctctttgctgcagatttctagtagttgcagacctctcgtaaggaaaaaagcagcactgtgcctactgcgcttattccgaaaaaatcctgatgctgtcaacgtggatggctggtgtgtattaacactctgtggttactggttctttgattttacaagtgcatctttcatatattttcattatcatatacttccagggcggatcgtatggcacaacttttggatgaacgagatcttggtgtcttgacgtcttctacaagtcttcttgtagctctggtatctaataatcatgaggcgtactcaagttgtctacctaaatgtgtcaaaatattggaacgccttgctaggaatcaggacgttcctcaggagtacacatactatggcattccatctccttggctccaggtttgacttaactcggcttattcactcttgttaatagcttaaatattctttaattgcatcctttttacaattccgtgcattttaagcattttatgtgaaattagcttatgaaaatacaggcttgccccagctttggtgtatttttgttgctcagttaaaggtatcgtggatacttatatatctttggttagtacaggttaaggcaatgagggctcttcaatatttcccgaccattgaagatcccagtaccagaaaagctctctttgaggttcaatttttcttgcgtaaatctctaatatatgtatttgaattccctctcatggcatttcatggaaatttcaggtccttcagcgaatattgatggggacagatgttgtgaaaaatgtgaataaaaacaatgcgtctcatgctgtgctgtttgaagctctatccctggtaagttcttcggacagctggggttttgataccatgaattttactagtgcaccagtttttctccctcttccccttcacccctcctcaacggcctgtcaagacgcatttactcaaagcagaatactgatgtgtgcatggatgttttaaaatatattttttggttttgctggagaaacttcgagtgtttgaattgcttgcagctacttgtacgatattcttgtctattgtttttcttgtttgaaagtagaataaaattagatgctctgcttgaaggtttcggcgctatttctaggaggtttatcatggatagttgacttgagtgttcctaacagtctggcttagtgtgcaacctcctaacttgttaatgtgttttgatataggtcatgcatcttgatgctgagaaggaaatgatatcacagtgtgttgctcttcttggcaagtttatttcggtccgtgagcccaacattagatatctaggcttggtgagatcttgcataccacttcctgcatctaagcctagctggaacagttatctgttaagtgtttggtggtgcattatgtggcttctcatgatgcatttgttgacaaaattacaggaaaatatgacgcggatgctgatggtcacagatgttcaagatatcataaagaagcatcagtctcagataatcacctccttgaaagaccctgacatcaggttggtttagatttgccatctcagcatcagcttttctggcttgtgaacccagatcagtatctcgttactgttctaatttggaaccagtacgacaattttttcaatcatcaaattcttatgattcaatataacgtactttactttgtctctagagtagttgtgaatttaagatcatttcagtcagcattaaaattatttgatttgggtggtatatattaaactctaagaaaattgaagctgtatctaatacatattttttagtgaaacattatttgctgatttgttttcttgtgataaactataggtataaatatgtggtagcaatccgtatacggttacataagaaatatgatattattatattattggctggtgggtcagtactatttctatgacgtttgtcataaaaagatggatgagtaccacagtccattaggtcttagtcctatttccgttgcaaatggtggcttccgttttaaaaacatatagttttatttatattctcttggttcttttgcttatggtgtcagattcactattggttgaactttcctgcagtattcgtaggcgtgctcttgatttattatatgggatgtgcgatgtgtcaaatgcaaaggatatagtcgaagagttgttgcaggtaagtctttgaccttgctttatattaatatttccttgatttggagtctccttatgatttgtgaagtttaatagaaaggaaggattaagttgtgtagtgtttaagcttatgtggaacccaaaaatacattgcagtatcttagcacagcagagttttccatgcgggaggaattatcacttaaagctgctatccttgctgagaagtttgctcctgatctatcatggtaaggagaactcgatacgacgtatatgtacacttcattcatgcacacagatttggttacagtgacatgcattagccatttggtgtgaccattagatccttagacaaacaactggtcaaagatgttaattttgatgttttcaggtatgtcgatgtgatccttcagttgatcgacaaggctggggattttgttagtgatgacatttggtttcgtgtggttcagtttgttacaaataatgaagacctgcaggtttatatgattgttaagataaatatattgtttatcctatttatgacattcgaaagttgcttacaaatttctttgatccgacagccttacgccgcgtcaaaagcaagagaatatttggacaaaatcgcaatacatgagactatggtgaaggttgtacattctcgcttcccataacaattttttcctatattgcatattgcggataacaccttaaggaaggattgtttttgttttataggttaactgtggtggtaaattttagcactcggctgattctctgattttgaacagggcttccttaagtcagatcattggtctctctctcaagtaacttagggtttgaaaaacagcttctccagtcagcatcttaccctgctcctcaacactcagcaaatccacaaatagaaacgagtcgttgcttcggaaagccttgttcaaaatcagagaatcaaccaagtgataaaatttaccaccacagttaacctataaaacaaaaacaatccttccttaagttgttgttgcttaatttgggaatttagatttactaccttgctacacatgcggacacaatcttatatgtatctaaattgtttgcaaaatacaaattaacaatgcttaccaacaataaatatattttctttcggaatttcaggtcagtgcttatattttgggggagtatggtcaccttctagctagacaacctggatgcagtgcaagtgaactctttagcatcttacatgagaagcttcccacagtatcgtaaggacaacacaaatgctgaagtgcgctcttcttgtctttgagtatgtcttaaacggttcttcttttttttttctctcaggactcccaccattcctattcttctttcgacatatgcaaagcttcttatgcacactcaacccccagatccagaactgcaaaaaaaagtttgggctgtatttaagaagtgagacttgctaactttgttgtccttccccaatgttttacttgtcattttatgtactgttttttttttggtaacctaatcaagtttcctaaaagagttttgttttcgcagatatgagagttgtattgatgtggagatacaacagagggcagttgaatattttgaattgagtaaaaaagggcctgcctttatggatgtattggctgagatgccaaaatttccggagcgccaggtttgtaaattatttgatgattctatgaaagttactttgatgggacgtttgtgctaaacgatttgatgctggattttcttccatagtcttcattgataaaaaaggcagaatatgttgaagataccgcagaccagagtgccatcaagcttagagcacaacaacagccttcaaatgctttggttttggctgacccacagcctgttaatggggcaccaccacctttgaaggttccaattttaagtggaagcacggtgagagcttctctttgtcggcctcaattgacgagacattttcatgtgctttgcccattatatagcacatacttttatctctctgacagtctgttttttcttacatgtctagcaggaccccgagtcagtggctcgatctgtctcacatcccaatggaactttaagtaatatagatccacaaactccatcacctgatctgcttagtgacctgctcggtcctcttgcgatagaggctccacctggagctgtctcaaatgaacaacatggtcccgtaggggtagaaggagctgcagatgaagttgatggttccgccattgtacctgttgaagagcaaacaaatacagtggaggtattcttttcttcttcctttgctttctttggcataataggttttagcatcgatgaaattatgcttctacttttgctagctcattatttccctaggtttttttaaccatacgccattttctttctgtttcctttttctgtatttattactttgaaatggtaaaacgtttacttagatagaatcctacctgagatgttctatttcacagttcaagattcataataaaagaaaccgaaccatttttgtattacataatactatttgcatgcttgaattgtttcttatacagttttgttttctttaacagctgctcggaaatattgcggagagatttcatgctttatgtttgaaagacagtggtgtcttatacgaggatcctcatatccaggtttgttttttctaatctcttcttttatttatcctagtacgaagattgcagacagaacagcctccgagctttcttatgttccgcattttattgattgttggtattcctcagattggcatcaaagctgaatggagaggacaccatgggagacttgttctcttcatgggaaacaagaatacttctccacttacatcagttcaagctctgatactaccccctgcccatttaaaactggatctgtctccagtacctgatacaattcctcctcgagcacaggtattttcggtcaatttctattcatttatgcatattttactaagacgtgcaatttttttcatggttataggtacaatctccacttgaagtg

SEQ ID NO: 5310 - DNA, 17352 bp, Arabidopsis lyrata
  Intron number 6 from transcript 484511 (locus 484511) deri ved from phytozome v7.0 (chr-ID scaffold_5; pos 3592912 to 3610263 reverse strand)
acttgtttaatttcaaaatggatcaatcttatcaatccctttgtgcttggacattccaaactctattttgatagatgcatctccaacccatctctatatttgtctataaactctattttagaagcaaatttgctacaacccacttctattctcacctataaaagattttagagagatatctattttttcctttatatatagaggatcatatagaaaatctctattttttattctataaatagaattaaattttttagaggaaaaaatagaagaacacattggaggaaagtcggccatttcatacccaatctatacagtagtgttcaattcatacatgaaagtttactatgtgccaatacatacccaatcttttaacattttcaaatttcatacccaaacttatcaaattgtgcgaaatcacacatctcttgtctttgttgctgacgtggatgaaacgtcgttgaggacgttgatgacgtggttgccacatccttcatgacgtcgttgccacatcatcatcattttaaacaaaaataaaaataaatgttttttttctcttctcatttttttccatcactatcatccaacggaactgtgaaaaaaattatatatttgatgtaagaatttaaaatcttcttttcgagactgataactaatatttcaaccaaaactaatatttaaaccgagtttataaactccaaatttacaattcttctaaaaatcttcaaatcacttttagtagtaaacataaacccttacgatatatcttctatattaatcaaaagacatctttaagttgataacaaaaaaagagaacttaattacatatattactattagaataaattgtattttaagaacaaaatacaatttctcattactggtaaatggtaatattgtcattgtatcttagcttatatatatatatattcaaacaaccctaattgacaatgataattaatttatataaaaaaatattttgttcctaaaagacaattatcaaatgacaataaatgtaaaaaatttcttcaaagattattgtagggtttatatttttcattgaaagcaatttgaagagttaatatataaaattagccccaataccacttttttcaaaaagtttaggcccagtaccactttctgagcccacttagcatccataccacattcatcatgtgaaaagacgattctaccctccaacttactgagacaagaccctgcggttgatgggactctccgaattttctgtcgtccacagtctctctcctaacgcattggtaaccgttttcgtccctctggtaaaacaaagttgtccccgagtaaatacagatcttcgtcttcagctttttggcggaataaaataaagatcaagttgtctccaagtaaattcagatctccggctggtaaaaccatatcatctggcgatggacaatcaagagaagttgtccccgagtaaatccagatctctggctggtaaaaccacaacatctggcgatggacaatcaagagatctggacttattcttgggggacatcattcactctatttcataattattgtccatggtaaatgtaaactgcatttaatgcaatgttttgtccttcttctctgacacaaagttgtctttcagacaaagttgtccttctctgacacaaagttgtccttctctgacacaaagttgtccccgtttcccagccggcgtctactgtagctccttcccctgacacatacctgacgcacagagaagggcaaaatcgtccaagagttgcgacacaaacaccaaatgtggtatggatgctaaatccatttcaaatgtggtacatttgctaggatttttccaaaatgtggtacatttggcaaaattccctttttagaaaaagaattgcgaattttgagtttagaaactcggtttaaatattagtttcggttaaaatattagttataagtcttgaaaagaagatttaaattcttacattagatatataatttttttcacaattccgttggatgatagtgatggacaaaaaacatgagaagagaaaaaaaattaatttttatttttgtttaaaatggtgatgacgtggcaataacgtcatgaaagacgtggcaaccacatcatcaacgtcatcaacgacgtggatgccacgtcagcaataaagacaaaagttgtgtgatttcgcacaatttgataagtttgggtataaaatttgaaaattttaaaagattgggtatgtattggcacatagtaaaatttcatgtatgaattgaacactactgtataggttgggtatgaaatagccgactaaaatagagaaaactcatctctattatagagataaagctaaaaatagagaaatacattggagatggtcttaaatggtagtttctaattttttttttttgcatatcttgcccttagaatcaagatgctctccgcctccatcatccaaggaaaaaaacaccataattagaatccaagatgaaaacaaagttcaattaacaatctaagtctattgttgatttatacagacctgctcgacaagaagttcaaattccttctccaaactcaacccgtcctcatcacacctaacaacatcctcaagggaaaacatgtcaatagcttcaatctcatgataaagaagatagatatccatgtgcggaatcgatatctccctgcgtccgattgcagttaaaagagtggactttccacaaccatttaacccagcataccataacgccttccatagttaagctccaacatcaaatcgacaataaggtcattaccatgaaacgtcacagacaacgattctatctgcaaacagacttaaacaaattccatcaaaatcttttacataagaaaaacaggggattcagagtataaacaataaaacttaatatatatatcactgagtcatggaatcaataatcaagataaaaggctatcaactccattggaagaagtagcggcggcggatttagatgtggcagcagctttactacgtcttttagaggcggcaacagctttcttctaagctgccttcttcttgctaacacacccctctatggttagaacttgaatattttgacccatttctcctctattgattttatttgtgatcaggaactaacaaatgaaagatgattctttttctctaaataccaaaatgatgcataagtctggctaagaaagcttagtgactacggttcacctcatccctcaattgaaattagccccacatccacaaacaatatgcagaccgtaagaccatgtaagatagatatattacacattagaacacacttcccatgaggattctagaatctaatttatcaatacagccaatgagcattatgtgatgtaacaatttatgtctacttttttatttattagttatcataaatcaattaattctatactggaataaaaagataaacaaagtttaggcacctaagagagacattaacaggaaacgtatagttaaagaaaagaatattgtctgctccacaaaaacaggatacgcaaaactcttcaagtttctttttttttttttaattggttctgcaattttcaatggtctgtaacattaatgtgtcatagggaaaaatgagttatcttatcaacagaaggatctaaaattgatcccccaagttcatagtctatagactcagttttcaaatattgatgtaagaaagtgaaagtgatgtgatgctctgtttctgtttacagctagacaataaagcttttttggcccttgtttctcctaattaaagaatctgagcagttgagaaattaagggtaaaatccttgtttgaaaaatcgttaggcgctagtcgggcgttcggtatgagcctagcgattaatcgaaaaatcggattaaaatcgggaattaatcggagattagttttagggttattttaatattttaaaaatatattaatctactattgttttcaaaattgtagtaaacacataaaaatatattttaaggtaaatttttatgatttttttattaaaaattgtgacttttattaaaaatttgaacataaattattgtaaaacatcacaaatttccaattcaaatgtttaaataacaaaaaaagagttgttttatacttggaataaaaaaataatcgggatatgtaagaatacgcagaaaattatcggattaggcgggaattaatcggattaggcggagagtaatcagatgactgatttttttaaaggattagtcattaatcgaggcggagaggatgggcctagcgattaaacggggagtaatcgggctaggcggggatttttagaaaaggaggtaaaatgcttgggagagaaagtgacgtgtaagggagaaggatttttactagaatagagtgctgagctgtattaatcgttataacgctttcatacttacttcgtcaaaatcagcttaagtcatgaatccagttcggctcaaagcttctgttttttttactaattctgcaaaatttagtaatcacaatatcaataatcttcaatacatcaaacacatattgacaattctttcattcacatgatcttctaagaatggggcgaattctttaattcacagggacattctatcgaacacatagtgtgcatcattaattcttcgtcttcgttaatttctgaggaactgaaataagaaaaaagtgagggtgtcgacgagagcacgtctgggattgtgtcgatgattataagcctaagatttttaaagcccaagaattaaaaaaatatcaagatgggcatgtataaattaaaaagcccatcaagatggacatatataaatttaaaaagcccatggtatcagtaaatgaagcggaacatggtaggatttctaatggacgaaaatgatgagctgtattaattgttataatttgattggagaaatgtttttactgatgtgtcaagctgagaacatctgaaaaatctgatgtgtcaattcaggagagaaacaaggtgttattattatattgatttaaaaatattttaaagataacaaaatatattaaggtaagtaattgaaattaagtgttaaacaatgtaattaaaaataattttaaaaaatggaatgaattatctactcgagagttggagaaatacatcaaaatgattattataaaaaaaacaccaaaaagattattttgtcaaattaattcaatcgatgtaaattgttatcactaacaaattagtgatgaaaaaactcgcacgttgtgcggtattggcctaattatcttgatttaattttaattaaatcaactaatatctctattagtattgagttcttaacaaaataaaaattagttaacaacaattaaggtggagtaattcttttgactttcaaattgagaattcattctcataagtgtcgtattctcctctcaattttccgcatgttgagacattgtgtataaagctatggccattgtttctcatttgtatcatcgattaccaacatcataatctccttcatcttcttcatttctctaggttttcggaaaaccgatgtaatattaacagtcggtttttggtccaaaactattagaacaatatcgatagacccacagaataactcaatcggacctcttggaaatctgttgaaaagattttccaaattggttttccgattgttgttttttgacaatattccgtcgcattttccgatcaagagaatcctcttaaatccgtcaaaatattcgatgttgtatttccttcaaaattttccttacgcatttctaacgaaatagaaccgacgaatcaatttcggtatgaaatgacatgttttcttgtaatgtgattgactcacacagtgatttattactacgaggcttcttgagttcttgttccttcttacatcaaagttaacttggcctttataataaattagccaccataaaaggatggtcttaaacctagataaaccacataaattttgtatgcacaaaattatcaggatttttaaaaaattacagtgaagaagttttaacttattattaagtttgatatatgatgactgtaggagagtggtttagtaccacttagttcatccggcataaactaagaataaaccaaataactgaaaactctaaccaaataacgcaagcccgacatcgatgagtgatatggtataaattgcctaaagaacactctctcaaataagagatcgttatagcactttagggacaaattctacaaaactctctagttcacgcaataaatttatggtaatggaattaagctaaacaaatatataagaatattaaagattgcaaagaaagtaatcggttgtaagtttagttgatggagaagctagacttagggtgaatcttttcactaaatcatacaacaggtgagagtttatttaagaaccgttcttgaactcaaccctagtttacttaataatacctctcatattccagtacttcatcgcagtttattcatcgagcgcataatgcatattaccatgtagttaattattacctataaataacatattttaataaaaagaactatcaaagttatgaaaacggagaattatgatattaattaataatgaatgtttcttttaatttaacaatttcataggcattttttccggattatctctcatttcttcttctttttttagaaataataattcttgatatatagcaatttgacaattagattcataaaacattcaattaacaaagaaaaagaaaaactttaacaaaggcaaaacaaaatgtctaaaagtttaatggtagtacgcttcagcattttcttgattatattcttattgacttctacaggtaatatctagaatcgaaagagaaagattaagaagacaaagtttaagaattactctcttattaagctttagaaaactaactcaaaaactaaagcacacaatgtctctcaatctcaaatctctcacaaaactctctctcaactctaaggtataccacacgcataggtaactcttatatagaggtttataagacttatcctaatcaaactatgaattgtttagataactcctaaacaatatttcaagataagacctagagatttaatattatcttctcctaacttgtcgcacaagttatttcgtcaagcttaatccaacaatctcctccttaagcttgaagctcttcttcaccaaatcttgcactcccatgagctctctcatttccttgaatctcatcttccctaatggcttcgtaaggatatcagccttctgctcaacaccaggaacgtgctccacttcaatctcttcattctcgacacactctctgatgaaatggaatcttctttttatgtgtttgcttctcccatggaagacaggattctttgtaagtgaaattgctgacttgttatcaatacggatgatagctttcttggcttcagttcccgtaatctcactaagtatatcccgcaaccaaatggcttgtttagccgcttcagtcccggccataaactctgcttcacacgaggatagagccactacgtcttgtttctgtgaacaccaagagatagggccgtctcctaagtagaaaatatggccagttgtgctccttccatcgtcaggatctatactcaaactgctatcactatatccaaagagtcgcggtacttttacttgtttctcaaaaactagtccaagcgatgttgtcccttttaaatatctcagacattgtctcattgcagctccatgtgattctctaggactatgcatatacctgctcaaaacacctacacagtatgacaaatcaggccttgtgtgaattagatatcgcagacaacctactttcttcctaaaatccgtagcatcaatctctttctcgttttcagcttttgacaattgaagtccgacttccataggtatatgaaccgggttgcagtctaacattcctgtttcttctagaatcctttgagcatacctcctctgacttagcacaattctaccttcatattgagtcacttctatcccaagataataagttaacttcccaagatcactcatttcaaatttagtagccatctccctcttaaatttgtaaatgatagacttatctgtgcctgtgacaaagagatcatccacataaacggcgatgataagagagtgttctttctctgtttttcgatagaccgtaggctcctttgaacatttttgaactgaagttcttcaagaatttgattcagcttattattccaagcccttggagcttgtctcaatccatacaatgccttgttgagtctgtaaaccttctcttcgctcccctgcttctcgaatccatcaggttgtgagacatagacagtttctttaagctctccgtggaggaatgctgttttcacatccaagtgatgtatctcccaaccgtttgctgctgcgagatttacaagtagccttatggtttcaattcgtgccactggagcaaatacttcctcaaaatcaatcccatattgttgcacatatcctttagcaacaaggcgagctttatgtttgttaatgcttccgtcagagtttctcttcagcttaaaaacccatttgagtccaataggtgttgttccaataggtagatcaactagatcccacgtttggtgtttctcaattgaattgatctcgtcttcacaagcgttaagccattctttcgatccctttgcctccataaatttcttggttcattatttaggcacaaaagaagtgtttctccttcttcttcagcaagtagcacatagtcctcaaggtactttggcttgttgatttgtctctgactccttctctgtattggcgcattattttctacaacttcatctccttgctcttgctctgcaatttcaggtagaaatccgtggttctctgcttcctcatcatcgttttcatcattgttctcagttcctgtctgctctgcatcattattattggtctcttctccagttatgatgccatgatttccaaattcaccaagtgtaatattaaagttcccatctccttcttgctcagattgattttttctccaattccatcccttagactcatcaaatatcacatcccgacttacaactattcttcttgtttgtggatcaagtaatctgtatgcctttgagccgggctctgttcccaagtgaaccaacatcctagatcggtcatctagtttttttagaagctgcgagtcaacttttgcatagctgatgcagccaaaaatccgtaaatgatcgatctgtggtttctgcttcttaaagacttcgtatggagtcttatccgttagagcccttgtagctactctatttaacagatacgttgaatgtctcactgcttctccccagagatagtttggtactctcatgtgcttcaagatactccttgtcatctccatcatagttctgtttctgcgttctaccacaccattttgttgtggtgagtatggtgcagtaagatgtctctgaattccagcatttttacagtactcattgaactcatgtgaagtaaattcacctcctctatctgttctaaaggtcttgatctgagcccctgtttccttctcaacaagattcttgaaatttttgaatttctcaaatgctgaactcttctcttttagtaaaattgtccacatatagcgtgagtgatcatcaatgagaacaaagataaaacgattcccagcagctgtacttggtgttattggaccacataaatctccatgtactagttctaagatcttagaggctctgtatgaagtggcttgcggaaaggttcttcttgcctgtttcccaaagatacaggagtcgcaaatttctttctcaaacgtgacctgtggtaatccttgaactagctctctctgcttcatagatttgatggtctccaaatttatgtgcccaaaacgtgcatgccaacggcttgactcgctaatggatgacaagtgcaaacatgcattgtcatgaaaatccatacacactttgtataatctattttttgatcttggtgcttttgcaagtagtttcccttttgcatctctcattgtaagatatcctccctttaatctaatatcacagcctgcttctgttgcctgtcctaaactgatgatgttgctctttaaatctggaatataatacacatctgtcatgactctaggttcaccattcatgtcaataagtgagattgaccctttcccttttatatcgactcgagagtcatctccaaatctcactttccctgtgactgattcatcaattttcccaaagtacctcttgtctcctgtcatgtggttgcttgcaccattgtcaaggtaccatatgttctcttctcctgtgtttgtctcaaacttgcttggtatgcatcgtttttcattaagaaaaacaatctcatgcatcatgagctcatcggcatcctgagtattattagtggctaattcttgaacctcttgtagctttaagagacgatcagggcagtcaaaggcgaagtggcctaacttgtcacatcggaaacacgtaatgcgtgaagtgtctcttatcgtgttttgtcgtcctcttcctctgttaaagcgaccaccacgacctctgtttgtgtattctcgtatgttttgagtttctgaattcgcatacatgagttttgattgatcttctggtgcattctctgcaacaacaatcctctcttcgtacgttttaagtcttccaataatgtcttcaaaagtggtggtattaaggtttaatacctgttctaatgaagccactatatgaataaacttaggaggcagactgttaagaaacttcttaaccatcttagattcctcaatctctactccaagagaagcggattttgaagatatctctgccatctttcctgcgaactcatctattttctctgtatcagtcatcttgagtttgtcaaagttagtcataagtgtttgtagacgtgcttctttgactcgttcagctcccacatgtctcgactttatagcatcccaaactttttttgcagaatccaaatcacctatctgcagaacaagtgcctctggtattgactgaaacaacaacgcgatagccgtgttgttcttctttttgtctactacttctccctctgtttcaggttcaatagcttcccatacctcatgacatcttagggcagccttcatccttaacgcccatacggtataatttgcagtgtttagcatcggacaaacaatagatgtagatcctcctcctttctttggatctaccggaaccagtgcatcttccgccattgctcccaagaagatcgcaacgctctgatacaaaatctagaatcgaaagagaaagattaagaagacaaagtttaagaattactctcttattaagctttagaaaactaactcaaaaactaaagcacacaatgtctctcaatctcaaatctctcacaaaactctctctcaactctaaggtataccacacgcataggtaactcttatatagaggtttataagacttatcctaatcaaactatgaattgtttagataactcctaaacaatatttcaagataagacctagagatttaatattatcttctcctaacttgtcgcacaagttatttcgtcaagcttaatccaacataatatatatcataatttataaatctctcaaaaattttgattgtttgcatttttgtttaatgtatatctaatggttttgtattatttaaacttacaacatctagatctacaagattttttttcatttttaaatgataaatgcttttttgttaaagtaactaatagatgcttaatgcaaccaaaataaaaattgttatttgcggttaagttttggtgtataattacaagatatacaaaaattgaatatatggaacttctatactcatttaaaattcttaaggaaatttgttaaaattctaattcagctgtaaaataaatcactacaaggagataaaatcctaaataatattgaatcttctaacaaatatattttctttgaagaaaacctaaaatatgcatgtataatcaatatggtatgaatatttgtaattgattgatatttattctattaggaaaagcaatgaattatcattggtgcgataaacacccaagcaaaacttcgccgccagggatgtgtaataagaaagacggtgatgtattgtgccaaatgaattgtaatagagaagggtggggtggaggacgttgtaatttgaagggaaaagttaaagtttgtgaatgtactcttgttctgtcttgcctaccccaccacaagaggccaccgaatacaccgaagccaccgaagtgaccacatacaaagttttatttaatttatttaccattttttaattttatattttaaataatacaagtacaacaacagtattgttggaaatagtttttgaaaaaatagttttgatcattgttatggtggattttctagtggagacgtccatcggaataatcagatttcggcaggaatcgttgctgcgagcactacacgatggtgtattagaatgacaaaaacgaactttgtttgaatgataaatggatttttaaaataagtagtttaaagttaaatggcatattttgtaaatgagaaaaatgtcgaaaaaacacgaacttttaaatttgggaccgaaaaaacatgaactttcgaaatgctttttaaatcataaggtttagtttgacttttgataaaatggttaagtttcgttgacttggccatttcggacatgtcgttaaatttccgttgacgagacgatgacggagtaacttttcgttagaaatttccgttgaatcgaaacgacgtcgttttgaaaacaacagaacgacgtcattccagtgtaaaataaaacaaaacaactacgtccatgaagaatcaaactgctgaccacttgagcgaatgagagactctaaaccatagagctacgataacattttaaaattataacaaacagagtgtatatgcaattaattaaaaaacaatatacatttaattaaaaataacaaaactaaaaataaaccagtaaccaaaaatacaaatattaaatgtacttaccatatatatatttttcgaaattttaaatatttaattttatatataaaaaaaattttgttttaataataaccttgttatcattctgatatgttatatcaaaacaagttggttttgtaaaaaaaaaaactctttgatattcttgataaagaccccaaatctcaaccatcctcacttcatccaaatctaggcgtaacaattctctcatcttttccgtatgagctcatatcccaactaagtcgttaaatctatttgtctcatgaattgtttcagtttttttgaaacatcagtggcgatcatggctgcttcattattactaccgaatgtgtgcatgaaattacgttagaaaccagaaaaaactgacctagctagagaatagatatatgatgtgagtatgacctagtgatgtatacccatagtgtgagaaactattaggatatatatcaatatatttacttagattcgattctatcaagaataggcaacttgtatgtgtataaatactcttctcttctattgaataaaggcaagacattctaaaatatttcagaaactatcctcgacatgtatgtataaataagaaaacacttgagagtatgatcaatgctaaagcgggcggatcagtattctctttagaggatgatcgagttactgacctagtgatgtatacccatggtgtgagaaaccaagtctggtatttaattatccagcagaaacctgtccatgcaagggtcaaaatccttatcctaaatcttttttttttttttttgctaagagagtaaatatcattaatgaaaattaggtgttacaagtggaagacctaagcactgaacgttgacaaaaaaagtttaaaaaccaagggaacaatagacagactcatacatgaaaagaaaggtccactagtggagccaaagaggcatgagattcctaaacttctttagatgtctccttgcagtgatcgaattgatgatttgccggtcaatatccctaaagatggtaagcggcggaatcttgatatgattgtgcttgtagttatttctctgtctccagacattgtaaaccagagcatggacaagcaagagtcgcaattttgtaggagaattttgatttatcacctttgtccactctaacattgaatcccaattgcagggcagtcttccaggcaagccaagtcttgagaagatagatgcccaaataacctgagtataaagacaatcaataaagatatgcagccgcgtttcgcttgctgcagaacaaagatagcaagaatcagtaacctgaataccccaagaccccattcgcgctaaagtgggcagtctatccagatttgcaacccagaagttgaaagcatgactaggcgtgtttcctttaaaccagacctgtgaggcccagtccttaagagaaacccttggtcgaagtgcttcccaagtagtactcgctgtaaaacctccacagcacttgtcattcacataccaactgaaagagtctatttcatcagattcacttggtaaggtgatgtttgagagataaacgtgtagtgacagagcacaatcagatctcggtggtggcaaacgccaaccatttccattacacacatcagcaactcttgcattaagcggcaccctaaagctgttgggaccattgtctctgatggctttgatgagagggcccaaaggagaccaactgtcataccaaaaccaagctgtagagccatcccctaagctgcactttataaacttctccgccaaatttctaagcttgagtaaacttttccatagccaagagtccgcacttttttctttcaaggcccagaaactaaccgaggttaaattatggtggtgatgctgccacgctacccataaggatccactgtttgagaaaagcaaccaaataagcctgaggcatagtgtggtgttccaaacaaatagcttcctaagacccaatcctccttcattcttcgggaggcaaatagtggaccaagaaacctttgcctttttgtgattttcaaccgtgccagaccacaaaaacctagcacaaagggactcaatcttttttatacaacccttaggtagtaagaaagtagacatccaaaagttgattgttccataaataacagaggcaataagctgagttctccccgcaaaagaaagagacttgacatcccatgttcggaatttattagagatcttgtctaacagaggagcgtattcattgatccacaactttctacacattagcggcaaaccaagatatcttacaggcaggctgccaataggaaaaccatagctagtaatagctacattttcagaagaggagagactagcgtggaagagttgcattttttctcggttcatatgaagcccagaccaacccgcaaaatcatcaagagtctcataaataccatgaagagaagagctactcccatcgaaaaacaccatcacatcgtccgcaaacatgagatgggaaatttccaaagcagaagtcttcgggtggtaggagataaagccagaatcatatctagaatgcaagagcttggagaagacttccatgaccaagacaaaaagatatggcgaaagcgggtcgccctgctttaggcctctagaacttttaaaaaacccatcggagtgcccattcacagagatagagaaggtgggagtgcaaacacattctttaatccatcctatgaacttaggaggcaagccaagagcagtcaaaacagataagagaaagtcccatcttactgagtcaaatgcttttctcaaatcaacttttagcattgctctaggagagatgtattttctgttgtacccttggacgatctctgaagccagcaagacattttcggagagaaggcgaccagataagaaagccgactgctcatgggagatcatagaaggcaggagcgattggagtctagaggccaacagcttagatatgaccttgtagaccgtgttcaaggaggatataggccgaaaatcagacaccttcgaggcattgtgagtcttggggattagcagaagagaggtagcatttcattgcttgaggagggttccagaagagaagaattcagcaactgcagaagaaacctcagctcctacaatactccaacaattcgtgaaaaattctgcagagtatccatctggtccactagatttgttctttggcaaagagaaaaaaacagctttgatttcctccctagagaacacagaatcaaacttacctctgagatcagcagagcattggtaatttaacaatgagcagatatcctcgtcagtgccggcccgatcaatttgggtgccctaagcaaaattaaagcctataaatttttttttttttaaattagatttttacccttaaaaaaatgttgtagttgtctctaaaaacccacaatatttttaaaaggccctacaaaaattattgtatataagaaaacttaacaaatttttaggtaaaaaggccctcaaaattttgagaccctaatcggtggcttcactggcttgccctctccgccgggcctgatcctcgtgaagaaacagaggagcagactccacagtgcctagcagctgtttgaagaacccaatacaatgatcctggatttctttctgagtctcaaaacgatttccgtcatcatcgaaaagaaagtgaatgtggtttatagcttgtctcgtcgaagccatacgatgaaagtatgctgtgcttttgtgaccctcaccgagccaggtgatccttgatttttggcagaagaaagactcctcagccgaagctaaaatttcccatttcgaagtcgcttcaatctctagaatagcattagacggagagggatcagtgagcattataatctgcagatcagagagtatttttcttgcttcatgcactcttttttccaggtcagagaagttttatttgctaaagtttcggattactttcttgagctccctgagcttgaaagatactctgaacatcctaaatctttgtgcattgaacgttgccatgagtgtaggaagtgcttaaatgactctgaaaacaagcccttctgttttgcttaaatgactgaaaacaagcccttcaaaggtctagccagttacaagagttcgtctggtgtcaaaacccatgactttgatatcataaactaattgtaccatgttggtaacttggtgatatatcatattgaactaacaataatgcaataatgtctatatatcatccttatgaaaaaagattacatcaaatttattcaaataatttcaagaaataaatattaaagtacacatcctacttgcatagacttgaattcatttgatggaaaaaaaaaaaaatagacttgaattcattttcaaa

SEQ ID NO: 5311 - DNA, 10000 bp, Arabidopsis lyrata
  Intron number 5 from transcript 891488 (locus 891488) deri ved from phytozome v7.0 (chr-ID scaffold_7; pos 21305577 t o 21315576 reverse strand)
acgcagaaggtttcaagttctctgaaattgaaaacatctaatcaagtaacccgaaactcgtgacaatgccggctcttcccctgtagctcaagtccttaaatgcaaacgaatgtgtataaggaggtatggagattaattgggatttacaaaaaaatctgtttgtcttgcaaaacctttgtgagtttgtgaatttgaatgagtcacacctcttgtctataagcttagtatatgactgaatgagttacacatctttttctttaatgagtgaatgagtgatacctcttggcaaatctgttaagtatagacctcttgtctttaagctttgttattgtggatatggtaacacgctaatactcttagagtagagaaattagtaggagattaattgggatttacagaatccatgagcaaaaatctgttttgttttgcaaaacctttgtgagtgtgattagtagtagacaaagcatatcccaatattgtcgctacactaggttctgtacgacagtatgagttataccgttttggtttaatagacaaagccttgtatttatttcttaattagctgtttaagtactaagaaaagtcttgttattttgtgatctagttagttagctgtttaagtactaagagaagttttgttatcttgtcaacgcattcgagaaaacttgtgaaggacatgaagcaaagctttgactgatgagcaaacataattgtgtacatttctgattatccaaatgaccaaatctgtagagagactggaatatctgatcccctagctccaattttcttaattcttcacagagagttgctttcattgttctgctacataggcttattcagaacaattgcaaactctgtgataactttttcaacatctcttttactatgaaactaatagtagcagcaaccaaaccaaaccaataataaacagcaaatcttaacgaaatcaaaccttatggatggatggggtcctcaccgactttgggggaaacattttgtttttgtatttttctatacaaggaggacaaagtcctttgaaatatcagttccgtagatagcttatccaaaacagttgtgataccttcatcgtccatatcaaagcttaccatatctttcatggcttcttctccttcttcgtcttgctcgcatcaagagatggtgatgcacccaatttggcatcactatctctactccattaaaaattgacgtttattggcatctccgtatctcggataactccaaccaaccaatttggaaacccgaaatatggaaatgccaataaacccgaatttgatccgttttaaactaatagtagcagcaaccaaccaaaccaacaataaacagcaaatctttacgaaatatggaaatgccaataaacaccattttcttaatagaaactgaagacattctcaatgtactaggaaacggaacagtaagtttttacatatatcttactgaattttgatatgtccaagaccaagtagtagttggtttaatttagtaggcgagcctttgaagagaaatcatacaccatttgaaagccaaatatgtctgcttacccggaaaagaactctctgtggagtacactcacaaagcgagattctgttcgaattcacttgctcagataacaacaagattattgagtgtggtatacagatcttgaaagaaggatatgatgaatatttggactgtgaacctgaagccgtaggcaacattggctaccaaaatgttgagaatgtggataacgctaaacacacaggttgttggtctaagaaaaagaagacaaaaagctccaccgtgaaacatcactttatttttcacactaagttgtcccagaaacacagaagaatcaaatgcgattgaggatggagccgctcggatctctaaagatgaaaatgtcacaagcagtaaatatgtcagatcattgagtgcagtgcatggatttgatggataaaactcagagtagcagcaacgaaaagtcttaaaaagaacgtagcatccacaaatgcagaaaactctgtgtcacatatcgatcttttggagtccgttgagtgtcgaaaatgtaagcaaagtgtgaatcattgaagagattctattgttattcctgcaactgtgtgaaactagacgaatcaagaagagtaatcccgcatgtctttaatcagatgtgtcaactcgttctctatcagaacatctgtttttataatttggtggtgacttgtatcatcaacaaagcataaatatttaacgaagtggatgtgaccatgagcaaggttctgttcgagttcacttactgggacaatgagaacaagactattgaatgcaagcagcaccattgcattagggttagttattgtcttgtgtatatttgctttccaggtaagtaagaaactactgttgtattcaatagatggcttattcagaaccattgtaactctgtgataacttctcttttactaagaaactgagtgtagacgtagtagcaaagaacagaagctgagaccatagaacattaagatatatatagatcaagaagaagcaacatagggttttgaggccaaacctgaaatgaagatcctttatgatttaaggatcgatcaatcgagcatacaaaagcctatcatacaaaaaccaaaacagagtaaatctccgacctgatcatccaaataaacaatctcaaattgaaaaaattgatgaagacaaaatcaaccgttgaaaaattggttatgtagagtgtctctcaccgatcaatacaacagattcaaaagagaatttgaaagcaactgaggatcagaagaagaagaagaaaaaacggagttgtgtttttcccctgtttttgtgttcttcttggttgctaagaaaatctctaatttctttttttgtttctaaccagaaaacctaaccagaaaaccaattttgatcgaattgaaaaggccggtttagtttttcaaaccaaatttacaattggatatcgagagttttaagatccctaattttgaatcatgtctggttctttcttcttcctccgatcatcttctcaccgagtctcatgcttcagctctgagctcatctctacgaaataaaattccgattgccaaaaattcaaaaccttatgaggttctcaagaccatgaggaaacactcttatgggtcatcgacgactttgagggaaacattttttgtatttttctctacagagagacaaatccctttgaaatttcaatcctctcgttacgcgttttcttcaattatataagcgagagacttgttttctactccatagattgcttatccaaaaccattgtggtaccttcttcttcaatctcaaaatttaccaatctgtttcatggcttctttttcttcgtctcgtatgaagagattccatgtcttttcgagctttcacggtccagatttccgtagagggtttctcagtcatttacactgtcatttcgcaagcaaaaggaatcacaactttcaatgatcaggagatcaagagaggccacacgattggacctgagctcgtacaagcgattagagaatctagagtctcgattgtggtgctctcgaagaaggtacgcttcttccagctggtgtttagatgaattggctgaaatcttgaagtgcgaagaagctcaagagcagattgtgatgaccattttttaagacgtttatccgtctgatgtacggaaacgggagggagatttcgggagcgctttcgagaagacttgtcaagggaaaactgaggaggtgaagctcagattgccggggacactctcttaattggtatgtaaatcgtctcttaatgaacttagttatcttttggaaatgcttcactttaaggaaatttagactccttaacatgattttgtttgcatatgttagggctaatcgcctcttattgatgtttcaaacagactgaatggcttattggtatgtaaccattgctggggaacactctctcaattggtatgtaaatcgtctctcttaatgccttggatgcgatgacgtgaagatgattgtaatttggggtcctgcgggaatttgtaagactaccattgctagagctctatataaccaactttgtagcgagtttccacttagtttgttttatggggaacctcaaaggaagttataagagcataatgggtgttgatgactatgattccatgttgtgtttacaaaaccaacttctgtccaagattttcaacaaaagggatatgaggataaataatttagatgcaatcaaggaatggctacaagattcatgagtgcttatcattcttgatgatgtagacaatctacagcaatttgaggccttggcagctttctttgtttggttctggaagtcggattatcattaccactgaagatagaaggattctaaaggcacatgagtttatgatatctaccctgttggttttctttccaaagagaaaaatcaaccgttaaaaaattggttatgtagaatgtctctcaccgatcaataaaacagattcaaaagagaaataaaaaagcaactgagaaattcagaagaagaagaagaaaaaagagttttatttttcccctgttttttcttcttcttggttgctaagataattaagagaaaaacaaaaagttgcaggaaaatgttgaattttggtttggtgtgattttgatcgttgaaaacattttccgagttcttcggagtcccatatataaaatacactttttaataactgttaatcgcatatagtatcaatgttatggccttcacgttgcttgcacatcccaccatgtaggtgggatgataaaattttagcgcgatttagataaaatactgttttgaacggatttgttgtgagtaggggtgtcaaaatgagctcgcaactcataagctggctcagctcagctcgatttttcatgagcacgagctctgttttttaggctcatttaataaatgagttatgtgatcgagctttttttagatcgcgagttatatgagcgagatttaatgaacatgagctcgactttttttagatatatatatatatatatatatatatatatcttttccatttaaattaaacaaaaatagaattattcttttagaaaatttgtgtctttttacatattaattttagaagataattaagtaatatagaaataatcttttaaaaaatttatcttaaccgtttcccaaaaaaaaaaaaggaattatcctatttagatattatataaaacgtttacttgtagatgaagacaatgaagatgttgatgtaggatcatctcaagagcaagactctaacacggaataaattcttgatcattccatatttctattatctttaattaatttaatttaattgttaggatttattatttgagattttttttttgtttggcgttttgaaattatttttttcttggatttatttccattatttaactttagaattaattatgttattggatttattttatttttttaaaaaaaattacaatatttttgttattatatttatttgttatgagctagctcctttaactcgtgaccaaaatgatctgagtccgagtttatatattgaagctcatctaataaatgagctgagctgagttagctcataaaatgtccgagctcatcatgaactgaaccgagttgagcgagctagcttattttgacacccctagttgcgagtatcgggaaaaccgaaatctcaggcttggcccgtttataaagttaagggcccaatatcaggccctaaaatgtcaaattcgtaatttctttgataacttctcttttacttatgaaactgagtgtcctccacaccaatgagacagaagctgttaaaatagaagccacacgttatttcaatacatccactacacacaaaaaaaaaaaaaaagcagaaaaaacctaaattaaacatccaaaatcatcattcccaaaagcagaatttaattcgatattactgttattgaatttaaaacaaataaaagacccggtttacttttcaaaccaaatttacaaaatgtggtatgtggttgagctcattcgaaacttcgtgattcgtcgtctctaccaacttgactgtcggatacttattataactctgtgctctctaccaacttgactgtcggatacttattataactctgtgctcatttcacatggcaaagctttaatgagtgattgtggtcctcgacgactataaagaaacacgtacgcttttgaaatttgtcctcttctattttgtatttcttcaattacattccaatttcttcgaaatttctcttctctttacgcgtttttttgcttcactacaaaaaccaaaggagcttgctcttccaatcatacattcttcaataccattctaattaagaatactatcttcaagttcaagcatttgtgatctctcatggcttcttcttcttcttcctctggcatcatgagataccatgttttcccgagcttccatggcccagatgttcgtagagggtttctcagtcatttacacgatcacttcgcaagcaaagggatcacgacgtttaaagatcaggagatcgagagaggccacacgattaaacctgagctcgtacaagcgattagagaatctcgagtctcgatcgtgctgctctcgaagaagtacgcttcttcgagctggtgtttagatgaacttgtggaaatcttcaagtgcaaagaagatcaggggcagatcgtgatgaccatcttctatgacgttgatccgtcgagtgtacggaaacagaagggagatttcggaaccgcattcatgaagacttgtgaagggaaaagtgaggagacgaagcagagttggagcaatgctttgactcatgctgcaaacatagaaggagaacattctcttaattggtatcttgtttttatcttcttcattttttttttttcttttttttttgtctctgaatgaattagtgcttcaaatttttgtaatttagacccaccaacatgattttgttttgcttttgttagggctaatgaagcagatatgattaaaaagattgctaccgatgtttcaaacaaacttaatcttacaccgtcgaaggattttgacgggatggtgggacatgaagctcacttggcaaaattgaactctttgttatgcttggaaagtgatgaagtcaagatgattgggatttggggtcctgcaggcattggtaagtccaccattgctagagctttagacaaccaactctctagcaattttcaacttaaatgttttatggggaacctcaagggtagtcttaagagcagaatgggtgttgatgaccatgattccaagttgtggttgcaaaaccaacttctgtctaagattttgaaccaagagaatatgaaaatacgtcatttaggtgcaatcaaagaatggctacaatatcaaagagtgctcatcattcttgatgatgtagatgatctagagcaattagaggtattggctaaagaaccttcttggtttggttctggaagccggatcatcgttaccacagaagataagaagattttggaggcacatgggatcaacgatatctaccatgtggattttccgtccatggaagaagctcttgagatcttatgtctctctgctttcaaacaaagctctgtaccagatggttttgaagagcttgccaataaagtagcaaagctttgcggtaagcttccattaggcctttgtgtcgtgggttcatctttgcgtgggcagagcaagcacgtgtgggaacttcaattatctagaattgatggaagtcttgatggaaaagttgaagacattttaaaagtgggatatgacagattgtcgaagaaaaatcaatctctattccttcacattgcatgcgtcttcaaccatgaagtcgttgataatgtgatatctgtgctttctgatagtaacttggatgttaggaatgggttagagaccctagccgataaatctctcgtgcataaatctacctatggccgtatagtgatgcaccatctactacaacaattgggtagacagatagttcatgaacagtctgacgagcccgggaaacgtcaatttttaactgaggcggaagagatttgtgatgtactgacaaccgaaacagtaagtttaagttcttacatgtatattgcctatttttagtgataacagtttcatcagtcttctttggcaatattattttgtagggtactggatctgtcataggtatatcatttgatacatccaatatcggagaggtttctgttggtaaagcggcttttgaaggaatgcgtaatctccgattcctaagaatctataggagcttcggctcccaaaggcacgtgtcgttggctaagtccgttcggcggaagcgtcgtccaatgcaaataccagaagatttggattatttacctcttcttaggttactacattggaaacattacccaagaaaaagtctgcctttaagatttcagccgacacgtcttgtggaactccatatgccatacagcaaaattaagaaatattctttctagtgcttctaatgattcaatttaaataagaaatatttctcatttaacatgcagtcccttcctaatctcaagatcatagatctgatgtgttcccgtcaattgaaagaaatcccaaatctttcaaaatctactaatctcgagacattgacacttgcgaggtgcacaagtttggtggagcttccctcttctattaagaatctacaaaaactaaagattctaaatgttgattattgctctatgctacaagttattcccagcaacatcaacttagcatctcttgagagagtagacatgattggttgctcacggttgagaacttttccagaaatctccagtaacatcaaggttctcaatctcggagatacagatatagaagatgtccctccatcagttggatgtttgtctcgtctttataccctcaacatttgcagcagaagcctcaagagattgacacatgtaccactctttatcactaaactatttcttaatggcagtgatatagagacgattccagattgcgtcataggtctcactcgtctagaatggctttctgtcgaaaggtgcacaaaactcgagtcaattccgggtcttcccccctccctcaaggtcctagaagcaaacgattgtgtatcactcaagagagtacgcttctctttccataacccacccaatgtactccaattcaccaactgtttgaaactggataaagaatcaagaagaggaatcatacaacaagcagatttcactcacaaagcaacagggagatccataaccatccctctggctccgggtactctctctgcttcctcaaggtttaaggcttccattctcattttgccagttgagtacgccggatatgttacaagaagaggaatcatacaaaaatcaatttacgattatgtatgcttaccaggtaaaaaaatccctgcagagttcactcacaaagctacagggagatccataaccatccctctggctccgggtactctctctgcttcctcaaggtttaaggcttgccttctcatttccccagttaaagactacggatatgaacgtataagctgtagtataagaagcaaaggaggtgttacagttcatagctgcgagcttccattttatgttttgagttttcggtcaaaacatctgtttatagttcatggtgacttgtttcgccaacgaaacaattgctatgaagtggatgtgactatgagcgagattacatttgagttcaaccacaagtacatcggtgacaagattatagagtgtggtgtacagatcatgacagaggaagctgaggatagcagcagcaggaaattggacaactatgaaactgagagtagcagcagcgaagtggacagccatgaaactgagagtagcagcagcgaagtggacagccatgaaactgagagtagcagcagcgaagtggacagccatgaaactgagagtagcagcagcgaagtggacagccatgaaactgagagtagcagcagcgaagatggaaatggag

SEQ ID NO: 5312 - DNA, 350 bp, Arabidopsis lyrata
  Intron number 3 from transcript 471948 (locus 471948) deri ved from phytozome v7.0 (chr-ID scaffold_1; pos 7307134 to 7307483)
tgtcacaggtagtataaaatttcgttgatttaatcttgataattaagatttaactctattattcttcgtcactaatgatttaactttaagcatcaagataaatattaataagttggcgtgatgattgatgggtcgctgatagaaaactaattgacaatgtttggattgtttatgggttaagtaatcatattttggagagtggaaacactactcttgtttgtttgctttcacttttctattatttctagaggatactatggattaagatgctttattcgaatctacgaataaaaaatgactctgattattttgaatgcagaaaacattaatcgtttggggagacaaggaca

SEQ ID NO: 5313 - DNA, 21220 bp, Arabidopsis lyrata
  Intron number 2 from transcript 897440 (locus 897440) deri ved from phytozome v7.0 (chr-ID scaffold_5; pos 12478758 t o 12499977 reverse strand)
tataacgagcttggtcctggtgaaggtttattttaccaacaacgacgtgcgtatggcacaacagaaattataaggtaacatctatatccatttacgtgtatacgtaacaaaaacatagatctaatatgttttatatttatatttatgttcaccattaacttcaagcgttttttaatcagaagaaacaaattaaacgtaacgggaaaaaaattccattccattaccgtttttacaatttgcaaaaatattgataaaaatgaaagctttgaaatgatttttacgtaagcacaaacataaatgccatatttgaacgacaaatcggaccataatctgatttaactatagatatgtaaaccgacccggaatctgattaaaatacatgatttaaacctatagctacaagttgatataatattttcgttttgttggttagatcggatcttcaaggtaggttctggcttccgttggagataaacatattgttgacaggagtaccatccacggctgcatcaatcgatatctctggtgcatcaaacaagccacctgagtccgtcctccgtaactcttggaccggggaaggcttatcattagttgaccctactcttccttcggaaggagttccagtttatttggctatgtatttctcagagcctcttgagttgagtgtacgatcgttcaacatattatatggcggtaagcaagttggtaaaggaccaattgtgcccgtgtatggaaaagccacgcaagtggtcgtgagagatgtggtggctagctcaagctccgagctggtgttccagtccacccctagtgcgctgttaccgcccattataaatgcgttggagatttatgtgataagtacgggtacaagtggaagcggaggcggaaacaaaagcggatcaggatccggtggaggtgctggaagcggaggaggagggtctaagagtggcggatctggaggtttgttattttggagatgcattttcagtgattagtctaggttttggtgtaaaatctcgaattaccaatatgaacaaagttattagcatgtttggatcatatagtcacttaatcttatagaaataaacttaatttttgtgtgtttaggctctggtggaactaacaatggaggaactggagggagcaatgatgtgagctcaggtttgtatttggacttctctatccattcaacttgtgatcttgataggtttattagtttgatgaaagctcctagttccattacatgtaatgaaaataacaaatcaaatatttaaaacgtttattatcccttatatgcaagtaaaaaaacaacatttgatattgggtcaggtgggtcagccagtgaaggaaagaatagtaaactgccaactatactcggttctgtatccgcagtaatgtttgctcttatcgcatatgtgttcattgctgttatcttagcgaatcgtcgcaaagcaaggctacaagccctggctatacctacgtcaggtatacattcattctctttatgtatttggtgtagtttttgtatacatattgagtgactaaattatatccatattttttctacattaagatatatgtattttcggtcttgactaatatctatgtactctagagatgtgactagttaaatgttttgatgatagtggctcatatggctactggatcatcccctctattcggacaacaaatgggcaacgactcaaaccagtctacatatgagtcagacatgggagatatcaacgacttgattggagtaaatcagtcgtatgtaacgcaatgacattaaacatcatgtgaaataaatagtttactctttttttttttttttttttttttttttttttttaaatagtttactttatattgtcatgatatcattacttcttttgtttttcgtctttataagattttgattcttctgatcgtgaatggtcatgtatccgcagttgtataatttcgtatcgctatttgtttattatggttgaaagattaatgagagtgctttatatataaagaacgaagtaacatgaaatatttctatcattttggactgttctttacttttctgttttactgcattatgtgtacaaggattagtgaaaagaaaatagtttttcatttatttatttattactgacagttcaatggatagtgttggaccggtacttttatcgtatatatatgcatttcaatatagattcatattaaaaatattaattctgctaaaatatagtttgggacaactttgagaaataatctagaattatataaaactaagttaaaatttagatctaaattctaactcttaaacacaaagcctacaaaaaaaaaactcttaaacacaaagcctacaaaaaaaaaactcttaaacacaaaaattttaaatttaaaataaaaaatgattacaagttaaaattgaaatcctaacatacatgttgatacctcgactagaaattaaatataccaaaccaaaaaatcaaatcatccaatagcggatggtgataagaatagaagattaagaaggaaatgtgtcgacactcatgactagaaatggagagaaaaggtatgaaatgtattgattaaaagttgtgtttaaaactttacaatggtggctacaacctttatatataaaagagattaggttaaaatgacatagaggagactggcaggtcttagccaggcgggtgtcccagacaggcgggtttatacttgtccctgccagtttggatctctttgcctagccaggcgggtgtctcagaccggcggtttctcaatataagtaacttgtgtttaatatctaactattgatttagttagtattaaacaccttcttgattaacactccccctcaatttatactacaatattcatttgtataaacttgacacttatgctagtaacctcattaaaaacctaagatcggaaaaccacgtgggacaaaaccgatcttagggaaaaagagtattactgacataagtggagaggtatctcaaggatgtgtgaggtctacaagcccaagtttgccatggataaattcgcaaacttgggtacttgctgccttggtgaatatgtcggccaattggtctaagctcttggtgtaacaaggtaagatagtaccatcttcgatcttctcctgagtcttgtggcagtcggtctctatatgcttagtcctcttgtgaaacactgagtttgtagcaatatggatcgccgcttgattgtcactatgaaaggtgattggagtcttatgctcgatcccaaagtccttcagcaaagcctttagccatgttaactcgtttgtgagtttcttcatagccctatactctgcttcagcactcgaacaagagaccactttctgcttcttcgacttccaagtcacaagattcccaccaatgaatgtacaaaagccagttgttgattgtcttgtgttgcgatcgccattgtaatctgcatcacaatatccaacaatttctgtgctagagtttcttcccatccatatgcctttgccaggacttcctttgatgtatctcagaattctctccaccaagctccaatgataaacagtgggctctttcatgtgttgagctacctgattcacagcaaaagacaagtcaggtcgagtatatgtcaagtatataagcttaccaacgagtcttcggtattgttctgggcaatgataaggagtgtcatctttctccccctttcgattgaccttgtaaccttgctccaatggtgtatcaactggtttagctccaagcttccctgtaagttttagaagatcaagagcatatttcctttgtgagagaaacagtccctccttggatctacacacctcgatccctaagaaatacttcaaaacacccaaatctttaatatcaaaagccaagtgtaaagaagacttaatagcttggataccttctttgttactgcccgagataatcaagtcatcaacatagatcaacactactacgattccttgattatcttgtttagtgaacaaagtgtgatccgaatgtgaccttttgaagccttctctaagcaaggttgaactcaacttttggtaccaagcttttggggattgtttgaggccatatatagcttttcgaagtcttaaaacctttcctggagctactgtatcctctaagcccggaggtgatgtcatatacacttcttcttctaactccccctgaagaaaagcgttcttgacatccatctgccacaattcccaatccaaattcaccgctagagaaaggacaacctttaccgtgtgttgcttagctactggcacaaaagtctctctatagtcttcaccataggtctgagtaaaccctcttgccactagtctagccttgtatctctcaatttcaccatcactcttatactttatggtgaaaacccattttgaactcacacacttcttccctggtggaagttcttcttcatcccatgtatggttccttaccatagcctgaacctcatcatccacagcattagtccattcctttatttccttatcttcttcatagctttgtggtacaaattccacatctagtttactgataaaagccttatgttcttcgggaagaaggtcaatcgaacatgtcgcttgaattggatgagccacgacttggcaattatagtggcacttcttcgatttcctttctcttgtaccccttcttggattctcccgagtgtagattggatcttgtgttactggtggagcttgataagtctcatctccgcttgatgattcaataatttcaccttcactagatggatctttctcttccacttcttcacttaccccttcttctctaccactctcttgttggatatcccgaggctcttgtgttgcattatcaccactttcttgagcttcattggtatccacatttggtgtaatttccacatcttcttgtgaagaactaacattacccaaatgctctagaatatgtcggagacttttagctctatctgaagtcgaattaggcaaatctttcacactttcccaactcttttctccaaaataagccttgtcttccatgaacttgacgtccctagatacatgatatctattgttgactggatcaaagcacttgtaacccctctgagttgttgagtatccaatgaatacgcacttggtactcttgggttccagcttgtttcttaagtcacctgggacaaacacaaaacaaagacttccaaatactcttaaatgatcaatgttaggattctgattatttaagacttgaaaaggagattgatcattaaggatacgggttggtgttcggttgatgagataacatgccgtcataaccgcatctccccaaaaccgttttggcatatgcttctgaaataacatagcttttgacacctccattagatgcctattctttctctctgcaactccattttgctgaggattgtatggacaactcgtttgatgtaggattccacatttctccaagtgttctttgagcttggtgcttgtatattcacctccattatctgttcttaggattttaatcttggcatcaaagtgattagtcacatagttttgaaagtttaaaaatgcatcataaaccctatccttagatggaagcaaagttacccaagtatacttagatttctcatctatgaatgtgacaaaatacttatgattatctctagatgcacaaggtgaagtccaaacatcggaatgcactaggtcaaagcacttctcataaatcgtattggatttgggaaaaactactttgcaatgtttacccaaaatgcatgcttcacagtttgaacaatcataagaaaagccaggcattaacaaacttaaagctcgagaatgtggatggccaagtctctcatgccacaatacaaccgatgtcttaacagaatttgcaaagatagaagaaacattattcttagaaacagaatttaaagagatgtcttgaaacacatataagtcatccttggtgcttccttgcccaaacacttttccactctcaatatcctgcaacttcacgtcgttaggactaaaaatagctaaacagttcaagtccttagtcgttttcttaacagaaagaagatttgaagtgaacttaggcatatagaaagcactagatttcttattgaacagactgatgcaacctacaccttctattggcacattatgaccatttgcaacctaaccattccctaaagccggttaaaggttctctaacaacttaggatgactaatcatatgatgagaagctcctgagtcctatactaatgagtttaaatcactagaattagaagtaaagagagagatacccccgggatgtaatatggaggcaatggattgaagaaggctctctagatcggctttgttcatcacaatggtctcttgagaaatggaagcagaactcttgtctagtgtagcttgcaacgccttctcatgatgactgtattgcacaatggccctttcgccattctcggagcctacgcttgcttatgccacgttagcctttacctggtcctttttgaacttatctggcttcaaatggggctgtagtatccagcatatgtccttgaggtggcccttcttctcacagtgctcacaaaccaatgtcctcttgtctccttgcggcggaaatcccaccttgttagctgtagggagacttatgctcttggtgccaaacaactcatgagtaccatactccttttgtatcttagcacatacttgttctagagttggactcttatcttccctcagaatgtgttggattacatcagtatagcttgagttaattagtgacaacaatagcccgaacacacgatcttgctctctacgctccttgagtgtctttgcatcagtggtgaagggtcttaacatctctagctcagcaaccaaagatctgtacttcccaaagtgagtgttgaaatcactctcttcttggctcagattgccaagagctttcttgataccataaacccgagtcaagttagactcgttgccaaatacgcttgtgagagtatcccacaactccttagccgtctcacaatacgaataaccctctaggattgacgcctctagtgagcagtgtagagcactaagcacattcagatcatattgtttccaagtaccctcatctaaactttcatcagttgcctttagctcctcataggtggactcaatgtgttttgtgagtttccttcctcctaacacattcaaagtagtccgcttccataacagaaagttgttcccattcagagtgaccgcaagcttcaagtctttgaaggtatcattcatctttccatcataaatcgtgacagacatcttcaaagtttaagtcttccaaccagattcgtagcctttcgccgattagaaacccaaacagacacactacaagacgaaagctctagaaatttagaaatccccaagctttaaacccagaacagagttaccacagattagtcacaagagtccttcacaagctgataactttatgaagaaccaaatcgcaaaatacccagaagaatcaggaaaagaagaaaccagcaggatcgaaagagaagaagcttaagaaacgaacaaagaaaccaagattaagactcaagaatcacacgctgctctgataccatgataagaatagaagattaagaaggaaatgtgtcgacactcatgactagaaatggagagaaaaggtatgaaatgtattgattaaaagttgtgtttaaaactttacaatggtggctacaacctttatatataaaagagattaggttaaaatgacatagaggagactggcaggtcttagccaggcgggtgtcccagacaggtgggtttatacttgtccctgccagtttggatctctttgcctagccaggcgggtgtctcagaccggcggtttctcaatataagtaacttgtgtttaatatctaactattgctttagttagtattaaacaccttcttgattaacagatggtgctgctaaatgattaaagattggttcgagactaaaaagatgtatgactacggcctaaaacttcttaattatatatactaaaaatggacccacgcgttgcgtgggtttagtgatatatttctagtttttataattttgtaaattatattattttaaatatttttattacaattctatttgaaaaatatatgaaattttattggtaagaatacggttatataaaaaataaaaaaagttatacatgataatggtatagatttagtgattcacacatccacttatgatatactacatatattaattatttttgttgttattgttgtacaacttagtaatcctataaccattaattatatattttctctttataaatgtatatgcataacatcttctaaatataaaatgcaaacgtgacattttaaatgtggtttgtcttttccaaatttatatctattatatttagaagcaaaataggatatctatatatatcttattttataatatatattggtttctctttagacctttaactttgtgagactaattttgtcacccagttccgatatttctataatctgttatttttattactaatattatatcttataaaatacaatattgtaattttgcacttttacctattttcatatttttttaaataattgctttatagttttaataagtgcataatgtttgtattactatcaaatgcatttactttcataatttttttatattgtatttatgcaaatctaaagttaaaaatatacataattatatttttagttttcttgtgaattttagatatatcatagacgatagtatttagcgatattttaacattttgtttagtttcatttataagctaatcaactattaatttagttattttttcataagtaatattttttataaaaaaaactcgaaaatgtatgacctttcaacttttattctttctaacaaagaaaaaacttttatacaattttagaaataccaaaaatattgattttaagtatgtgataagatttatcactatttatatttttttaaactgaaaaatgtatgacttttcaactttcatataattttagaattacccaacatactgatttttaataaaccaattttaaaactgaaatgtttctaaaattttaaatattatcaatcttatcatttttcgctaaattcaaaataaattattacgtataataacatcatagttttatacttataatattaattcattttaaatcataaataacaataaatataaataaatatgtattgaattaacattttatataaactaaaatttatgaattctatttagaatagatgcttaggtgcacgttgatgtggacgttgatgtggatagcttagatggagaaaaaactctcgtattatatatatagattaaaaaattaatcctaaaggtcaaaaaactaaaacctaaacaattcattaataaacaaatttaatcctgaaccataaactcgaacctggttattatactcttaaaatctaagaatatttaaggcataaaataagggttctttttgtttttcttttgttgtctaaaaggtggtcatgctggcgtttttaatttgaaataattaactgaaaatatgtgcgttgacaattaaatttacattgacttgttggcatttgacattacttggcaagaacgccagctcagagagcaaagaccaaccaagatatacataaaagaatgagcataggttgtatctagtcttcacttagatcaatgagttgatcatatgacgtatattgttgaataaaataaatatgattggaatctaaagtagaggaaatgggataaataaacattagttatgagaagcggtgccaaatcctatacatatgaattatatgagtatcattgatatataaagtcaatgtatttatttatacatcacactacgtccaacgaaaactctataaccaatatagatctatgtatatgagataggaaaattaaaattatagaaagtgtcaatgtgaacgtacttgtagttatcccaatataagctcatcttagttcttagaccaagaaagattatgcaaaaaaaaaaaaaaaaaaaaaaaaaaaaaaaaaaaaaaaaaaagaaagtgttagaaaattaagaaagtaactacatttttacaatatattatggctgtttcagattgtttgaattttttttattaaaactgaaaaaaaagaagaagaagtttaactagcaatttttagcctcgtctaaactaatttcaattttgccgaaatagtaaagcccattaacgaagcccatatacacaaaaacggcatggcattcactagcctacttgatgaacttcatgtcttttcaatcctcagcaccgaaacttcttgaaagcgcctgagaattctggtaacgacgcttgatattagactatgcaattaatccaatcttgtaaagaactacgtgccttagcgtatttatagggagagagagtaaggtagaggataatagaaagatttctgcaagaaaactcaagaatcttcttttcttttctttagaacgacatgaattacttagtggctaacgagagtgtaagtgttgtgaaatatcatttgcaaaaaagtaaacatattttttacagtaagagaatttatatgtaagtaatactatctcatcgacaacattatcataaatttctaagctacaaattataacaaaaaagtaataattaaaactaattaatgtattattgaacatgcgcaactcgtgaatcattttctagtgatacatttttttttccagttaaggttttctctgtttgttggtctattttaagatacacgattaattcttatttatttaatgaaccatttgaagtctagcttacaaggtcaatgggcccttgtttttctccgaaacctagattatgaggtgatatatcgtggtttttactgattttaaccataatattaggtgtgtttttagagtatttttggttctttttgcgtcttttagagtctttgcagtatttacaggtttgggagaattctggagaaaaagctggacatttggaacaatatggctaacaagagcaacttgtcacgatcagagtattttggtgtcgaccgacaccgtcacgttttgcttggacgacacacgtttttatcaagttttaaagaattgcagaatggcactcatgttcctgtttgttgcaaaagaagtccccgacgtgttttagactatattgttaagtttttatctttgtaaggtttttaagctttaattttggagagagattttgtatcaccttggagagaagaatcagactccttcagagagattcagaactcctttactctatctcttactcttttaatgcaatttattcagattatgatttgtgtttcttttgctatgtctgagtaattcacctgttagatttagggtttttccatgtattgaagaattgctaagttgaacaattggtagggtaattttagggttcttcacctagatttgatttaattactagttctagcatgtacacctagaatctagctcataggataataggtagattcgagaggtcatctatttcctgaaataatcttaggtgagcaaaagaactattctcattcgagaggtggtttagtgcttttgtgaacatatcaaatttggactttaatgcttgcttaactttaggaatttacattcgagaggtgtaatttctattgataggcattgtgaattaattcattcgagaggtggttaatttgatatctgtaatttgagttcaagaacggtgcttaataaacccttacctgctgtttaatttgtaattctgatttactgtaaggaataaccttaagtctacctcttccgtcaattgatctaaacccgaatcacttgcttcgttttaatttaatatctttattctctatttagcttaattcgattgctgatttatttattgcgtgaacaacgagaactttgtggaattcgacccttaagtgctacaattgatctcttatttgagagagtagttctataggatttaatttgacatgtatcaaatttggccccgttgctgaagttctcttcgcttcaccattagactaagtatagaattaagtctagattttctttatttttgttactaacgtgattttctttttttttgtttcttgtgtgttcaggaacttcattttaatttaatatctttattctctatttagcttaattcgattgctgatttgtttattgtgtgaacaacgagaactttgtggaattcgacccttaagtgctacaattgatctcttatttgagagagtagttctataggattaaatttgaaccttatcatgaggaaaggaacccatgaaaccttatataccaatactctcctcctctatcttaccgatgtgagatcttatcaataccccgcccatcatacattgatgtctcgatgctagtggcttcggccatacaagcagccttcaaatgagcccatacccgcgccctagtccgtaccagctataccaaatccgcattgttgattggtggttcaagttcacgctcaccactctaattatagagttgaggtgtagcttacacggtccatgggcctttgtttctccctaaaacttaggttatgaggagaacaacccataaacacttatataacactctcatcctctatcttaccgtgtgggaccttatcaatatctaaacaagtaatatataacaatcccagagatatataatcatttcgagagaaccataacatgtaattcagatagtctacgattcgaaatattttccatatcatagttgtgaaacccacatatattatcatcttgtttatcaggaaccaatgcttggttagatagaagatccatcaaaacagaactagcaacaaaagtttacctcaaacagtaatctaatacaaatcagaaagaaggtttttgtatcgagctattctgatgtacccgccagctcctttgttgattccgtatgactcttgtgcttcctagaacatttttccggttgaatctatgccataaccagtgttaagaatcatgtgtccgctcaactctcttgcatttattcgcggatcataaacatcatctcccacaattgagtcatacttattagtgacgattaggcgtgtagctacatgggattccaagagagacttcataagcataattttaaagttccagatcctcgtactggtctcgtacaactacatgggattatttaccacttttgattcctttgccaaattatacgtaaacgggttctcactttctaatattgttcctacatccaccaaaagatattccaacgcctcaagttcatcaagatgaccaaggttaactaagttttccctgggtatgatgcaatcaatggtttcttggatgaacaagtgaaatctagtaggtaaacctctaattcttctattagctttctagttgtcttgttggagcaatggaacaacaataatcctatagttgatacagtatgcctcagatcaaatgcggattatgatctcgatgagaccaatactcacggtctattaaacctgaatcagagattttatttattactaaatgttcacttaaatattaagagattactaaactcacaaatttaatttaagatagacattcttaggtcacatttttttctgaaattattaaaaagaaatctaaatttttttttaacacaaataataatcaatagtcatatgattcatgagttgtacaacaaaatatacaaaaaattgatatgtaagccggttaaaaaaattgatataaaatatttatagcatatctcaagtgataattttgtgatatactttttttttttaaacgtttgagattccatcatgtaaatcaaatatttttaacacaaaaaatcggcagcaacaacatattttaagtacaccaatatgttcatttttaagaagacggtgttgaggttacatcataaaattaagatctcaaagtaataaaaatgatatgtaaagagtgatctgaagtcatcgaagatactattataaatgaaaatgaaatcacattgtttagtattggatgtgtaagtgttgtgaataacaaaaactataacattctcatgtataattttcattagcagttatatattagattatgcaattaatttcctttgcaagaaggtaaacacatttttaacaataacatgcataatgggagtttatacgtaggtagtactaacacatcgacaacactatcatacacttctaaactacgaattaaaaaaaaaaaaggtgaacatttaatagtttgaaaaaataataattaatactaactaatatattattgaacctatgcaatgcgtggatcattttctattgatcaaaaacatattcaattagggttttctctctttgttggtttattttaagatacacaattaatttttgtttatttaacgaacgaaaacaaaatgatttagttgaaatacaaaagaaaatggaaaaacgtttatagtgtcgccgtatatacatctatataaacatcttatacttgggtgtgttaaccaaaccatatatattaaacatataacttaaaagcggtacaatggttaaccgtacactgtataagtgtcgtatatacatctgcctaaaacgtattttaaaacactagtcataacttacaagtatatgttttgtgatttcgaatacaaagcaaaagatcacaatttaatacgtctcttctctctctctcttttggatctgaaaaaacagagaatttatatagaataaaaccaaaaaaaagaaaataaagaatcatacaaaatcacatttaggcttcaattagtgaacacattttgagataaaaaaggaatgatagatgactttttttggtactctttgttattttttgtttccaaaaatatttaccatgtgagagattgttgttgatttgtatggaattttggctaactggcatttgtaaaattgttttcataatgtttatttgacatataattatcatggatcacataaattaattatttatttgcaagatatgattttgcttttagatacaattttgtagtttgtatgccatgtattcaagatccacaatggattctcggtttggtaatcatttttaattttaaattagaattctatagtaattatgttctctctctcgaattcatatactcgattttttttttcaaagagagtagtgttgatgttgtggacaaaaaacatgaaaatcacaacattgatgatggtagaagaagaacctattgattatgagaaaaaactaagtgaaaaaataagttgttgatggtaatgaacattttcacttcaaatatgttgatggtgatgaacataatgagtgatatacttgatgttgataagcaagttcattgtctttctactctccaacgtaaagcaaataagtaaaaaaatagatagtgactaatttttaaaataaaaattgtttacattgttttcataagtagatatttcaaatctttaaattaagtgtttgaaaattcgtgaaattattttcaatggtcatataatcttggattaagttaatatcataattttttgtataagtattatgttggggtttaagttatgcaatttgtacaaaagttgaactacacatgagagtaagatcattaaatataacaaacatgtattcttatagtttaataacaaaagatacgtgtttgttttagtagacacatgattaattgcatgtcgtattaaggtccattagcaaagtccatgtaaaataaaatggtgtgatgctcatcaacatacataatcaattgcatgttgtctcaactattaacatgcccatatatataatatttgataaagttgtataagtatatcaccaagcaaatcaaaatacacacattccgtttcgcttgttgtagtgaacgggtcgctctatgttttagctcaatgagtaaatgtgcttgttgatacaagtgttttcaatagaacgacattcgtggatggttggttcttggatcaatggtaaactgctctaaaggttgatcgtgatgttgaaagacacaacttagagttgctatggaccctatcttccaacgctgataatgtaaagagtgttacccaccaatccggctgtcttttacgtgagttgagaaggcatatgagggccgttgcggaatttgttgaaaaaagagttgtaaactcatagactagctcgatcataagttgaactcaaaacaaattataccatgggaaggagaagatgtcacgggtgggaggttgaggattgggcatgtgagtcggttggaataggctggccatcagattagtttggttgcgactaaaagaataccaaaaatgaggaagacatgccttattagtgtccaccaacattatgaaaactccatctttgcctaactgccttctcatgtaaagcatttcgcgagagcagaaaatctgataaaacttttgagaaaccgaagagaggcgagactgcttttagagactcgggtaaggatatctaacatcatattgtgggacataccacaatatgaatcatggaaagcagtctgcatgtacaagaagataaatagaaatattaacaactacacacaacaaagatgaaaatcacttgcataatatcccaaattttcattgaccatggcctaaccttaagtcaacttagatcacaaggcctcaagttattctttttttgttttctttggtaaaataagacctcaaattgtttatagctaatgtcaaaagttaagattggcattggacatgaatttcctaacttgttagcatgagttggaaatatcaatatcaaatgcatgttgtaaatattttgtagttgcccgttcttcaagaaccaattgtttcctcgctggaaaattaaaaataggtcaaaactctaaaggattgttctcatgttttatattgttagtcgatttgaacttgtttttaaaataataatagtcttaatagacagctcatctagataacatatattataacatatatatatacacagatggagtaaatatattcgggtgtctatatataattttgtataaaaagattagttgaaatattagctcccgccgtggctgctgctttgctttttcttctcttctttctttacatcataaccctctccctagccagtaagtattttttattcgcacgtaatttaagttctttctttatcctatcaggtaagcttagtagtagaaagtgtcttggatttggccgtaaacttgaacctcttcgtcccgattgatctacataattaagggattctgtttattgttttttttttttgttcatgtttaatttatagtgtgttctatgtcacaaaatctacataatttttaggaatgcataaaaaatgtttacataagacttttcttatcttctggtcacaaaatccataacggccttgtgcattttcaccaaaaccaatcacacataaagcgttaaattaacaatgtcccttaatcatgtggatcgagtcatatgacttatttttacatgatctgcaacggaaattcataacgactaattagaactccagaaaaattgttcaatagatcaataagatgaatttatatataaaatgggggtgaattattatatacttttaattgtcagtatacaacaataattggcctcaaatttggataggtaaaactaattttaggaaaaaaaaaaagattatatatttaatccttagcgatcatgatcatcataatgacatgatccatgcatgaataatcaattgcaggcgtaaacatagactgcggaacgtcattgccgggcgtagacacaacctaaaatgggtcggagacaaagatttcatcacatccggagagtcagccaccgtttcgtccaccaccgtcgagaaatccctcaccacacttcggtactttccgaccggcgactccaattgctactccaacattccggttacaaaaggcggaaaagttctagtgagaacgatgttttactacggaatttacgacgggaagtcctcaaccccatcattcaacgtagtgtttgaagggaaacaccgaggcaccgtatcgctatcctcggcgttcgaaccttaccttttggagctgatattttctccggccagcagagagaccagcgtttgttttgtacgtacgtcttcatcatcaaacccttttgtatcttccattgaagttttcgacttggacgatggcatgtataacgagcttggtcctggtgaaggtttattttaccaacaacgacgtgcgtatggtgcaacagaatttctaaggtaacatcgatttccagttacgtgtataagtagcataaacatacttcagataagcggtgaaggtggaggttgaagatgggaacatacttcagataagcggtgagaggagcagtgataatgaagagaagagtgacaagtggcaccgtgtggagagatcaagtgggaagtttatgaggaggtttaggttgccagggaatgcgaaggtggaggaagtgaaggcgagtatggagaacggtgtgttatctgttacagtgccgaaagtgccggagaggaagcctgaggtcaagtccattgatatccctggttagagggaatttgaagttttgaaagttgaagacaaaaatgtgtgatatgtgaaataaatggtgtgattatgctttctctctttcgtttatcttgttttgtaataatgaatatggtgatatcgataagtgaattttaatgagagaatgttttgaaacatagttgccccaagtggttattaacaatgccaataaaataggttgggatataaatatgtagctaaattctgcaaacatgagtcagatttctccaaaataaataaaacaattctcgaaaattaaccttaaaaccaaaaaaaatatctgcaaagcttagtcgctttctcctagtccttaagttttagggtagtgacctcgatcggtcttatcagcagagtaattaagaaaccgtttggcataattctgttggaattcaaacgaaaatttaggattctcataatttagttaatagaggttaatccagttgaatgactcaaattctagaacgatatttctaggtaatttaggccttgtgatcttaaaaatgtcaagaataaatttctatagtataatcaagggttaagttgatttgcaccttaagtctacttagatcacaaggccttaagttatttttttattttttttctttggtaatataagatttcaaattgtgtataactaatgtcaaagttaagactggcattggacataaatttcctaacttgttagcatgagttggaaatatcaatatcaaaatgcatattgtaaatattttgtaattgcccggtcttcaagaaccaattgtttcctcgctggaaaataaaactagctaggtcaaaattctaaaggaatgttctcatgttttattttgtttggtcgattttaacttggttttaaaatactaatcgacagctcaactagataacatctatatacacatatgatgtacatatatcgaatttctatataaattttgtagaaaacattacttgaaaaattagctcccgccatggctgctgctttgccttttcttctattctttctttccgtcataaccctctctcttgccagtaagtatttttgcttcgcacataattcaatttttttctttctttatcgtattaggtaagcttagtagcatgaagatctacataattaagggattctgtttatggtttctttctttcttttctgtccatgttttaaagtttttttttttttttttttttgtcatccgcaattaattagaattcaaaagagtcattcctcagcattgttggttttaaagtttggtctatgtcacaaaatccacataattttaagggatgcataaaaaaatgtttatacaaaaaaaaaagacttcttatcatctggtcacaaaatccataactgccttttgcattttcaccaaaacccatcaaacataaagcgttaaacaatgtcccttcatcatgtggatcgagtcatatgacttttgtttacataatctacaacggaagttcataacgactacatggaactccagaaaaattgttcaatagatcaataagaggggtgaatttattggattattattagatgcttttaattgtcagtatacaacattaattggcctcgaatttggatataggccgtaaaactaattttaggaaagaagattatatatttaacccttagcgatcatgattcatgcatacataatcaaattgcaggcgtaaacatagactgtggaacgtcattgccgggcgtagacaacaacaacctaaaatgggtcggagacaaagaattcatcacatccggagagtcggccaccgtttcgtccaccaccgtcgagaaatccctcaccacacttcggtactttcccaccggcgactccaattgctactccaacattcccgttacaaaaggcggaaaaattcttgtgagaacgatgttttactacggaaattacgacgggaagtcctcaaccccatccttcaacgtagtgtttgaagggaaacaccgaggcaccgtatcgatatcctcggcgttcgaaccttatcttttggagctgatattttctccggccagcggagagaccagcgtttgttttgtacgtacgtcttcatcatcaaacccttttgtatcttccattgaagtttccgacttggacgatggcatgtataacgagcttggtcctggtgaaggtttattttaccaacaacgacgtgcgtatggtgcaacagaatttctaaggtaacatcgatatccaattacgtgtataagtagcataaacataggtttcaattattattttagtttaggtgttcacgattacaatgtgtatatatgaaacagcaatttctagcgtttaaattcgaaaaaataaaattgttagttgtaaatggaagtaaaaatccgtttggtttacaatttttgcaaaaatattgataagaaagtgaaatttataaaatacttatgttttaaagtacagttgagatcataatctaatcaaccataagtccataattatgtcaactggccgggagattgattaaatacaagatttaattaatagcttgtcgagtttaattaagatctttttttttttttttggttagatcggatcctcaaggtagattttggcttccatccgatataaacatattg

SEQ ID NO: 5314 - DNA, 20243 bp, Arabidopsis lyrata
  Intron number 6 from transcript 472658 (locus 472658) deri ved from phytozome v7.0 (chr-ID scaffold_1; pos 10563588 t o 10583830 reverse strand)
attggatttctatgtatttggatcttgtaattactacaactgataggtagatctctggagtaagttttacctatatatcaattaatgacataccaccacgagtggcactaataataataataataatgatgaactccaaaattgtagtgtcgtaaggcgacgacagaagttctctccaagttggagattgtgaaagttgtggtagaaacatctaatgaagatgtggagccgccgaatgagagactcaagaccaaaagtgtacatgtctacataacgtttaagggcttggcagagcctcgagcccctcggcgggtttttgagaatggtgagcatgttgaacgccaagctatagttagaagagtcatggatcatacaggaaacttgactctcgagggtaagctttgtggtggtcaatatatcaaaaagcgttctctggctctcaagagtcgaaaaagtcccagaatggtaaaaagcaagccggctaggcttccgtatatatgggagtctgcgtaatgttaagatctatttgaaaatgtggatcagataataatctaagctattttgttatgatataagttgagattctcaaaaaaaaaatcaaactttgttcataaattcataatcagtcacaaattttaagaaagtttgaagaagatgagattctaagatggaacctctaatttgcccaacttttcttgatttttgaagctgtatgtttgtttaaagattaaacaagtttaaaacttatcagataatcagagccggcccatggcacaggcccatgaggcagtggcttgtgacctcaaatattatagttaatttgcggtcccatatttctgagaagttcctttagtctagtggtctgctctcatgtgtataatgtcccatgtctcgggttcaagccttggtaataacttttttttttttttttttccgttttttagaaataaaacgaaaaataatattaaaaagctttgtgataaaaaataaaacgaaatttaatttacttaaacaaaaattataaaacaaatattaatcaaaaaaaagcaataaaccttaaaacctaattaagacgtcgtttgctcttcttcttcctccttggtcttgcaaatttgcaatcgtgaatcgttcttcccttcgacctcatcaatctccatcaaagcaacaatatcagattcatctttctctttttttcactttgctcagacttgagttttgaatcaattcaggtttgtcaattgattttttatatgcgtttaaacattagacaaacaactttctctctacgactctatctcttccttgtacagaaagtcatactaactattgatttgttcaatgattgcaggaagatgacttcgaatcgaataagacactagccaggaggagcatcaaaagtaagaaaaaagaagagacaagagaaattaacaaaatcaatggaaaactcgatgttgaggtatgtaaaaaaatctgaaacttctaaaactgatgagcctttagaaaaagagatcaatatgagtagtgaagaagctggtatttcagaaacttgtgaagatgaaattggtgaacatggtgatgaacacgagtgtggagagaaaaagaatgagaatgcgaatgagagtgatatggagattgaaactgagattgagagtgataatgggaatgatgagaaacttgattataaaagcttgatgaatgagtttgcaggaacaaatgcattgagaattgttagatttgaagaataatatgcttttttatttttgtgttttacaatgtctacaaattagagcttttgtttaacatttagactattttaatttttttttgctttttttttaatataaatatgaggcagcctttttttttcctttgattgtggccctcataaacgttgagccggctctgcagataatagaagtttatgtatttgtgggacatatttaaaaatgaaagctttaagaagagaagtcaaatatattattttctttggtggggttttagacttttaaaaagagtatccaaatatgggatggaatcaattatcggtaggggaaaataatgatgacccataatttgtattattctccaaaaagagcattcgagtgagataggtgaggagaactttcacgataatctccgaagtggccttctaaataattacgtcacgatgatctctcaagtcaaaaattgccttcaaaatcatatcctcccaaattacatgaaaattcagtatgtggtaaaaaacatatacaacacatgttcgaatgtctctaaatatgttaacaatttctatcaaaaaaattgttggacatgatctaatatccaaaaaaaatttgcaagtcgaaactgtaactgtagtatactagtatatacatcattggttatgaatcaaatctctttcaaagcctcatagacaagagacacatattctacttcccattccaaacatctgatcttttgtacaaaaagaaaccccaagaaccccaaatcccaaaccccaaacaaagccgagagtacttgtttcaagaaacggatgaaataaattggaaggagaaagccggttttgctccatcaacggattgggcaagacttttctttcctttttagtggggttgatatcttgatgaagataaacactcaagtccttatgctgaaaagacaatggctgatcggtcagtttcacaacccgcgagggaagttgctgacttgtccttcctctaatacatctttttcgttcagtttttaccccatcctcatgcgcatcacatgggatttttgccataaacattaaaccatttgagtgctaactactaagtcactgaatccacatgcttagcgtatccatgtttgagcatatattatgttgtggatcatcaagtgctatactgtggtcttttgtgtctctgtagatgaatcttttttttttttgtgtttgttcaggggaataagcttcttctttgattacgttatatgggatgtttctgttaatccctacttctaatcatactttttgctaaattttcaaaatttttggacagcatgtttctttctctgtacgattagctttatgttcataaacagtcataaagttttgagaaaattaatctgagtttgttagtttgaagtagataggattctgatggaacctcaaaattgcacaatatctatctactaaggctttgattggtaacatgagttttatcattgagttaagttgagttgtggacataactcatagataattcaaaaatgttatgatataagactggagtcttattgatcacaagatgtcaagagttgaccagctttcatgcggaaaagggcgttggtatagagatggagatggagtttgcgattgattcctcaatcacacacgaacaagaaggtttgattccacaagcaatcagatccataaatcaatagaaaaaaaaaaaatccacagttagattctaaagacaagaacatgaaagaaaacaaacttctattaaattaatgataatgtgtgatttacaatgaaatcgaaactgagattttattggctcatagaaaaagatcttaagaagctaaaacagaaaaaattgcaaacattaaagaatagagccattggagctttgatgacaaatctggccaaataagaaaattgtcttgagctttgtatctaaacagcttggggaggtacgtgcgacttcttgggaaattatggaagcaattcagagcttctagctcgttcccaaacataaaggaaaggagccgttgcaatgtgaacaccttaaacgaaaatggctctaaataaggtaactcttggggatgaggttttcggaagctggggacactacttggaagtctctttctattggagaaggtctcaatatcgtgtatagactccataaaaggaaagagctgttgtgaaaactcctttattgctcctagtgtgaacacgtccaaacaaggaaagtgtaagtgtgaaaggatccgcctgatcctatgggtgctggtgcatggaaagacttcttaaagatttttaagagtgtctcctggtagccaataatagttttgggatgaaccaaatatggaaagatccatttttggtaacatatagaccgtgggtaaggccaaatatgggcaactcctaaaccaactcgaaccaagggtgatgtggctcgatcaatatgctctaaatggttgatttgctgaataataatgaatccaagattaaactgacgagtggattctctaaattgcaacttagcttgctcacgaacatgtctcagaaagctcacatgacaatctcttgaattactcctatgatgggtaaatatctctcgattattctttataaaatagtcatgttgctcatgaatcttaaagaccacatcaaattgacggatggtttgatactttgactttgacatgtggttccatgagcttgatcgtggtatggttggaaagaagcttcatgaaccatctttacttttggacgtctttatttgtttccgatgggtcttaataaaatatccatgatatcggtgattgaatctaaaatatagttcgaggaaacgtgacgttgggttgatggtattgaagtcgtctcgatccggatggttttttttggcgtttagattgattggctcagtagttttcgattatgtctcaaccaaaagtctttaaatatgtgactttctggtgaatcttcaatttgggtcggcaatagtctccattgggtcgttggattggagcttggtgtgatccgggtgagttttcgtggaccaacttcgatttggtatggtgatttataattccagctgaaccattagtcttcttagaatgtatttctatggaaatatcaaatcctaagccagtttcttctcatgtgttagagttgagttattaaattttttagtttttgtttgtttttatttaattttaacttttatatatttattgaaacatacagaaaattatagctttatatatttaggagtgtactgtgtagagctcattaatatttacttttatttaatagagtatcatttttaatcttttatttattaaatttataaaaaatgtttatattattaatactttatatttaatttatttttaataacatatactgcaaataatacatcataaatgttacccgtcattttttttttaagaaaaatatttactgtaatcgtaccatataatttttactgtaaattacatcaaattttaacatctactgcaacaatcactttttaaaaaactgcaacattctctaattaaaacatgtacaagaaatctgatatatcaacaccagaaattttccattatttttactttatgatttactttggaaagacagttttctcaacctatccactccacgatcttttcatattctaattaataacttccacaattttatcagaaaaaataacaacatttcacaatttctctctagctccactctcttttgcaagtcgtttagcaatttaatttatagtcatttcgcaagtcatgtagtaacttcagttacaatttagggtttcttaaaaaaactttatttatttatttatttcatgtagtataaggccatatttatcgggggaacctatgggctgttcttagagtaaacaaataataaaaattgggtttagaaagttaagaacaggtgaagtggtcttgggctagatcagttttaagcccgttctcgcggtgacgtgtcaggctgggattgggtaccaaatttgatatcggaaatcttttctcatttgggcgaaaatcgtttctaatctagggtttgtgtctcgaaacatcttcgtcggcgattttgtccgcctttgatacttcgccgatttcgggccgatttccggcaaaatcggagccaaatcttcaccctgcttcgttatttgctatctcgtgtcatttacctttcattttagttcttctttttgccgatacaaagaaacagagagaaaagaagaaaatggcggcgaatggaggagctacggcggctggtcagccatctgcagactccggaggcacatgctgctgcttggaacatcttgaaggtgagaatttcagtcttagaattctctgatttgatttatttcatatcgatgctcagacatcagaccctgttgttatttttatgccagaagtatgtattccaaacatgtattcataaatctatcaatggagtccattcattctctcactgttgttgatattaccacagggctcaagaacacatatgggaagcacaatgagacttggatcccgaagaacacatttacagaaccgagactctctcacttcaaagctgtaagtttaaaaattgcatttatctttgccgtttccttgagaatccttgtagttttcagttcacggttttaaagacagcaagttgttttctctccgggcatttaccagacagcaatgacgtgaaaaaggtgtctttcttttgatgatgttaggtgaatccagaagtagctcaagcacttgaagaagctggtttaagatttgtgggtaaagatgatacagggaaacgagttgaggtatagaaaatgagataagagaaaacaccatcttagtgttggtctctctctctctctctctgtcaaaatcttatttgtttgtttcaacaggtgattgagtttcaagatcatccattctatgttggagttcagtttcatccagaatttaagtcaagacctactagaccttctcctctgtttttaggcaagtcttgagaaacactttgtctcatatggtcaaagagctgtcttgaagtttgctcagtacactggtgctaatgcaattgctggaagacatactcctggtactttcactaaccaaatgcagacttctttcagtgagcctaggttgttgattaaactaactacaagtgtttgttttggttgtgagacatgtaggtgaggtagctctgaagtttaaatcggagtagcaacaccaacaaccatttcctgccaacgataaggtaattccctactcaatatagttgtgattagctgctgaagtatctagtaaactggagttcttgttcttgttcttgtttagctgctgaagtatcttgttcttgttcttgttctcttaactttctagttgtaaacagactagtaatgtctgtttaactttcttggttgtaaacagactagtaatgtctgtttaactttctagttgtggaaagttataataaatactgatctgaccttggtagttcaaggttagctctcattatgagtttgctactttaaagcttttttggtttgaaagtgtctttatacctgatttgattgtggtaggtaatgatactttaagactaataactagtttaacttgcctctattaaaccagaggtttgttaaattcattatctcctctttgaatctctccttttacctaagcttttacttctcttccttctattaagttgtcggatatgggttcaaataaccatccaaataaccatccaaataaccagtgtcaatctcaaccatactatagtctccaaaacttcccttacggcaatttttcttccaatgcaaacatttccttctctcaaatcccttcttttagttcacaaccgagctcaccaccagttcaagctgcaagtcaaccagaaaagacaccaagggagagaaggctttggaccagcaaggatgatcttgttcttataagcggctggttatacacatcaaaggatgtgataattgggaatgaccaaaggtcaggtgccttttggaagcgcataggagagtattatgcttctagtactcatgtactaaatggggctgagccaaggctccctgaccactgtaggcaaagatggcaaaaaatccataggtatgtcgctaggttttgtggagcttatgctgaagcagtgagtgagaaagccagtggcatgaatgacttggacattctcaagaatgctcaccagatatacgctatcaagtacaagaagaagttcagtttggagtatgcatggaatgaccttcgctacgaacagaaatggattaacctagagcctatgaaccctacttcaaagacaaccagctctaacaaaagaaaagccaatgatgctgcaccatcttccggatcaaatgttggtgagcaagagagtaggcctcctggtataaaggcaatgaaagccaagaggaacaaaggtaaagacaaggtaggaccagctttggcgtctgataacatgtgggagaagaaagagaaggatatgctgatgagggaaaaactccaaaagatgtctgtttacaacactctccttgccaagaatgacacactggatgaagatgaaaaagtccttaagaagaagctaatgtttgagctgttttaatttaggcaaaacttagttaatttacctttgtattgatgtctgttttaactatgtttgtctgagatgtttctgttaggtaagttttaatggctgtgatggttctgttttaactacctttgtattgatctctgtctttatttccagtttctgatttgcttgcaaacttctctctgtgttgttggtttcaggttgaagaagacatgggacttgactctatgtatttaagctttactttgtattgatgtaatcgagtatgtaatgtaaaaaaagtcagatgtcatgttgaatcaatacccgagagtcacatgtgtttggattgtagtattaaagcaagagtcacatgtgtttggattactttctttaaagcaagagtcacatgtgtttggattgtagaattaaagcaagagacacatagattactttctataaatatgtgattcataccgatgtttctctcatcaaaatcaaacttcctataactctctcaaacttccttctctaatattttctcatcttcgtattcggttccgtttttatggcttcttcttccaatcattttgactttcatcatggatctaataatgatgatgatttttttgaccaatattgtgacgaacaatttgataatctatgtgatgctactgaagaggttattccgaccgaaaggaagaagcgtacttatatagaaagaaatcgggaagacgggcacaaacagttgtgggaggattatttctgtgataatccgacttacacggagaacctatttcgcagacggtttcgcatgaacaaggcattgttcctgcgtattgtaaatcgtctcgcagccgaagtgccatattttaaaccaaaaaaagatgccaccttccggaatggtatatcaccgctacaacaatgtactgcagcaattcgacaattagcatatggggctgcggcggactcgattgacgaatatgtacgtattggtgaaacgacggcacgtcaatgtttggaacatttcgtcgtcgcaatagttgatttgtttggcaatgaatacctacgccgacccacacaagaggatcttgaaagactactcttttatggagaacaacggggttttcccgggatggttggaagcatcgactgcatgcattggaagtggaagaattgtccaaccgcttggaaaggaatgtattcacgagggaccgataaaccaacaattgttttggaggcggtagcttctcctgatctttggatatggcacgcgttttttggagcgccaggtacttctaacgatttaaatgttcttgatcaatcaccagtatttaatgacattatttacggtcgagcacccaaaatgaactactatgtcaacggaagggagtataatttgtcatactatctgacggatggtatttatcccgaatgggcgacttttgttaaatccatcccacagcctcaacacccgaaacattccttgtttgcacaacgtcaagaaggtgcacgaaaagatgttgagcgtgcttttggagtcctacaagctagattcgccatgattaaaaatccatgtcggtttttgtctaaaggcaaaatagcatatattatgagagcatgtctcatactccataatatgattgtcgaaaatgaacgccattcatacactctctatgacgaagaagaattcgaaaaagacgatattcatacgttttcagtcgagatgcctacaaatctccaaggtctaggtgatggtcacacaagaattcgtgatagacaagcacatcgccaattaagagaggatttgattgagaatatatggaataaatttggacatcttccaaataattaataagttttttttaactttgtattaattaaataaaatgtttgtaacctttaattaatatgtttttttaataattatttggaattgtattttgtgtttctttttattttcaaatcaatattaatataagtttactttttaatgttttctattttaaaactaaatttttaattttaatatactttaaaatgttttgattattaaattattaattcatatgatctaaacatgttctaccaataatcaattaatttacaaaagatcttaattaaagctcttataatattttaatatttttcctcccttaagatcaatcttcaaagatgcacccttgcatatgctctaaatgtttctatggaattaatttctaagatgggtatgaaattccgcagtcaatatcttatttgcgtaatttgtgtgctctcacaaccaagataacaatgacataaatttgttacactgccatcttcttattatcaaataccaactccgtaatttattgaccaaataaaactccttaactttttccattatttatactttccattgctcaaaactaaattaaaacatgttgtaattaatatatgagtttgcctctgcataggaagggtcacaacgctagtaagtagtaagagacaagtgggtgtgtgagtcgaaggaagtgtccgattattgcctgacgcctttaaaaaggaagaagaaaaaagtatcaacgtattaaaaagagaaaaacgtattttcattcattaatgtatgggtttgtttcggaaatcagatatgagatttgggttgagaaggcccaactgaagcccataaatgagtccgataagggcatatacttatatcgcctggatcccaacaaaaacccatcaccattcacgacgacggcgaggaggaggagaaaatggcgacggatgaggagtttttcagattgcagagagaatattggcgtcaagtcgcggaatcggatgtaattctttcatcttcttaattactgtttagagaatttatctataattgtgattttttggattgtttgtgtttcacgaaattaaacgtttctagggttggttatgaactgatagaaattttttgctgatgggtcggtcttagggtttcgatatagagaatgttagagtaccggattctatggttggaaagattgctggactgattccccacgactgtctgcgttataggcgttttccgtacggtgtcttggtcaagcattatgctattgttgggcttcatcgttacaatatgttgaaggtaacgagatcttgtctcctctggttggtgctttgttacaacatgatgctttgttataccacattcattcattttcctttgtttatctatcaggggactaacttccagttcggtcgcctaatgaaattcaacatgttacagaactgtgtgtcctctttctacatgactttggaagcatttgatcactttgtttctggccgatttcctaaaacctttcagattcgaattgatgaaaaaacatatggcagtttggatttgacggtctccattgctagaactacagatgaaggtgacttattgttcttttttttttctctataaaagtcgattcgagtataaactcacttgctgattaataatgttccacagtgaccaccaagaagcccttcatacctcactattatggtggggcagtggcggatggtatcatcttcgaaggtgaattgcctgattggccctcagatgatgatttgaaacacagaaaacgattctacgtggtaagattatatattaagacacaacagttatttaagttttgttgtgctagcagtcgtgatatgttattattgcttttgcaggtgaaggaatcagagtggcgagacactgcttggattttcatgtatttggaacttgtactttgtgcacatgataggtccatcactgatgtaagttttgcatatcaattaatgacataccatgattggcactgttggtaataataattattaacaccaaaactgttgttgttgctgctgcaggctgatctggcccggttgaagattgtgaaagtggcgatagaaactagtatcgaagatgcgctgccgaatgaaagactcaaggccaaaagtgcaaatgtctacatattgtttaagggcttggaagagcctcgagtccctcaacaggtttttgtcactggtatggatgttgaacgcaaagcaataattagaagagtcatggatgatgcaggatacttaactctcgtgggtaagctttgtggtggtgttaaaaaggtccgccggtttaattagttcagaaaccacttttcaaagaacataagatcgttttctgtcaaaatactgcaaaagggagaagtcgaatgttatctctttggtgggatttggaaagacagttttagagtattgatggacccataagttgttgttatgctacataagattaatgaacccttgagtaaattggttgataattctttttgttgcataatcacacgtttatcttaattaataattatattattatcttttgaattatattcattatcaaagcataattattcggtgtactttccaagataagtaagtatatggttgatagttgatactgtatacttgaatgtagttatcatacttttaactttttagaaatgagtttaatcatttatgtatatgtaaaatgttccttgatacattaatttacgagtttttgacctgttgtcaatctatacacttgtaagtggtaatccaaaagaccgttttatgacctgtcgtcacattcataaaacgttcactaattagctcaattcattaattagctttcacgagaaactgatgattatgctaagaacttccgatttcaaatgtaaccaataaccatggtattttacttacccatgggctctatcttttacatgaactaatttaagcttctttttgtttatgagatagtattatactaatatgtttatgttaatttcaactcctgggtgaatggtgctagcttggccataagatgaatttgtaatatcccctatatattaatcaggaaatactctacaaaaaaaactttattttcacatgttatcaacgaagttaccatgatgacatgtcgctcttaaagagattgttcacctaatctttactaaaatatttacagattttgtctatatatatacatatatatatatatatatatatatatatatatatatatatatctcacaaaaaaataaaaataaataaatatagcaaagtaaactattcacaaaaattgcatatgattgtattttatttaagttagaaataaattgtcgttttcaatcattttactgataaaacgaatttatacaaaacatcattgatttgaatcgaataaaaatatatatcaaatgtttcataatatttcagattttggatcataatacaatgcatttgtaattaaaactataatatatttacttaataatcatttaaccccatgcatagtgcatgtaaactacctagttagttttaaatgtcaagtaattctacatgttattatgttaaataataaaaatttaattttttttattatatggatgatatgatgatttatttgtttcacaaaaatagaatcatatgaagatgggaggtgaagtataatgattactaacaaattaatatggtaagttagatatcgaatcttatatgttcattttgattggtcattcattttttaaaaaattaataatgtatttttcgttttataatttaattaaattaattaaatttcaaaaattagtattttacttgtttatcttttatgagatgaattatttctttttgaaattttatcaccaatgacattcttatgtaattacttataaatggtaagcttactttcaattatgtacccccaaataataatataaaactaggatatgacccgcggtataccgcgggataattagttatttattattttttgttataaacttatgatgttactgtattaatttttttttgttttattggtctaaacttaggtgaaccgtatgtcgattttttttataactaaaaattttaaattttaagttatatttttttgttaatattatttgttttgtttagtgtttaatattatataattgtatttttgttagttaattctacgatttcacccgtggtatatcgttccgtattattatcgacccaaacccgtcccaccatataaacatgtcacgtgaaattaaacattaattctttttaaaagacatataattcgagtcaattgaaattttttattttaaatggttcccataatatatttatttttaatttttatagagttcaaatattactaatattataaactttttacagaatttaaatattataaataattcaaaccgtttataaagtttaaatatttataatgtttaaacttcttatcaagttaaaatatttataataattaaaattcttataaatttaaaatattgataatatttaagctaaatatatgttaaaaatatattttattttttatatttacaatttagattagtgatatatatatatttaagatatttaaaataacccgttgaaaaaagatatttaaaaacattaatatgttatgccaattctaatataaaatgtaaaataagttgaaagaatagatctatattaatgaaaaatcagaaatgcatataatcaccttaagagtaagaattcttgacagtattttcatctctaaatgcctggaaaagcaaaacattgactatataacttaatataatttgactgatcaattcgaactcagcaattatcataaggccggttagagtaagcttacttttgcatattcttgtaaattctggaatttgtggatagataacttgagaacaatcttgtaatcttgaatccaaaacaaataaaaacagaactcgctaaatatatatgttaaaaaaaaaagaaaaaaagatgaagaagatttatgctagctaattatagtaccttatcataaactaattataactcgattgctttatcgtgaactcccatttgcttccagattctcaaatttttacacggatttgcaagtctgatacgtgtgaataaagatctgaaacatcagtaaggtaaacaaaatgagaagaaacaacaaaacttttataaaattttaaaaacctttgcatgaaagaagattagaggaattgtggaaatgttctttaagaaaactaaatcaattataacgctaaaaaaagtgaattagttaagagttatggatcaccttggcagtatcttagtctctaaataaaatgataaatcttttctagaggttcaaaattatattgtgaatgataaacaaaacaaaaaagtaaaaaggttatttctgttttaccatgtacctttcgatattttagcaaggcttgtaaaaccatcattggcagccaatttgctttcagagttaaacgattttatgaagattccaagtcttgctatgagttttaataagcaaacgaataatatatttatagaatatgtaagtcgatttcggaatatgcttcgaaattctgagaatattttattgttataaattcaaatgttgcatatatcttccaaataaattatttccaaaaatattgtgtaagttcctaaatttctgatgatttgaatattatgttagtaactacattggagattgtttcaaatttgaaataataaatatatgcaattattgtcgatctaataaatacatttgtaaaaatggaaattggtttgaagaaattgttgtataattagataattatttaatggtaattgcaatttaggtaatattctttaagattcagaatcttaacttaatgattgacatttaaacgattatacatatatagttagttgtttaaaatcgcattatatggaatgaaatttttgttgattgaatatctttattagggaatattaggaaatcaaatattgttgaattgaattttcgggtcaaaatcagttagagattttcggggatttaatgtagggaataaatgtcgtttggatttaatgtagggattatcaaataaggaattatccgattcaaaaaatttggatcaaaaaaataaatatggaaggatctgaatcaaagatttccgggtcaaaatcaattaaaacccgacccgattagctttagcaaatttgtacttcaaaaatgttaagtagattataacttatttttttttataaagggttttaaggaaactgaatatattctcaacgattttagggaaactgaatatattctcaaagattacgaattgcttgaatacgaatttatatctaaacaaaatataacaacctaatatctttaagatctttatacccgtttttcgttatttgacccattttttaattaatttgttaatgttagtgacatagaattaaaatgattatgattagagatctctaatggcatatattataatttcttacaaaattaacgttacgacttataggatgtacttcccaaataatagtatatgatttgccttattagtttgaattgattttattatttacgaaatctccctaattaattaattacaaaattatgtgattatattatttaggtagtataattaaacccgtctgatgacccaatgacccgcgtaattaaaaaatgaatatactacctaaacaatataatcaactgaagtcagaaacaacgatttaggaaactgaaaatattgtattgtttagcttaatcaaaaacaacgaaattgataataacagatgtttaggaaactgaaaatattgtcaaagatgataacagatgtttaggaaactgaaaatattgtcaaagattacgaattgttgttgaaaataaattttgtttagatataagaacgtagacacattttcaatttttagtaacattttcaaaaaatagagaattatataacattttcaatttatataacattttcgaactatatgagtattataattcaaaattgcattttttattttttataaattggattgatataaaatgttttcaatgatatatcattttcattaacattttcaatgacattttttataagatgttcgaataatggattactatataatattttgaataacattttcaattttcaataacatttttgaataatatattagtatataatatttttatatattatataaataaaattttttatgtattatataacatttttatgtattatataacatttttatgtattatgtaatctcgaatattgattagtatataacattctagaattatattaattatgtattatataaacaaaatcttttaatatctttaaacccgttgacccgttaatatatatttttttgggtaaggacccgttaatatatattagtgacatggaataaattttatgattagaattatataatggcatatattgtaatttcttacaaaatttaagttatgatccttaggatgtacttcccaaatattagtataggatatatttttttaatgtgtgagaactccatccagatatctttgatggaggtactctaagattgtagttgtaacaaatctaaccaaaagtatttatttgatgagattttttttctcagttgagacaaaaaggttttctctttgtttcttaacattagacttttggtttaggagacttgttttcgaatgttgtgggagacttaacgcgataaactttaattattcagcatggcatattttagtactatgttgtgttaaatttcatcttatttgtgtcaattttattcaacctcatacgatatatatgattttagtgtgacatattaagtttgagattagttttttttttcctcgtacaccatcaatatttagaatatacgcgcgtatacgatacctaggcctcacttttctagagattaattcaaattgattccgagatgtcgacaacggctacttgaatgtcacagcacgtaaaattaaagccaccaacgccattggttggactagtaaattaaacaaagaaaaaaacctaaactatttgtgataggcatagagttatcggtaatacgattgggaggcctaatccttggctagtcgtggagtttgcatgtaccatctttataaagaatatatatacttgtaccgctttaattaaaagtgttgattgtttttgatcggttaaaaaagctgctaattcttacaatttgttaggagatctcggagattacgagatcgatttgaaaaaaaaacatttgtagaacattttcttattgttaaataagtatatttctaattatcataatataaagaagttgctaatcaagttataattttgtataaataagctattaagctaatcaataaaagtgagagaaactattatactactaaaatttcctctaaatttatcaaaattttcaaatttcaagaccatcgtataatcaagtgataaggtcatcgtcctggtcgaagcacaaaatagagtactcaccacatttcggtaaatagatcccaatcattaaataatttattgatgcttacacgatcgaatctgtcagtttatgtgtcagttggactatttgctatatattaaacctcaacttgtttatgtacttccaaattaatttgcatatattcttatcaaactctcctgatcatttcccatttttctcataaaatgaacgtgctgccgtgctgctatataataaatatatacgtaatgtatacatggcacacactcacacctggtagaccaataataaagggtttcttttagttataagtgacacaataattttatgcatgggttaagaaacgcgactataataccaaaagttaatttggatccatataggcctaagtttaataattcaatgtcaaaattagaaaggtccatgttgtgaaaacgctacactcggatgggaaattgcaggagaagaatccgaaggcaaaggccgtataagatacatgcatgtcttggacaagctgtctctagttaaaacattaattcatatttgttgtagtcataaaaagaaaacaaaaaacgtatgaatgtattgttttcgttttcataaatataaatcagatttgggttaagaaggcccaactgaagcccataaatgaatccatcggatgggatattattataaatgtatcgcctggaatggatcccaaagcatcaccacgacgaagacgagaacaatatgacgacggaggaggagtctctttcgccgggggaggagggttacagtgtacagagagacttttggcgtcaagcggcgaaatccgatgtaattccttcatcttcttaattatttgttatctatgattgtgatttgttccttttgtttcacaaaattaaccctaaacctgagttcttattggcttctagacaacaattagaggaaattgatcgcttttagggttgtttataaggactgatagatttttttttgctggtggatctttagggtttcgatttagagaacgttaaacgaccaccaggtatgaatggagtggtcattggactgattccctattactgtcaactttataaccgttatccatatcgtatcttggtcgacctttttgctaaggttgggcttcatcgttacaatttgttcaaggtaaaatatttaaactctttgtctcctctagttggtatgttataaatatatgctctgttatatataccacattgattgattcgattttcttccttcatctgtcagggaacaagcttcgaggtcgctgccctaataaaattcaacatgttacagaactatatgtcctctttctacatgactctgcttgcacatgatcccgatccagctgctagctcattggagaaaacctttcaggttcgagttgatgaacaagattatggcactttgcatataacgtgctccattgctaggattaaagccgaaggtaacttgcttgtggtgcattattttccttatattttttttaataaaatttcacttagcttgctgattaataatgaatgttgcatagtgtccaccgaaacgcccttcatacctcactttcaaggtggcgcacgggcgt

SEQ ID NO: 5315 - DNA, 2730 bp, Arabidopsis lyrata
  Intron number 3 from transcript 485169 (locus 485169) deri ved from phytozome v7.0 (chr-ID scaffold_5; pos 13600803 t o 13603532 reverse strand)
tggtggagtatttaagctattgaaacacttgcttcttaatttgtgcaataagaaatgtctatcattcttgttcccacttcatgatcgatgatcttagagtaagaaacatgttgtatgatcattgtgaagtaatgtaatagctctctattctaaagtcaaatttggtttccactttataatgatcttagaatatatacattactctactaaagcctaaagccatatcaaatagcatgaaccagtaacaaacaaccttccttagcaattagcattgaaagaaggaaatgcacagtgaaagaggaccagaatgtcatcagaatggtgcctgaggtttctcaaactgtttaaaacattactaacctctaaacctcaaaacaagtggctatgcaaacgctccaggttctagctactacataaccaaagaataaaacgattaaaacacaacaagtaatttgaaacttgtctcatgatggggtattttgggtaattactcctgtccacatcttcctattaaactaacagagtaggaggactaagaagcaagacgactcaaaggaaaagagagaagaaagtccacaaaagaaaagagattagatagatcaaatggcgtttgaagctcttaccggagtcgacggtgatctaatcaccatatcatggatggcgtcaaagggagctaaccaaacggagcactatctcaaagaagaagtagggggaatcattattttcgccttcccaccatttttctcggcggaaggtttgttcgctacggcgaataaatctccctttggagaaataaagatgaagcgtaatcaatttccttgtatgagaagcatcggcaacaacgttgacgctactgttaacgaagctttcctcaagaatcttgaagttatcattggtccaagaacctcattttatgcttcagtaagtaaaaaaaaaaaaaggttctgggcataggtccgtacatcctcttacaatgcatattaagaggaaaacatggaataatttgtgtctgaattttactttcttcaggtgcaaagcgcggttgaaagtaaacaacagattgtgttcacaggacattctttcggaggcgcaactgcaattttagcaacagtttggtatttggagacatacttcatacgcaatccaaatgtccctgagcctcgttgtgtgacatttggagctcctctggttggtgactatatcttcaaacacgcgcttgggagagagaattggagccggttttttataaactttgttacaagatttgatattgtccctcggattatgcttgctcgcaaggcatcgatagagaaaatcctgccttatgttcttggccaattggatcctagaagagcttcgatccaagagagcgaccagataataacagagttttacacaacggtgatgcgagacacatatactgttgcttctaaagctgtctgtcagttggttggaaacggagaagcgtttttagacactctttctagttttcttgagctaagtccttatagaccagtaggcacttttgtcttctctacacagaaaagattggttgtagtgaacaactcagacgccattcttcaaatgttgttttacacttgtcagtccaacgacgaacaagaattgtctctgattccatttctaagcattagagatcaccatggctatgaggaactagtacaatcaattggtattaagctgcttaatcatttggatctgcataatccgcctttggatggagaaaactcaataagctccgctctcgacgaccttggaatggtaaatctttctcttttcaatttgtgcggctccattagctccatccttattcatgtttccttttttgcagagcacaagaggcagacagtgcattcatgctgcattagaggctgagaagcaacaagtagaaaatcagaagaagatagaaaccaaaagagagaaaatagtagaaagactaacttggatagtggagagatacaagccaaagtgtcaaactcataaaaatgggtattacgattccttcaaagattcaaatgaagagaatgacttcaaagcaaacgtcacgagagtggagttagccggtattttcgacgaggtgcttggtttagtgaaaaaatgtcagcttccagatggattcgaggggagcggagcctggatcaatttagcaactcaataccgcagattaattgaacctcttgatatttcaaactactatcggtatttaaagaacgaagacactgggccgtacatgttacacggaagaccaagccgctacatatacgctcagagagagtacgaacatagaatattaaagccaaaaggaatgattgcagaagatgtgttttggaacaaggtaaatgatcttaacttagggttacagcaagaaattcaagagaatctaaagatatcgggatccaagtgcggatcatgcttttgggctgaggtcgaagaactcaagggaaagccatacgaggaagttgaggtaagagttaagacattacaagggatgcttgaaggatggatcggagacggggaagtagatgataaggaaatatttctggagggttcaacatttcgaaagtggtggaatacacttcccgacaatcacaaactccattatccgctgtatctgcgagggcgtctgatggatgaaacaagagctacatgaaccttaaatggtcgattatttaagctattgaaacacttgcttcttaatttgtgcaataagaa

SEQ ID NO: 5316 - DNA, 13501 bp, Arabidopsis lyrata
  Intron number 17 from transcript 477163 (locus 477163) der ived from phytozome v7.0 (chr-ID scaffold_2; pos 18868042 to 18881542 reverse strand)
ttctcttatttactagttgcgaatctgctgatttgttgaaggatatagcgttctaggttttttttttcttttcctggggtttgcaaaattgtaacgtctgtattaaacgcatcaactagttgtttgacattgttcgttagcagttgaagcttgattacttatatctttgttgccaaaattttactatggtttcgtttggtctttttcatatgtgcttttgcctgttcatctatctaatggttctatttgttatgttttgcgtataaagtccactcttagttgcttaatttctattctaatatgagtcttataattctccctgcagaacctgttttgtttcttatatctgtcctttgtcaactaatcctgtaaatcaggtgaaaactcggtgttacaggccacctactaggatggataacagttctgatgaagagtcagagatcagtgagtctgagattgatgtctattatgtaaaaccttacgagctactgaagaatggggagtacaaggttaaggtgaaggacacattcaggtgccccttttgttctgggaagaagaagcagcattacaagtataaggagctacttgctcatgcgtctggtgttgccaaaggatcttcgagtagaagtgctaagcaaaaagctaatcactttgcattggcaaagtacatggagaacgagcttgctggtgatgctgatgtcccacgcccacaaattccctcgtcctcatcgaagcagtctcaactagttgtggatgacatttatgtctggccttggatggggattgtcttcgacccggtaagaagaactgataacaagaatgtgctccttgattcagcctactggttgaggaagctcgccagattcaatccccttgaagtgaaaaccctttggcttgagcaggattctgtagttgccgtcattcctcagtttaacagtggttggagtgggtttaagagtgccacagagcttgagaaggaatatgagattaggggctgcggcagaaaggactggattgataaaagaggagactggaggtctaaggcttatggttggtgcgcacgcgcggatgactacaactctcaagggttgatagcagagtacctgtccaaagtaggaaaactgagaagtttctctgatatctccaaggaggaaattcagaataagaatattgtggtggatgatctagcaaataaaattgctaagaaaaatgaggatctgaacaaggtccagtacaagtgcaatgagaacgcgatctctctgcgcagggttcttatagagaaagacgagctggaccaactttataaagaaggtttgtactgaaaattgattgcttatgtttcaccctggctgcattcgagtttatgcctttgactcgtctctgtacttttctctccagaaacaaaaaaaatgcaggagttttcgcgggagaatatcaacaggatctttagagaaaaggagaggctaaccaatgaactggaggctaagatgaataatctgaaggtttggtccaaacaattggacaagaagcaagcactaactgaactggagagacaaaagcttgatgaggacaagaagaaggtaatattttgtcattatagtttacttatgcgttgatgttttccagggtactgatgatctttttgttttccccttgttatggcagagcgatgtcatgaacagctccctccagttggcttcacaggagcagaaaaagacagatgatcgtgtcttgagacttgtggaagagcacaaggtctgttttcagtaaatggtcaaactagatctatctgtgtgtgtcaagttccaaaaaaacatttttcttgtttgtatttaaagattccaactttcttctttctgaactccagaggaaaaaagaagagacgttgaacaagatccttcagcttgagaaggagttagacagtaagcagaaacttcaaatggagattcaggagctgaaaggaaagctgaaagtcatgaagcatgaggatgaagatgacgaggacatcaagaagaaaatgaaggagatgaaggaacagctagagtacaagtgttctgagttacaagatctagaggaaactaactcggctctcatggtaaaagaacgtcaaagcaatgatgagatactagaagcacgcgaatttttgactacggtaatatattttaaatgcttccatgttcttgggtgctagtataatatgcaagagtgaaatgttggtgacatggtcaaacgcaatcggtcgagaaatctgtatgatgaggatgcacaaggccacaagggtgatttcccaactgctttaggattctgttaaacagcatcacagatgctcaccctgatatatagtccaggatctgtgaatagttccaacagccattgtggaacctgagctgtgagtgattaatttgtttacatgttttgggttttttcaggaattgagagaattgttgagtgatcgaaccatcatcagagtaaagaggataggagaacttgaggaaaagcccttcatgacagcatgcaagcagagattcacagttgaagaagctcaggtgcagtatgccatgctttgctctaaatggcaggaaaacctcaaggatccagcgtggcacccattcaaacatgtggggactggagacaaaaagaaggtttgtttatgcctcatgttacaatggagattctttcatactggccctctgtgccacttcattagcatttattctggtgaactagtagtgatggtgttgtttatatggaaatggtgtaggaagtggtggatgaagaagatgagcaaattaagaatctgagagaagagtggggagaagaagtgaagaatgcagtgaagacagcactggaggagcttaatgagtttaatcctagtggccggtactcagtcccagtactgtggaattcgaagcaaggaagaaaagccacactgaaagaagtgattgattacatgacacagcagatcaaaactctcaaacgcaaacgaccctaaaaggtaatcactattttgttccttaagttagtactttgtagtattgtcttctcattgagctcgggtacacaaagaatcttaggcttgacatagatttgcttatgcatgagtagagtctacagagtcgttttgtgtcataacttgcaaataaaattcttattgtttaagaatgaacacacatcaactagggattttcagctggtttaggatatggtcatattgatttgaacttgtaaagagtattattgaaagttgaaaccaagtggttgtgttcttgtgttgcaggaaacagatactgcaggagaaagaaaaatctggtcgttggtttcaaacttttaaccgtttaattatgccattaataaattgaagacctgtttatatgttttgtaaagtgttggggcttttctgtctcacggtgatttttgtctatactaatttccttaaaactatctgaagttatgtgatcataattatttgaagttgcactatgagcctggcaaataatatgtttttgtatgttccgtaccgtacggatatcgtgggcttaatgaaaggcccactattgctattaaacacaggcccaataagctgcaatcatatataaaaaaaagatgtaaagtttttttcttcgcgcagccatcatctgagggttagttctcttcactcctcttctccgacagttctgattctgaaactcaatttcgcgaagatttttctttcgcgccgactctcacttatttttcgatttaagctttgccttgtgaaactaacattggcccttttactcgcagataaatcggatttctttaaacagccaatttcggtaacaaaaaaaaaaaaaaaaaatcggatttctttctgatcctaaacgcattcaaataggaaacatgtctgggtaagtcttttttgtttttttattggatcattgttctcaatttctatttctgaatctgctgaattggctattgatacatcctacttggagggatttttctgggtttttgattttcatttcatttgattttttttttttatattagattgaatgttgttgtctgttggcaattgaaagttcaagattttgagttcacagttttgttttcgaattttactctgcttacattggatcgtcctatatatgcatttgtcatttcatctagctaatagttctctctgtcttgtatgttagtgtctggtcttcttgtgtttatatactgttttctttgatcataacttcacaatgcaagtggatcctttttcaaaactgaccactataacaggtaaaagttcatgtttatttgcctttctgttctaatgagttatataatttgctgtttgaagcgatgaggctgctcctgttgttcctcctgttgttgagccagctgctattccagaggacatggatctgatgactgcattggagctgacccttaggaagtcacttgctcacggtggtgtgaccaaaggtcttcatgaaagtgctaagctcattgagaagcgtgttgcccagctctgtgttttggccgaagactgcaaccaacctgattatgtcaagcttgttaaagctctgtgtgcagatcatagcatcaatttgcttaccgttccaagtgccaagacccttggtgaatgggctggtgtaagtcttgtgttttctagcttgttaagtttgtcttgtgatattctttcttgggttttctctccttaaagttagatgcttgtaatgaccaatgtactatgtggtgacagctctgcaagatcgattcagaaggcaatgctaggaaagtggttggatgttcttgtgttgtaattaaggtaaagaaaggccacatactcaaatctccttaacttagtatagactctcttgttctgtgtctggtcatcacacttgtgggtctctgtgattgaatgattgcttttgcttgttgcaggattacggagaggaaacaactgcactcaacatcgtgaagaagcatcttgaatctcactaaaagcaagattagataaaatttgctttgtttccccttgttgtgtgtttcttcttgtttagaggattgctctcggaatttgtttggatccataagttatgtaaggctctagtcttccaagactcatcacgatttgcattttcagaactctctttataaaatttagcttctttctataaatcaaattattattattcgtatcaagtaacaaaattggtcttacactttcacggttaagaaggcgggaacatgtgttatcgaaaaagtaaacttttttacatttttggctctgcttcattcttactccaccgaatctgtgcatatacctaaacaaaatgaagaataattatggaaacaaatttatgattcaacacaatctagatgttcactgaaaatttaagaaaaaaatgaaaacctaaatttccaaaatttgtgtcccttctttaccttttggagatgattctaattttgtaattagtaatatatatatataagtgatttttgcatgtttaaccacaccgcttaacctcagaatcacccgaaagctctctcctttttcttgctctgaccttgaggatttgaagcgatgccgtcaactacagggttttttttggcacagtttgtttgattacgttttttttttagggttttgaagtttgagattgtttggggaagaagaacaaatgactgctattgttggatttgaccatatttcgaaagcactcatcgatgctggaaagaatcttcttagccctccttcttcaactgacgaccttcttactcttctcgatgtacagtttctctgattcttcttccaaccaaaatcgttgcttttgctatccttctttgtagcgtttggtggaatagattctgctaggttggattcacgaaatgcgattagggtttctctttcttgccgataaggaaagcttgattgttgattttatttatatgtttgatcaaatctcgttgctttttgttgaattcgttgcgttttccacttttctggggtatttaacttgttaatttggttaaaggcgaatcctttttcgttgaatttctaattgaaacttctctggcgtaggaaactgagtctctgcttaaaaatgtggagcaagatcaaccattatcaatgcaaagcgccctaattccatcgaggaatgctttggtatctgttgaccttttaagccatcctgattctgatgttagggtttcagttgtctcttgcttaaccgagattgtgaggattgctgcccctgaagccccttacagtgatgatctaatgaaggtaaatcaaattccactaacactctattcaatttcatctctctctctgtgtctttaattttctgttggttcctacttctttggtattacaggatatcttcaggttgacaatagaagctttcgagaaattagctgatgcgtcctcccgcagttataggaaagccgagtttgtgcttgataatgttgcaaaggtcaaatcgtgtttggtgatgttggacttggaatgctatgacctcattctacaaatgtttcggaacttcttgaaaatcataaggtagattagatatacaaaaccttatttacaatacttgagaaactctttagattatagactgaatgggggttcttttgggtgtatatctaacagatctgatcatcctcaagtggtattttcgtcaatggaaatgataatgattgcaataatagatgaaaccgaagaagtgtccacggatttgcttgatagtctcttatcaagtgtcaaaaaggaaaatcaggtaaggtttcttcctatttcaagtttatttatctcgcagtcaattaacatgtgatttgatttttcttctcctcatgtcttagaatgtttcaccaatgtcttggagtcttgcggagaaggttcttagtagatgtgcacgtaaacttaaaccatacatcatcgaagctttgaagtctacagggaccagcatggatatgtattctccagtagtttcgtccatatgccagagtgtttttgacactactaaagtccacaatataattaacaccaaagaacatgaggtattatatttggcgagctttttcatttgtagagtttcagcatcttttaatagtgttgtttaaccaaataccttgatctaggggaaattggatttggggcattctcgcaaggagaatctttctaaaagtagttccaagagacctgcaagagatggaactcgacgaatcaatgaaaaggaaaaagttagaaacggaaataattctagtttgttgaaacagagtctgaagcaagtgcggtctgcaagtacagatgcagaaacagaattaggaattacagggaagagaggacggaaacccaattctttaatgaatcctgaggattatgacatttcttggctttcgggaaaaagagatcctttaaagacgtcttcaaacaaaaagatccagagaaaaggatctgggggagaatcatcacttggaaaggtggctgccaagaaaacacctttgcctaaagaaacttccccagccactagtagtagggctctgacggggtcacttaaacgaagccgggttaagatggatgtgagtgactatgattctgattctctttcttcaccgagattgaagaaattggcatcatgcttccgggatgatgaagaatcaaaccaagaagaagatgacagaaagattggaaactccagcaaaaagactaggtcccaaaatggtttagagaagagtcagaaaacagccaagaagaagccagttgtagaagctaagactgtaaactccagtggaaagagactatcagctcgctcggtttctaagagaaggaatttagaacgtgcacccctagatactcctgttccacaatcatctaagagaaaggtcgaaagcaagacaatcatagatttctcttgttgaaataaactgttaaactttttgttgaatttcacgtttggatcaactgtgcagaagatggtttctcaagttgcagctagacaattggcagacgaatctgaagaaactccaaagagccatccgacaaggagacggacagcgagaaaagaagtggtataataagctttgtcaccttctttccccattattaacattgactgccacatatctgttaccatgtgatatatggatttccatcttttcaggagtctgatatgaatggctttggcgaggatttggtcggtaagagagtcaatatctggtggccgctcgacaagaggtaagtgggctggaaacttgaaggttcttatttccaagtgtactgtaatctttgcttttccgttgatggtcttgcactgtgcagattttatgaaggcgtcatagattcttattgtactcgtaagaagatgcatcgggtgagagaatatctctgatctgctattcaattatgttcctcctatcagaatcgtgcttgtttcttaaatgattgatatggaatgtttgttcccccactggttgcaggtaatatattctgatggagattcagaagagcttaatctcattgaagaacgttgggagttgctcgaggatgacacttctgccgatgaggtacaaggttcttctttttgttttggaggaaagtgtaattgccgtgcttaatgattttcccacaatcgatcagcaggataaggagattgatctgccggagtccattcctctatctgacatgtgagtaaaacggttcattactgtgatctgtgtaaagtttcaatctttatctcttatggtcttttccggatcttatgatgttgcagaatgcagagacagagagtcaagaaaagcaaaaacttggcagtgtctgtggaaccgactagttcctcaggtgtaaggtgtgtgagaatttactaaagttcaagttattgtttatatgtaattttgatgattacttgttctgagtgaattggcgtgtatattgatggtgatagatcctcaagtagaacacctatgaagaagggttgtggcaaaaagttgaataaacaaggtgaaaaaacaagagaaggaaagaatcttagatcgttaaaagagttgaatgctgaaactgacaggacagcagaagagcaggaagtgagtctagaagctgaatctgatgacagaagagaggaggatttcgaagatgatagtagcgagaagcaagaaaaatccgaagacaaaggtgtagaagctgaaactaaggaagaagagaaacaatatccaaattcggaggttgagagtgaaggagaggactcagagtcagaggaagagccaaagtggagagaaacagatgatatggaggatgatgaagcagaagaagagagagaagaggtagatgatatggaggatgatgaagcagaagaagagagagaagaggttgatgataaagaggcaagcacaaacttgtctgagattgagaaagaagaagatgaagacgaagagaagagagagtcatgaaggagttatatagagttaaagcattgtaagcaaaaaccatttcagaaagattctttctgcttagacgctctggtttttctttcttagtagatttgttgttattgaaccaaattatagaagatgtcacctggttagtgtttgtgtcttgagagtttgtcacatttgtaattcattttcgttgttacatactagtataaagtataaaccatgttatgagcccacacgtttctctgtcggttataaaatcatttacaacgtgcgactttgaattcttcacactactgatagagaaaccacttggaaattgtctaaattttacattcaaccatcttcgactcgacggctttgaatgagagaccactatccttgtccacatattctgattctcgaaaaaggtactattaaataagttaatactcaaacataaaatataacttaaatcagttgccaaaaaaagaaattacttcaatcataattgacttgaaacataatcatcatccttcttctctcttgttaaaccccatgttaaacaatagatgtattaacttgaaacattgttcaaagatggcttgaaaaagactttgcaaaaaaaaatacaactataggcgttttagtactctattttccattattaaataaaataaatacaactatgcttaacattatctgcatctaattttttattactttcatcaaaaatattaaaaatcaattatagttgttttactgaacagaatatagttatagtttttatattttaaccacttagaaaataatataattttctcttaactttttatctttatgaaattcactatcaaaaggcatataaatcttacggtcaataatgttgtacttaacttttgttttgttgaaaacaaaatatatacgaatctttatcatgaagatacatcaaattaatctttggttaacagactgaaatacggatttaggatcaggggaactttcctattagcaaaaagttagggcccagattttaagtcaaggtcaatcttctcaactactcaccaattgtttttttttaaggggttttaaagaaaatataaaaataaaaatttagaataagataatgaatgacactaaggagaaacaaataaaaaatttaaaaagcattgttcatagattttgtatagaagatcttaaaaaagagcatacgtacgattactagcttttttatcaaggtcttctagaactccatatattttgatttataaactcattaattggttagaattttgttttgtttttgttaatgttaaatagcaatttcgtattcgaagtgttaaaagttaaaccattaaggttatatatttggcaaaaataaatatgtaaaagtcagattcacaacacctttaattgaccattttgtttggctttttaatgcatttacacttatcacctaaaactttgaaactaatgtacttctctagtgctctaagataaatttaataaaatattaatcccaataattcttcatttaccaaacccatactctttcaataaatcagaacaaaaatatattaatctaagtttttcagtttgttcttttaagaaagaaaaaattatcatatgtagactgaccaactctttagtctttaccatggttaggtgaaacacggcaaagtaattacagaaagaaactgtaacttcttttgaagtctctatatatacaaatcaaaaacgacacatcatattcatatcatactactctcttaagccctataaccttctaaaccattaagaggctttgctccattactagaagaaaaaaatgcctgtcgacgggaaactcgtctgcgtcaccggagccggcggctacattgcttcttggatcgttaagttactcttagagagaggctacacagttagaggaaccgtaaggaacccatctgatcccaagaacaatcatctcagagagcttcaaggagccaaagaaagactcactcttcacagtgcagatcttctcgactacgaagctctctgtgccacaatcgacggttgcgatggcgttttccacaccgcttctccgatgaccgatgatcccgtaagtaaataatgttttttaatcggtgtgaggagtattagtattattctttgttttcttagttttaattaattttctaaattaatgtaactaattaggagacaatgttggagccggcggtgaacggagccaagttcgtgattgacgcagcggctaaagccaaggtcaagcgcgtggttttcacatcatcaattggtgcagtttacatgaaccctaaccgtgaccctcaagccatagttgacgaaaactgctggagcgatctcgatttctgcaaaaacacaaaggtatgcttttatctatttaagttttgttatacctagttttagagatgccctaactccttaacaaagagtttctgtaataaaatcgaacatgtggctgtaacaaggtctacgtctttagcctttaaacggagaccaggttacttttggaattctaagtttctttttttttcttcttatagaattggtattgctacgggaagatggtggcggaacaatccgcgtgggagacggcgaaggcaaaaggtgtggacttagtggtgctaaatccggttttggttctcggaccaccgctccagtcagcgatcaacgccagtctagtccatattctcaagtacctcaccggctcagccaagacctacgctaacttgactcaggtctacgtggacgtccgtgacgtggcactagcccatgttatggtctacgaagcaccctccgcctcaggccgttacatcctcgccgagaccgcccttcaccgcggcgaggttgttgatattttggctaaattcttcccggagtatccacttcccaccaagtaagtcattgtttggctctttgacactttggtcaaaattatatcaaagtcaacacgatttcgtcggtctaataaatacaacctttgatttacaaactatttctgtttagtttttaagacgccaaaaaaatttatgactacttgaacatatctattcaaaattatacgtaaaaaagaaattagttaggataaaaggggcatgagtggtattggcctatggggtattcttatgactgttgtcccatttcccatatgttttaaaaatgagcacttgtgcttgtggtgagattggtgtgtactcactctcacatcacaaagtccacgtcatctgtcacctactgctgacgttgagatcttacaagatcttatagtacacgtgtttgggtatgtgtttgtactgaaaactcaaaaaaagtgtactcttgcgaagggtcaaataccgtttgacaaacacgggagtgtgtgaatgttttttctttacctactccaatatttggtcactagtttcatgacttgtgtgtctcctttagtaaattagttctatagttaatacgttacttcaaagtgatatacaagaaatccttttcacatttcgtattctgctgattaaccaatgtactttgttttttaatgttactaggtgttcggacgagaagaatccgagggctaagccatacaagtttactacccaaaagataaaagacttaggcttggaatttaaacccattaagcaatctctttacgaatctgtcaagagcttgcaagagaaaggtcatcttcctcttcctcaagattcgaaccaaaacgaagtcatcatcgaatcttagaacacatccacgaccctagaatacgatcatacccacataaaaagctttattctgaagttatacatacgtttgattttgactaaattattgatatatcttaaatcattatatatagctgattgttctttctttcttttgttgtaattgagaatatgtacgcatatgtattatatgataatggaagcggaagcaatggttttattatccgatgttattataacgctgcttcttatataactgactaaaaaaacaaagacaaagcgattcttgtaaggtcttccactagtactatcgaaaagtctttgtgaacttggtttcagtctaattattgtttaatcttatatcattacatatatatatatatatatat

SEQ ID NO: 5317 - DNA, 1247 bp, Arabidopsis lyrata
  Intron number 2 from transcript 320036 (locus 320036) deri ved from phytozome v7.0 (chr-ID scaffold_4; pos 566591 to 567837 reverse strand)
ggcaagaagccgataacgggtagtccatttccaaggtaaatcattaattctaacttcgtagaggacgtataatacttttattcgtttatcatatacttggatatttaagttttattcagcagcttagattattgtagttgcatatgctatataggttgtgttgatttgagtattgcaatgaatgtttccacttgatgaatttagaaagaataaatctcttaaagcgtagaatagttaaatgtcaaatggacaacttgagacaactaatatatagtcgaggctgtcaagttttacaagttaactacccctctttttgcattaagctaatcggttacggttagttaaaaggcagacaaaactttgttcatcggtttagttaggactaagatatataaaactaaattttagaacatgatatataattaatattcaaattaattcattgcagcactcatatatatagttaataatttcaccttttaaaattagagttagtttctgcctacaaaatcctattacataaatatgagatttgtttttgacaatcactaaattatataagaagagcactcctttctgagtttcgactaataagttgaacatgattgttgttcaaaaaaataataaaaagttgaacatgattttctatattaaaacccaattcactcaaactttaaatgtgtaggtaggtagtgtataatatataaactaattagtgttccctctttggaggatagatgtttcttgtccaaattcactatcaccaaaactatatactgtatacacacatatatatgtcttggtttttgttagtgttacttatatttccatgtggaacatgtgtcctaaatacataataagtagaagccagaaagcataccatctattgaatactattaactaattgtaagtcaggaatcaactgggatattttaacttttaatttttttgtctatatatgtccacttcccacaagttgtagtataagcttataacaattaacacttgataatatcataatttagttatttgttgtatattacctttgatttcaagtagatacataaacgacgatactgtttttgttatgctaacaattattggaccacgctatctacatatattatataatcaaactgttacattaaatcttgtagaatctcttaattagagttttactaaactattggtgctcatcgttatttgaaacaggcattatcacaagtgttcgaacccagattgcaacg

SEQ ID NO: 5318 - DNA, 3869 bp, Arabidopsis lyrata
  Intron number 26 from transcript 477381 (locus 477381) der ived from phytozome v7.0 (chr-ID scaffold_3; pos 308060 to 311928 reverse strand)
tgtgtgcactcttgaggagattgttgttgtaaatatatataggaccaaaggaaaaattattcttcatctacttcaaatttcaagattatgaaatcaactaaaaaatttcaacaacatttttgtttttggtgagtcagagagatcatatttcgtattaattaagttgcaattaacaagtttaagaaaatcactaaacctaaccataattaggtttcactttgattattaggaaagccaaagaatatgtgttgaaaatccctgcatccgatatatggatgtttcatacattcaacaatgatgattttttatcatctcataatcgatggaataatacttatacgtagttgttttcaacgcattgaaacactccttagtgaggccgtcgaaatttgtctttaagacaagacttcaaaacaaacggaggagtactatgaaacattcaatgaggcatatatgattgtttgcgatttgtgaaatgttaagactttcgtatcagaatatctgattcatttttattttatcattaaaaatacatagtacaaataagaatcccctttcgttacatgatttttgtttcattgaaccttcgagaacaaaagtctttgaagataaaagtattgtaactttcgtcgggagctacaaccaaaaggcagtgaggaagtatattcactgcattgcaacagtctcttgatagcaatctgatatttttatccgaagctaacgctaatttcaacgcatcgaaacatccactcacgtttactatcggtgctatctgttcacttgaacatatccacgatttgatcttcatctgagcttcggatggtcggaaaatcaaagctgaaaccacaattagtacgaagaacttcattttgatttgctttgttttcattttctctgtttttgttttacaatagaagactgaaaaagattatggtttatagagttgtgtagttgtagagaagtgacgtgaagctttttttatgtgtggaatttattctaaggatttccttctatttttgacaaaaaacaaaaaaaaaaaaaaggatttccttctataagaagattgacccaagcaaatacttatttatggaaaagtaacttttatatgctttaaagtttaaacataattagtttgaccaatagagtttttagttttgttggactcaaatttttattggtgattcttagttatcaaaaaaaaaaatattttcctatatttattgtttttgttaaaaaaaagataatctatgaggggtcatatatgttgaatatgaacaattcttgggttcagccctaggggtgaacccaattcattcacctcctctttaataaccaatcaaaatttgccatgtcatctaatttaaaaaattaaaataattaatattatcaaaatgaaaaaaaattaaattaaatcattaaaacccaaaactgaaataattttgctaatcatacgagagattgtggcattgatgttagaagttctacttgtataattatttgtatgctacttataagagaaactgattataagagaacggcgagctattccctttacttgttcgagaaaagactgatcgtttctgaccccaaagcttccatgagaaaacatataatcccatttcccaaaccatggtcgaccatatgcaacaccatggagaagcctcagattcatcgctcccttcttcgatgtatcatccaaagaaatcttcctgcagccaaagacataatcaatgattaacaacttcataaacactactcagtactcaatcaactcactttacattattcactctggttataatcggtttgtgcattttaaaacattttcaaatccatatagatttgcttcattttaatatagatttccatttgaattttgtatatgtaactagattttgttgcaatccatagttttgtgtaaaaacacgaaattggcttcaataaaaatactgaagttcaatcttagtttacccaagaaacaaaaaaaaaaaaaccaaagggttatgtgattcatggtcgatgtgggacatcaatgtcatagtcactcctataattagcaaaaatctattcatgcgtcccaactcattgtgagcttcaattctaaacatcaacgccacaatttctcttataactagcatacaaataattatactagtagaacttctaacatcaatgccacaatctctcgtatgattagcaaaattaattcagttttgaattcttaatgatttaatttaattcttttgtttaaataatattagttgttttaattttttaaattagatgacatggcaaattttgattggttattaaagagggggtgaatgaattgggttcacccctaggggtgaacccaagaattgttcgttgaatattgaggtcgagatagtgattaagcagtaaccacatttttttggtgaaataagaacaacaaaataattagacagacagcgagatcatatttcggattaattaagttggaaataaaagctgaaagaaaatcactaaacctaaccctaatgtattgaacaatgaatacgtaccctagcatcctatatggatgttcatacattcaacaatgggattatttaccatatcataattgatcgtaaggatacacataacacagtaatcaatggaatctctaaatacttggttgctgtccacgcattgaaacattccttagtgaggccgtcgaaatttgtctttaagataagacttcaaacaaacgaaagaccatgaacgaaattaaacatgaaattaatatatatatatatatatatatatatatatatatatgattgtttgcgatttgagaaatgttttaagattttcatatcagaattaaaaagtaaatctgattcatttttattttatcattaaaaatacagagaaatcataaaattgattcattgaacttttcgaaacaaatgcctttgaagatataagtattgtaagctctatcgggatatacaagcaaaaggcaatcatcaagtgttttcactgctctgcaacagactcttgttagcaatctggtatctctatccgccgctaatctcaccgcattgaaacatccagccacgtttactatcggcatcgtctgtttacttgtacatatgctcgtttttatctgagcttcggacggtcggaaaataaaagctgcaactacaattaataaaaagaacatcattttgatttgctttggtttcattttctctgtttttgttttacaacagaagacggaaaatgtatggtttatagacaaatgacaaaagtttttttactgtgtgtggaatgtattctaaggatttccttctataagaagagtgagtaaagaaagaccacgtactaaattaaatatatacatgatttgagaagttttgacctaagcacaaaaagtaacttatatttagtttgaccattggaattttagttatgttggattcaacaaatatatcaaggtttatactggatataaataaaaggatttaacggatataacatctatctatgtatcgaagacttaaaattatctaacgatggagatccttttttccttgatattatttttttttttttttttgcatagtttacaacttttacatatgaaacatgatgatactaataccaagtcaaaagatactgacatgcacaggtataattttaattcgtgggttttttttaatgcatatattaggatattcgtatacagataatgcgattctatcaaagaaataatatgttagctttttttactgtacaattttcttctctcctcgacattcaaattttagagttatgcaaattcttaaatgtagtgtgtatatgtgtgtactcactcttgaggagatttgggaaagcccttgaaa

SEQ ID NO: 5319 - DNA, 755 bp, Arabidopsis lyrata
  Intron number 1 from transcript 917300 (locus 917300) deri ved from phytozome v7.0 (chr-ID scaffold_8; pos 17325759 t o 17326513 reverse strand)
aaagaaacgagtaagcataaatatgtcataaaatcaagagtacgacaaaacaaagaagatgggcctaaagaccgagactggacgtgggaacccatggacagtggcggtcggggcgttgctaatatattgttggtttaaatatatagattttttatatttaattctattatatatatcaagatataaacactaataattgtttgtgattcaaaaacactattaattgttgattactaataatatatatcaaaagttatagcgttttaccataattctatattaatgtcgttataaaaattagactcttgacaaaattaattcaataaatatccctaacttgataaccctaaatattaattattaattctggtcttaatcaacatacaaccccgcgctgggcgcggggacctcccctagtacaattatatatgtattatcttcttcatcgtaggtttttttttttctgttggttttctcttcttctttttctttaactgagttccaaaaatccccaaatctaattctatgaaattcaatccaagaccatttgagttaagaatcgaaatcagagtttgggaaatagttaatctcgattaaaattccttcaatttcggcaaaatttctcttgaaatctgattcttagattcatgaaaagtttttaaattttgaaatcgtcgtatgaacctgttttacgatctaagctatctgcggcggttacagtttcaccaccagctccggaagagagagagagacag

SEQ ID NO: 5320 - DNA, 12727 bp, Arabidopsis lyrata
  Intron number 5 from transcript 489926 (locus 489926) deri ved from phytozome v7.0 (chr-ID scaffold_6; pos 20566276 t o 20579002)
actgccaaggtgttgagctgtttgtttgagtttgagaatttcattaaatcaatcacttttttctttcttccgataattttatttttcatgaatgtttgcgtcgtgatattttgtacgaatatgaagtaaaatgccccgttataaattttacatttcaaaatataattttcttcgtgatataatttgtacgaatgtgaagtaaaatgtgaaaaaatctatcaccaaatgcattttgaaaatgtattattggatgtgtcatttaatattttgtgaaaaaatcaattaaatttagtagtaataactaataaattacataaataacaaagaacttaacaaaattaaaagtaaaaaagtaaagaaaattatcaatagaaattaatgaattaaatgaaaaaaaaatctttaaaaaatcttttgaagatctaattccgaaatgaaggagttaaaaatggagaaaaagagagaagattttcaataaatttgaaagactattttatccttttaaaattaaaatttcatatgtttaatactcttatagtaaaaaaaaaaaagaaggaaaaacttgcaatatcacatatgaaaattttataatttatgataactttataatattatgaaaatttgcctatttataagttaaaattaaatagtaaattgaataagatttaattaatctatatgtgaataattataataaagattacaaccttattttcccatttgacaaatggttaacacacataacataattcataactgtaagatctcattagatttaatttgcacatctctatgctttattttagcatcatgaccatgcatctaggtatagttgcccttgcctccatggctctatatatctgcattttgcaaaacccaaaacagcaaatgagtttgttttcttcctatcaggatattgttgattgagcctaattctgtatatgtacgaaatgcattctcaagtcgccaatgatgagacatcaccgtctatgatgatgtcacttccagatgacctcatcatggacattatagcacgtgtctcgagattcaactacgcagatcttgttggaaacaggtcttagtattaacacaaaaccaacgtgaattatacagcccattttgaaaacataaggcccaaaacaatttgaaaaaacatacccaacagatctctcccttgtgtgtaagaaattccgatttctgatttctttgactgatgaactatacaagaggcgatctttgctcggctccactgaatattgtatgtatgtcaatgtgctagaaatcgaaaacaatgttactcgttggtacattcttaaccgaaaaaacaaaacaaacatgttaggtttggcccctatcttgtcactcccgcctatgcccgtatgggcaagttatgatgttgtgggttccaacatctttgtcatgggcggactttacgatcgttttaattggccaccggtaccatctagttactgcgttatgcattgactgtcgaactcacgtagcacgtcatgttgccaacatgtacgttatctgggatattgagatctaaggtcattaacgagaagataaatgtaatcggaaagtccgtagatgaaccatcatatgctccggagtcgagaattatcatggtgtttgatacacgaacggaaacgtgggagcatgggacaaaaccagtctcggagaaggatcctaggtggttcaaaagcttcccaccaacgtcaggcaagtttttattttttataaccagtttggcagattcacaaaacataaataattaatttctaagtccttaaaacgttgagccctgtccctcatttaatgtaataaatctaattaaaatttgggccagaaataaaacaatttttgtttggtatgaaataagacaaatatttgctactccccttccgtttcgttttagttgtcttttaagattttttcacacaaattaagaaaaacattaaattttctgttttaccctttattaatatattttataaaaaatatcattgaccaaaacattaaaaaaatagggataaaactggaattttcaccaaacatttgcattgaaaacctaaaacgacaactaatatgaaacaaaatttaaatcctaaaacgacaactaaactgaaacggagagagtaatatattatgagatatgagcatttgcaccttctacacatgcgaaaaactggacatgttgaatgtgacacttaagatttgaatttggatctggtaccactgtctaatcatacttgggcctgcagataaatgggacacggatgagatcctgcattataagtatcacggttgtgttatagacgacataatgtatcgctataaacgtggtaaaaatattttgataacgtatgatctaaagcaaagaatttggggggaggtgaagggtcttgaaaaattacccttaataagttcaaagtcaacgatgattagttgcggtaaaaagttgatattgttcttggagaagggtgtccagaaaaaagaaatttggtgtgcagagattacggttgaaaggcgcgaaggagagatttggggaaagattgagtgttacgatcttttgcttgatggctgtttttgcttttttcattgtctagctgttcctgtttaatacatcaaaaatttgaatgattgcactgacctaaaaactatatagttacttttcccatagttttttttaaaacgtgattccgctgagtaaatatcagtcagtatactatggctttgattgttatgacagaaatttggcagtccaacgtgtgagacaggtgaactgtatttaatttaccaatcagggaaaaaagtagaaaagtgggccgtctgcatgtagagaaatttttttgtcttttagtgataaaagcaggtcaaattaaagaattctctcccatacgtcaattgaagtggtccaacagcagatcatcaatttttaataaacaaaaaacgaaaatcaaaataaataatagtatcattcttctataaaaacacaaacacactcttttgtacttcaccaattgcatcacattacaaaaaaggtgagtgtcttgttctctctctttctttatttttacgttgcttttttttttgtagaatgtagcttttttttttttacaaaactagaaataaatattattgtatttatttatttatgtatagtataaatatcttttataaattgttataattgtgtagtttatatctctatcctaattttttcttcaaggttttaaaatatagagactaaacaaattagtaaatcaactttatgtatgttattttagtataaatcaatttttaaattttatttaaatagatagatgagttttcttctaaaaaaataattcctataattttaaatatttgcatattaataataaaattggtaaaactattaatctaaaaaaatatgtcttacatgacagtgttataagaagtggttcaagtggaaatagcaacgttgaaaatcaaagggagccttatctacaggtataaattaattttttttatcctaattttgttttgatgtttatgttaaatttattgatgtcattagttatgattatttattattttttcatgcaataatgtagattaaaatttcgtttatatgatgtagaatcgtaaggaacaatattagccaaacaacataaatatatattttgttaatcatttatagattcatgcatcaatctattttcttaaaaaaaaaatttatttttaactttttaatttactactacatctttactttgcaatattctagtaaaagaagtttgttaatttaaagtaattaaatttatattgcttcttataagtttatttagtattagtttaattaatattttatttttagtatatactttaaaatatacttttattttttaatatatacttttatttttaatatatttttaatagatacttttatttttatatatacttacaaatagaataattcaaaattatgatatttaaaatgatatgctttttatgatgtagatatgcataataatttcatacatattaatttgtaaattatgtttgattgtagataactctaaatttctatctttcattgtttatatttcataaatgtgtaatatttacataatatttcaaccgtcattgagttactacaatcgaaattttgaaagagggccaattcaaacagatggcgggttgggatggagaaatatttggcgtcgaatacaagaagatagtgctgcttgtcttcagttactacgaatgtctcttgattgttttagatcattatgtgacgtaatggaaacacgttatggattacaacctacattgaatgttagcattgaagagagtgttgccatgtttttacggatatgtggacacaatgaagttcaaagagatgttgggttacgatttggacgaacgcaagaaacagtgaatcggaaattttttgaagtccttagagcgacagagttacttgcttgtgattatatcaagactccaacaagacaagaactacgccgaattcctgaaaaactacaaacggatcgaagatattggccatatttcagtggatttgttggagctatagatggagttcatgtatgtgttaaggtgaagcctgaactacaaggaatgtattaaaatcgacacgatagaacatcgtttaatatcatggcaacatgtgatataaatatgttgtttacatatgtttggaatggagcacctggatcgtgtcacgatacagcagttctaacgatggcacaaaataatgattctgaatttcctttgcctccaagagacaagtattatgtagttgattctgggtatccaaataaacaaggctttttggcaccttatagatcttcgcggaacggagttgttaggtatcacatgtcacagttctacaatggtcctcctcctaggaataaacaagagttgtttaatcgatgtcatgcatctctacgttctgttattgagaggacatttggagtttggaagaaaaatggaggattctttgtgaatttcccagatatgatattgatgttcaaaaaagagtggtaacggctacaatgggactacataattttatcagaattttgaattattttgatgaggattttgttgaagtaatgagagatacaaatatcaacaacgtaaattctgagaatgatcttgatgacatggagagaggtagtatacctgaccgaaatcatatggcaaatataagagaaaatattgctgatatgttatgggcaaatcaaaatactttccattaaatttaattcgtttttgcttatatattgtcttttttttcactcttatgtgttgtatttggatattttatgtttaatatttaaaattatttaatagattaatatattttagttttatatgattttatttatacatagcataatatattataacattatataaaataaaataaaaaataaactaaaaataaaactgtattttatatatgtattttttaataaaatttataacaatatgtagttcttaataaatttttagttatattgtgtactatttattatttaataatttgatctgtacatgttgaacatctttcaccattcgaactcatatttgaactgcttgatctgcatgatctgtacttgtcctacatgttctgcatgttttgcacttgtcttgcatcttctgcaagatctgcatgatctgcaacgcttgaactgcttttaccattcgaagcctatattagaggtatactatctcagtataccactcacataaacttgcacatggaagataacagacgattttttcatttattctgcatgttttaaaattgtaactatattagagaaggttcatttatcaactaaataatagtatatttttgtcgttttagaaaaatatcatttatattcagcttaaaattattgttctattgattcaagtgttaatctgacataccaatcaagtacatatcttgtttatttagaagaagtttgtcgatgtcatagttgtcatccgtagatatcaaaatcacgagcatgatgtatggactaatgtttttctactatcaaaattgataatattcaaattcttacctaacaagttatatatattttagttctataatatttatttatttaagatattttattattttttcgttatatagtttttggttctataatatattaaataaaaagatattgtatattttattggttacatggatagtactagggtgagattttctagactatatttggtaatagaaataatagatctaactagatcatggtccgtgctatacagcatgagatttaatatttttttatgaattaaattgtatattttgttcgaaaaataagaaataatatagtataatagtatagttactatagtataaaagggaatatatcataatatttaatttttattactatttggatataatgttatatatttcatttgacgatggttgtatattttgtttgtagaattaaataatattatatgataaattttaaatctatattctatatcatattgggttattttattgtaggaattaaatgttgtttaatcttaacttggttgaaaaacatgacttggtaataaagaaggagagaatattgtattgtatatcaaatatatttagctgcattagatttgtatttttgtttatatgagattaacaatatatttggttcaattaggtattcataattgcattgtgtcattgagagcaaaaaaaaaaaacagtaaaacctctataaattaataatgttgaaaccatgataatgtattaatttatagtgatattaatttatagagagtttttgtttttaatttatatttttttttaaatatgagaaaaaataatttgatttaaataaaagactaaaagtaatgctttagatgctttaactttggtaattttagactttgaatatttaatatttagaagaaagataattttttaaaaacaataataacctagattataaataaattcacatatacaaaaaatatgtaacatagtgacttcaactgttatatttgaacggcctatacgattatttaagtaaaaattatactttttttaaattttgaaaacttacataagttagctattttatgaatagaaatttatttttaaaaactactaaaaatatattatctttttatatatatatgtaaattcacacgattattaatttatgatattattgggaccatatttttacatagagatttgaaaaaaattattatcttattatcttatcgaatttggtaaatttttacactggcccgacttgggaccggcaaaatttattattttattgtgtttattaatttatcgagtattaatttatgagaaattgttaaaaaatgcccctttttcaataccccttttcaaaaatgccccctttgagagtccatttttaagtttgccctcttttaatttttaatgaccattttacccttatttgaaacaaaattaggtccacaaaatacaaaatattttttggcgggaaaagtgatcccacaaatttttggcgggaaaagtgatcccacaattttcccgccaaatttttttttttctcgggaaaagtgattccgcaatttttttggctggaaaatttttggcgggaaaattttacaaagtattttaaaggttttacagagtatttacaagtgttttgtaaggttttacaatgtattttaaaaggttttacaaggtacttataaggttttataaggtatttataacttgtaaaaccttataaaaaacttgtaaaaccttataacttgtaaaaccttataaaatagcttgtaaattcttataatatcttataaataccttataaatacgttgtaaaaccttttaaaatacattgtaaaaccttataaataccctgtaaaaaccttaaaatcacttttcccgcaaaaatttttttttggcgggaaaaatttttacgggaaaattttaaaggttttacaagtttttacaaaatcaaatttgtaattttgatgtgtgcacattgtcatgttttccttatatatttgtgaaatattttattaaaagaaagataatttagtcattttgtacataaaaatgagtattttttaaaaatggacagccaaaggggacatttttgaaaaggaatattgaaaaaggggcatttttgcgaatctcccttaatttatagaggtttaactgtagttgtattgggtttaagtttttacgtgggctatattggattttgtttggcccagtatcatgttgttttaaaataaaagaaaacgaatatttgataagaattttatctcttctttcttgattacggaataaatctatgaattaacaacgacaagacgcaagataaaacgcaaatatcattaaaaagaatttttgttagcaagtctttcaaatatatttttgttaacaagttttaatatatttgaaagtaaaaatctaagcttacaaatcttatcattttttcgctgtaattttatagtattcaatcttaaaatctggttaaagcatatatcaaagtagcatcaatggaaaattaaaagtactgtaccttgaactttcaaaattacatcccaatcaaatgtgaaatatgcttttccattatcaaatataatatgcacctgcataatgtagaaaaaaaattatattagaaaacgatattaacatcaatgtatatgaaattatatataatgtgataataagaaagctaaactgaaacaaataaatttgattgagcaaaattagaaagaaaataaaatcatataaaactggaaagaaaaaaatggatgtcttgttcagataaatgaatgatcttatataatgaagaggagatgtcgatttagggttaagaaattaaaatcttctagtagaatattcttttagcatgtagagcaatcttaataaattgaatgatagtcttttgattaaatcttttaatatttacatattcaaactaaaataattaactaaagatataaattttttgttttttaacaaaaaagccttatttaaggaaataaaaagatttgagtatgatctcgactttaagaatattcagcattaaatatatttagaaattttgtatttattatgaaaatcttagaaatttcttttacatttatagaaaataaatggaaaaatagattatgtagcatttattttttaaaattttaataaatactaaaaataacaaacgaaaatatagttaccaaactcggagtagttagcaatttaggttttaaattttagatgtacaccacaaaatttgtaaaatttttattaaataaattttaatagcacaaatttatatctagatctaaacaaattataactaccaacaatattttcaaaggattttatggaaactgaataacataaaatatttgatgcgtgattaatgtaaataaaaatgatctatttctattttttgattagtgaatacttttatcatacgtgaataacaacattttctttataaattttatttataacaattgtaaaatctaaacaaaatctctttaatatctttaaacctttgacccgttgacccgttaatatatattagtgacatggaattaaaatgattatgattagagatctctaatggaatacattgtaatttcttacaaaatcaacgttacgacttataggatgtacttcccaaataatagtataggattgtttagatatttatacccttaatgagattttttagtgttctatgtcaatagtatacctagaaaactttttggacagtctcatctctttattataactcttcgtcatgtatttggtcactaatatataattttacattcataaaatatgtttcaaaagtgtttttaatcacagttttttttttttttttttttttacatttttattcacaaaactttttgacatctttatacaatatttatgatataacataaaaacacggtaaattttatgtaataattcaaatatttgaataatttaatacataaacacaatcaaatgtttattttgtaaatttaatacataaatttttttaaaaaattgtaaataagtttcccagcgataacctagtagtatataatgtcatattcaacaaatttaatgttaatcttttaaaattcactccctctttgatattaattagtagattacgacggtccacaaaacccacctacataaaaaaacgggtccaaatctgaggagctccttactcctcacttgtcaatctatttactctccaaaaatctcacatactctcctactcttaataaaatacaaaaactctattttacccttataaaatcaaatttaataataaataacaaaaataatttgaccaataagaagctattattttgaacaatgaaaattgactgttccgaccaatcataacattccatatcagtccgtatttgtgtatttgtgtctgtatttaatgtttgatactctatatttgtataacttgataaaacttggtttcttaatggtacaactacgaccaatttaacaaatctttatatgtaatttaataaattagttagataatttataaaatcttcatatgcactttagaaatttaaccaatgtttaacaaatcttcttaaataacattagttaaacaaaatttataggatagtttccattaaactcatttttgtacaaattgtttaataaattagttagaccatttataaaatcctcatatgcactttagaaatttaacaaatcttcttaaataacattagtttaacaaaatttataagatagttttcattaaactcatttttgtataagaaagaccttatacttttaagatgactttgttattgttatccccattgcattgcaaaacacacaaaaataacgttttgacagatatttttgcatgaaaacataggaaatgtacctcaaataactaaaatcatgggtataactaaaaaaatttagtttcaatccaagtataactaattattcaaaaaatctcaaaaagtacaactgtgtatatgcgagtacaacttgaaaactaggaataactatgttcatttttgcagtgccacctggcagatgtacttgttttacggcgcccacttgcaatttatgacggcgtagtttgaccgagagcagtttgacccacgttttttacggttttaaaattttgaaaattttcaatttttttattttctactatagaaagagaaaaaggatgagagagaacaaaatctgggtagaacaactacgtaccaagttttacctagttatacaaaaatttcaaataactatattaaccaagttgtactaagtttaacaaactgacgtagttatgccaaatttctatataagttacaaaaaaatatagttataccaagttctattagttgtctaaagtgtatagattatactgttgaatccctgcgagaaattgaatttgttgcttcataatccacttatgccatattcttattccatgattttctctggttctataggattcgatacagttgggttttttgttcgagccactactctcttgcacaaacgtacaaacaaaatcaatcgattagattatcacttctattttatcgatcagattaacacatccattcaaacgattctattagcacttccattccatcacttcagattctacacaaacaaatcgactaacgattaattatggtatccctaatttcaatcgtttttatacaaaacccaaaatgaaaacttgattttaacttacacaaagacgtagttgtctgtagttataccaagtttgacgtcgaagaagtagaaaaaaaaaaaaaactgttaagtgtcaaatgatttctttcaaaggttgaacgaaccctaaagaaaaaaaaaaagattttaattggatatgacccaataagtgtgagttcggataattgatgatccgattagactggttgggtcgtaaatagatgaagtttttaagggttacaaagtctttgtctcatatttcgatttaaaataaatcaaaaagaaatttctttttagaagaggagcatttgagaaaaaatattgagcttggagagcccctgagaatttgatcctaaaaaaacagagatataagaaaattatagctatcaaaaagaatttcataaaattcaatggtagtagtagtatgggaaagaactaatttatggtaatgaaatggttaaatgatacttattttaagttgagaactaaaaatgtcctttttttttatactttattagttttcaaaatcataattgttgtttacaactttcatgagaaaacttggacacgaatgataaagataccacagttgagtacagatttttgggtatggtttcggtttagtttggattggttaaactagtttagacatccttaatgaaaactactaggccaaaacattaaagactttttttgtgatggctatttgtaatttacaggatagaggagttgagatattagagcaggatctgaagctgagagaggaaaagctcgggagcgaatccggattttgaggacgaaaagaagcgtctggccgagcttttgaaggaaactgggccgtcgccgaactacaaagccaagtcgctccagaatctgattgatcctaacgcaagacctcccaagaaagagtattctgttaagaaatggcccagccttggtttcaagttctgaggttgagaatttctttaattcaatcactttttt

SEQ ID NO: 5321 - DNA, 557 bp, Arabidopsis lyrata
  Intron number 1 from transcript 313117 (locus 313117) deri ved from phytozome v7.0 (chr-ID scaffold_1; pos 9799197 to 9799753 reverse strand)
ggctaagctctcagagcaaaccgaaagatacggtaattttttcgatttctggatctctgttttggaaaaatgatttgttcatgtttctgaaaaatccgatctttttgtttctccgatcgaatgaatatatgaatgtttttgggtcaaactagatttgtttttacatttccatagattttctttgtagcccttttacggatttgtgtgtttctgggctgttacttgatctggatttagagattttgatgagacctttaagtaatttcttgtttgatgttctttaggtactgtgatcttatgttgatatatacttttgtggaatctcttagcttttacaaaggtggctagtatgaaaatgaaatagatctatgtttttcactctctgtaagaaatcatctttgcttttggttttggatattttaaagtttgatgcagaagaatgaaaaaagatttctacttttctttttttgtgtgatttatgttgcgtagttagattggtccatgttttctttttactgtctttaatacccaaattctttgaaattgttgttgcagaa

SEQ ID NO: 5322 - DNA, 1572 bp, Arabidopsis lyrata
  Intron number 4 from transcript 311954 (locus 311954) deri ved from phytozome v7.0 (chr-ID scaffold_1; pos 3470067 to 3471638 reverse strand)
caggggcatgttagaatatatgcggaatatggccaggttatgagcctgggacaaatcaagagtgagcagctcatgcttcactcaaagagaatcacaagaacaccaaaatcgggtttgtgtgttcatgtgtaaatccatcaagaaactaactcaatgtgagctgttcttgaggtaaaataggagctatacacgccaatatgagctgtgtatactcaagaataagtatgagaggaagaaactctctcataccaaagaaatcccaaatacccttatagaatcgttttagaagaatggaatagaaagaatttgaggaaggttagagaacaagttttgctaagacttgatctcatccccgagaatattcagaccctaatctacccatttgaatgtgtaaggaaacgatttagtataaggggaagacatcccacaaagagtgtttttgtttctcaattgtgagagcttagctttattaatgagcatgtgttacatatttatacacaaagtagaagagacaaattgtctcatttctagacctaaatccaacggtcatatctaccaaaacgtccacaagatgtagatcgtgtggcttagagtgatttggaccattctagaaggtgatggctccaaaatatcttcccacttgttgcttttcctcaaaatgcaacatgtggctcttaggagagagaggagcgtccttgatgatgtcacatgtggtcctccttgcaagttgcttgctttcttatccacatgaggctccttttggcgcttaaacgcatttgaatctcgggctactaagtgtgattggtttgacaccaattttgcacatctttatcttcgacccggactttgcacattctcctcttgactttacacgaactttgcacactcggttcttgatcgacccgaacattgcacgtccgctacttgatcatctttacacggattttgcacatccggtcttgataatcttttgacaccaattatgcacattaggtcatgataactttgacactaattttgcacattggtgtttcgtcttcggccttgtcttgagagcatcggccttgactcttcttacgagtttacaccaattttgcacttcggtgtcttggtgactttacaccaattttgcaccttcttctcttgatgttcttctaagtgacccgaactttgcacggctatgatcaaaccaccggatctcttctagcttctttcatcgcttcttctcatccggttcactaccttcatggcttgtgctcattcggttcaatactccccctcaagctttaaccgtaagggacgaaggttaaagcttggactttgatgagcgtggtcaagtcatgcttccttgaaccacaccaacttggcctcgtcttgtagacttcggccttaggctttggattagccttttcttcttaatactcccccccaagcttgatcggcgggaaccaaagaccaagcttgcaacacataaaggactacctcgttaaaaaccttagcaaagaaaaccacttgggtaaaactttgcttaagggaaaaagagtgtagtctttatggttgaatgatgtagct

SEQ ID NO: 5323 - DNA, 727 bp, Arabidopsis lyrata
  Intron number 1 from transcript 913433 (locus 913433) deri ved from phytozome v7.0 (chr-ID scaffold_1; pos 17517031 t o 17517757)
taccgattttggtttgtctgtcttctataagccaggttcgattttctcttttggttgattgattaatcttggaatctttcatgtttgtttgatgatgatttgtttcgttgtattgaaagtttgcttcttgagcattgtttctttgtttaagggaactttgctttgtatcttcatcgagtctttgaaacttgatgtgttgattggaatgattctgcatttgtgtctggcttgtatctgtgattcgttggaaaccaaatggggtatggctaatgcgggtggtttcatcgtctaattggtttttgtttactcttcaggacaatatctgtaagatgtagttagggagcttgctttgtttatttgttcttcattgaggagtctctcattggaattaatttgcatttgatcaaatctttcgtttgtttggtttcttgatagaaacaggttggttatgttctatatgaattgaaaatcgaaataaggcttctggtgtgtgttgggttgatgcaaattttgctgcttgagcattgtttctttgttagagggaacattgttttgtagatgttcttcattgaggagtctctgaaacttaatgtgttggtcgaaattattctgcatttgtgtgtctggattggatctctgattcctttagaaccagatgggtatggccaatgccggtttatcgcctaattggtttttttgtttgcttcttcaggacaatatttatacg

SEQ ID NO: 5324 - DNA, 3666 bp, Arabidopsis lyrata
  Intron number 3 from transcript 472599 (locus 472599) deri ved from phytozome v7.0 (chr-ID scaffold_1; pos 10377010 t o 10380675 reverse strand)
tactggtgtcgagtctgccagaggagtttctggtatgtcttaaattaaccctctctggtttagtggttcaatttggtggttagtctctgagtgatgtttttgatcttttgtgttgtttttacttaaatattatgccttcctcgatctttccataggtttttgattcatatgaccagtttttgaaaaatgattggttgcttattgataaaataaccctaggttttttaagtgatcagaagcaaaatagacaaaaagataaaccctaggtttggtgactgagccacaactttcgtttccatagctactttttcgggaccttgatgggttttgttttgtggctggttttttttttgggcacgttgaaactcaggagacaaaggtctgtttaaggtgttgtgcaattattttactcattcatttaatgttttagccatgggattagggtgttggagtggggtggggatttcctcttcttcttgtatttgatctttgtgctaatcatacatttttactttatatctttttcccttctttctctgtcagaaagaaaatggtgtagaaagcaataaacttttgcggtagagattctgattttgacgtttcagaggcttgttgcgtactgaatgttttttcaacttgttgcttttttccagtgaaacccaattgacagaaaaacctagtcataactttttaacaataagtgtagttgattttcatgatcttattttacttcacttctcgtttaacgattgtaagtcgcttccctcttctttacattgtttacttattgggattaccagcttttctaggactccaacttctcttggtgagatgattttttaaccaataagccaaacaagttatattagcaattaaaaacacctttttaagcttattcatggatactggagatctcataatagaaaaagtaagttttcattataatttctacgtatgcttaaagatttttagtagtaaaaattctattatacatgtcttaataatatgtaccatacaatattatccatctaattagtagattaaaataataaagatatgactgaaattatattttagaagtctacaaaacgacattctctgttgaatcctgaatacgacatttattatgaagaacttaactttggtctatttcaagttccaacggtttgagaacaaaagtaaggagattttggttgatcatcggaaatagtaacattgccaagtggctactcttatctgcatgtccttgttggagtcttgttggacatacatgtgagtaataaaccaaaactgactcatggtgtttagagggtctaggttttatgcttatacatgaatgaaatgcttcaaagaagtgcctttctttgtggcctttctttgtggatttgctgatattatctctttagaccacacatggatggttctaaaactagcaaaaacattgtaatgccttgggaaatttttttaatttaaaatagaaagaaaaactccacctgaaagagttagctgtaaagaaatgtaactccatagattgttggacttttttcagctttgcagggtttttccattatcgtggtagatctcaaatgcagcttccacttatactttggtaatattgtttattgaggaaaaaatgctgctgagatatgaaaacacatcagcttatatgttattaactaatcgagagttagcatagagaatcaactggaaaaggtaatagatcactgcaagttgtccataatggacgaatgtttgtgattaattattttaaaatttgttcgaagtacaacttgctttttgaatgatctcatctgggttttttttttttattgggtgtgagctttatataaccatctttttctttcacctgaatacaatcataaactaataaagaaaaagaagcttacaattgttagacaagattcacatgggatgtgatgttatctactaatttctcagttcaatcacatgctttgggttcttccactaaagtgatcatatagatttttgatttcccaattcttgattgttgtgatacggtaatgcaaatttagcgaacgcccttctttggacttgctgaaaagctacatacacattcttttcttctaatgcttggtcatcttgctactgagagaggatggtctcttaattgactttttttagtcaacatttgtcttgttgcatgcaatctcatcaatgtttcatgtttgcatatttgatctagaagataagaatattgcaatgggaagaataggaacatagtgcatgataagcttgaattagaggttcttttggtttttgttataaagtaaaagtagaaaagtcacatggactcccgcggattccgctaatgaccccaccaactttctctccgaagattttatttgtgatttggtttaaaaaagagaaaaaaaaaagaaagacatagggttctctacacaccacaatcaaatcatctataagagactgtgactatgcttcttctctatctttctcaactcttttgccatgccctctggttgcgttgttcccttggtgggtcgtattatgtctctctgcggcacgctacttgcacgtgtctacttgcatgttaccttcttcagtcaaccctattttccaagcagtcaatgcattgctgaaattgtaataatattatctcaaccacatactaactatcgtgttttgccagtaaactattaacctaacgactcttacgtgtagtatattgtgtatacaatattatgtgaacgtaatggtctctctaatattgatcagctcatgttttatgcattttaagatatcttcgtaatttataatggcctgtttgatctctctagttatgtttggatttaatttaagagattgtaggatcatttaactttctttatacatgttaaaactgaacattttttttcttttaacattgtgtatgtagtccattattttgcatgactgactagatcttttaattgggactaaccacggttgcttggtccgactatagtttctgccacatagacaaaactattgtaaaatcaggtaatgttcttgaatcatctttgggttgagttttggtgtcagaaaagcttggtaagtgggtcagtagagtcgttggggcatatatataaatgttcaaattcattaaagaaagagagagactgaaaggaaatttgagttttggggtgttgtggagaacataaatatgaggtgtagcgttatttccgggggttcacacaacctctatgtggtatttaacacgtgtcgtattgagattgggtaatgagtaggccaaagggggatgtctcctcatggggacaagacttattagtcctctccctgacaaatgacaatggaggtaactattcactgcggcggttttttgactgctgcactcaatcgtgtgcgtcctcgatattctctcccccttaccactctttcttctttcctttttttgccctctctctcttctctttagccgttttagccgagaaagcccatttaaacatgttcatggtagtgtgaatagtgattatcctttagtagtctacttatgttacatttacttgctataaccattctctttactgttttctctacgtgcatgtgacatatgttgaatttttgaggcctagaaagttactgagttgttaatttgtgtaacagagg

SEQ ID NO: 5325 - DNA, 10663 bp, Arabidopsis lyrata
  Intron number 3 from transcript 895321 (locus 895321) deri ved from phytozome v7.0 (chr-ID scaffold_6; pos 21190382 t o 21201044)
tgttcccaacaagagccttgattatttcctctttggtaataaacaataacacttggtttaatttatgttccttttagaaattttatcttaaatgcttatttctctaatgcagatccaacaaagaagactcagctaaattggaaaagacggtacaacatcataggagggattacgcgagggcttctatatcttcatcaagactcaagactcaccatcatacaccgtgacatcaaagcaagtaacattcttttagatgccgatatgaaccctaaaatagcggatttcggaatggcaaggaattttagagtggaccaaactgaagacaatacaggaagagttgttggaacattgttagtattctaatattcttctttaaatttgataaacctctttttgtttctttttgtttctgataacataaaaactttcatgtttatatttgcagcggttacatgcctccagagtatgtgacacatggccaattctctaccaaatctgatgtttatagctttggagtattgattcttgagattatttgtggcaagaagaacagcagcttctaccaattggatgaatctggtggcaatttggtgacacatgtgagcaaaaaccaaaccaaaatattactctgttttgtttgtgaccacgaaggattttgattctgaatatgagtttcttggcaggtttggaggctttggaacaatgattcacccttggatctcatcgatcctgcgattaaggaaagctacgataatgttgaagtcattagatgtatccatatcggaattttatgtgttcaagaaactccggcagatcgtccagccatgtctacaatctttcaaatgcttaccaataactccattactctacctgtgcctcgaccgcctggatttttcttcagaaacagatccaatttagaccctttaacctatggatccgagtcgggacaatccagcagccaatctgttcctttttctatagatagtgcgtcaatcacgcgagacactcctcggtaaaatgattgcttttgcaatagtccttagcattttccttgtaacgcaagcaactccaattttcaaattctatgtgtaaagaagttaatagacacatgatcctatttattttgtatgtaatgtgggtacatataaaaccaaattaaacttatgtgtaggtagagtattcctttcttctttttattccatggcaagacgagaatttgtgaaaccacaaaactgatacattaacctctaaaaacaaccacttatgagcccaatttagacttcttcaatcctctatgaaaatcaacagcttgcttattccacttgacttgatacaagagctttttgcgcccccagattttctataaaccggcaacaaattttattacttcccttgaaacatccatgcaactacacgtataatgtgatgatgttccactaagtttgatcaacaacatttgtagacctctcaggtttttctgtttcataattttttttttttttttttttttttttttttttttttttttaattcatggtagatcctaagcctatggagggacccaaactaatccctaagggaggtgcagcccatgaataaactctttctctggatattcaaatggactgtaagcaaaagtctatatccatgtggatgtccaaaaacaatgtgttggagtttcacacagcaggtggatcaaacttgagatgtgttggcacctcaagcccatccctttactgttagaccacaaggtcttggacttttcatcaaactttatctagcagcttcacatgttctagtatatcatcttgataaagattaccaacaacctttaatccattctgttgcttgaacactcatgaattaactcacaatcgctaacgaattttaacatacttcttgaaaataagactgagatcaagccactgtctataccatatggagagcaagaaatgggcgtaggcatggtgaagaaccgaatccagtgaaccaattagttcggtaaatagataagcaagtacgaaatcaaatttttgcaatccgaagaatgggagacaagcgttatgaagagggctttcagctatatatggctccaatatcgtggccaaatgtataaacgtttaaacattataaatacttaaaattttataaacgtttagagtaaatataatatttaaattttgtaaaagtttataatattaataatctttgaactctaaaaaattaaaatctctctctctctctctctctctatatatatatatatatataaccatttataaataaacttttaaattgactcgaattatatatcttttaaataaaagtattcttaaaaaataacaaaatgatgtttagtttcacggggcggagttatatggtgggacgggtttggattgatattaatacgggatgttgtaccacgggtgaaaatataaaattaacaatcaaaatataattatgaaatcttaattaaatactaaacataataaacaatattaacaaaacgactacaactgcaaatttaaaatttttagtcacagaaaatcgacctgctttaagatctgtgacgattattacataaatatttcacataataacaatgaaatatgaaaaacaaaccgtaactatatataatacataaaacaaacaaaaatattctgaccttttcaatttcacataataacgtctaattgataaaattccaaacaaaaacaattaaattgtatatacatcaaacaaactaaatatctatatactccctccgtttcattttacttgtcgttttagagttaaaattttgtttcataatagttgtcgttttaggtttttgatgcaaatgtttggtgaaaattctagttttatccctactgttttaatgtttcggcgaatgaatttttccctactgttttaatgtttcggcgaatgaatgaatttttctcacacaaatatattaatttgtgtgagaaaaccttaaacgacaactaaaacgaaacggtgggagtattatttttcaaatcgaagcaaattaaaaattctttatgcaaaatataaatcaaatataaataatacaagttttaagttttaaattattttttatataaaaaattatcatgcggtgtaccgcgggtcatatcctagttgtttacattatgttaatgttacattatgctcggcaacggaaatctttttttgtttgaaatcagtaactttctgtttcaatatcgtataaattcataatttaataaaagatccgttgtagcacaatagttaaactatcgtggtagatggctttctgggttagaagcccggcagcggaaatcagtttttgtttgaaatctgcaattatctgtttcaatatagtatgttatagcacaatggttaaactatcttgtagatgactttccgggttcgaagcctagaatcataaatgttatcgatgatatttgaattcgaaatagtaatccccacatattccctaatatttagaagtttttgttttaaacgaaatttcaatttgaacacattccattttgctatacactttcactaactatgtcatcataatagactgtattttagttctatacactctatcttattgatgatatttgaatgataaatagtaactcacacttttttctattagtatatgtgtttttaaatctaatctcaatcttaaacattctattttgcaatacaatttaactatatatttcatcataatatacagctggattttaattctacacatttcatcttaatagataaaagcttaaattttcatatcaaaataatatgtatatcatatcaaatcatatcttaattgatattaaaattaattgaccgataatacatgtaaaaagagtgtgagtttttttgattaaaaaataaaagttaaatttttagatatagacataaaaattagtatatgtaactatgtttattttttcagttttcttgttttcttaaagaaaaaaaaataaatctttttcaatacatgtcaatatctaatctatagatataacatataacataatctgacgaattattttgaaaaccaaggtttatataatcagatatcaaacacaaatcaataaattttagttgagtcattggtccatggtcatttttcatcatttacctaacgtgtttataaagtactaataaattatccaaaacgtttaccgagttgacttgtaataacgaaaattctacaaacgcaacctgttttgacgatatatcaaccctccaaaatatacttttcttttatagattcaagttccaaaatgtgcatcgagtttctgagcaaagtaaaatctcaaaagaaaatgtgtctaagcaatctgttatcaatcctctgttttgtcctacccgttatatttggttacgtgtctgcatcagaaaaatgcggggactcaatgtttttcactcccaacagtgcttacgatacaaaccgtcgtctcgttctctcaactcttgcttccaacgtcagttctcgaaacaaccgctcctacaatgtctcggtcggtgaaggagctggaaggatatatgccttaggtctctgtatcccagggactgatccatgttagataattgagttttgtgtttacgatagtgaaagagaaaaaaacagagtatgaatgtaattgactttattgatctgaaaacttgattgtattacactctgttgtgttttaaaagacaaagactcgatctatacttatatgaaacgaaacgttgtgtttgtgtaataataaaaagacatgactctttgatctaaagacacaactgtaaaacaaaacaacttgtgtctcttgaacaaataactaacttatgtaaatgtgatatgatacgagatttgattatccttcaacactcccccttaatcatatctcggcttcactccaagcttccttctaagatcttcaaaccttgtaacacttaaagccttggtaagtatatccgcgagttgatcttctcctttgcaatattcaagttgaatgagtcctttgtgctcggcttctctcacgaaatgatacttgatctcgatgtgcttcgttcttctatgttgtaccggattccttccaattgctattgctgacttgttgtcacataatatgggaataccttcttcaaactttaaaccgaagtcttcaaagagtctttgtaaccatatggcttggtttgtcgctgcacatacggccacatactctgcttcagccgttgattgagcaacggtttgttgcttgcttgattgccaacagaacacggctgatccaagggtaaaaacatatcctgatgtgcttttcttgtcttcaacggaaccaccccaatcgctgtctgagtagccgattaaccttggcttttccacacttgtgaactgaaccccaagacttgatgtacctttgacataacgtaacactcgctttgctccctggtagtgcttcatctttggcgctgacatgtatcttgcgaggtaagagcttgcatacattacatcaggtcgtgatgcacataggtatagaaggcctccgacaatgcttctatactttgtttgatcgccatattctctgtcatctccttccttcttaccttgtggtgtaagtggagtgcttaccatcttgcttgatctcatcccaaacttgtctacaagtttgttagcatacttttcttgagaaagaaatatgccgtgatcatcttggattacttcaaaaccgagaaagtaacttagcaatccaagatccgtcatctcgaattctctcttcatgttttccttgaatgtattaatgtgatgaatgttgcttcctataatgatgatgtcgtccacgtaaaggcttacgatcaacacacctcttccttgcttcatagtatacagcgctgcatcgttcatacttctctcaaaaccgttttgaataaagtatgaatcgattcttccataccaagcccgaggggcttgcttgagaccgtataaggctttgtgaagccttaacaccttctcttcctttccttcaatcacgaacccaggtggttgtgtaacataaacctcttcttgtaattctccatttagaaaggctgacttgacatccatttggtatagcttccacttcctttgagccgcgtatgcaagtatagctcttatggtgtcgtgccttgagactggagcaaaagtctcttggtagtcaactccatgttcttgagagaaaccacgagcaaccgatcttgctttgtatttgattggctctccatttgcacccgtctttatcttgtagatccatttcacactgattacgttcttcttctctggtttatctacaagtttccaagtgttgtttctctcgatcatcgatatctcttcgatcatggctcttctccattcctcgatctcaactgcttgatcatagttttgcggttcttcttgtgcaagaagacatgcttctatgacttgagccgcttcctctaaattcaccctcggtgcgttttccaagatttcagtcatcgatctgaatttctttggggtgttggagtctcctccatcttcttctctggtattttgagaccttccgggtgagatttgcagatttttgaaagcattactcacttgatctatttgattacttagatcgttgcttactccttcttcattgctttccgcttgatctcttggtgcattgtcgttggttatgggcaagacaaaggttttgtcgacttctttttgttcttcccaactccatttcttctcttctttgaattcaacatctcttgagacttcgatcttctcgttttcaaggttgaaaactctatagcccttcgtttgatcgctatagccgatgaagatgcaccgcttagcttttgcttcaagtttcttccttctttgatctggtatatgaacgaaacatacgcttccaaagacttttaagtgtgacacattaggtttgtgtccacaccacttctccataggagttagatcaccctctattgctcttgttggtagacggttttgcaagtaagccgacgtgtagacggcttcggcccaaaacttgaatggcaagtcttgttctgcaagcatcgttcttgccatttccaccaatgatctgttcttcctctcggctgatccgttctgttgtggagagtaaggcaaagtgacttgcctttcaatgccttcttcttcacaaaacttggtgaattcttttgatgtgaattcaccaccaccatcggaccttaatatcttgatgaaacaccctgattgcttctcgatcatcgctttggccttcttgaaagtggagagagtctctgatttttgtttaaggaagtatacccaacacatatgggtatagtcatccaaaaacaataggaaatatcgacttccattaagtgattcatgttgcattggtccgcatacgtccgtgtgtacgatctccaatctctcatttgtcttggattgagacttctttggaaagcttttacgagactgctttccaatgttgcacgctccacatgattccttgtgaatcatgaactttggtaatccctttaccaaatccttctgttgcatttgatggagccgagtgtttcccacatggccaagtcttttgtgccatatcttcatctctcccggttcattaactagcattgcttcttcttgaaccgtgcttagctttatcctaaagcttttattcatcattggaatctccaagatcttcttctctcttgcatccagaatgatgcatttcttctcttggaagcatacttgatagccactagagattatttgtgacacactcaacaggttcttctccaaaccaggaaccaaatagacgtttctgatgattctcttcccatactttgtcatgatcgtgacgtctccctttccagctgtcatgactatctctccatttccgactttgatcggaaccttgatgctcttgttgatatttgagaaatatctctcctcctttgtcatatggttggtacaaccgctatctatcaaccatgtgtcttctcttggtattgttgttacttcctcactcgcggtgaacaacatgtgatcttcttccgattcactttcctcttgactcacgtgtgctttctccttcttctttgatcgacacacgtttgcgaagtggccaatcttgccacaattgtaacattctttgttactcttctgatctttccattgatcattctccttcggtttcttcctgcattcacggttagtgtgattgcttttcttgcagaactcacaccatttcttgccttgtgtgccacggcgtttggtgtgatcgcgtttgaaaccggcttccttgtcttttgagcgcgtgtagaatgctccttcattgttgttatcatctcttacagccaatcttgcttcatgtgccttgaggattccgataagctctgtcattgtaagttgagacaagtcgcgagtttgctccacaacactaacgatgctatcgaattttgcaggcatagagatgagtatcttctgaatgagttgtgcgcttgttttcctctctccatgatatgttaattgactctccaaatcaactaatttatcggtgaatgatttgacattctctccgtcattcatcttaaggttttcgtattctcgacgcaacgtttgaagtttcaccaatcgaacttggggagatccttcatattcgtctttcaacgcttcccaagcctcctttgatgatgttgctccggatatgcgtgagaatatctgatcagtgacggcggtttgcaaaatttgcaaagccatcgtgtcgtttgtaactgcttcttctctaacggctactgctcttaatgatgcaggggtttcttctccttgtaccggttcaggcggtacgcctccctcgaccactgaccaaagtttccttgtcctaaggatggtcgacatcttgatgctccagaagtcatacttctctccgttaaagatcgggatcacttggtgtgaagagccttgcattgtctcggcttattgcctttgacagatgcgatctgttgcggttattcttcgcctttcttctccttttttttgtgttttactcttgtcctctctcaatcgaatagctctgataccatgttagataattgagttttgtgtttacgatagtgaaagagaaaaaaacagagtatgaatgtaattgactttattgatctgaaaacttgattgtattacactctgttgtgttttaaaagacaaagactcgatctatacttatatgaaacgaaacgttgtgtttgtgtaataataaaaagacatgactctttgatctaaagacacaactgtaaaacaaaacaacttgtgtctcttgaacaaataactaacttatgtaaatgtgatatgatacgagatttgattatccttcaacaatccaaaggtgtgttccgattgtatccaacttgcgtctcaaggtttactacaaaactgtccgaatcagaccgactcattcgactggagaggcgacaagacgctctgtttcgttcgttactccaacagctcgtttttcagcaagatggctctagagccgacagtaacaattttcagtactataaagtttcagggaaatcttcaaacttataacagaacatgggacgcgctcatgaactttatgatcacccgagtcggtcaatctcaataccttgccgacatatcccctcgaataggttttgatcgtatatacactctgatgcagtgtattccggggatatcctctaacgactgtgaaacctgtattctagtaagtgtccgtaattaccagagatgttgcaatggcttcgtaggtggagtcgttcgcaagcctgtctgctttttccggtgggatggttatgaatatcttggtgcctttggtaacacgcaatcattacctcctcaagaatctcaacccacgccgcttccgcttcctcctcctccagatagtagaaaaaattctacaggagttattgtggcgattggtgttcctgcggttataatcatcgtgctgctcgctgtaggattagttatttggaagagaagacgatcgtacaaaacattgaaacctcaaagtgagttacctttttagggttttaccattctcactatttggaatacataatagtaagcattgacgatatgttattgcagctgatgatgacatgataagtccacagtctctgcaatttgattttgcaacaattgaagcggcaaccgacaaattttcgagggacaacaagctaggtcaaggcggattcggtgaagtttacaaggtatacttgagctgagctctgtatacatatctatgattgcttgatcttctatgaaaacaaagaactgagaagcttttcatatgtatatttgtagggaatgttatcaaatgaaacagaaattgcggtaaagcggctatcgagaaattcaggacaaggcacacaagagttcaagaacgaggttgtgattgtggctaaacttcaacacaagaatcttgttaggcttcttgggttttgcttagaaagagatgaacagatacttgtctacgagtttgtttccaacaaaagccttgattatttcctctttggtaataaacaatagcactaaatttaatttatgttacttttagaaaattttctcaaatgcttattctctaatgcagatccaacaaagaagagtcagctagattggaaaaga

SEQ ID NO: 5326 - DNA, 7927 bp, Arabidopsis lyrata
  Intron number 1 from transcript 490669 (locus 490669) deri ved from phytozome v7.0 (chr-ID scaffold_7; pos 317254 to 325180 reverse strand)
ccgtttcgcaacttcctaatcgcatcttcgtccaagtacggtgactatataacctctagtcttttattttacatgaatttatttactttagattttttttggtaagaatttatttactttagatgttagttactatcccttaatgggctgcttttaactgattcgaaaatagatctttttagtgtgtgttgggccacatggctaaactgggccttattggttttgtatcattttatttctcatggtttttattttttaatagaaaatcctttctcaaaaaaaaaaaaaacaaattgcttcgttaaaaacatgcgacatttttataataaacacatgtttatttacttttaaaatatttgaaaacaatactcaaagaggaaaagcgtgggttttgcaaaccttcgaattttctttataaaattcgttgacaagaagttataatttaaaataggggaattgttaaaaataccacttttggtgtgctccttttcaaaaatgcttcttttagatatttaaaaaaatgtctctatttaaatctgaaatttttataaagttttattaggtttataaggtacttattgattgtaattactacttgaagacttgatccaagtatttataaggttttataaggtgtttttaaatgttttacaagttattttaaaggatttttaaggtttttcacaggttttacaagatattttaaaggtttttaaaggtatataaaatgcatttataaggtatttataaagtatttataagattttagatacatagaaatatagtttgtgtatgttttaataatattacatatatatttgggtaaatcttatacttttaagagcattttttataaggttttaaaaaaggagtatttttgaaaagtggcattgaaaaaatggcatttttgcaaaagcctccctttaaaatatttatcaaaaatattatttgaaaaataaaatccgtaacgttttaatagtaatataaaaatgtaaatttgaaaacttttttttaaatttttttaataaaaatataagtgttaaaaatttaattatgtgtaaatcataataaacctagaaaacttcttaggagtttggatgttgtatctaaattagtttacacagaattaaaaaatttaacacttataaaaaaaaaatttttaaaaaacaagtgttaaaaatttaattttgtgtaaaccatattgaacctagaacatctcttaagaatttggatgatgtatccaattagtttacacaaaattaaaaaaatttaatacttataaataaaaaaacaaaaaaaaacaaatgttaaaaatttaattttgtgtaaatcatattgaacctaaaatacctcttaggggtttggatgttgtatccaattagtttacacaaaattaataaatttaacacttactaaaaacaaacaaaaaaacattataaaaacaagcattacaaatttaattatgtgtacaccatattgaacttagaatatctcttaggggtttggatgttgtatccaattaatttatacaaaattaaaaaatttaacacttataaaaaaacaaaacatttataaaaaaataagtgttaaaaatttaattttatgtaaaccatattgaacctaaaacacctcttaggggtttggatgttgtatccaattagtttacacaaaattaaaaaatttatcacttataaaaaaaaaattttaaaaaacaagtgttaaaaatttaattttgtgtaaaccatattgaacctagaacacctcttaggggtttggatgatgtatccaattagtttacacaaaattaaaaaaattcatatttataaaaaaaacatttttaaaaagaagtgttaaaaatttaattttatgtaaaccatatataacatagaatacctcttagggatttggatgttgtagccaattagtttacacaaaattaataattttaacacttataaaaaacaaaatattttttaaaaaacaagtgttaaaaatttaattactacgagtaaaccatattgaacctagaacacctctttgggttttggacgttgtatcaaattagtttacacataattaaaaatttaacacttacaaaaaaagaaaaaagaacatttaaaaaaaaaaaaacaagtgataaaaatttaattatatgtaaaccatattgaacctagaacacctcttaggggtttggatgttgtatccaattagtttacacaaattttaaaaatttaacactcatcaaaaaaaaaaaaaaacaaaacattaagaaaaacaattgttaaaattttaattatgtgtaaaccaaattgaacctagaacacctcttaggggtttggatgttgtatccaattagtttacacaaaattaaaaaatttaacacttataaaaaaaacaaacaaaaaaaacaaaacattaaaaaaagcaagtgttaaaaatttaattatgtgtaaaccaaattgaacctagaacacctcttaggggtttggatgttgtatccaattagtttacacaaaattaaaaaatttaacacttataaaaaaaacaaacaaaaaaaacaaaacattaaaaaaaaagcaagtgttaaaaatttaattatgtgtaaaccaaattgaacctagaacacctcttaggggtttggatgttgtatccaattagtttacacaaaattaaaaaatttaacacttataaaaaaaacaaacaaaaaaaacaaaacattaaaaaaaacaagtgttaaaaatttaattatgtataaaccatattgaacctagaatacctcttaggggtttggatgttgtgtccaactagtttacacaaaagttaaaaatttaacacttaaaaacatagtttaaaacaaaaagagatttgaaaaaacgtttaaaattatatataaaacatgatttaaaaaaactttttaaatctgaaaataaaaactgaaaactttttttgtatgaacaaaatcaataaataaaatactaaaatcaaaatatttcttaagagaaaaagagaagataagaaattaagaaagcaatacctcgtacgtgcagcttgtgatatggacgaaaaacaaaccgggagagctaaacgtcttggctggtactagaaaaaactctgcctccttgagcccatccagcttctttcaggtactacaacatattaaaaaagattgcacatatatcaatcagcaagtgactactaccatatccaaattcacaatctttaactcatcccatcaaaatattgcctattggtctaagaagcatgatataagaaaagcaaaaaaacaataaacaaataaaccaaggataaagaacagagaagaaaccttaggaatctatatcaccaacgatgatggtggtagcaccaaaaagagaatctcagttctgtaacttgtacactactacttgcaatctctgtctttgcttctctatatttgcatacccataactacaaattccgaaccctaattataaatcaaccacagaacaagtaccatcataaagagagaagaagctgttatacctagaagaagaattcgaagatgaagaggatacgagattgttggactatatatgcctccttcttcgaaacgatggaggtttctcatcagtccatggtttccaaagaggtttttggcttcttcggtttatgtatcggctctttctctcttattttgcagagatgataggcgtacttcaaagtctgcatggatcatcggcggacctctctgtatgagaattgcataaagaaaaagatgattttttttttctctgatgatgttggagattgattaaccttcacttgagtatttataggcaaaacgttcttcgaataaaaaaaaaaaaggaaactttcgattgtttcctttttttttcttcgactgttgtttccttttcttatatgtgttgagaattttttttttttaaatggacctctgagaacgtttgagagatctagaccgtttattgagatcggacggtgattatctaatctaaacggtaagattgtaagatcatgtgggaccgggacgatctatttattattattatacctctctgttacaaacaaacacatgtttatcacggagaaggaaagaagagatggagatgatgattctcaagaaactgtttataatggacatgatgatgttgcctcctttaaatggaacaggagcagcagtgattgatgatctaacagacattgacatcaagctaccaatgctagtctttgtatggagatagaagccgcttggttatgagattgctggagccaccaattgctttggttaggaccagagcaatcacgtcatttattctcaaccacaacactgtcttctttgatgttagtagtcttgcatcttattttgagtgtttgtgtttggtttgatctatgtaactctgtttatgtaatcacacaagtatgctttctggttagtccgagacagagtaagaagacatcatacacatgacattggagaattataaggcaaaatcttccatatagagataaatcatctctaaagacttttgagaaccaaaataaggagtagtatctgcacaaaattactcatagaatcaataataaacaaaaaaaaaaaaactttaacctgaactatgtgtgaataattgataagaattgtagctatgaactattctctctatcacttctcaatccaagatacaaactcaagaaccctaacaatggagatttgttcaagtgatctcctaactctcctctaacaaaccatacgtttgttacacgcacatcaatacatgcataacttcttcaatactctcctatctatttatatacaactcattgggactctcaagcggttacacaatctatttcttcttgctctgtttttaactctgtttcacgtgccttctctgcttctctttgcttattcacgtgcctcaacgactccttttgagctaccacacatgcctcttatcaataagctaactatatttttattttttcttcccacaagaacatattcaaccgccggtagaatacttgaaaagaagtttgctcttctaaattgcgtctacagtctggtttgaactgtctgaagcaacactactctgtttcggcaaggtttacacaatctttaacagaattgtttccagttgaaaaccaccaaggaaactctgcttatcttcggtttagtcctcatggctggttaaaacaaacaaaacccaacttaagataagattgtgattctgaatatgcaagaaaaaagcgatttgatcccacaaaaataaactttcagaaagtgactggtaagttacagattttacattttttacaatagctgatgataaccaacaagggtgtcttatgcatagcttgttcaatgcataaactaggtaaagattcgagatccttttagagtaactcaataacactcatacgtgcaaattctctgaaacccttttgccttcgtaagataaatcccctaagaaactacataagaaaaggtgaaacaatcactggctcagtgtgctcatggtgttccaaaatttatcaggaccagtaaatatgccctaccactagcccaattccccactattacaatctccaccaattggccaacaatggagtatttaaccatgaagcaaatcataaagcttctatctttttgtttactcaatgttatgagtgccaaaacaaaagccatacccatacccagaaatggtaaaaacttcacatatgcttaaaaaagtaaaaaagccaaccccacaaacacaaagaatgaagattcctaacttatagttcaactattgatgaacaaacacagacaataagcaaaatgacactgcaattgaacagacttttgtatagagagtttaccgatgaatatgtcgaactcgaaaacggtgtcaatgagagtgtttatacagatcataaggtgcccacaatgacgacgaaagttgacattttcaagtcttaaccatggcttaccactacctgaccaatgaagcaaactcacaggaccaatgaagcaaaatcacgacaactacctctaaattttgagattcgtcagtttagggaaagttgaacgaattagagattctaggtttcgaatctcggaggagacgaggaagtggaagaagacgctttgaggacaattcgtgttgccattgagccacggaggtaaatgatgtcgagagagatggctacgtggaatcttcgccggacgatctgcattgttcgacgttacggaacatttgggttcttcgtggatacttaaccttgattcttaacaatttttaatattaaaattttgcattttctaagttaagaatacaaagagaagatcttaacaaatttgccttccaatggttaagaatcaatgggttcttaagataaaacaaattcaaattttgcaaaacaatatcttctaatacaagcattcatacaaccaaactcatacaagctttttttgcaaatgaaagaggaagaacttaaacattcatcacttcaaccaaatctgagccattcattcaacatcttttccaaaccaacccgacgttgttaccgtctaacttccgctcacagattctctcggttttgtcccctcgaagaaagcaatgcacaaacaacactggtatgggaaagaaaagaatgaagcatctgaccatgaattatgcctaagatttgagatcaaaacagtataaagtatcttcaagaacagctgagaacatctatctatctttttcatctttctggtatagtataacaacattttttcaactcctataaaacaatgtttcttccaagagtttgatctacttgatacaatggcaacatcgaagactgaacctgcaagaaccattataacactttcaaaaaccatcttaaaggtactcagttctacaaatccatacaagagacaggatactcaaacactttgtgaacaatgcaaaaacagaaaattatcacactttgacctttagacaacactacaaccaatcagtaacaataaaattatcacactttgacattcttactaacccaaaatcatacgccattaatttcaaattccaactaacagagtcaaatctcaaatcccatagaagaacaacaaaagagaaggagagagagagagagagaaagtgtgtgtgtgtaccagctcctttagagtcagctgcctgaatcaaggtgagaggtaccattggaaccgatcaatttattctccagcaaagatatcgcagtctcagtatctctcgtttcaaaaaaacaatggctaaatccgctttgaaccaccgccgcgactgaacataacaagcacacgaccaccgcaatccacaacaacacgctcctcatctcctccgcggcgatgaaatttccaattacgtctaaaaaggttaattcaaaatctatctaaaatcaaaaaatcaagcttcgtggagaaaacaacggcgttacggcggcggaaattccgcctaatttttcctctcaattcgacggatcaagatgcgttggagagatttcgtcgtcggaggattcgagaaatagagaaaaagagatgaaatcgaagacgtgtcggaagcattttttttcccttttgttcattttttcgcccactcattagtcgacacgtatgcacatcttaacatctcaaaaacatcttatttaagatatctatcttagcaattcttcgtggttttgattagttttgattatttttattgctaagatttttttaagatactcaaatttacaaccattggagatgttcttaggttcctaatgtatttctttatacagtatcttgtttatttttgtgtgttttagtgataaattaactaacaataatattcataaaacttaaactgatgcatatattgagaatttgatttataatgtcaatactggtattttaggtaggtgaaccaacaccggattatcagtgttggga

SEQ ID NO: 5327 - DNA, 662 bp, Arabidopsis lyrata
  Intron number 2 from transcript 896735 (locus 896735) deri ved from phytozome v7.0 (chr-ID scaffold_5; pos 4378555 to 4379216 reverse strand)
aacatgtatttctacttttggaatatattttgatatgagttaaatgtgtcaaaaagaaaaccttttaacaaaacaaaaatgtgtcaacaatatacttttgtaaaattcttagtttacttttttttttacaccaattcttagttttacttaaatatatataaataacgcacaaatgtaaaagagtaagttgaacataaataaacttaagtaaagaataatcataaatataaataaatttataaaacatagaaacaacaactttcatttaaaagaaatatactgaatcagtgaattttatataaaattctatcaccaatattaaagagaaatgtctcacttaggaatatctactatacatttttgcagcagtttttggggtacccaaatcgggtcaaaattttgattaattttgacccggaaaatgacccggaattttgacccgcaaatgtgatttcgaatcctaataatgattttttccaaaaaaaaacaagaatttcggattagaatatcggatccctactaatgcgactttgcaaaacaaaaaaatcctaacaattgctatgattgatttcgtatttatcaacatttattactaagaatattttggtttaacatacatagttacaggatccaattcgtttcctctatttaagcaaacgagt

SEQ ID NO: 5328 - DNA, 719 bp, Arabidopsis lyrata
  Intron number 3 from transcript 473698 (locus 473698) deri ved from phytozome v7.0 (chr-ID scaffold_1; pos 17656790 t o 17657508 reverse strand)
aagaagttgagagcttgaacaagaggtgagtcagagatctgacgattttattttttatttacgaattttagaaaatattaatcaggtaaaaaaacaaaacggtacgataattaataaatgcgaaacaacaaataaagtacgaagaatctgtcaatttgttaccagatgatcctgtcgttagtttggaccgaccctatagaatgtttttttttttttgtttggtaggaaagagtttaattgccataattaatgtccttaattatgaagcatatttggtatctcttcaatttaatttccctttttgatgatcttcgtatcgttcacgcttctctaattttgtctttttattccttttttggtaataatacagtctaattgtgatttaaaacccaaaatttgttttctttgccatttaattgttactttgatacagtttgggtcaaattttgttgttaatgttttggtcatgactttgatcgtaggaagccttgttaattgattcaatctccaataaatctctggttatttctggtttagattggttattgtactcggtttaagttctatctagtacacatttttacatttaatgatacccttgagagaatctgaaagttactatgacatgtataagatagatttgggtaagttttgttgttaatgttttggttatgtaacccaaaatcctgttttgtaggaagccttgttcaaattacaag

SEQ ID NO: 5329 - DNA, 18119 bp, Arabidopsis lyrata
  Intron number 3 from transcript 489019 (locus 489019) deri ved from phytozome v7.0 (chr-ID scaffold_6; pos 8947591 to 8965709 reverse strand)
gttgataaataaaaacatgcggagtcgcgtcattctacggaccggactacgggttagtactactttattccacaataacagattattagagcacttccaacatggtgtctcatccaatatctaatgaattaaaaaaatactccctttgttcttgaaaatttgatgttttagaatttacacatatattacgaaacaatcatgatttaatcatttaataatttttcattttattaaatatttttaataatgtatgaaccaataataatctaaaacagttaattatttgtaatcattacgccttgaaatctacaatttgttaatatcaattaataaaaaataaaataaaaagttagaaaatcaatctttgtggaataaacctaaaacactagaacatcaaactttcaggaacgaaaggagtaaaaaataaagaaaagtaagaaagagtatgagacaatatgtctcatttgagaaactgtgagacactgtctaatacttggcataatttgattggttaaaattttttttaagtaattaaaatttaaataaataattcatttattacaaaaacattaaattactatatttgagaaactttgatggtttctctctgttggagatgctcttatgtcgcgcaattctacatattagcaaattagcaatgagacccaaacatataaatgtatattgtatagaataagcttcttgttgcactttttgcttttgttaagttttcttgtcacattacatccgtatactttattatatgatggaagaaaactagagtaatttaacaacctgatgtatgccatgccaatgaatgacaacaccttcagtggagagtttgttaatgacgtggatgttgacgttgtctccggcgaccgcttcgatagtcggccccggaaactggccattgatggccataacaatgccttccttacaatccggccaccagaacttatactcaacctcccactttaattgaattactgagggggagtactctgattgaaccaccacgaccaccattagtagccaccacataattaccggtacagccatggtttattttattttatttcttttgtgtgaattatagaatagcttgcttatgtcagtataggaaagaggcttttataaatataaagaaagcagtttattatttggtttgttttttgtgttctaagagcaattctatttttgtgtggatgttattagttgaagttataaattataaactaaaaagaaagacgaggacaagatcgatggggccattatatagaggacactggagtaactaacgaagatgtggctgactgaaatcatttcaaatattaaacgagcaattttttaaaatgttttggcacaaacgagaaatgaatctttcacaaaaaaatgattagctatgaattttctttgatgtaattatttctgaacaaaaagaaagaaattaagtgtctttcactgataaaaattgctgcagttcaattcaaaagaaataattaaaaaaagaaattatgttttattttcccaagcataatcgtttttttttctttttattttcattctgtttcacttcaaaattgtgaaattttataattagtaattccactatattttattctttaaaattgaacaaccatttgcagttttaataaaagtttcttgaatttcaaatctttttatccatgtattttttttcttctaaaattctccccatagtgagtaactaattgttggagatattgagcacatgtttctcaatagaagccacaaactcttaaaagtggttatagacttgttgtaaagaataaaacctttttgaagctgtagaaattgtagaattcatatcatccacaagctcttaggccatttacatcggtggatcaccccctgatctaagcaatattttaatccaaaaaaatgggctaatgggcttaagatcaggaactgggctctagatctggatctgttcttgtgggtgttgcggggtgacgtggcatttgggcattggttggaatatttggggtgcgttttcttctcttctctctctcatctcttctcttctcttctcttctcttctcttcacttttattttcagtttttaaagtttgcaatttatatgttatttttaaatgttttaataattgtaatatgttttaaaattatattattaaatcttaagatcttacacatgttctcccactaatcaacttctaaacaaaatatctaaacacatgatcttacattattttaacattatattttctctaagaacaccctcacatgattccccattgatgatgtctttagtaagctaatctaaaattgtaacataacttttactattgagcacgtgttttaacttaacactgccctcctacccaaaaaaacaaaacaaagttgtctaaaaaaaaaagggttctttacttgttacgaaatgcaatttgtcttgtttgtttagtcaacatctcaacgtgaaaacctatctttgtacgttaccacaacaaaaactaaaaaacattgctgatatcaaatcctatgcaagtattttgtgtgctactatttaatgcgagatggtgatatatatgaattggactaagtcacaaaaagttcatatatacgtaccatcttaattaatatgcatgccatgcgtaaccaagtaagatatttaagatccactataaattattttaataaatcatacaattgagaggtcctaagtagagtccaccccaacaagagaattaacatattttctctgatcttatgaattaaaacatccttatttttgtcccccaaaagtttaataacccaacgaagaaaactaaacacacacatatcaaacataataacgtcggtttatttaagggagtccccggttcataagccatttcctggttaatccacaaccaagcgcctcatccggtatctccatcttaccaatccggtctactccttcagcgaaaaccacacccatacccacatgcaaatgcggttcaatgtgacaatgaaaaaaccaaaccccaggattatccgttacaaatcttaacgccgtccatccatacggatacaaaaccaccgtattccgtaacggcgggttcttcaaattaaacgtcttctcatcaattcccggtttaaatttcccatcaccgtaacccaaaacccagaaatcatgaccgtgaatatgccatggatgaatctcactaatcacaccttttaaaacgtttgcgttttgaagaatcacgtcgacgacgattccaaacgggaaattgtagattccgctacctttcgtggtgtttggattcggcggcggtttcatgatatcgtaattatcaactgtgaatttcttcggcggagattttaaatcgtacgccgattttaaaccgtatttgatagatccgagatatggcgtcaccggtaaggacaatgagacgttgttgattgaccatttcgtgtaatcgtcgtagagattctgtgtgttgaggaggataagctggtcgtgtgatttctccggcggttttggatatcctttagatatgtctattcaatgtacttggtctttgcatttatcgcatgtgtaaatgaatctagtcacattttacccatctatactactaggaaaaacggtctatttccccccgataactatcgcatcataacagatgcagcccaaactttaaccccggttctaatgtccctgaaatgtacctttgaggcctagttccccccgaaacggaagttcacttcttatttctctccgaatcaaatgttcgagagttagaaccacacgaatctgggtttaatcggtttattgtattgaaaacccaatgctaaaccgattaaatgttttattaaccagagtaaaccctaatgtacccgaattcaacccgatttcactaacctaaccaaaacccacccaccccgatttaaccccaaacgcaaaccctaaaatcagatatcaaaaaaatccccaaatatttccgacgaaccctagagagaaaatttgagtgatcgaagcttccaatctctgcaatcgaaggatgtctgtagttgtttgtgaccccgatattggtgatgtcgatcctgaagctgaagacagagaccaatttcacgtcgaagaaatgttgaatgagtggaatgacgaacctccgattcgccatgatgtgtacccagagagcgatgctgaagagaatggcgatggtcctgagagagttcatactcatatcaggcgaggcgatggtcatttgtaccataagcaaactttcttcagtggagttgcgttcaaggaagctgtggttgattatgctcttaggacaggatgcaatctgaagcagtacaggtatgacaatgataaaattggcttcaaatgtgttggtaacgatggtaaggaggaaggagtacgatgtgaaggagtacgatgtgaatggcttgcaccagaggactacgtgtgtcactggttcaggacatctacttggaaaaaaaactacactgatggtgtgtgtccacagagaggtcctaagttttggcctgagactaatgctcctcctgtgcatataccacagccaccagaaggagagaaggataaggagatgacaaagaaggataagaagaggaagaagggtgtcaatgagtctcctactaagaaggcaccaaagaacaagaaaaggatcatgcattgtcgtgtctgtgggacagctgatcacaatgctaggcatcacaagaaagataaggtttgttttgttttgttttgttttgttttgttttgttttgtgtccactcttctgtgatcttgtgtttcagggttctcaagatgttttccactcttctcaagctgaaccaagtcaagggtcactcactcaagcttagtggagtagtagctaagtagatgtagggcacaaatgtggttgtctctatctaattttcgatcacatatgacttgtgtatccctctgttttctaaaccttttgaatgtttctaggtcttttgaattaatgtctcttcggatggatgtagaatgaatgttttaaagaatgttggtttctcttaacttgaatttgattgttttgttctctgttatgaccaattcgtaaaaacacagaatgaccaaagccattctctttatccaaaccaaccaattctcttaatacaagacaaccaccattctcttgatacaaaacaaaaaccattctcttattacataatgtcttgatcataaatccaaactacaaactccattagcttaatcataaatctaaagctagaaccaaaacacaaacattcaaccaacacaacaactacaatgaagtgatcaatggttcatccgactaatttgatgattccaatcatgatcatacaccctatcacaacgacaatcatcatcttcttagtgcttcctttggcttcagacaaagcatcttccaccttctcaaatatctccttctctatcatcatttcgaccttctcgcaaacgatcttctcaatctccaaactctctgtcttaagctttgtaacctccttctcaagttcaacattcttttctttcaatgcatctatctcattgagcaaggcttcatcaacccatttgaacgtgtgttcatcgttccttagctacaatttaacatgtcattggtccattaagagaatcttaaacaagatacaatacaaaacaattgaaacaagcatgaaattaccctaagtttagcagcaacaccacaacgatagtatctccggcaaggattggaatcggattttgaatttagtgccacaatttcttccccgcaccaacatctctttggcaccccgacgattctgcctcttccacgaggacctgtagatcctgacgaactcattgacatattgctcatcttgcagcaactcgatttctgggttaatcaaaattttagaatctagggttcttcaattgtggaaaaacgatttcgaatttggggattttgattttggggtttaacagcattagtgggtcgggtaaaaatatggaatcggtttttttttggttaagttacgaccaaaatctggtttggtctcgggtcaacgcaccaaaccgacgaaacccagacatggagacatttagatggtgaacttccaattcggggggaattaggcctcaaaggtacatttcagggacattagaaccggggttaaagtttgggctgcatctgttatgatgcgatagttatcggggggaaatagaccgtttttccatactactatactagtataatcgcagcactttttgtgacgggtgggtaaaaaagctttcgggtatattagatatccgacccattttaaaaattccttcacaaaaaatttgttgggtcgggttatatttaactcaattcatacaccggatattccatatttaataatttagatttttagaagatttgattaagatttataattatgattctcctatcatctttgtttgatttgtttttaactgttttgaattatcatataatacataaagtaaaaaaaaaatcaatttttttcagcatatactgtgattcgaaattttaaaaacggacatatattatccaattgacgaaaatgtgtgttcaacgttctacatcgattaaaatatttagacaatgattcagaatcatatcataaataagaacattaataaaataaatgagttttttggggggatgggtttggcgagacgggtttttgaatcaacaataataaaaagattaaaatatcattaatccgccgcttcaatacggatttaatccttatttttttaatacaaatcacaggacgggttaagaaatttgggaacgggttatatttcggaaatgatttatatggctgacgaatttgaatcaatatttatataccgctttaatacgggttaaatcctcagtttattaataattatctcgtggactcgtggtataccgttacttaataacaattgtaaactataatataaataaatatgttataaagagatacaatttacaaaatatttttatactaactttaaaattaaatcatcccgcggtgtaccgcgggttaaaatctagtaatttaaaaaacgatagggaaagaaatagtgaagttaaagttctctaaagttaatccatttatttgattcaaaagaatgataacattcatttaatcaaacgaataaaaccaggatcaatttaatattagattccatttcaatgtggaatagttcttgaaccaaacatattgatatagaatcgaaccataatataattaatcagaaacatgataattagtactgtagtaataaattggaaagagagaaacttacttgaacggccaagttgagggaagcaagagcagtggtgctagcgattcgaagacggtaaactctattgggctcgacccgtagagtttgaggtgcacactgatcattttccttaaaggtgcacacatctttttcccctcctttgttaaaatacgctgcttgtgaacaattaaactgtcctcttccattaatcaataggctttgaggttcgccgatccaacgcatagggcgagaagaaagagcgagttcttgcgagtgaatgctttggtgccaccagtcactgagcaagagattgaactctccatcgtaaattattctctctctctttcggtgatcttactatcaacattccgtatagtcccgctgatctctgcattccgtagtgtccatggtagaaatgtgttcccgcctgcatcatatcatccccctgtaaataaagatcaaacttagagtaaaataattttgaagtttatagagagcggcttaaagcttcatactttgatacctcattaggtcatgaatacaaaagggatatttatacactgacaagaacaatctagagactagacaggtggcagtgacacctcattgctcaatggataggagcgcatcaaaactgttctttagcgggatttgttgtggctgcatttccgtacctctctcacgtacatcctgtgttctgcttttgaccgttgaagcatttgtctgcttcatgggctgaatctgttggcggcccactgcttcattctcatttcgcttttgggccttactgggctgagaagagctcaccttaatacccccctgcaaactcgaggtgggtggataatccacaccgagtttgaacctcagagagaaaaaacttgcttgaggatagaagagatccaagtcaattcagctgcagtatcagagagtgttctgtattctgcttcagtagaagagcgagaaactgattcttgtcttttggctgaccaagaaatgatgtttgatcccaaaaatgtacaaaaacctcctgtagaacgcaaagtttcttgacagtctgaccaactgctgtcacaatatgctctaactgttgagtctgtatctgaagtcaatgaaactcccatcttcaatgtgcctttgatgtacctcagaattctctttagtaaatgaaaatctgataacataggcttgtgcattttctgacacacaaaattgactgcaaattgcacatctggtcttgtaagtgtcagatactgcagtttacctgcgagacttctaaaataagttggatctgagaagagctcatcttgatgaggcaccttgttaagttgtaacggcaatggagtaggcatcggggaacaatctaacatgcctgcaaccttcagcaaatctgtagcatatttttcttgatttagaaacataccagtaggagtatatgtagcttgaatgcccagaaaatagctcatagctcccatatccttcatccgaaacttttcattaagtgactgcaacagtctttgaaccagagacttgtcattacctgtaagaatcatgtcatccacatatagaagcaacagaagaataatgtttcccttttggtagacaaagagagatggatcatctgtactgcaaaggaagccaaattcaatcaaatatgaactgaatttgtcgaaccaagctctaggagcctgctttaggccgtagattgctttcttcaatttgcaaacatactccgggtgttctttatcttcaaaacccggtggctgcttcatgtacaccacttcatttaagtctccatgtagaaaagcgttctttacatcaagctgttttatatcccatctttcaaccacaacaaagtgcaacaccattctcactgttgcagtcctcacaactggactgtaagtttctaaaaaatcaatccctgcctcttgttcatttccctttgcaacaagacgagctcttagtttatcaagtgtcccgtctgcatttaacttcgttttaaaaatccatctgcatcctatgagatgtacatttggcgggagaggctctaaatcccatgtatctgtctcatgacaagtggttatttcttcttccatagcagcagtccatcctgagtgtgtaagagctgctgctactgactttggttcttcaggaatacctttgattgtaatgagagcatatcttggattaggcttacggattcccgactttcctcttgttatcatttcgtgatcatttgggccttgaacctgagaattcaacggagagaagtcatcttgagtgaataagcccgatgttgtagcattctcagatggagattttgtctctgtatgagttcctgaagatgttgtagccgcactgttgtttactggtaactgtgttggtgaattagtcaagacagttgcattgtgagctggtgcagaagcaataggagttgggacttcagtttgaactacaccaggagcagcagggattatgactggagatgattcttcctctgtgacataattattagctgactctgaaacagaacccagagactgagtacctaacatccatgctgagagaagaggagttcttgcaggtggaagcaggtctttgtagttgtcttgataagggaatcttttctcatcaaataagacatgacgtgagatgtaaacacgtccagtaggaggatgaagacaacgatagcccttatacttttcattatagccaagaaaaacacatagaagagactttggatcaaatttattttctgcatatggcctcaaataaggaaaacaggcacacccaaacacccttagagccgtataacatggagcttgaccataaagtttttcaaatgggctgatcatcttctcattagtcgaagtaggaagaagattagcaagaaaattggcagtaaacaaagcttcaacccatagactttgtggtaaacggctttgaaataacattgacataccgagttcaacaatgtgcttgtgcttcctctctgctaatccattctgctgtggggtgtgaggacaagagataaagtgtttgatcccattttctgcaaagtgagtttgaaactgcttattcacaaattcaccacctccatcactctgaaaaatcttgattttctgatttaattgattctctaccaactgttggaagtttttgaaaattgtaaacacctcagacttttgtttgagaggatagaaccagcaaaatcttgagaaattatcaatgaatatcacataaaacctgaatccctgaacagacataacaggagcaggtccccagacatcacaatgtatcctctcaagaggcttagaagactgaaaatctgaactagaaaacggaagtttgcaactcttccctaactgacatggttcacacatagacaatgtatttttattgaatgaaatagcttgaacagaagataaatgttgaaggacttgctgatttggatgtcccaacctcctgtgccatatatcaccacttgtgctttgctgtcttgaggagtagaaagcttggaaattggggttttccaactgatacagtcctttactctttgttccctgagtgagcagctggtttgtctgcttgtcgataacagagacagcacgagaatcaaagataaatgcacatggataatcatcagttaatttggagactgagagtaaacattttgcaatttccggacaaactaatacatccttaagtgggagattacctgtcactgtaggaatgtttgcagaacctatatgcgtaataggaagaaactcaccatttcccaccataactgcatctgagccatcatatgagtgagaggattgcagattctgaactgaattagtcacatgatgagttgcagcagtgtctggatgccatggatgccattctttgccagagtaatcgttgttatctgacattctcatcactgccaaagcctgcattgtttcatcaacctggtatgacttatcaaaccgattgtagcacctatatgcaggatgaccatacttcccacagatctgacaggtaggtttctgaccattatctgagtagggttgtctgcctccactaccttgaccaaattgttgtggaaatccacggccttgagttgaataagaaccggaacctctgcctctgttactgtttccacctctgttttgtccacgaccacggccatagtaaccaccacggtctgtataaaacgcctggtgaggagtaacctcagtggagacctcatacccttgtagcttatcatcaaaacatgtcaacttatagacaacatcatcaaaagtgagaccagggtaagatttatccatagaatcttcaatgactgtagtaatagactcatattcccgtcctaaacctcgtaatacgccaaaaatcttttcttgctcagagataggagagcctatagaatctaactgatcacacaaggtctttatttcagccagatactttgctagagtacttgatcctttaacagtggtttgaatctttctttgtaaatcgagctttcgagaggatgaaaccctattgtactttttagcaaggtagagccatacctcttgagaagaacgaagaccatagatactcttcaaagcttcttcagacaatgaaccaaacaaccaagccatgatgagctgatccgttttcacccatttcataaactcaggattgctggattcagtaacctggtcaccatttctgactaagaacagttttgatgcgctcctatccattgagcaatgaggtgtcactgccacctgtctagtctctagattgttcttgtcagtgtataaatatcccttttgtattcatgacctaatgaggtatcaaagtatgaagctttaagccgctctctatgaacttcaaaattattttactctaagtttgatctttatttacatggtatcagagcaatggaagagctcaccttaatacccccaaccgaataatgtttttgattcatcatttcttgatcatattcattaacaaaataacaaaacagaaaaagttaaaaccttatcgacaatgaacttgtaagtgaaagtctcgccaggattaataggacattgtgtcacacccgctgccccatctgcccatggagtccctttctgttccatgatcacaaaacagtaatcctttttaaaaaatgaattatacagactgtatatatagtattacactactagagtggttctgccttagaaacaccccaaaattaatcacaaaaaataactaaaataacaagttttaactgaaaatccgcagaacaatggttaaccattagttttttggttgaagaaaaactaatggttctaattcgtaacacaatcaaacatatagttgtatcgaataagctcatggtcacatttttgtttctttgttgatgcttcttgtcaaattacatacttatatttgtatataaaggaagaaatttatagcaatttaataacctgacgccatggaatctttcactttactttctcttgcgtggcttgtgaattataaactagcttatgtatgtgtatgaaagaggctttgtacagatatgtagaaaggcaatcgacgattaaaacatttcaaaaattaacccttttttttttttttttttttcctctttcaaaaattaaccttaaaaacaacagtgggttcttatttactttgtttttgttggtctaagagtcagttttgtttttgtgtggatactagtggttgaagttaaacattacaaacgaaaaagaaaagacgacaagatcgatggggccatttgttttggcagtttcttatgatggacacgggagtaattattgaatacgaaatttcgaaaaccatacgatcaattatgtacgtataaatacgagagcgtacattcacgtgggtttctaaatttcaaccatgcacaaaataatgtagctctcactgccgtagtgctgttattattgctatgaaattgcttctggtgtttgattgacaaaaaaaaaaaaaaaaagagaaactgacaatgacaagtgtcactgatgtacatattgatttgtgttaatatcattgatacttcacaatcatgttcaaatcaatatattactgccaattttgtttatacataatacgtgttattgataataacaacacatgtcattggtcccaaaattatatggacttagttgaaactaatccaaaatttcatggtgagtaacacaatcaataagccacaaactcctattgtggttataaacagtaacatcggaagataggaaacacaacacgtgttttctttcttatttttgcaatttggccgaactcacgtgtgactgataaaggactatgggttgatgatgactagcagtaagataagatatgataacggaatcacccaatcccatctttggctttatataacagatctaacacaagtgttttaaatgcagacaaggcaaacaacttgataccataccaatacaaatgttacttagaatcccacaacgaacattacagtacgcgaaagtcgcatttagaaattttacatacacaggccactcagtctttgggaggtctgtctcaattgagaccagatgatattgctgattcgattcttcatttttttgggtactacatatatatacttattacataatagatgtgatatatgataaaagtggtgaagtgttcttacgaggtcaccccccaattcttctttttcaggttttgccagttgtttcaggtgcagttagtgtcgtagcttgcaagaccgagtaattccggtccttccaatcgcgggttgttctcaaagctgcacaaatgttttgcgttattagaaacaaatgctcatatgcaactttatcagtctatactttatatgaaaacatacgatatcaattgatatctgtaacaaagacgacactcgacttcacacttatcaaagcagtttgtaatttgggtgacaacaaatgcaaatgcagggggatatattatccagaaacttgttggctaagtgaaagaagaaacttacttctgtaaaggaatgtgagcaaaaggcccgtttgttgggattgttccacacaaatcattgcttgagacatcactgagaaaagaaagacaaagaaaatacgtattttcaagtaagaggatgaagtcaataggttggatagaaaggggttctggtaactaagagaaatgcagcagagcgttaacaaacaaacaatgatcaagctgaacttacacaactttaaggcttgagattgccgtgagtgctctagggattggaccggtcaatcggttgtcattaagccgtctgccacattaaacagtttcttagagagacaagagaatgaagaggcatcacaaaaataatcaggttttggagaacaacccacataaacactcttgttctcttactcaacatttgataaaccattttgcagtttttaagagaagtcttaagtattattgttcggtgtgtcgatgtcagagtttgagagaaacttacaaaaagaccagagacttcaattttcccaaagaagtgggaactatccccgtaagattgttgttgtacagatccaagctgatgagattcttcagatttccaagttcggaaggtatagttccttggatgttgtttttgtagagctctctgcatcaatcataggacaagtaaagagttaatctacattgtctataacataatcaatctcatagcaaacagtttaggtacttatatggtatacaatgttatttacattaaagctgacaatggcattgggaaaagtaaaaatttcagaaaaacaaaagtccaaagagtgatggcatacagatactgtaaatgttcaagcttcccaagttcaggcgcaagatgtccagagaggtttgagttacccaaatccctgccaaaatacgaagaatcagagatacaatttgagagcaaaatatcaatatgtatatcacagaataagaagacaataaagcacaagtgaacaagagataagcattagttttagatactcaattagctgttctcttgattcatcaaacagttatcagatgtaatcaagtacaaagaatccaaaaatcttcaaaaagcgtaagaactcacaaagtagggaccaaaaagtaatcgagatgagtatcaaagcattgagaaaatcatgaggtacaagtaaaattgaactgcttaatagatgaaataactattagagattctttcaaggaatccaatgactagaaaagtctacactgtgcaaaaacatgggagctttagatttccccttttaatactggaaagttgaacaagaaagtgatattttctttaattgttgtactctgcatttgaagctgcgaaaaggaccatatcataaatagtctcatgaaccttaaagaaaccaaattaaagttaccccaaatctgataaagaagtatctccaagggcaaaggaaagctagaaaatcatcacaaacatcaacaaaatccccatttgactaaataacatctagcaaagacgtagcgaggcgcctactacgaataatcaaagcaatcatgaattcctattatttctaacaattatgctttacggggatgcccataagttatcttgtttgctctctgagaagaagttacaattatcgtcaagtttatctaacatcttccacaacgaccaaatataaaataacagcttcggaacaaaagggtctgcatatgactctaataccgtcatgtttaagctcggacataaatcgacagaaacttcaaatgatactatctagaaatcctaaaaatagagcaaaaatatcaatagaattctccatagattctaggcgaatcaccttctcgaaaacaagagctaagagctaagagagaagaggatcttacacacgggtgacgcggttgtcttggttacaggtgacatggaaccaggtacaaggattaacaagagttggatcccagctttggagaacatggtccggatccgttaaactccggcgaagagcgtaaagagcgtctccttcggagtttgcttcgaccaggtgaatcaaagctaaagttagggttagtgaagctgcgaaaagctcgcaccgatagtttcgagacgccatgtgagctatcggaggttgaagagagggaaatctataaggaatttgagtaaagtgaacaagatgagaaagcaaaattagggtttcgttcgttccccttttttctccttgttgaagttggaagatatcgattacgatgcgattggtgtgggaaatgacaaacggaaatactatacttttttttggtttagttacttttttacattaattttttaaataaaattcctgtctttttctcaatttctttaatttttttaatcaacctgttgttatttttccattacaaagaatgtatacagaactaaggaatagaaaatgaggaatttgctttagatttaaaatgaattgtatatagagtatagacacattgaaaattaaactctgaaacagttgaaactttgattttaagagaaaataaacaagtcaagtcttcgtttgtgacttatttcttggttttaaaattgttggtcaaagaagttaagaggttgtcttgagttggtcaaaattggtgactcttactagttcacttcacgcggaaacaaacagtcatcttttgtgcacacattattcttgtgagatatagtagaagattattattatgaataatgtgaatgtgatattttcactttttgtttaatttgtaaggattattttatcattgattgatggaatacgagttgtgtgcactaacgaaaaaaaaataagagagtttaagtgcaaacataacaaattaagatttaagaaaaagtcaatgatattcggggggaaaaagataagattcttaagatggaatccgatccgacaaacacataacaacttaaatgtcggaataatagcaactccactcttcctttaaaaaatactaaaggcaaacaaatgacgacaaaaagggtaggaattgtcttttctaaacgacaccgacttgtccaaactgttcgcctgaaaatttaagaaccggtgattaacaatgaacgcttctgaccgggttcgtcgtatgggtttctctagaagcctgcaggttttaccggttcgggccgaataatgtagacccgcagctctgaaagttggcccttaaaacctatgggcctaataagcccacaagctttttttttttttttgctttttttatttatatgttgttgttatttaaggccttaagggtgaatatgtgatcctctttgcatttacaacacaacaagcaaagacatgtttggaaatttattgctcttcgtctctatgaactatgattatctgttcataatcaagctgttgtaagtatgaaatgctattgatgtggttctatacacatgatctcacgattctatccaaaaaaaaatccactgaagtgtgtggtattgaagtctgtttctctatagacgacgttgttgcggacggtcattagagtacttgtttcttggagaggaagaaagctttaaaatttggtttaagagtttgagaatgagaggatgtgattgtatttacccaaaaatagttcctctattcacgttccctcccattattcaacattcttatgcatgaattgaatttggtaatgtcatgacaagttcaggcgtctcactaacaaaaacgtctattaatttattatttttaattacaataatattcttttctctgtttaatccattattatggccaaaaacacaaaatagtaaatggaagggccaaaaaaaaaaaaaaaactttcaaaatttggttcatatgagaaagttccgcaatcatctccttttttttgcaaa

SEQ ID NO: 5330 - DNA, 36063 bp, Arabidopsis lyrata
  Intron number 4 from transcript 897766 (locus 897766) deri ved from phytozome v7.0 (chr-ID scaffold_5; pos 14198901 t o 14234963 reverse strand)
tccaaatcatagattggagccacccaagtagatctgtaacactatcgactgcttgctttcgaagctcagtgagattagaccaattttcccgtttctgtacagatcttggaaggcggttgaaaaggttatcgtaacgctccactgctttctcgtaacggtcgggctcattttccgcaagagcgttcaatatcgggtgaacgcaaaatgccacttgcgcccacctgagaaccgcgatcaaccgcatcatctgaatagaaaaaccaaaaaaaaagaaagaaaaagaattagtaaccaatcaatcaaaacccaactaaaatccaaagtaaacaacataaaagaaatatcacttactagtttagttaattcagcgagacaggcatgaggaggatatcgagaactatagtactcaacgagtctgtttttatgaaaataagtatgataattttctaatctcgtcgatttctgtagagagaaaagaaaaaaaaacaaacaaaatgaatcagtttagggtctcatcagtttatacataaattacataaaaaataataataaattatacaaaacattaccttgtcaagtgaataccaaagacgaggtttaacacaactcgagaaaagtgtattgtgaagattcatccactccaaagttttggggtccaaacacaaatctagaaggtgcgcagtgattataccagatgatgctccgtagtgacactaaatgaataatgatgccaaaagaatggttagtcggcaaaattatccttcatcttcgcttaacctttcaaaggggtgggctttaatttacgattagggttttatatttcagtttggactttctcttattatgagttcaattattatcgtaatgaggcatgcccacagttacagtttattaaccatggataaagttataaattttgtttaaccttaaccatatacggttacagtcaaattcatatattttgtttaatcttgaccgtttgatatacggttatagtttaatatggttctggttaaagcggttatgattagatacggttacgatttttttatgatatgatatggttgatattagtgatggacccttaaattcttatcacttctgtaaataatctaagtgacgatataacttattactgatttatataatatgaatttagtgttatcatttgatttaaataacaacattattatttaaaattattttatatttctcattgaagggttcttacatacatttgcatgaaacaataaaattttaaacaaacggctcgaaactaggtttgagctttaatttacgattttgattttacatttcagtttgggttttctcttattatgggttcaataacacggtaaagtttattaatcaccggttacggttttaaattttgtttaaccgtaatcgtttagatatacggttacggttaaatatataaagtttgtttaacttttaaccgtaaccgtttgatatatgattacagttaaatatagttatggttcatatacggttactggttttgatgatatgatatggttgatattagtgatggacccataattttttataacttccgtaattaatttaagcgatgatatacaaactaatacttattatgataatgttacaaattataatataaatttagtgttatcatgtgattcaaataacaacatcaatatttaaaattattttatatttctgattgaaagttcatttttacatacatttgcatgataaggggtgtcaaaatgggtcaagattcatgggtcaatccaactcaactcaacccatgaaccctaatgagttgaaaattttgactcaaatgagttgatggatcaaatgagttattgagtcaaatgggttgatggatcaaatgagttgggttgtaatgggtcaatggtttacccatttaacccatcaatttttgttaaattgaatcaaaccaattcaaatctctaaaccggttttaatttgagtctaaccaaaaattataaaccgattgaatatagtccttaattttcccgccaaaaatatgaatacacaattttcccatcaatatataaattcgtgattttcccgccaataacgtaaatccgcagttttcccgccaaaaacgtaaatcattgatttttccgccaaaaaaaattataattttaaccaaaaacgaaaatatgtaattttcccgccaaaaacgtaaatccgtgattttcccgccaaattttttttataatttttaaccaaaaatgagaatgtaaaattttcccgccaaaaacgtaaatccgtaattttcccgccaaaaacgtaaatccgtgattttcccgccaaaaacgtaaatacgtgattttcacgctaaaatttttaataatttttaaccaaaaatgagaatgtaaaactttcccgccaaaaacgtaaatccgtaatttttgcgccaaaaacgtaaatctgtgattttcccggcaaaaacataaatcattgattttcccgcaaaaattttttataatttttaaccaaaaatgagaatgtaaaatttttccgccaaaaaagtaaattcataattttcccgccaaaaacgtaaatccgtgatttccctgccaaaaatttataatttttaaccaaaaacgagaatgtgtaattttcccgccaaaaatgtaaatccgtaatttttccgccaaataatagtgatgttgatgatgatgattattattattattatatttttattattagtttattattacattaatatttaatgggtcaacccatttaaccttctaacccatccaattaaatgagttcataggttgactcaattcatttggctaaatgagttgagtcaacccatgaactcatttaactctaaactcattgggtaatgagttgagttgagttgggttaaccattttgacacccctatgcatgacattataaaattttaaacaaacggcttttttttttttttttagaaacaaaactaaataaccttttctataatctaacatttattttgaaagtaacaacattttaaaaattaattaaatttctaatatacgcctgcatatacaattttttggttttgtctgcgcttggacgttcggatattcgggtcgggtttttctaattcgagtttttttgagtttagaaaactaagactttttcggatatttttaaattttgggttcggattaggtatttcgggttttgattcgggtttactcgaagtatccaaatatccaaaattttgtatccgattatatgcaaagtattgaaaatactcaaaaaatctataaaacccaagtattttctagccaaatctagccagaagtaggtaaaacatccgaaaatatcttaacatccgaataatttaggcacttaggttattacaaatataaatattactaatatattataactacgttcttataattcgggtatgttcgggtatttgttcgggttcgggtccggatcgggttcgtattcgagttttcggattgtgaagtttagaacccgttcggatattttaaactttgggttcggattcgggtctgttttttcgggtcggttcttctggtttggatattatgctcgggccttttgtcactttgtattcgtgaatgatctcaacgatatttttttttctttaattattataaaaaggttgtgctgtaacattataaatatttgttagaaaatatcattttgtatctactgtactcatatttctatatcatatgatttaataactaattattagtatattttattatgtttcaaaaagaattacggttaaaagtattgaaggttacggttaattaaaaattacagttaatataattttatccatggttaatggttaaggtttcaaaccgtattatacggttatagtttagatacggtaatgttatagtttgattttgattttggttatatctaattgtaatgggaaacttaggatggtttatgtgtaatagattggccttcttgccacatatttaaattaatgcaacaaattaagaaaaattaaagaatggtaccagtttacaaagctgagcagaagccatcactgtctcagtctctctaagagtccagttaaagccgtatcgatccctgaatttgtacccattgggagcttcgagcgcttctaagtcaaccaccgctccgacattcacgattgtatcgatggcagcatccaagttaggagtttcaataatgatcccagcactcatgaataaaataaaacaaatgagtcaacgacaattatattaattttgataaaataaataaaagctgagtcaagattttacgtgggaaacggtgctccggtatgaaagactgcggtggaagagtgcgatagcttgagctcgacctgacgagcacgaggacgacgagtcggggttgccgcaaacaaattggtgtaaaactctacagcctgagaaaagcatgtaacgtccacggtgaacgcattattcgcacgcccatccatcctacataaaatgtggaaaaatataagatttgaggaagaagagtctatagaaggaatcaaaagaataaataagatcttgaatgatttgagacaacgtttataaccccaacgagcacaaccaagacagtaaacacattctaaaagagggcaacaaccacatagaatcgacataaacagatacagagttataacacattcatcatcatagatcaaaacataaactttcaatgttaaaacaaagaaatttcaaaactttagtacacccaactgaagaatattggaagaagctaataaaactctgtagcatttgtgtttggaaataagtgactaaagcttaaaccaaagacaaaaaagtcaactttgtgaatcggaaacaatggtaatggaaatgaaattgaagattgaagttctaattgctactctatagagaaaaacatatgaagagaattagatctcactactgaaacactaatttgtctcttctcttcttttaagctcaaatcaagatcaatgatttcgagaaggaactgaagaatttgagagaagataaagaagagaagggaagtgtcttcccgtggaaaacggaagaagaaatgaaaatcatgccatagaaggaggattcaaaactcgccggactcgtgttagctttgctttctttaattgtggcagtgactttggggttaaatttgcagttgcagagctactttggagcttgatgtgttgtgtgaacaagatataagattgaattgcagtcgatgttataatttgatataatttgcagtcaaaattatgtggtataaattatagaatgatgtagtaatttactgtagaaatatgagttatcagtttgatcaatacaagtgattggtaactcttgtgctttaaaagttgtagtatatgttattaaaactaattaaattaaatatcaataatattaataatatttcttacaaattaaataataaaataaaataatactaaaaatagttaatttgaaaaatatttatgttacataatagttataaaactaatgacttacatttcatagcatatttaaaatttcatcaatattaaatataatcctataaatagtttttgataattaaataataaaaaaattaaaaattgaaagatattaagaaaattaagaaatttaactatctattttttgtgaaattttattgaataaatttaagataataataacaacttttctcattattcaaattaatttaagacattttcttctaatttaaaactaattttcgtttttctaaaaataaaaaattataactcaacttaccacatcctaactcatgagaatttacatgtttttgagttaagttttgatttaacaattttacaaagaagataactcaaaaatgtaagtcattaataactcaacaaacttcaacctctaatgcaaatttttaaaaacaaatcatgattggtaacatttttgagttatctttctacttcaatgataccacatattaactcatgtcaccaatcacacccataatataaataatactattttttgacaaaattttagttattaactgttaaatttacagagaacaaaaagtgttaatttttgtttacgaagtttctagatttaaacagaaaaagtagttgtgtaacttgagttagtcaaaataagtagtagttgattttcatcggtcttattatttttattgaatagatttcatataactgtttgtaacagtaaattctgaaaattaatgtagatcttaatctaaatttttatgtacgaacaaaaaaaatgaagggaatagtttttttcttcacaaacagaaaaatcacattggcttttaaatgatttttgatgatattatccagaatttaaaattctcaattaattttaaaataattgtgacgatcgaaattattcttacagtagagggctctctgtatgtgtagcctctacatatatatttaaaatatatatatatatatatgtttatacccaatcaacaaatcaccaaatgatttgggaaaaaaattaaacttactttttatgtcggatcttgatagatacccaaatgaaattcttaatgagaattttcaaggaagctttatgaagctcaagatttgcaaaaaaaagtttttgtcagtgtttttaaacccgatccggacggtgaatcggactaccttctgggtcaccgggtcactgggtcaaccggattcgaccacgggtcaattgattaaaaatttatttaatatatataatatttataaacattatacagtttttataaatataaaaataaaaaatattcatattatattacaaaatatgaagtctaacaataataagaaagtgattcaaattaagtttttaaatccaacttaaaattctaaaaccgtaacaaatattaaaatagtaagagatcgcgaatggcagaaataaactaagaaaacatcgtgaattcaaagcaactaatctcggttatttctctcaccattccattcattcttcttagacggtaatgtgaagtttcattaaaatctaaaacattaaatgagtctaagaacttaaaaaaattcttaaaatgaccgaatagagtctaaaactctatattttactccaaaatcaaatgatatttttcccatatccagccggttcaaccggttcactgggttgcgggttaatgacgggtttttgtgggttttttcggttttaaaattagcgaatattagattatattaaaaagctataaatacacaataaaattttatattaaaaataatataaaaaaatttcggttttaaaatttttgattttatcatggtaaatataaccagaataaagagctataaatacacaataaaatattatattaaaaataataagctgtgtatttaaatataaatatcatgattcatgacatgttacaataaaaaaataacatggttataataaaaaaatgtgtcataatttagggaagtcttaactaatgtgacaactaaatgagtagccacatcatttttgttctcagtccatctttttcacttttcaggaatctactacctcatcaagttcgtagtctgtcatttttgctattcgtccatattttttttataaagttcccactatctgtcaaattagttgtcaatataaaaaaacttagctgtcaaattagtttgttacgtcatctctctttaccgttgtttctttctccaaaataaaaaaaaaaaaaaaaaaaaaaaaagaagccctaaagttcacataataaacttctcactttttcagggtagggtctttgttcagtcaacttgtacttttacgagcccttccttccatcactagaatttaaattaaataggagaaaaaaatgcaaatggttttttttgtcaaagaatgcaaaaatggttatcgttctaaattctaacacaaatctagacctagataaaattgtcatcgttgattcgttgtcatgagaccctagatttctttaacaaatcatcatcgtcgccgcaaccaaggtaaaattttagttaaaacggtaaaattttagtttggattaatttttcagcagataaaatagtagatatggaaaaaggtaaatgtcggttaagcctagaaaggtttattcaatcaaaatctcttaacttgtattttgttctttgccgggattattatattacttgttgttttttgttcttaatcctctatgagccatgtcatcatgatggtctatagactctaggttttaggaggctagcttttacatagaactttagaatacatagatatgcatatttatgttagcttttactaaagcttggagaaagctgcatgccgctgcagtgtacgtagaagggtgaatttaaatcaatcatttaatatgaaatatcttattacagtatttaacttgatttcaaattggagtattttttggtgcacatattttttttctttctaaatctaaaaaaatatactggttttacatttcaatattatagttttcataaatttatcataatcctgaaaaaaaaaactttcaacatagtaataatttccaatgtttatattctttagttgacaaatcttaagtccattggtataattcttgtttacgaactatatacattaatgttttgttgtatagcatttactatctaacatatgtttcatcgaaaatactgtgttgtttgtagtagcatttactatctaattctaacatgtttcattggaattcttaaacttccgtacaacatttatatctacagtgtaaattccaaacctaaccacaaccaatttttttattttttattttttttaaactactagctagactcagaaagaaaagaaaaaaaaaacgattttagtgatcattaattaggagtcaaggatttccagtgactttttgcacatgtttgattcgatgttaatcgtgaatatatcggcaaggttaaatatagtataaactatataattagacagttaataataaacaaactagttaagatttcttagtcaatttattaacggaaatatataatcacacgatagaaccaagttcactctcagatccgagctactgtgattcgattctttggacagattatgaaaatgaacaaccaaacaaaccagcttaactcgttagagcaaacaaatccgaaaaataaaacaaaatccagagcagcgaactcatattttattgaatccagagaaacatggagctaaagagagcaatcataaacacagacgacaaaatgcacacaagcaaaaccagtctaaatctagtgaaacactaagaaacgccactggaaaatgcaaaacggaggaaaacaagtagagatcagcaacgaagcagtaagataattgaagagaaagcgtttgaggaattgacaacaagttcaagtcagaatttcgaacggaaaacaagttcatctggccggttaagaaattgatcggaaggtaacgaaatcaacttaccggcgacgatcggatgtagtgtcagtgagattagtacacaccgacggatcctctctctctccctcttctcttctcagtggtaaaaggcagtagagagagaagggtggtttctgtgaaaagcttgaaaagagaggagaactaggggaaggggattgacttatagagagagagtcagggttttttctttttctttttttttttgtgtgtgaggaaaattttgttcgttatttttttttcttaatttctaataaattaaatttacctaaccgcattaatttggtgacaattgtattttttataccaggtttgattggtaaccaacgacaaaaatataccgctaaaaggaccaaattagtatgtccggtttgctatatccatatggaatctaagttagaaaaagacgtttagatcctaaaaatgaaaaattgagaaacatatgtagtatttgattgaatagtctttggagcaccaaccaaaaacataaatgggcaataatataaaagttcgtttaattaaaaatatttcagcaagcaactcaacaataaatgtaaataataaagtctgacaccaatgcccaacacaaagataaatgaacaacaatatgaaaatcatattttaaatgttgtattaagagactagtcttatacataaatgatcaatactgattttagtatctaaatttagtggttagcagttatatttatgtgatactatatagtataacgttcaataaaaccgattttacaaaaataagtcccaaacccctcgtttatctcgcatttatgtggtgttcgtagacactctatccgttaaaccacaccaaaaatcatatccataccgcaccacaaacagccctgtgagcttaataataccaagctccttgagtgtgatcccctttccagggactctaaatgttacgcttcttagagtaggagcccttagagaatcgatatcacctacacatttgtattgcttacgaacactagcaagctgagatcccaatggaagctgcaaaagcatatcaggctcagatagtgttacccggttcatcatcactgaaaggcgttcaggtggtggcatggaagcagaataatcttcatcatcaaggtgagcaaaacagtcaacaccacccacaaaagcatgcaatgtgatatgttacttagcatagtatatctttcttttttttttttttgatgaaatgttaaattaattgaaagaaacaaagttatttacgactgagataacatggtggaactaaaaaaacagagcaagacgtgataaaaaacagagcaaagccaagttttgaaaaaaaaatagagcaccacctattgagtaatacgtgagctgaaccacctttgcatcatccctcgcagattccttcgctcatagtatctcaacgacatgatccttgtcttaatccccctctcaatcatgcgcgccagttggaagtattagtatagtatatcttattatataaagtatggttttcaaaattaataactcatatgatcgtgacacgtggcaaatctatcgatcttagattttgacacgtgtaaaacaaaaatttcctttttaaaaattagaaaaaaagataattgaaagtaattacaaatttaaataattttaaaagtgtaaaagataattataagaataattgtaaataattcatatttctataaaatttttttttttaaatgtcaaaagatagtaataaggaaattatacgttttttatatttcaattaaacaaaaaaaaatcaggcaaatttattaaaaaagaaacatatgctattacatattaatttaaaatttgatattatttatctcaatctatttttcaattagaaatattatatgatttaattaaactaatcctcatattatttgagtttattttttcaattagaaatatgtgagatcaatttttttttcctttttgtaatatttttttacttaactgtttttttttgtcctcaattatgattgtagtatagttagattgtttatttcaatttctcttttcatatttaaattatcaaagattcatatatcatcgtgttaataattttttatttttagtttaactattgtatctttaaattatttattttggtttctacgttcagtttaaattatataagatttataatatatcatagttctaatgattttagatagcgacatgtgtcatgatttaaattacaaatttacgttatttatatcaatattattttctaattagaaatatgtgatgattttaagtaaagtgttatattgttttatttgaaattcttgaatatgtaagaaacatatatgcttcttttttgtttttgatattttaaatttaattatattatttcaaaattgtttatttcaatttctatattcatatttgaattatataagattcatatatcatcgtgcttataatttttgaatttattaattttattgattgatcatataaaattattgcaatcgagtatataggaatcgaaccagcaacgttagcttggaaggctaaagaatttagtcgatttatcatttttatatttttaacgtgtcgaattgaacaccactttgattttattcaccaactttatgatgaatatttttaatttttgttcttcatataagtataccatgaattatttttatcttattatataaagtatagtttcaaagttagtaactcataggatcgtgacacgtggcaaatatatcgattttagattttgacacgtgtaaaacaaaaatttcatttttaaaattaaaaataaaataattgtaagaaattataaatttaaataattataaatataaaaagataataataaggataattgtaaataactaatatttctataaataaattaaaaaatgtcaaaagataataattcaaattatatgtttttataattaaaattataaatttctattaaacaagaaaaacaaatcaggcaaatttattaaaaggaaacatatgttattatataactaatatgatattttatttttctcaaagttagtaattaatagaatcatgaacagttatcagtcaaaaattctatcatatgtcatgatcttattatataaagtatggttttcaaaatcaataactcataacatcgtgacatgtggaaattttatcgatctcagattttgacatgtgtaaaacaaaaatttcctttaattaattttaaaactataaaaagataattataaggaaactaaatagttttaaaattttcattaagataattattataaaaatgtatcttattgaatagaaatatgtaaaacaataatttccttttattaattttaaaaatattaaaagataattgtcaaaaaaaattaaattttaaaaagtaaaaagatcattagaaggaaattaataatttcaaaaaagataattattctacctactcacttctatataaacaaactagctaaggacacatcctatggacgggtataatttttttaaaatttaaatcaaatttaaaaaaaattaattaacaacgttttaagtagaaattatctttcaaaagtaagaaaaaaaaatatttactttgactgttgcattgtttttttaactactaaaattattgattaaaaaattatttcgaaagaaaaatattttccatagcaataacttatgctatacttttaaataacggggatatgttgaaattggctaaaagtcacatagttcaggtttgttatttaaatattgtgtgagttcggtttgattagtgacgggtatcagagtttggattgaaaaagaccgtataaaaatagttgggatcgattataatatatatatgaatcttatattattcaaatatgaacatataaatttgaataaacaatttaaaatagtataattaaatttaaaatatcaaaaacaaagaagaagcatatatagttcttacatattcaagactttcaagaaattttggaaattttggattttgagaaagttatgtgattttttaggatacttttggtggaattgttagaattttcattttagaaaaggaaatactagtttgttatttggtgagatttaagagataatattggatgatttggtgagatttttatctccaacattgtctagaaaatttgggatctctttgcaacgttgctttacaaaaaaatagaaaaattggattctctctgcaacacgttccaaaacacgttcaacgttgtttgtggtaaaagataaagaaatcatggtgtgttgtggttataaaaaagtttatgtttttgtattaggacttcaaattaaaaacttgaaactgagagagattttgttggtaatgaatttgatttgccattgaaatcttttgtttttttctgcaagtgaagaacaaaaaaaaggtgacagatttgttttgacttttgacgatgagaatgagaaagtgaaaggacaacttctcttatgtttattttgttaaaagaagttttttccaaataacacctctcaaggtgtgatttctttaattgaatttctcatgtaaaattgtatccaaagtctcccaaaatcaatgttatggcttttttaaaaaaacaaagttgtgttttcaataacagttgatttgatatcaagtttagaaattatagtttgaataacaagagattgtgagtgattttattgaaatctcaatttcaataacattggatttgagaagagatttgaaaatcacaaattcaataacaggtgattttagtaaaaacccaaaattttctaaaatcctagttccaatacacccccctaaaagtcacatagttcaggtttgttatttaaatattgtgtgagttcggtttgattagtgacgggtatcagagtttggattgaaaaagaccgtataaaaatagttgggatcgattataatatatatatgaatcttatattattcaaatatgaacatataaatttgaataaacaatttaaaatagtataattaaatttaaaatatcaaaaacaaagaagaagcatatatagttcttacatattcaagactttcaaataaacaatacaaaactttatttaaaatcatcacctatttcttctaattagaaaataaaattgatataaataatgtaaatttatagtttaaatcatgacacatgtcgctatctaaaatcattagaactatgatatatgataaatcttatataattcaaactggaagtagaaaccaaaataaataattataagatacaataattaaactaaaaatattaaaaaaaatatcttttaaaaaagataattaaaaaaatatataagatcattcacttacatataaataaataaccattcattaacttatctagatatagatttgatatgatcaatacatattattttgatataattgttttagcatttattcattaagatgaagggtgtagaatcaaaatccagtttgtcattattaaataatagttaaattgtatattaatgtaaatggaatgtgtaagatttgaatttttttttcaataaaagtactaaattaaatattgaaaaagtgtacaaggtaccgtttagaattcaaatatcatcgataagatggagtgtgtagaattaaaatgcacttttttattatgaaataaatagttaaagtgtatgattgaaatatgattgaaatttggttgaaataaatagttaaagtgtatgcaaaatagaatgtgtaagatttaaattttgtttgaaacaaaaaattaaattaaataataagaaaaatatagatcactatttagaatttaaatattattgatacgaaattatatttattttttacacccgcctatttaggcgggccttatctagtactgtataagtttaattatgtgataattaagttaggttgtaatgtgataactaagttaggttgtaacaaacacttttaatttctgatgataaggattctgttacatctccgttttctctcagcggagataaataagtagggttcgcatagtgtagtaaaagttataaaagcaaagtaaggactacataaaaccgaaagctttaaataaaaaagggctcatgatcggttcatgcaccaatacaagacatgcacgtaattaaatatatctacacattttcaactcttgtgttatatgtttcatgaagatgcatattttaatgaagatcgtctatttatacttttttacgaatattaaccttggcaaagattgaaacagcaagtgacactttgtcaaaaggtgtcactcgaaacctaaaagagatggtgaaatttttccaaatgtgtgtataaagaaagcttaacaagaaaacccagttaattaagaacgttaatgtgtaatgctaattacgttcgactcaatgcaattaattttgattatatatattgttgattaaagaacatcaacatctctcaaacttaattagcctacaagacaagacatatgtactttatttgctagaaacgagtattatgttgacatgaataattcaaaaacaacacttcctgtttttcttttcaaattccaagaggccgctgaagatcaacatgctctcattatttctatctttttgaaagaaacccatacgatacgagtcatacgacacaacacgacacgcgtttcaactcgatattcttacaaaagccacatgatgaagatttccatgttcatggccatgccccatgcatgtttacaaccatgaccatcatcaagcaagtgttgtgatggatcaagatcaaagagtttcagatctaacaaacttttcctttgtttagaattatgcttcattaagtgttaaataaacaagatttgttccttaaataatacaaacatataaaccaagttcaaattagtaaaccgagacattaaactaatatataatctgatattcctctttaagatggagagtacatgtgatggagtctcatcttggacaataaatgattgaactgaagcgttgtgagtggcttagtgagcatatcagccaactggtgttgagtgccaacatgaaaagtcttcaaacgaggcagcctatcaactctagcttaaagcacgtggttaaatctacaaatcttttctagagcgatttaaatttttccggccgtattatttcaatctacgatgcgaaaacgtttattttttttaatataatttaatattaaatttaaaataaaaaagtcttcagaaaaccagatgccacatgtttccgaacaacatgaatgtcacactcaatatgtttagtactctcgtgataaacaaagttcttggcaatgtgtaaggcagcctgattgtcgtagtaaagcacaatggtgtcagccaatgaaacctccaaatcttcaagcaaagagtatccaaaccaattcccatgtagcattatccatactcctatattcaactttagcagaattgcggctaacgatatcttgcttctgcgatttccaggagatcaatgaaacaccaaaaaaaacataaaatccagagatagacctgctagtctccagacaattgccccgatcagcatcaacaaaggcacgaagagtaagagaagatttggcagggtaaaacaaggcttagcctggatgatttttcaaatatcttaaaatcctatgtgcatcaacaagatgtggctctcgtggagaattgatgtactgactgagcttgttgactgcaaagcatatatccagacaagttataatcaagtaaaacaacttaccaatgtgcttccggtgatgagacggatcatgaatcagttcaccagactcctggctcaacttgagactaagctccattggtcactacaagaaatatgagcattgatagcacattgtaatagctcattttccgtaactgttattaaaaatgaaatattgaatgagattatcatatgatagcacttcaaaaatgctaaccacgaaaatgagtaagagggaaactaaatttcagcggacaaacctaaaatcactattagcggcaacacttagtcaaaaatattacacttagcaacccagtttttaaagaatttcaatttttttttttgaacaccagaagaattctaattattttctttctttataaagaaaaaaattaaggccctctcacgtctcaccttcaaccctaaatccctcttttctctatcttcaaaaacaatttcacactctctaatcttcctcttgtcttcgtcgatgacgagtccaaaatttgaaatccatcttctcctcatcgtcttctccgatttggtctgattcgaggtcaaatctccttcatcctgagttgggtctgttggtttctccatctatagatctagattcccttgtggttcgagttatggagaagtttaagacgaattcaaacaaaagagagaactcctcaacttcgatttcagaatccatggctacctcacgattttgctataggtggagcttatgggattagatttggctcacaatatgatgtttcagagtgttgaaaatggaggaatcgtggcggaggaggaggatcttgagctattacaagccgaattctgaaacaaaatcaattgatgagaaggcgagtggtgaagccgacgatgacgagattcttgagcttcttattgataagatttttgaaaatcttcaaacgagaaggagatgaatcagaagtttcaaaggagacggatagagtgagtgtagagtattacgatcctatgtgattttgtggtttgtgttgtggtttctgtaattgaagtttttaattaggttttctcattgttgttgtagggtatagaaagaggtaagagtaaagaagaccaaatggatgtcattcatgcttattcccatctctcgatttctcatttcttaccaacaacacaacttaatcttgtttagattggtttctcgtcttttacgtgatatatatgtataatctaatcatctgtgtatttagcaatcacatctgtggtaacaatctctaagatattttgaggaacaatggattagcaatagagaaaagtaagtaaaatctccattcttatcatcaacatttattattacgtaaatcataattcaagaacctatttcatctttgatctgtttttaacaacatgggtgttaacgttgattgtaggaatgaaagaagagacaaaaggaagcatggtccttctcgtaaaattgtgtttcacattgtctctttgctctggtaagtataaattcctttcgcaaagatggaaaacaggttaatgctgcaaatacacttcatctttcttcagttttggtctgtttatttgataaaatctgaaatgtgtgtgtttgtttcttgttcttttgtttatccagattgcatacagtaaaagatagatgctacatattattgattttttttcttcttcttctttttttcttttgctgctagctcttcttggctttctcctgtcaagttttcacaagtcacaagatttttgaggagctttcttccttccgaaaatcttgggtaagttcttgttggcataaacttttcatgatattttagctctatctcatgagaaatgatacattgtgtctctctaattctttatgccatgtctaatcttttctttgttactaacaaaaatccattaaatattggggcaatagtttttgttcttttgtcagtaaaaggttttgtttaatatatgcagtaatcattttgagagactactggagagtaatatgcaaaacttgtttgagaaattgagacctcttgtgggttcaagagcttgggattattgtgttctttggagactaaacgaagaccaaaggttgatttgatttcttttatgtagttagtctttgatttcttctatgtagtctcacttgctttacttatacagagacaaccaataacaaagaaaagaaccaaactgcagaggatatggagaaggcagcgaagtgtggacatcaacctacgttcttggagggagagaaagagcaaaccaatggagttcttcgttattaagtccatctgaattgcagtacttatgatgttgtttaagaccttgttttaacaaatggtgttgagttataaactatgtatcttttgatgatctatggaaagaaacatgcttttaataaattggtaattaattggatttcaaatattttaattgaatataatatattaccgcataaaaggcgacataaaacaaattaaagcattttaataatgctatggtagaaagcatctataatagcacgaaaaatgatttattacataaaaaaacaaaatttaaagtcgttatatcaaagcgtttaactaacgctatggtagaatactctatcataacatacggaaaaaacgctatcgtacatggggggtctaccataacaggggcataagacagcgtttatgaaaacgctattgatgacatataatagcttttctctcttgctaataatgtcgatatttcttgtagtgggtgttggtactagttacaaccaataaaaccaaactcttcaagtaattccaatgtgtacttcctctatgaaacagatataccttctttagctctagcaacttctaatcccaaaaaataatgcaatttctccaagtttttaatcttgaattatttagctagcaattgtttgatatctaatattgcagaatctttgttgctaacaagcataatatcatccacatacatcaataatgccagaaaactttcagaattcgatatgacaaacaaagtgggattaaaaggagactgaataaacccattctgtaagagaacacgagagaacttaaaaccatttgcatgaaccttgttcaaggccataaagagactttgatatatcatggtttttacggtttttaaccatgatatatgtattgtttttagagtctttttgttatttctagagtattttctagtctttcaaggttaatgcacgtacgagaccaatttggagattgtggttcattatggagcaaaaccaagaaattatgctacaagagcaatgcagagatcaaaatttgactgggtgtcgatcgatacacccctgttatcggtcgacaccgatatctgacggcaaattaatttcacgtatctttgaagatttgcagaatcaccccagaaaacttcatttgagagagtagtcaatagggtaatttgactcatatcagacttgatgagtcgacacacatgttttcatggtaaaatatccaatgtcttggagtatatccttgtggtaaatgcataaagacctcctcatccatatcaccatggggaaatgcattggtgacatccaattatgaatagtaggtaaaacaagcattaaccttacggaagtgagcttagccacatgacaaaaatatcaagacaatcaactccttcttgttgtgtataaccttttgcaacgaagcgagccttgtatcgctcaataaacccatcagacttatacttgatctatacatttatttacatccaacgcatgttttccatcaggcaaagagaaacttctccaagtagatgtactcacaagagcatccaattccatgttaattgcatcaagccaatgtcgcaacaagactatctctttatgtgagttggttctttctcagcaagaatggccaaacagaacagacgatatttatgaaagagtttatcgtaagataaataagcagagagaagatgagcagtaccatgaagagaaggagaaggcttttttttttttttttttttttttttttgttttgtaataaagagagctatgatactgtgaaagataactaggagcatgagtctctctctacgaatttcgttaatttcttacactggcccgatttgagaccaacaaaatttattattttatattgtttattaatttatcgagtattaatttatagaggtttaactgtatatgagacaattgggaaagtaaactagcttatactttttagtacttagcaaaattcagatgtatgtatgacaaagtaaatagaataatttatgaaattcttttggtttggttaatatagtttggtttagttattttgtggtttattttggttattgcatttgatttagtatttcaagaaaatgaaaatctattacggagtactactattttctgtatttcatatttgtttgctcagatgatcttcctccgtttgtttcctcaaatctgattgaatttttcatcttcttcgacttgattcgaagatatcaacaaatcatcttcatcgatcgagctctgatcttttcttttgatttcgagatctatctattgttctgactcattttgcacacaaacaaaaaaaatctattgttttcacttgaattttctgtttctatcagaatgatttgagcacaaaacgaaaacagaaattcaaattcaaacatgggacaaattttgctgaagatttcatcaccccaaggccggcattgcatttgatatcatggctgtttctactcgcgtgatgctgataagcccatgggagctaattttagaagaagagaagagtcttctagtgaagattaggaggtttgtacaagtagagatactctgttgttttgtaatcggatttttgataagaaatatttagatttatagttatcaaattggtgggtcgaggagattcttgtgctttccggtgaccgttttgaaatccatggatggaagatcgatcgatttgttccgcatcatttctcagaattgcagaaattgaatcttcatcgaggctgggacgagttgatgagggatgcattattgttgcggttttgggaatgacgaagaatagttgcttctagactcgaaaacaactttgattccagggacaaaattgattggcgcagcagaaccaaatctgagctggtcaagattctactttgaaactttgtcatacgtctgcgttcatggagctccaccaactatatccgaggaggaagttcatatacacatccgaggagaaaagacaaactatacagaagaatcaagactggttcaatactgagagtgatgtagtgagttgggggagaagaacaagggtgcaaaattgcttatccttcccaaacttaagtggtttgatctggctgttcaaggaaatattaaacagggacagatatttcaacaagatgtctaggaagctgctgttccaatacagtttggtaattcgacaaagttggctgatgctttggatgtgtgaggacaactacaagtccgtagtttcggtattttacataaatctgagcagcagagtgcattgtaggagaattgctgacctgcggttgttgcatctggttgacaaatttgtttcgttgtctcacatatccacagatatcaatgacaatcaaattgagataagattttcctgctgttactcggaaagactatcaaaggctgaacgggaaatcactgtccctcatactctttgagtattaaccgacacttgggagtgtacagacattatactattctttcgggatagaatgagaatcaatgttcagctgtatggagctgacttgcacccgaattttgagcagttgaaagcagcaatgtctcgcgtaatgatgtcgattcaagagcacatgttgtgcaacgacagacatgaatcaagaagaatcaaacagattatttctggtgatgagatgtctcacgtaaagcacatatggaggaaatctaagcaattgcaaacagtttcagacttgggagttttgttgggacagtgttgtaatcaacctttagtgatgaaaattatgcatattcagcttgggaacaacaaagaaacaaggcagaaatggcgcagcatgaagtcaccaagcttgcgaaaatcgaatttgacatgaagcagaatgtgtctcaagaaacatatagacagattctagcagtgcttgagcatattactggaagtagaagtcacaatggatacaaagtgcaccaagggaacagtgtttgatagaggtagaaatcggcaaaagagacagacacaaaaatgtttgccttcccgggaagttacgtacaaatgtccttgcgggttggttcagacgtgagtatatcctatttacattatacgtatagccaaatggggaatgtaccaagtgtttcgaatccaagctttgtctgatgagggatctgttattttttctgttatagtagctaaaacatccatcttgtgaccttttctttttttgttaatcaccattattttaaatcaaaacgcacatggatgcatcaatatgggccttctagcttcaatatgtttctcttgattataactgactatactgctctgtgtagttttttctctaacttattctgtactaacctttacgacgttgtggatgcattgcagcaagttatagtaggttttgatacgatggagatgatcaaggaaatggagctgatgggtctttctgatagtgactttgaaactgaagatgatgaaagtggagaagatgacagtgaggatacaggagaagacgaatatgaggaggtttaacaaaaatttttatttcatcttttatactgagtcactaaagaactctataagaggaatacttttgccatgtcttagcatgcttcactagcaaccgttttcttgacttcaggaatgggttgctgttctagaggatgatgatgatgatgatgatgatgatgatgaatcgctggcagactgggcaaatttggaaacaatgaggagttgccatcccatgtttttttttttaaagagaatgactgaggttgacttttagccttaaattcataaaaaaatgtgttgtgattctttataaaaacgatatgcaagatcattttcaaacctgaggctaaaagagaatgactgaggttaacttttaagacatttgttggttgtcaaatttaggttgcttcagatgatcttgttgattggatggatcagccgtctgctggccttgctatccagggaattctgagtcatatcttagtggaagattattcagatatccaaaggaaacttgctgataacaattctacaagtacgaacagaaacaaggatgcagaaaacttagaagaaaagcttgcagacattagtaaggcatgtggtgaagaatctgacatagattcatcgcagggtgaaaaagaaagaactgtggtggcattttacaagctggagatgataagaattcagcttattacaccacaagctggaggtgataagaattcagcttattatagattcttctttttgttgcaagcttatgcttactagtgtctttttaacttttgggaacagactgaagttgaggtggaagatgtcagaaaagcacaacctgatgttattgctcatgcatcagctggaatcataagccgtttagaagaatctggtgataaagtaactgaagccctcaaatctctgtgttggagacataatggtattcaagcagaggtaaacagctgcaacttaactctagaagctctagtaatgaactggtattcaacaggatatttctgtaggttttggttgtgtacgaatatatgatcgaccgtaattcttttttggctgtaggaagtgaagctgattggggtagattccctaggttttgacctcaggctttgcgcaggagcaaaaattgagtcatttcggtttgcattcttgacaagggtacatcggttctttccttcggtcttttagattttgttcctgatccatgatatctatgaaacagtgtggacagaataaatgacggtattacaacatttgaagcctctgaaaactcttgcaggcaacatcagaagacaatgcagagggacgaataagagagctattattcccgtaaaaaaactcatggaagcaacagaaaccgaaatgaacaagtcagtagaagtgttgatgcctgtagtaatcttccgtgaagctgcgcagagaaaacagttccataaacaaaagaattaaaatgccaatgcatatgtttgtggaacaaacataaacaagttcgtagagatctaagcccaagagtaaaatctgtggcttcaagcaaattttcaattgatttctgaacgctgtagttttgtgttaaaattggtttcaagtttgtgggttactctgcacaaattgggcattgaagtttcaacccattctttagaaaatccttgcttatgccaaaatccccttaaaccagacttctgatctgatatttctcgaactatcttgatcccttgggttattccagcctatctggtttctttggctctaatcgaaaaatgacttaagtgtatgaatgtcattctgttttcaagaatgacagtaactccaattatcaaaccaaaaccatcctcaaacgcaatgcaggagagttatttgtggtatcaattctgctgtactattacataatcctttttcattaaccaacttattgttgcagaaacataactgtattcttattatcaacttctgttacagttaatgtttttttcttataatttacgaaggaattctaactataacaaattaattattgtttcttatgaatgataacacattcttaagtgttaagcaaagcgctaatacaaacaaacaatcgaaactcaggtgctaattttttgttaaatggaagtcaataaaccttaagcgtggatccgaaggagctagctattagttgctgaagcatatcagcatgatgttacgacggagacaacaaaatgaataaaacaaaagaacctcaaatttcttatgcatctgctgcaaagtttgtttaaatcatgcaattttttgacaccatcttgtattttctatatataaacttaactttaattaataaatgtttgacttaagccaatccaaaaaaaacttaagccaaattaattaaagacttaaacaaaagcatttcccctgtacacaaagccttctcaccgagacactgttaggatttctcctgctccaacattgtaatgtgcaagtgacctgttgtcctttaaaacccgggcttttccacttaacatctgtttgtttgctggaattcggatctccctagctattttcttcttcaaacttgccactttttccgataacgacttcactgtgatctcgatggctccattatcagagtctgcaacaacaaccctgatcctagagggaccctgaaaatgtatgattgctaattagatacacgtcaagtcagacggaaggaaaaaatagatatacacggtacgcatctgaagaagacattaccgggtttttagcaagaaactggtcttctggaacaagagctgactcgtcaaacttttgtctctttgtctctggttccttgggtcctgcagtttgcatcaaccacgttgaagggtctgcaaacccatgagtacacagacaatgacgataccaactgtctgcacactgaccatgagtataaggaataggaggatacatacggcgatattccagtggaagccacttacgcataccacgcatccggttcatgataattgaaaggagttcaggtggtggcattaaagcataatagtcaacatcttccaagtcagcaaaatagtcaacatcttccaagtcagcaaaatagtcaacaccactcacaaaagcatgcaaatcaatcatagcttcttcttccaccgccagcttctccagttgaagacggcgaaaaaaatcctcaagaactgtctccgtacaagcatcatcaaaagggtatactactctggaatacgcatcgacaaccacattatacaaactgaacttctgattagttggctccataaacttaaactgaggtttcataacaacttccttcatcaattcttgacaaaaatgcatcccatagcgcgccacaaacagagctgtgaacttcataataccaagctcctcgagtgttatcccgccaccatatacatagggataatgatagctacgtactatacgcttctcccaggcagaatgaaactcaagatcgcgttgtgcatcactgtcacactcatgagtagctggagcatcaggtcggatatcctgagttccaccctgattctgagcatggtatccagtaagccgagatcccagtgaagtatgtatttgtattagctggttaatcattattgaagggcgttcaggtggatccattatagcaaaatagtcgccatcctccatgtgagcaaaacagtcaaccccacacacaaaagcatgcaaatcaatcatagccgtttccactccctcctccagcttccacagttgaagtcggtggaaaaacccctcaagtaaagccaccgtacaagcatcaggcttcttcagcattttagaaggttttagcactccggtgtacgcaagtaaaagcccacagtaaaaacggaactgcttatcgaaaggattcaagaactgaaaaaatgagttcgtagacactctatccgttaaaacacaccaaaaatcatacccataccgcaccacaaactgcgctgtgagcttaataataccaagctccttgagtgtgatcccctttccagggactctaaatgttacgcttcttagagtaggagcccttaaagaatcgatatcgcctacacatttgtattgcttacgaacactagcaagctgagatcccaatggaagctgcaaaagcatatcaggctcagatagtgttacccggttcatcatcactgaaaggcgttcaggtggtggcatggaagcagaataatcttcatcatcaaggtgagcaaaacggtcaacaccacccacaaaagcatgcaaatcgatcacagcagccgccactccctcctccagcctctccaagtgaaggagtttgagaaaaaaatcaacaacggccctcgtacaagcatcactcttcttcagctttttgcaagggaataatactctggaatacgcatcaacaagcaaattgaaaatattgaacctgatctcggttggctccacaaacccaaacgaagggtccgtaaacagtactctcttcgtcagagaagggcagtccgtaaacagtagtcttttcttcagagaagacgggagaaagaacataaactcaaacagagggttcatagccactctcatcatcaaagcccgacgaaaaggcatccgataccgcgccacaaacaacgctgtgagcttaataacaccgaactccttgggtgtgatccttatagtaggaggcccaagactggtttctgcatggcctacacactcatgaatagctgaatcatcagcttgcaaatcagacaagtgcgttatcattgaaaagggttgaggtggtggtaggatagcaggatagtgagcatcgtccatgtgagcaaaaaagtcaacaccacccacaaaatcaaacaaatcaatcatagcagtctcacttccctcctccagcttctccaattgaagatggtcgaaaatacgatcaagaaagaagggagaaccaagggaaggttttaatactcgtgaatacgaagtaacgagggcattataaagaccgaagttgctattagttggcttaataaagtcaaacatagggctcataacacctacacgcttcaaatcctcatgaaaaagcttcccataccgcgccacaaactgcgcaatgagcttaatagtacaaagctccttctccctgcgtgagatctcggtatatcgaggctcctttgagggaggaggctcaagatcataggattgtgctttgcccttaggctcacgagtagctggagtattaggttggaaatccggaggtttacctccttgatattcagtaagcttttgctggtacaaagcgtgattagggtctgagctactcataaagctgaaagttgtatctcccctattaacgattatcatctccttctcaaactccggcccccttagtgcaaccacatatgccattttctcgatcaatcctactatgctttctggaggctgctcagtgattatttcacctgccgccatgttctctatacaagcactaaaacatgccaaaaaaaaaaaaaaaaaaaaatcagattttccgttgcttacctaatcaaatccaataatcaaacccatgagtcttacctctcaaacaatggtcgcagctaattcaaacccacgcacgagagagaagaagacagccggcggagagatcaaagacgagtggagtggagggagaagatcaaagaggagtggattccggcgagagatccggcggagaaatccagctgcgaagagatccggcggagaaatccagctgcgaagagatccgacgaagatctcgtttctcttctcactttgtcgaaggatggctctctgagtctttgtcgtggttagaatgatgagataggggtatttaggtcattttatattttagactgaatagctccagtcaactgctccaatcagactcagtcggaaaatgatcattttttggatgagtttaataaaaatcatccaactggttcatctcactgctctgtaaaattgttataaacgaacatcataactcatctccattcagatgatccatctgaatggagtaagcaacgatattcaggaaaaaaaaaaccctactttgggctcggagagaaagatagggattagggtaataaacaaaaacccaacaacttttcttatctcagcattttatattttatataatatgagaaggttttcttccgccgcaagaaccgccgtaacgtttagaaagaccgacttggagcttagacatcgacgatacaaggaaactggaaaatcccctcttgacagccgaagctgattcctaacctaggcgagcatttatctgttcccgcttttctaatgggcctttactaattggatttacaaagtttgatccataatcatttgccagaccgacttaatttggtagaatggacttgtttttttttcccttctttctgttgtccatagtaaacaaaaacccaacaacttttcttatctcagcattttaaataagcgacaaatattgaattttttgaaatcgtatttactgcaattaaattataatccccataatttcatggttagacttaaaaaaaaaaaattaatctcatctcaaacatccttctatttttcttatgctttcttttctatttatcacttcttacgaatcatcgactccattcacttcttatggaactttctaccattctttttttccggcttttctaatgggcctttactaattggatttacaaagtttgatccataatcatttgtcagaccgacttaatttggtagaatggacttgttttttttttcctctttctgttgtccatagtaaataaaaacccaacaacttttcttatctcagcattttaaataagcgacaaatattgaattttttgaaatcgtatttactgcaattaaactataattcccataatttcatggttagacataaaaaaaaaaaattaatctcatctcaaacatccttctatttttcaaacaattgaaattatatatatatattaaaactgaactaaagttttttaaaataaactttcaaaaaaaaaaattattatatcatctgaagtcatttttctaaattaaatatgattataattaagtgtaacataatgctatcattatttctatctttttgaaagaaacccatacgatacgagtcatacgacacaacacgacacgcgtttcaactcgatattcttacaaaagccacatgatgaagatttccatgttcatggccatgccccatgcatgtttacaaccatgaccatcatcaagcaagtgttgtgatggatcaagatcaaagagtttcagatctaacaaacttttcctttgtttagaattatgcttcattaagtgttaaataaacaagatttgttccttaaataatacaaacatataaaccaagttcaaattagtaaaccgagacattaaactaatatataatctgatattcctctttaagatggagagtacatgtgatggagtctcatcttggacaataaatgattgaactgaagcgttgtgagtggcttagtgagcatatcagccaactggtgttgagtgccaacatgaaaagtcttcaaacgaggcagcctattaactctagcttaaagcacgtggttaagtctacaaatcttttctagagcgatttaaattttttcagccgtattatttcaatctacgatgcgaaaacgtttatttttttaaatataatttaatattaaatttaaaataaaaaagtcttcagaaaaccagatgccacacgtttccgaacaacatgaatgtcacactcaatatgtttagtactctcgtgataaacaaagttcttggcaatgtgtaaggcagcctgattgtcgtagtaaagcacaatggtgtcagccaatgaaacctccaaatcttcaagcaaagagtatccaaaccaattcccatgtagcattatccatactcctatattcaactttagcagaattgcggctaacgatatcttgcttctgcgatttccaggagatcaatgaaacaccaaaaaaaacataaaatccagagatagacctgctagtctccagacaattgccccgatcagcatcaacaaaggcacgaagagtaagagaagatttggcagggtaaaacaaggcttagcctggatgatttttcaaatatcttaaaatcctatgtgcatcaacaagatgtggctctcgtggagaattgatgtactgactgagcttgttgactgcaaagcatatatccagacaagttataatcaagtaaaacaacttaccaatgtgcttccggtgatgagacggatcatgaatcagttcaccagactcctggctcaacttgagactaagctccattggtgttggtactagttacaaccaataaaaccaaactcttcaagtaattccaatgtgtacttcctctatgaaacagagataccttctttagctctagcaacttctaatcccaaaaaataatgcaatttctccaagtttttaatcttgaattatttagctagcaattgtttgatatctaatattgcagaatctttgttgctaacaagcataatatcatccacatacatcaataatgccagaaaactttcagaattcgatatgacaaacaaagtgggattaaaaggcgactgaataaacccattctgtaagagaacacgagagaacttaaaaccatttgcatgaaccttgttcaaggccataaagagactttgatatatcatggtttttacggtttttaaccatgatatatgtattgtttttagagtctttttgttatttctagagtattttctagtctttcaaggttaatgcacgtacgagaccaatttggagattgtggttcattatggagcaaaaccaagaaattatgctacaagagcaatgcagagatcaaaatttgactgggtgtcgatcgatacacccctgttatcggtcgacaccgatatctgacggcaaattaatttcacgtatctttgaagatttgcagaatcaccccagaaaacttcatttgagagagtagtcaatagggtaatttgactcatatcagacttgatgagtcgacacacatgttttcatggtaaaatatccaatgtcttggagtatatccttgtggtaaatgcataaagacctcctcatccatatcaccatggggaaatgcattggtgacatccaattatgaatagtaggtaaaacaagcattaaccttacggaagtgagcttagccacatgacaaaaatatcaagacaatcaactccttcttgttgtgtataaccttttgcaacgaagcgagccttgtatcgctcaataaacccatcagacttatacttgatctatacatttatttacatccaacgcatgttttccatcaggcaaagagaaacttctccaagtagatgtactcacaagagcatccaattccatgttaattgcatcaagccaatgtcgcaacaagactatctctttatgtgagttggttctttctcagcaagaatggccaaacagaacagacgatatttatgaaagagtttatcgtaagataaataagcagagagaagatgagcagtaccatgaagagaaggagaaggctttttttttttttttttttttttttttgttttgtaataaagagagctatgatactgtgaaagataactaggagcatgagtctctctctacgaatttcgttaatttcttacactggcccgatttgagaccaacaaaatttattattttatattgtttattaatttatcgagtattaatttatagaggtttaactgtatatgagacaattgggaaagtaaactagcttatactttttagtacttaacaaaattcagatgtatgtatgacaaagtaaatagaataatttatgaaattcttttggtttggttaatatagtttggtttagttattttgtggtttattttggttattgcatttgatttagtatttcaagaaaatgaaaatctattacggagtactactattttctgtatttcatatttgtttgctcagatgatcttcctccgtttgtttcctcaaatctgattgaatttttcatcttcttcgacttgattcgaagatatcaacaaatcatcttcatcgatcgagctctgatcttttcttttgatttcgagatctatctattgttctgactcattttgcacacaaacaaaaaaaatctattgttttcacttgaattttctgtttctatcagaatgatttgagcacaaaacgaaaacagaaattcaaattcaaacatgggacaaattttgctgaagatttcatcaccccaaggccggcattgcatttgatatcatggctgtttctactcgcgtgatgctgataagcccatgggagctaattttagaagaagagaagagtcttctagtgaagattaggaggtttgtacaagtagagatactctgttgttttgtaatcggatttttgataagaaatatttagatttatagttatcaaattggtgggtcgaggagattcttgtgctttccggtgaccgttttgaaatccatggatggaagatcgatcgatttgttccgcatcatttctcagaattgcagaaattgaatcttcatcgaggctgggacgagttgatgagggatgcattattgttgcggttttgggaatgacgaagaatagttgcttctagactcgaaaacaactttgattccagggacaaaattgattggcgcagcagaaccaaatctgagctggtcaagattctactttgaaactttgtcatacgtctgcgttcatggagctccaccaactatatccgaggaggaagttcatatacacatccgaggagaaaagacaaactatacagaagaatcaagactggttcaatactgagagtgatgtagtgagttgggggagaagaacaagggtgcaaaattgcttatccttcccaaacttaagtggtttgatctggctgttcaaggaaatattaaacagggacagatatttcaacaagatgtctaggaagctgctgttccaatacagtttggtaattcgacaaagttggctgatgctttggatgtgtgaggacaactacaagtccgtagtttcggtattttacataaatctgagcagcagagtgcattgtaggagaattgctgacctgcggttgttgcatctggttgacaaatttgtttcgttgtctcacatatccacagatatcaatgacaatcaaattgagataagattttcctgctgttactcggaaagactatcaaaggctgaacgggaaatcactgtccctcatactctttgagtattaaccgacacttgggagtgtacagacattatactattctttcgggatagaatgagaatcaatgttcagctgtatggagctgacttgcacccgaattttgagcagttgaaagcagcaatgtctcgcgtaatgatgtcgattcaagagcacatgttgtgcaacgacagacatgaatcaagaagaatcaaacagattatttctggtgatgagatgtctcacgtaaagcacatatggaggaaatctaagcaattgcaaacagtttcagacttgggagttttgttgggacagtgttgtaatcaacctttagtgatgaaaattatgcatattcagcttgggaacaacaaagaaacaaggcagaaatggcgcagcatgaagtcaccaagcttgcgaaaatcgaatttgacatgaagcagaatgtgtctcaagaaacatatagacagattctagcagtgcttgagcatattactggaagtagaagtcacaatggatacaaagtgcaccaagggaacagtgtttgatagaggtagaaatcggcaaaagagacagacacaaaaatgtttgccttcccgggaagttacgtacaaatgtccttgcgggttggttcagacgtgagtatatcctatttacattatacgtatagccaaatggggaatgtaccaagtgtttcgaatccaagctttgtctgatgagggatctgttattttttctgttatagtagctaaaacatccatcttgtgaccttttctttttttgttaatcaccattattttaaatcaaaacgcacatggatgcatcaatatgggccttctagcttcaatatgtttctcttgattataactgactatactgctctgtgtagttttttctctaacttattctgtactaacctttacgacgttgtggatgcattgcagcaagttatagtaggttttgatacg

SEQ ID NO: 5331 - DNA, 1341 bp, Arabidopsis lyrata
  Intron number 1 from transcript 897459 (locus 897459) deri ved from phytozome v7.0 (chr-ID scaffold_5; pos 12630720 t o 12632060)
agagctggggattttttttttttttttttggtaagcatcgatgtttcattgttcatcaagggaacacatgggaatggagggatctgctacggacgtgtcttgtttacttttacgattctatccaataggattgcgaattttttcaacgttcaaaggtaaacggaaacacagcttcacaatcaccaaagtggccgactaatataaaagggtaaaacacataattaacaaaaaggttaattttgcattcacacaatatatggatcgtcttagtgagtgtagtgtcggtttattgttctttataagaatggaatttaattcgacctccaaattttaattcggtttagtgttggttttagatggtttgctatcgggtttaggtcgttaaccgataaaattacatatagagatatatatccaaagaccccaaaatcgattttaataaaattacaagaaaaatatattttagttagtatctctacaataattatttgagaagtagaaacgcaccatattgaaagttagggcattggaggcctgtggttaaaagttagaatgatttgtcctaaacacccttaatgaattgttcttctcgaaatttctccttcttcataattaggggtatataagtctaatcgtgtgttgatctctataataatgtcctaaacaccctcaattcgaaaatctttgttcttaattgttaagggtatataagtctaatcgtgttttgagatgattagtcttaatcacccttaaatttttttattttatagtgtaatcgttggggatacggatgtcataatgtctcgactttaatgattatggaatcttagcttaaatttatttgttaattttttagataattctatatcttagtagttaaaattcgtttttgttagttttctgattttgtttctaattaaaaagttaaattgatttgttaatattttggatataatctatatcttagtagttaatattcgtttttgttagttttctgatttagtttctaattaaaaagttaaatttcttaagataatgattgatgtttgccctaatcttaaagctatatatattgttgatcggccagagaattaggtattatttttctgtgcccattagatagttttcatcgttatggttttgttatacagctacgattctgatgaatcaaattgtttgtcatgcaaatattgtttttatttacctttagaggtcgtgtgcatattgtttgtgttgtttgttttatttttgcattagttcgttgatttattgttttgctgatttggttttttggtgtgtgttttagttttgtataacgtgggaggttccatcgacaaagct

SEQ ID NO: 5332 - DNA, 7951 bp, Arabidopsis lyrata
  Intron number 1 from transcript 320730 (locus 320730) deri ved from phytozome v7.0 (chr-ID scaffold_4; pos 13640021 t o 13647971)
acgaaaatcaagaagacgatcatcaagaagaagaagtagagaatcttcctccgattcctcgacaaatcccactagaactaatcgaaaaaaccatcgcacccatccggagatgtcattacccgtcgctatctctcctctctaacgcctttcgtcaagtaatctcttcggaggatctcttccaaactcgctcgcgcatcggtttgactgaaccggttctttataccttaatctcgttcccaccttctgatcccccaagatggttcattctccatcggagcaacgtctctctaaaactgaccagagtcacttctcttcctcccatgtttcgtggatgcactaccgtcacaatcggacacaagatgtacgttatgggtggatgcaggtcctcctcaaatcgaccagtaaagactgtgttcgtcatcgattgcagattccatacgtggcgctatctcccaaatatggaaagggctcgttgctacgcagcctccggagtgattgacggacagatttacgttgtgggaggttgcacgaaacgacatgatgattggatcgaagtgttcgatgtgacgactgcgacttgggaaactgcgcctggtttagtatcctcccttgctaggtcgcgtgcaaagtttgatgtacatgtggttttggataatatgatttacattttggatggtgaacattgtttgggttacaatccaagactacgtagatgggagacttggggatttgaaagtctgcagtggtatttctggcacgcgtcttgtgtggttgatgatttgttgtatgccgttgttcctaactcggttcttggatctcccattgtcgtgtatgatccaaggaaaatggcttggagacctgtctatggtgtagattacttacctaatctcgtttatagtgagtctagattggcaaattttggtgggaagttggtgattttgggatgttatcaaagccgggatagatttgattgttacggggaagtaaatgtttggtgcgtagaggttgcattggaaaaacgtgaagatggtaatatttgggggaaggtccaatcactctcgcttgtgaataaattccgcaagtctcctttctttgagctttctcgaactgttacggtttgatgattcgtgttgcagttgcaaggtatgttaatctttgatgagtattgactattgatgatgatgatggttatgatgttttcttgagcctcaagtcttagttagggtttcgttaacttgcaggtgaaggatctttcttacatctactgttttagcagcttgttgatatgaagcaaaaaagtggtgcagaagctgttttagctacttatctttttatctcacattaaagagtactctttaacagaattagccttgtgtagatttcttaagctgtgtataagtaggcagtacttttagcctttatacaaaaactcttacgaaacttgtgtaatgcatcagtcagttagttctttttaccatatgagcgatatgaaacactggtttagagattagcaaaacgaagtgatttagttaaccggtgggtttgactttatgggaaattacaatgtcaaagtgcagatagtacaaagtcctgattgtttgtactttgtatatctcttaccaaaatcttaacattaaaagacccactgtgcatcagtgcatgcttcaagtatatgagcaaaatgagtgaattaattctttgaccaactatttttggaaaaattatatataatatttccctgaaaataaaacttctattgaaaaaaacttgaaaagaaaagcaagtaaagatccctaacaattcaacctattttcgaatgagtcacattgtgattattcacaccttttataattcaatacagcagatttttagtaggtaaagaaaaacacattacaaaaaaaaatgataatgtataacgaacgagacttaagaagaagaaaaatgatttaatacaaaatatctttttggaattaaaaaaaaaactttttttgaaatgaagtttctgaatgcgttacgtgcaatgagagatacctagagaaatgacattttggtttccttacaaatacccaatcaacatttctttttaatctttcagttaattcgttgctcctactaattaacgtcacacggcggcgatggttttactctctgaaaattcccggcggccctaatggcgacgatccaaacaataatttaataatctagaattgtccaacaaagctatattaatattctagtctttcatacatgttaatttttaatatggttttcgatgttaatatttgctaaatagtatctattggttaagggatcccttttcgttaacgaagccactagagtaaataaaggtttaacgttctctcgaagtcattaattcacaaagcacttctaattcaagatgccatttaaaagataatttagggtttctttgtagattaaaaaaaaaaagatttgttaataacacttaagagacgtttgacgactccatttatatcggtgaatttttttcatgtaaacaacgtaaaagaaacaaaaactagaaaccagtgttatagaaatagaaaaaaattgctttgctgatattgttttcaaaaaaaaaaaaaaaaatcatttgcaagttttagactgaatttctttcaccaactgtttttggagaaaatacatgtatattatttccctgaatatatatttttcaatacacgaaaaatatatttaattaaagatccctaactttttttttttttcgaaaaagatccctaagagcatctccaatggtgtaaaaatggagctctcttcatagtttttctcattaaaagttgaaaaaaataaatcagaatgatttatttttgagagagctgtctctcttgagagagattttgcaagacaagagagacgatgacgtgtcacgtttttattggttggttcttttgacaaaacagaagaaaaaaaaaaacacgtaaaaaaaaaaacactttgcccacgatagccgatggagagttcgcgtactcggacccaactgaatcgttaactgcgattccggtgattatgtctggtaaccttcatcaacgtgtcttcgtgttcgacggagtctgtcatctttgccatggaggtacaatacttttctgtttctctatttagtcgtagaagaacaaatccgctttctcaaggatcatttagtggtttattgattgatttcgcctattgatctggtctacgtttgatgagattgattcggttgtagttgatttttagtcttgttctgcgaaattggggaaaaaacgagatcaaatttcacgggatggggtaaaattacgtgtgtaatcgtggtatctgagagttcgtgacgctggagtgatttctttttcatgtttctttaggatgacttcgctgaggttacatagtatgagaagaagaagcctaagtcacagaagcaaactattgctaagaaaggtgggtgttttcttgaaatattgtttgagattgatttgaatctgcatctgcaatgaaaagacttgagttttcatattgatttagatttgctaagattatagtggcttaagttgctaaatcaattgattgatgatagttatacgtttgtcatactacagtttcttttttcaatgtatgcatataatttactcaactatctacctcaataatttattcagaggacttatgtagtaatgtgtacatctagcttagttaggcttcttcttatccctttgcttcttcatcgttgactcatcttcttcctctgagacatggcctatttattcttttcatctttctcttcttcttgtcgctgactccatcttcctctttataggttatcactgttagagttgaatcctttgatcattggctgctgctaaagcttgagattaatgtgtgtggaggacttgtgatacatgccgccatttgatgcatccatggaaaagaagtcatcattggtgaaaatagagaaggatggtttgttttttgagaagtcatcattggttctcattggcaacatattggttttgctggttctcattagcgttactcatgttgcatctaagcttaacacacatcaaccatcattattcacaaacgatataataactatgttgactgaataataaacaagtaaacaataaataataaacatgtaccacaaataatttatgaaaattgtgtaccacgaataagttagaatgaatgtgtaccacaaaaatatgttcgtcgaattgtctaatggcgaagaggtggcaaaaaaaaaaaggaaacgagcttattttgacagaaaacgcgaagaaggagaaaatttcgcaacaatcaacagaataactaatcgtttttttttttttacaaatttattttcaaatgtatgaaattattgtatgtttaatatgttatgaattgtaatattttttcagttttatgaaataaaataattaaaataataatttaattttttcctgagaaccccacaaagagagcctaccattggactttgcaaaattaaaaaaatttaacaaaagctctcatctcataaatttgaaaattttattcttaaaaaaatggtgagagcccatggagggctctcaccattggagatgctctaacagttattcctttttcttttataatagtatcccttctctaatttcgaataaattacgttgtgattattcacacattttatcattcagtaaagcagatattaaaaaaaaagtaagtaaagaaaaacacgttaagtgttaaaaaaagaaaaaaaaaagaaaagaaaaacacatttcaaaaaaatatgaaaatgtctaacgtacctagagaaaaatgatttaatacaaattaatatctttttggaatatttttaaaaatgagataaaaataaataaataaaaaacttttttttgaaatgaagtttctgaatgcgttacgtgcagtgagagatacctagagaaatgacattttggtttccttataaatacccaaacaacatttcagttaattcgttgctcctactaacgtcacacggcggcgatggttttactctctgaaattcccggcggccctaatggcgacgatccaaacaataatcctcaagaagaagaagataatcaaaacgagaatcctcaagaagtagatgagaatcctcaagaagaagtagaagagaatcctcaagaagaagaagaagataataatcaaaacgagaatgctcaagaagaagtagaagagaatcctcaagaagaagtagagaatcttccgattcttctagaacttccagaagatctcatcgtgagcatcgtcgctcttatcccaagatgtcattacccgtcgctatctctcgtctgcagagcctttcgtcaagtaatcacttcgcataaactcttcgtaacgcgctcgctcctcggcttcaccgaactggctctttatgccgtatactcccccaagctggttctttcttcgtcggagcaacatccctttacaattacgcagaatccgttcacttcctcaaacgtttcctggagctgctatcgtcacagtcggatacaagatgtatgtaatgggtggttacatcagctttgatgaacctgtatcgtcgactgtgattgtcatcgactgcagattccatactttgaaccatctcccgtgtatgcgaagggctcgttgctgtgcagccgccggagtaattgacgaaaacatttatgtgatcggaggctgcaagaaacaagatgctgactgggtcgaagtgttcaatgtgacgactgcgacttgggcaactgtgcctagtcaatgccctaacgatgctagtgagaatggagagtttgatacatatgtggtgatgcaggggaggattttcattttggatcttgagtgttgtttggcttacgaaccaggacaaggtttatggcagtcatggggtgttgcaagtgagttgatgagattttggcagtcgtcgtcttgtgtggttggagatttgttgtatgcacttgatcttacgtgttctcaacatccgatagtggtatattatccgaatgaattggtttacacctgtgctgggtgagtattcttcccatttgcatattctcagtaactatcggcccaagatggcgaattttggtgggaagttggtgattttgggcagctatcctagacggtttcacggtatttggtgcatagtgattgcgttggaaacacgtcaaggaaatcagatttgggggatggttgagtcaagctcgcttgtgtttagggccgagataatgatgccttacattgagctttgtcgaactgttatggtttgatgatacgcttgcaggtatgtttctgtgatgagtttggactattgatgtgaatttatgatgtttcagacatttgctttagcctcaagtcttagttatgaaacttgcaggtgaaggatctttttattacatctactgttttagcagcttgttgatatgaagcaaaagtagtgcagaagctgttatatatctgacaccttattgagtacttcgttcttcttaacttttgtccacaatgtgattactctgagataattagccctgtgtagagttggccactcttttagccttctatacaaaaattcttatgagacttgttgaaacgcatctttagtctcttgggtcccaacttcttcatgtttacttttagatatataacttttgtacgtgtaaatagcagctgagtttacaataatgaaacctaatctgcttctactatatgagcaatatgaaagatcttggtttagatatatatgaagcaaaacagagtgatttagttaaccggtggttttgacttttgactctataggtaaactataatatcaaagtgaaaacaaataactatatgggtttcgttctatcataaaactgagaggtattactctattagcttggtaactaatgaatgacaatctccacacacccttagattcttgataacctgaatcacctttggagtttctgttgatatcagtccacaagattaagagactgtgccttcatttcttcttcatcgaggatctccagaacttttaaccattctttttcgatctctccatataatcgaataaagtaaaacagagaaagacattgagattaccggaatctgcggacttcagaatccttttaatcagtgtcccagtcaagacgacgaacaaagaaattgaattcaacatttgtgtacgctatttgaaagacaaacgagggtttctaagtagagagcacaaagagacttgtgagtcaagtaatcacgtcgatagacatttgaatcaatttttaaacatttttttcattggtgaattgttattcaggttaaggagcttaaaagaaaattaataattagaaactactgttttaaaaaaaaaactactatagttttccaagaaaaaattacattcaaatttcaaagtggatttctttttataatcaaagtgaattttttttttaccaattgtttttttcaaagaaattttatatataatatttccgatgatattgaaaatattatttaagtgatgaaaattaaaacacattaaatgataatgatttcatacattaatgtattagaaagagatttaagtacattaatgtattagaaagagatttaagaagaagaaaataatgatttattacacattatcattttgatttttatttctgatgaacatattttttctaaaacgagtttctgaaattccgtgaaataagaaagtatttatttagtcattatgctttcattataaatacacaacgtactcttacgtaacagcttctttcaaaactcaaatctagtctcgcttttcgttaattcgttgctgctgacgtcacacggcgatggcttcaatctctgaaacttccggcgacggctctaacggcggcaatccaaacatgaaaccagaagaagaaccccacaagaaagaagaagaagagaatcaaaacgaggacgcgaa

SEQ ID NO: 5333 - DNA, 6468 bp, Arabidopsis lyrata
  Intron number 10 from transcript 477947 (locus 477947) der ived from phytozome v7.0 (chr-ID scaffold_3; pos 2641747 t o 2648214 reverse strand)
tttttgattcattgtccattgacgagaaaacttattggctttttacatgtaaactgagaaaagctttgaataaacactacaaaaaaaacttacattcttagcgcggaaaaagtgctatcataggtaatacatagcgaaataacaactgctatgattgcggcagctatagtagataccccacctacaatagcattaattttgtctgctatagtatgttcatctacaatagcacttttttaatgtctttatttattgtttcatagcaataatcgaatgccattactacctttaatagcatttatttgttgttattagttaggtatatattaaatataataatccttttatattatatattttcgtcaattttgttttttttttacgctattttttcggaaaatattaaaatgaaaagacaattaaacttaaacaaaatatgtttatataattgttaacattacaaaccaacaaaagagttagatcaaagttttacaaaaaaaatggaaataaaattaaaatgctcataattctgtcgagcttccatatattgctcctgcctaaacgagatatcgtggttccccgccatcatcagctcgtgatttgtcatttcatcacagtaacaaaatattggccaaaggacttgctcaatgaatcccatcattggcatcaaacatacttgacctattacaacaaaatcgaaatcaaccacaaagccaaaactcaagatattcatatcactttgaagaaaaagaagagatacaacatcttcatctgtatacctgagaattccttttagaggtcctgctgaggcaaacctattagaggttttgcatcaaatatatgtgcatagttattcatcaatgtcccagcctgaatctacctgcaaacacaaatgttcacagtcaaaaatcacaagaggtaaaggaacaaaccgttctcatgttgttggtagctcgcttgaagtttcctcttagcaaactggaactttgcgtctgcatcaagagctttgagtttctgccatgaacaaagaaggattaaaaccgttacttccctgctcaagaatacgactaaaactctttgattcccacactcacttcttgttaaggtcctggagcttttcacttcttgcgtctgcatcaaaagctttgagtttctgctaccaactccttccattcactgcatatacacatgaaaaccttaatggcacatttaaaagagtaaagaaattgccaaatttcgtgttctttaacgaaagataaaactcatacaggataatagtctttgcgagttggcgaatcttatcaaaacccatgtttcctcaaaccattaacagcctttccgatttcagtactctgaaagaagaatctcaaaaccttaagatcaacaacaacaaacttcatacactaatccactagagaccgaccttaagaatatccaaattcaaagacatcaattgaagctttctcaaggattcgagcaacaccgagattggctgcaaacacaagaacaagaaacaatcagaatcaagcttcacatcaatggaatcaacaaagatttttgattgcgattttagatcaaaaacctcatctataatctattagctttgctctctttactaccaccagcttcttcataatcttcatcaacatcaaccctcgtaacaccatcatcaccggcgactccacatcccaaattagcctctccctcttcgtcgtcccccggaatcgtaagctcgagatggtcgcatctgatgcatcgattcactctacaagagaaaagaagctcagagattttttcccttctcgatttaaatctcttaggataacctgtagcaaaaacaagacgaaataaagaagtaaaattagggttatgacaaaatcgaaggaaagggggaaaaaagagagagggagactgagagggataaaagcggcggtcgagagagagagattgaagtcgtcgacgaagtatctggcaccatcttcaacttcggatctttcggctcctcttcaaccacctcaaccaccagccccgtgaaacgtccatcgccggaatcgaaggaagccgacgagcctagacgcaagaaactgtttcttcaacgatctgaggaagaagacgcgaatctcatcggatattcgaagattccgcttccagtggtggaattcaatccgacgagaatccgatcttctcgctccaatgcaattcctgaagctgagcttgtgaatccagaaagctctgcagccaataaggtgaattgaaattagggtttggagatggagacttggagaatagaagagatagaggattttttccctaagtgttaagagggaaaatgaaccgcttgtttttcacttaagcgggcacttaaaagataggcgtgaaaccaaaaaaaaaatttcggcatagcattttataaatgctataataaagtattccaatccgacgtagtctttttcatagcaaaatcgaaaattgtgctatgcttaagtgctatcaatgtaatctttttttgtagtgaaagggtattgttttatgaacttgacctttatggctttatgtttgatgtaatcctgtcacgtgactgatccagcattttactctctttctttttttttgctacatttgggatttcgttttcagacaataattaatgaatgcaagtttacatgaaatctccaacttgaaacaaaagtagagtttatcatttgatcagaaaaaaaaaaaaaaaaaattaccaatcttatatgtaatgtaaaactgtttattatcaatctttatgatgcaatataattatctattaatggtttgccatatctttaagtgggaccataaaattattttatagtcactcgttgcaaaagatgtcatatgaccatcatcatgtaaacaattaaaagaacatttacgaaaaatgtgacgaaggtaagccctcgaaggaacttccggtaatgagcccaatgtctcatatattgcaaagcatctcgggagccgtgatagtgagctgagctcacccttgtagtagctctgacatgctagccgttgtgaacagtcctcccgggatctatcgtgttcgttaagtagagagttccaagttccaaccacactcttcttttcttaaacctcttattgttttcaccaaaatacacatcgtacatgcactaagtgtcgtctttccactaagccgatttcgcacgagtgcaattattgtccatctaaatctaaaaacattgtccctttagctaatcatgttttccaattatgacttgaaaactaaatttttttttcggaaagacattcatatttataaacacatcttaatagacgaattatttatcctacactatgaaacacatatatatatataaatggcgatgcatgtgaatatatgataaagtctaggcctccgttatgacccgaaacaaattttccaaaccgaccgaaccagtttttcgtaattccggttaggaggttttggtcatttccgtttgggatcagttattatatttgaaccgatcggcatgattttcaaatggttcagctatccggtcagtttggttcggttatataaaaacatctaaaattgataaccaaaacgatcaaaatatttgtataaattatgtatacgtaaccgaaccaaactattcgagaacgaactgaaccaaatatttggtcagatagtttcaataggattttttcaaaacccaaaaaaacgatttaacccaaatttgaggtttatgataaacgccctaaaaaaaattgataaaagtgtgcaagcttttcgcgtatttaatcgtttcaaacatatcccaacttttcgttcagtttgtgtcatttttaactatgttttcaaaattctcaacaagatgggggcgatgttcaccaaacactcacagacacatagcttgggaacatcagcctcttcttaataactaaggtactcttttctgttggcggtatactcaatttggaaggagcgaaactgccggaaacatggcaaagctacaactcctccaactcatttgatacatagtcttgacaaacaagttggaaaccgcatttcctccataaaggaataaagagatagaagatatgaggatttgcctcaaaagataaacacactaagaatatagtctttgttggaaattttagctacaaatgtttaatctaacaatgcatgcacttattgtaataaagttttttcgaattaatttacattttattaatatgttctcctaaaagtatgctaaaataacacaaactgatgaatatatatataaataccacgcagttgcccgactgtacgatttcttattatagtattatttattagtaaacaactacagtatagactatgattaatttagggtttgaccttataagatataaacgactttcaagcattgaaaacttacctaaagataaaatgaacaagcggctggattttacaactcccaacacgtttgctaatcatattaaattattctactatctatgaattaagattattaaactaaacaatgtctttatccaaaaaaataagtactgattgatgcagaccggctgaccggatgtcaaaaggaaaaaaaaaagtattgaccaaaaaatccaaaaagatttgttgccgttggggaagtatcgcgaccttcaatcccgtcgctgtcacatctcactttttttatataaaagacaaaatacatggttttttagggttgttttatttttactgaaagaagtaaaaaagtaacactttatctacaaaaaaaaaaagggttaaaagtactaatttaggttttgaatataaaaattaagattaccatatcaaattttgttacttagtactactaatataaaaaatttaaaggaaaatgatgaccactactcataattggattaccctggataattattagggttttgtcattatatgtttaaaatatattttttggtatgaataaattttctttttttgctaaactagaaaagttcaaataattaactcaattttgaaattacaaagtacctacgaaaattatgcataaaaacatcaattgtacacttcaataacgaaccttatgaaaaaatccattggcttaactaaagtaaagtttcacacacatacaacaaaaaaaaagacgaggaatgcatgtggataacgacaaacaacaaatgacgtaattttattgatgataaatgttaatgattttatttgtattataaaaacaatccacggtgccactcctcttttctctcccatttttcttcctctctccaccatttttagatccgctttcttcctttctctttctaccttgtcaattcctgtttatcagtatgttttccgtcccagttaccagtttgttctccatcccatgtaccagtatgttctccgtcccagttaccagtttgttctccatcccatttaccagtatgttctccgtcccagttaccagtttgttctccatcccatttaccagtatgttatgcgtcctatcttcctctttatattgagacctattttcttaggaatcaatagggttttgagagggatctcgtggttgtatgggtttaggtacacactaatggtgcaaggtctactttgttactggagagcgtttctatactttgagagatcaagtttgtgggaaaagttagtagcgaaacatgagaaaaatcatgaaaaatcttatttaatcccacttttttggactatgaatgggattttccttatctttatcatccttctggttttggctgcaactcttgcgggagaagacaatattaggagagtttttaatattcaaggacagattggggttaacttttactgtctaggtaagagtactggggaaatatcaatgttaaggttaatggtttatattggtgaccatgttgcagataaatcggtagctgaaatgaatattgcttcatgctttgtgtgtgcttatctcagcgttgttagtcttattaaactttgccatgtggggaatgatttagggttcgcagatgggatagcttgtgtaaccttgcctattttcactcactattgtaaatccgccaaacttagagtaggtgggatcttcatatgttggtttttgatattgggaaagaacattttgttcaccggttgctggaggtgctggtggtcttcatggccgtggcggagatggagctcgacgcagaggcagtaggagggacttagctttcccaatcgatcctcaggccgatgttttccactcagccaggagttccacttcggcaaggagcgtatagttttaagccgccggtttagtctcccaatacgtgttgagagttgagacttgagggtttacggtttaagtaatgtttcacgtattttgattttgtgttaatttgtttaataaggatattataatcatgtctgttacttttgggcttgttaattttacgataattttcttaaccgttgttgcttttgttgtatcggggcacact

SEQ ID NO: 5334 - DNA, 608 bp, Arabidopsis lyrata
  Intron number 23 from transcript 491448 (locus 491448) der ived from phytozome v7.0 (chr-ID scaffold_7; pos 3717107 t o 3717714 reverse strand)
ttcttacctaaggtatctagcaaaaatctcagtatctgtccattttatctcctaactgaaccttttccagcctaatccttccaacgtctttatgttttatctacacagaataaaattgtgcaagaagggagatccatcaggtgagtaattctggacggatttcaaccaagtcttagcactaactacaaaggatacatgttatttatcttttcctgtttgctacatgatcactcttacattaatagctaagtttctatggtcggtcctctctcgattaatagctaactggaaagagaatcaacagcatagctcctgtcatctaatattcctttgggaaatgaacataatattttcagatttcatgaacatgtattgttgcttactcggtgttggtttcataaaaccttgtcaatgctgatgatttgttcttatgatatttggtacttttcaggaatgttgtttctctcgtatatggtagaggacaggaccgcaggcggcccgtcgtatgtggagtttctcgtgcaagttcatcgccaaatccagctcaaaatgaactgatcctctgttttctaggagtccttacagaagtttcgtcccatctgtgtcat

SEQ ID NO: 5335 - DNA, 5184 bp, Arabidopsis lyrata
  Intron number 1 from transcript 471905 (locus 471905) deri ved from phytozome v7.0 (chr-ID scaffold_1; pos 7140231 to 7145414)
tgcacaacaatacaactgtttctggaaaaagatagatttcgtttcattttgtatgttttctgatgtataaaccatcttcaatctcatcacattttgtctctctatctaaatttcatatctttgactttgacttcttcttatttagattaaaaaaactcaaataatatttgtgaagtttacaccttttttcttgttcttcatatagtagtagaaaaaggaagtagataatacaacacaagataaagaaacctatacaaacgttttgagagtaacacacaagatgattgatcgatccatcaccagtcgtctgctcctttagatacacccagaatcacagctattgttgcaagaatagcctgcaatgtttacacatgaatcacttaaatttgttcgagtcccatttggatataaaggaaaaacgtgagataaggagaaagagagagagtataggaaatattacagcgatagtgcaggcaatgtatcctggtttctccctgtaatcgatccttcttccaaacatcatgatgaacaaaccgacataccaagggattgctccaaggaaaaatccaacaatgaaccttcaagaagccaaatattttctcagggatataacacgaacgagtaagatatcggcttgacttgtaggacgtgttaaaaaaagcaagtgtagatagtgtagcacgcatgtgaagagagagggtgattcagagaattctgagcttgtgtttgaaggaagaaaaagaaggaacttacaggaaccatcccagaccaattccacagcaaggaaggcggcgttgtctcccagtgacaggtcttccttcagcaacaccaccatggactgaaaataaaacaattaagaaagagtaaacataagaacagctgaaaggacatccatttatgctcatgacttggatttgaacaagaagaagagacaatgagacacaacagaagttaacttacagattatataaagcacaaaaccaatacaacctaactatttactgagctcaaaacttctcatcatgggttgttcttttaaaatctcagagggttattatgtaacatagcacaaatcaagttagattttcacatatagatcctttccctaacatgcaataacgaaaaaaggtttcacctttcaatagaaaactcctgattatgttacactgtaacaacattttgattaaaacaaagaacaaacacaaaattagtttctcttgctaaacaaaacacgacccaatgatcaaatcagaatcttaagacgacaattcaatgatcaccatcaactttacaaaaatcaaaagacctaagtttcacaaatctgcaaaaaaaaaaatgaaatcagcatatccaattcaggaagtgaagctacctggaacagtttgatagccatgagcgtaataaggagctccggaatcgtaaacgccaggtggcggcgaaggttgaggaaacccagtgaccggagcagaattctgcggcggggggtaattggaaacaccttgaaaggtaccgtattgatgatgctggttaccttcttccgaagcaaatcctttacttttatcttcttccccgtgacccatatctttctccgtgatctgatcgctctttctgattcaatcgagagattgaaaatttgcaaagtctcgttgaatcaaatgaagaagaagtctttttttttttcaaacttttaattatttgctggcagacccgagataacgcgtattttcaaaattggcccggagttattattatatgcatttacaaccaccgactgcaatgtttgacattaatacgattgctatttttataaataaagttatgaattttttttttttgattccgccttctccaccaatgtaaaaaaagaaaaaaagttatgaatttttttgattaagaaatatgtggttagggtataataaatattaaatgcatccatcgaagcttcgagttcgttgaaaagattatgaaattaactaatgttcttaatcaaccatgaatatgatttatcaccttcaatcaattttcttattatacgatacaattaggtcatgaaaaaaataatacagaaaagagaatttatcagtaatctgtcactatccttttttttttgaatattcattattgaaaatttctaaattgtcacttttgtcaacgatgttgttaaacttttaattactttctctgagtggaaattgttttctcttcttctttcacgtcttagtggagccttttattctcagcctccaaagaaacataaaccttgaaaattaaactgaatcaagaaatatattaacaatataactttgaactttccacaaatttgtgcaccaccattcaatttatatatgttttttgcagactgtataatttctttcatgatacacatgaaacaaaaacaaaaatctggattctgatgcataagatgtggatagatactctcaatctatggattttaaccatttacaagtagaaaaaaattgcaaaacatgaagagagttgtgtaatgaaatagaagccaacctttgttttcaacaagcacaaatatcctcatgagagcaatcatcttggccacaatcatcatcatcaatggatccttggttactggagacagtaatgatcattaccttctcatccggtttagcttcttctggttcaataagattcttcctgagatcactgaaatcctggttttcatctttcaagaagctcggaagaatggagaagcaagtgaaacaagaaaacactatattaattgcaaacaaggagatgcagaagatcacgacgatacaattgtaagcatccattcttcttgaaaacagagcatgatggttgttggtttacaaaaaccagaatcattcaaatggagaaatcaaaagtgttattcacttgaaaagtgatatatgtgtaatattgatttgattctttggtcccctcccctacacagatatataaaaagaaagcttaaatctgaatgtttggtgagctttacaacaacaatctcttatatatataagaagaaaacaaaaaggataaagaaaacaatattagtttttttgggtctgcggtggagaagatttttcaacagataaaggtggcaagcatgacaaaagcatttgtctctttctttctttttccaccatatttgttagcttttcatatatataagatattatactagctttgttaaaaaaaagtacacatatgtagtactaaatcctaaacaacttcaaataataggcaacataatatgaaagggagagatcatcttctctattatattttcatatcgagaatattagaattgcagagtatttgattttgttatatcagctgcacattttccatcagagagtcgtcgcaatagcattgaagagatcatcaccatctgtctatatcagtgaacggttcagggtttgcgattgactctgagatttggaaagagaagcatgacaaaagaacatttgtttataaagattatctgatgactaacgttagcattctatatgtagcttgagtgtggatttaataagctatgaagacatttctttaaagaatttgaaggtttcttggtttgaagtaaacatcaaaaaggcatttctacgtacaaaacttcatttaaaaagaatagtttgtggcaatccgaattagtaaactatacttgttcatccacttatctgattcataaataatttattgccataagcacacaactttatcattgactacttgcattatgcaatctagaaagactcaagattttgcaatctattataaagaacaatttgtatagacagctatcaaattcgaaagccatgaacaaccaaatatagaatgcgaaaacactaaaagaattacctgtttctctttttataatcgttgtcaactcttttggatatcaaaactttgcccaattcgtacaagaagaaacctaaaatattgttttaaagacatctctgcatcaaaacacaatttgacatttgatcaaacaagtcaactctttttttttaaaacatggcaagatgatacaagaaaacatgtcaatgagttgtacaaaatacaaaaaaaaaaacaatgtagaaaacagaattcagatgagtaaggcatgttgacctgcagctcagagatgggcagtacttaagtcacatattcagccattacagttttcatcataatcccaaattcaaaagctttaaaaatggtttcaagcactaaaatcatccccagaaatgcagaagtttactaagcaatctacagaatttctaaagggttcattatgaagctctgaaaatcattatgattcttcaaagtcatgcataaacgttagatattgaaacagaaagcgtactgaaagacgaaaagatagcaacgataaaaagtgacaatgttgctttaactcataaaccacatatatacccgaagaattcttaaacccatcgtcttcattattcccatcgttgaggagctgccattgcttccatcatccgaagccagagattcgtcgattcctactacactttgtcctcgatgtgaacccgttttacagtcactttctgtaacggtgtattcgcccccggttgacgccaggcgtttgttcatctaaatcatcttcttctttggttgccaagctagacatgacaataccttgtgtggttttgccttacagattcaagtgtccttccatccgcggcggcagttcattgtatgtaaccccatcaacaggcaagtcattgtatgaaaggactccgcgtatccttgggatacgatcctgttggtgatcagttcaaagtactgagcttggtgacttctcctgaccagtttcttgattatcatttacacgagtttattacacttggaggacaacaagtatcacgcaatcaggttaccaccgctccttattaccctataaccgatggactttgcatcaatggttccatctattatgctgcttgggcccctaaactatgaacggatccggtgattgtgtgttttgatgttagatacggccctagggatgttgtggtttgggagtgtgaatcaatattgatagattacagaggcaagttagcttcgatttcatattgtaagttttctgatgtataaaccatcttcagtcttgtcacatttggtctctttgtcttaaattcatatctttgacttcttatatagataacaaaactcaaataa

SEQ ID NO: 5336 - DNA, 5714 bp, Arabidopsis lyrata
  Intron number 1 from transcript 912299 (locus 912299) deri ved from phytozome v7.0 (chr-ID scaffold_1; pos 10791723 t o 10797436 reverse strand)
aacaattttaaagctcggaagtatgtatatgtattgtttttgcaagataaaaaatatgtttttttttcttagtttaattcatattacatactctaattttttttagaactaattagttttgatatatattttcattgtagacttgataggaatgttaatcaagaaggtgtttaatactaactaaatcaatagttagatattaaacacaagttacttatattgagaaaccgccggtctgagacacccgcctggctaggcaaagagatccaaactggcagggacaagtataaacccgcctgtctgggacacccgcctggctaagaccggccagtcgactctatgtcattttaacctaatctcttttatatataaaggttgtagccacaattgtaaagttcttaacacttgttctctatctatacaattctctctttctctctaaaacatggattactcaatctttccttcctaaatctctaatctttacatggtatcagagcagattcttaaatcttcaatcttcttcttctaaatctttagcctttctctcggtttgtgtttctttttctcgcaacgttactctttatttctggtttgttctcgaaagtcgaaaagcttgcaactttgaaggttcttgttcggattctttcttggaaaacatcatcacggtgatactcttgggtttttagtggtgttctgacgaaggttctgaggcatctttggagaggttttgaaggcggttcagctcagtttggtcagtttatcgcttaaagcttcgatctttattcttgtggtgcattggttttggattctaaacggcaaaaggttacaaatttcgtttaaactctgaaagcttagaaggatacaatgtcagtcacggtctatgatggcacgatgaatgataccttcaaagacttgaagttttcggtaactctgaatgggaataacttcctattgtggaagcggaccactctaaatgtgttaggaggaaggaaactcacaaaacacatcgagtccacctatgaagagctaaaggctactgatgagagcttggttgaagagacttggaaacaatatgatctcaatgtgctcaacgctcttcattgctcactagatgcctcgattctcgaaggttactcatattgtgagacgactaaagagctttgggacactctcacgagtgtatttggcaatgaaactaacttgactcgagtctatggaattaagaaggctctcggaggtctgaaccaagaagagagtgactttaatacacactttgggaagtataggtctctcgtggctgagttagagatgctaaggccgtttaccaccgatgctaaggtgttaagggaacgaagagaacaagatcgcgtctttggtctattgctttcactcaactcgagctacacggatgtgatccaacacatcctaagagacgagaagacacctaccttagagcaagtgtgtgccaagattcaaaaggagtacagctcccaaatgctattcggtgctaaaggtgtaagtctacctacggctaacaaagtgggagtggttagacaagaggataagaagacatggttttgtgaccattgtaagaagaagggccacctaaaagacaaatgctggttgctacatcctcatctaaaaccagagaagttcaagaactacaagccaaaggcaaacgtggctaatggaggcgatggcgggtcagaaaatgaagaaagggcaattttgcaatatgaacagcaagagaaggcaatgcaagcagtcacacacaaccagggtggtgcctccacttctcaagcgcaagagaccattgtcatgaacaaatctgacctcgagagcctccttcaatccattgcatccaagttacatcccggcggtatctctctcttaacctctaactctcatgattcaaattcattagtgttagactcaggagcttctcaccatatgattagcaatcctaagttgttagagaacattaaaccggcactagggaatgttaaggttgcaaatggtcacaatgtttcaatagaaggtataggatgcattaatctgtttaacaagagatctagtgctttctatatgcctaagtttacctcgaatttactctcggttaagaaaacgactaaggacttaaattgcttagctatattcagtcctaatgacgttaagctgcaaggtattgagagtggtaaggtgttcggtcaagggagcaccaaggatgacttatatgtgcttgaacacttatctttaaattctgtcttgaataataatgtttcctcttctatctttgcaaactctgttaaaacatcggttgtattatggcatgagagacttggccatccacattctcgggctttgaatctgttattacctggattttcatatgactgttcaaactgtgaagcatgcattttaggtaaacattgcaaagtagtttttcccaaatccaataccatttatgaaaaatgctttgaccttgtgcattctgatgtttggacttcaccttgtgaatatagagataatcataagtattttgtcacatttatagatgagaagtctaagtatacttggataactttgcttccatctaaggatagggtttatgatgtattcttaaactttcaaaattatgtgactaatcattttgatgccaagattaaaatcctaagaacagataatggaggggaatatacaagcaccaagttcaaagaacatttagagaaatgtggaatcctacatcaaacaagctgcccatacaaccctcaacaaaatggagttgcggagagaaagaatagacatctaatggaggtgtcaagagctatgttgttccagaagcatatgccaaaacggttttggggagatgcggttatgacggcgtgttatctcatcaaccggacaccaacccgtatccttaatgatcaatctccttttcaaattttgaatagacagaatcctaacattgatcatttaagggtatttggaagtctttgctttgtgtttgtcccaggtgacttgagaaacaagctggaacccaagagcactaagtgtgtattcatcggatactcaacaactcagaaaggttataagtgctttgatccagtcaacaatcggtatcacgtgtctagggacgtcaaattcatggaagacaaggcttactttggagaaaagagttgggaaagtgtgaaagacttgccgaattcaacttcagatcgagctaagagtctccgacatattctagaacatttgggtaatgttagtccctcacaagaagatgcagaagctacaccaaatgtggataccaatgaagctcaagctcaagaaagtggtgggaatgcaacacaagagccgttggatattgaacaaaaaagtggtagagacgcactttcgggtagagaagaaggatcaagtgaagaagtggtagagaaagatccatctagtgaaggtgaaattgttgaatcatcaagcgaagatgagacttatcaagctccacaagtcacacaagatccaatctacactcgggagaatccaagaaggggtacaagagaaaggaaatcgaagaagtgcctctacaattgtcaaggtgtggctcatcctattcaagctacatgttcgattgaccttcttcccgaagaacataaggcgtttcttagcaagctagatgtggagtttatcccacaaaactatgaggaagccaaggaaagaaaggagtagacgaatgcggtagatgatgaagtacaagctatgataaggaaccatacatgggatgaagaagagctaccaacaggaaagaagtatgttagctcaaaatgggtattcaccattaagtacaagagtgatggtgaaattgaaatatataaggctaggctggttgcaagagggttcacacaaacctatggtgatgattatagggaaacgtttgctccggtagctaagcaacacacggtgaaggttgttctatctttggcggttaatttggattggaagttgtggcaaatggatgtcaagaatgctttccttcagggggagttggaagaagaagtctacatgtctcctcctccgggtttagaagacatagtggctccgggaaaggtcttaaggcttcggaaagcaatctatggtctcaaacagtctccaagagcttggtatcacaagctaagctccactctattggctaatggcttcaagaagtcacattcggatcatactttgtttactaagcaagataatcaaggcataatagtggtattggtctatgttgatgacttgattatctcgggaagtaacaaagaagggatccaagctattaagtcttctttacactcagcctttgatattaaagatttgggtgtgttgaagtatttcttagggattgaggtgtgtagatccaaggagggactgtttctctcacaaaggaaatacgccctcgatctactaaaacttacagggaaacttggagctaaaccggtggatacaccactagagcaaggatacaaggtcaatcgaaagggggagaaggatgatactccatatcattgcccggaacagtatagaagacttgtaggtaagctcatatatttgacatatacttggcctgatctctcttttgccgtgaatcaggtggctcaacatatgcaagcccctacggtgtaccattggagtttggtggagaggattctgagatatcaaagggagtcccggcaaaggcatttagatgggaagaaactcaagcacggagattgttggatattgtgatgcggattataatggagatcgcaatacaagacaatcaacaactggattttgcacattcattggtgggaatctcgtgacttggaagacaaagaaacagaaggtggtgtcctgttcgagtgctgaagcggagtatagggctatgaagaagctcactaatgagttaacatggctaaaggctctactaaaagactttgggatcgagcaaaagacgccaatcactttcaattgtgacaatcaagcagccatccatattgctactaaccccatgttccacgagaggaccaagcatatagagacggactgccacaagacaagagagaagatcgaagacggtacaattctctcttgttacactaagagtttggaccaactggccgacatctttaccaaggcagcaagcaaccaagtttgccaattcattcatggaaaacttggtcttgtagacctcacagatccttgagatacctctccacttatgtcagtaatactctttttccctaatatcggttttgtcccacgtggttttccgatcttaggtttttaattaatgaggttactagcataagtgtcaagtttataccaatgaatattgtagtataaacttgagggggagtgttaatcaagaaggtgtttaatactaactaaatcaatagttagatattaaacacaagttacttatattgagaaaccgccggtctgagacacccgcctggctaggcaaagagatccaaactggcagggacaagtataaacccgcctgtctgggacacccgcctggctaagaccggccagtcgactctatgtcattttaacctaatctcttttatatataaaggttgtagccaccattgtaaagttcttaacacttgttctctatctatacaattctctctttctctctaaaacatggattactcaatctttccttcctaaatctctaatctttacaagga

SEQ ID NO: 5337 - DNA, 43872 bp, Arabidopsis lyrata
  Intron number 28 from transcript 477381 (locus 477381) der ived from phytozome v7.0 (chr-ID scaffold_3; pos 262328 to 306199 reverse strand)
aatttttcatagatagctaaatttcgttttatgttggctactttttggattaaaattccaaaacacgaggattatatatatagcctttaggaccgaagaaataaagatgatgatatgagatctcaaacaaagtgaaggaccatgaaacattcagtgagacaaagtaagagttaacgttcaagatgttcttataaatgaaacttccaatgagacaaagtacaaaaattaaagaataaatttgtattcatcttattattggtaaaaacttaatagagaaagaaaatgataaaactaatgacgtaatggaggaaacatgccattacaaatgcttttgaagatatgaatagggttttgtcaggattaacaagccagtagcacgtatcaggaagtgttctcactgccgtgcaacaaacttttgttacccatcggaaatctgcgtcgcctgccgcttttctcaacgcatcgaaacatccaggcacgttatctatccctgttgtcggacagaggttcggattccgagcttccgtggttggaacatcaatgttgggattagtagtgctaacaagaaaaacatcactttggtttgttgtagtttcatttttgagaatattatttttcttagttgctttttgtgggtttggattgtgtagagatgataagacattgtatcgtatataaaagaaaataatttaggatactttggaatgtaatcttatataataaagtttgacttgaaagatcgggaaattttatttttttttggtttgacccatataaatataattattaagagaatccacaatcaataaatatgtgatggttttaaggaaattacatattaccgtctgagataccaccaatattaatttaggtatatcacgaaatgattctggatatagaaagattactaatcgcaagtgaaaataaaggatatgtatagtttgaatgacataagaaaatttaaacgtattttttagcgtatcattgaaagatagagactaatgacgtaatggaggaaacttgccaatacaaatgcctttgaagatataaagatagagactaatgacgtaatggaggaaacttgccattacaaatgcttttgaagatattaatagggaaagctctgccaggataaacaagcaagtagcaataatcaggaagtgttctcactgccgtgcaacaatctttatttagccatcggaaatctgcgtcgcctgccgctaatctcaacgcatcgaaacatccaggctggttatctatcgctgctgtcggacagaggggcgtatccttagctcccgatggttggaacatcaatgttgagattagtgctaacaagaaaaacatcactttggtttgttgtggtttcatttttgagaatattatttttttagttgtttttgtgggtttgaatggtgtagagatgataagacattgtatcgtatataaatagaaaaggatttatgattttatggaatgtaatctcatataataaagtttgattggaaagattgggaaattatatattttttgtttgacccatatcaaatataattattaagagaatccgcaatcaatttgtgtatataataaatatgtgatgattttaaggaaattatatattaccgtctgagatatcaccaatatgtagatatatcaagaaatgattctggatatagaaagattacgaatcgcaagtgaaaattaaggatatgtatagtttgaatgacgtaagaaaatttaaacgtactatttttctttttatggtatcattgaaagatagagaaaattcataaatttggttatgcaggtgcagggaccgtattactacaaattactctgaagacactaattggtaaagcaaagtcacccttaagtgtcaagacgcaagtatcaggaagtgttgcgaatactgctctgcaacagtctactgatagccatctataatctcttcccgcagctaatctcaacgcatcgtaacatcctggtactctgcttatcctggttgtcaaacaatagacgtcccgcggagctgcttccgatggtcggagaatcaatgccaagattagggctgacaagaaaaacatcactttggtttgttttagtttcattttttttttcttgaaaagtttaaacaagaattgatttcgtgggttcaaattgtatggatctgagatcttttgtttcggcgaataaataataaaaagtttgtaatgtattagagatacgtaaagaaagtttgactataaaaattaatttggaaatttcatatattatatagtttgacccatacatatatatatgcatatcaattcaattgatatatagtcaattcaattgatatatagtcaattcaattgatatatagtcaatttcttttgcatatatatataggaaaatcattgaatatgaagacttaagaaatccataaagtatagatatcatctccaatttgaataataagatcataacgaaataaaataaatcattcttctataatgcatactatttgcgggagaaatacttaattttatcacttttcagttttggtagacaagattacgttcggagccagtataagtaatatcacaagataatgaatggaaaacttattttacttcttcttttaaacgatcctttacttgtgacaaaaggtacaaagtcaacaagcagatgtctagtaattaactgatacttgatatagaagatagtcgaagttctaaattatgttgtgattttttttttcatggttcgtcttggattatatgatttaattcgttgatttctgttaagtaaacaagcgttaacgtgacttttcagcggaatatggcaaaataacaatttaattgtaatcttttgcatattttttttaaatgggtatatttctttttatgaatcaaaattgaaaatatattcccaataagtgaggactgaggaatattaacatctaagatgataggcctttttagacaaaacgaacacgatgaaaatgagacttcagacaaagtcgaaggacgatgaaacattgaatgagcgagtgcaagtgaaaaaagatatttatagtttgaatgaggtaagaaaattcaaaagtattatttcattttttattttataattgaaagatacacaaaaatcatgaagttggtcatagagctggaggtttaacagcatcacaaatatttctgaaggaagtcattggtaaagcaagttcagaagtaagttgcaagaagcaagtaacaggaagcgttgcgaatactgctctgcagcattctcctgttaacaatctaatatctctgtgcaccgctaatctcaacgcttcgtaacatcttggcacgctgtctattctggttgttgaacacaagacgaaccgcggagctgcttccgatggtcggaaattcaatgccaagattaggactaacaagaaacacatcaccttggtttgttttagttccatttttatttcttatttttttttagaaggtttcaaaagaattagttgtgtgggttggaattgtatgtatctttggctcgctcgatgtataaatagaaaagagtttgtactgtattgtgaatttgtgatacgtgatgaaagtttgactataaaaagtaatttggaaagttcatataaatattttttggtagaaagttcatatatttgtttgacccatatatattttggaaattcactgaatacctaatagtactgtatgaagaaatccataaagtggatatcatctccattttgaataataagaaatcattcaatattaaaaagaaataaaataaatcacttttttttttttcgacaaatcacttttctataatacatactatttgacggaaaattaattaattttatcagttttcagttttggtatactgaaattaaatacagcagtatataattatcaacaactatttctaggattttttttttgaaccaaactaatcctaggataatgaatggaaattcaaatttttctagatgaaaactaatattgtagttcttctaagatcgcttgcatagttaatttgttgcacaaggtacaaaagtcaaaacatgatgatatatagatttggttttaaattttaagaacaaaaatttctttttttttacaactgaaaagaaatgtaatgataccaaaccaaatatgggattaaacatttatattaagttaaggagagaataggaactcgaatcaactatagaacaaagtcactcggcaaaaatacatggatttttgttgggtgtgacttttatcaacaataatactctgtatcttactattgattatggcaaacaaagactaaagctatatgttggatgagctatgtgctctcatgtacccagagaaaacatgtgacctcagtaatgttatttattccgatcaacctctgcataccatttcttccatgcctccgtgaaatgcccaagaagacctgttatttctgtttttacaacatttttcaaaaccaaaactcagtttatgttttatattcagatatgtttgcaaaaacagacccatcttatagaagccaaatggaatcaagaatgtaacgatttgagtgtggttgttaccatgattgcaatactgtggttggtaggtagaagcaagggcctcgatctctagtaaccttccctttccgacattgttgttgttcgtcttagatgctcctgttggggagaatgggccaaacacatatttgcttgcagctggtttcgattcctgctctgtgttttcctggtcatatttcttatatccaatttgcttgcggattgatgaacagcctgttttgtttctctttgctctcaagtttgtgatctctgttccaaatacccgcttcttcggttcatcagaattgaataagcttgatcctttttcagctatgcttttggaccccaaccacctatatgctggtttcctagtcactggtatatgagtctgtagagaaagcataaaacaaaactaaaagatgaagcatttgaaatttctaagttcagggttaatgtattggactaggaacaaagcgcttaccttctcgattaaattcatcgaggcaaacacatttgcaatgtcgtaaagtcgtctaactttagctgttaatcaatttcagaaattgggttggttaatggtactatataacagagatcagaaaagatctaaaacaggaaatagagatttacttctcatatggactgaatcttgagagtcgctcagcaaggcttttgcagcactatcaagtgtgatgagatcatcctgaagataaggcagcagacagggtgtgagttgttttattagagggatttgaaaagtttgtgtaagaagccaaagagagatagataacaagtcaaattattcacttacatcagaacaaagaaacatcttcacaaagttctgtgagagaagccagagagatttttccttcttttggtctgaaaatgatattagtttgatttcaagttagctcctaaaacaaatgttatcctgtaaaattttacgcatcaagtagcactttggtaatgcaaaattactagaaaaaacatgtttattcagaatcaagttctggaatgagtgattaacaaagaactaaaaagagaagattacccattttagaggatgatgagttttcctgatcatcaggtgttaaacttaaaggttcttctctttcaccatcatttgaaacctattacattaacgaccagatgacatcttcaaagttaagttcgaaaccacttaaacaaaaatcagcaataaagaatctgaatatataccttgtctgatttgttggtacttgagtcacctaacctctctctcattccttgttcctgtaaacaaaacaaagacaagtttgaaaaccattctcctgcatcatcaaaacaaacccagagattgattgaacattcaattctcaagtaccttgagttcattaagagaccgaggaatttctccaaaacctttccacgagtattgattcttccctcgtcttgccacaatctgaatatacaccacaaaacctaaaatcagctcaagctaaacccagaaaaaataaaaaatagaacagtgatttaatcatacataccccaatactctccaatatattgaccacatcatagatacgccgccgttcaactcctgcaacaaaatttgagcgtaaccaaaacagtcaccagattattattaattcccaattgttcttagtctatgaatcgaacgaattcgcttagatttgacctatccatcgatttcaatctcacaaaatcaggaggaagaagaatttacctaattgcccagcggcatcgtcgagcccaatcagatccacatcgtctcggttatacagtctcaagaaactgaatcgtacataagacataaattacaaagtaaaatccggtgtgaatctcgagaaaccataaagttcgatagagagagagagggagagaggagaggtgtacttggagacgagaaccccaagagatttctccttgcggctataaatttgcagaccgagcgattccgcatcttgagaaacaacaatcgcagaagacattttctcgagaaaatcagagaaagaggatgataaatttctgagattgggatatttattttcacagctttcgtgtgacttctattcggaggaaaaaaaaaaaaaaacctttttggcaaaagcggggggattttcgaattatgaaataggcgctttacttgttatcgataatgacgcaaatacccttgatccacacactcgaaacggaggagattcgagaggttaatattgtaaatctacgcagagcatcaagcgccagcggcaaaatttcctaaatcaaaattttaatgaatcagatttagttggttcaaaaatccacattaatttgtataaatttattatatcaaaaagtagtaaaaaaaagaacaaatactaacatgtaaattgattaaacttgtcaatctatatatacatttttggaacacttttagcaaataaatcctgggattggtcagtatttacaaagaatgtcattgacatttattattacttttacaaatttaaataaaagatattaaccaaacaatatcttgtctaatttgtttctaaaaatctctacacaatctttccatatatcttcaaaaagtttttataacaaatatttatattaacattttgcatagcaataaaaacactaatttataataatcaaaatattcacatagaaaaatcatatacacatacagaaaaaagaactatatctattatcatttaagccgttgctttatttaaattaaaaaaacataaaaacttgaaatcatatactttatatgataaatttgaaatatatattagtagtataaatttaaaatcgttcaaagaacggtatatcacgggtgagatcctaaaattattagattttataacaataataatttattttcttggattttataacactaataatttagctaacgagataatatagacgggtttatatggaatgacgggttttggtcgatattaataaataacggtatatcacggatgaaatcctaaaattaacaatcaaaatacaattatacaatcttaaacacaaaacaaaagaaacaatattaacaaaacaaatccaacttagatttaaaaattttagttatagaaaaacagacacacggtatactgcagagtaaaatattcaaaattttaaaatccaccatacatcgttacttaaaaaaaatgtatgttttcgtatctatacttcaaaaattgatagatagatatctacatttaaaaatacaaattaatatgatatatctttagttaatcttttaaaaaataacattacattttttaaaaaaatatagccccgcggtataccgcggattaaattctaatatatactaattttggttataaactacactaaatttaccaaatgtccgaatctcttaaaagagtaaaaagtgaaaaaaaaaaaaaaaaaaaaaaccattccactaaataaaaaatcattatcagaattaaaagtttcacgaaaatacatttcctttgcaatatttgttgttctgaccgattaaaatacataaaatatattttcctgagaaacgtatagagagaaacaggtccctagaaaatgtatacagaacacaccacatttgatattaccacaaagcaaaagataaccaaacaaacaaacaacaatctatggctcaacaacagtcacttgttcccactctccatcaacagcctctttccacaccgtaacgttattgttcccatcggaaacagccaacaaattacccgtcaacgaccaccagacccgccacaccggtgttttgaaatctttcaaaaccgtaccttcccattgttcaccttctttccctatggtccatatgatcactttcccatcttctgaaccactggctatggttgactttgggagacccaagttcggtgcccaagccacatcacggacccaatccgtgtgcttgttaagagccggaaaacaatccattttccatgacccgctggagaacttccacactttcacggtgctatcacacccgccggatgctagtttgtaaaccggatcgagcatgccagagctaacgagtgcgcctggttctgtggccggtgcccatgagactgaagtgactccaaccgggtgtgcttggtctatctttgatgtgtcccaaccgccatcagctctagctgagaaaacggatatgtttccatcagatgctccgcaagctaaggagaatccgagttcatgaggagcccaagcgatagagttgactgaaactttgtggtctgtgaagacatgagcttgtgtccattggttttggttaccttctttccataatatgatttgcccatcataggaacacgaagcaaggaatgaaccaaactttgggtgcgcccaagcgacttgccagacaggacctcgatgaccggttaaggtagctagatgttgagatccaccgctgttgctaactccggttatcttaatggtgcaatcagatgaggcagttgctagtcgctttccatagtaatccatgaccacatcatggacagtgtcgctatgaccagtttcaatcttctgaggaggcatgtttccttcctgaatgctttcactgttataatacaaatcaacaaggaacacaaccatatgagcatgttgatccagacattaaacgaagcaaagtttgattactaagcagatcaactaacaaattaccacagacaagacatggtaagcacacggatgatttatactcagacctcaattttaagcgtttaaccaacacaatcaacatcgcaatgcttaaattggaactctttaatcatctcaaaacgagaaattcgaaatcgtggattcttagattggaactctttaatcatctcttcccaccgatgtaaaattccatttcgtgagagtatacataacccaaatcgatctacaggcgctggtaagaatctagcgaatcctaacgaaattcactggaagatcaaactgaagtaagatttcataaacaacagagaaaatagtttcgatacgaacctggttggaattggagttatcttcttcctttgaactctccaaaactcagatctgctactgctgctgctagacagctagagagagagaaatcgaaagaggtgagtttgtatccttattaccgattctacccctacttgtggaatgacagtagtacccctagagagtaccgactcgactaccaaaattgtatgaaattgacccccagaccacttatttgttgggccatcgtatatgttactgggccttcaatatggttttgttatattattgggtatgatggaaattgagatctacaatatgacatttttaaattgaatccttatatatcattgttgaaattactgatgaaacaaaattgtttgaaaagtctaaaccattttttaattaggtatggtagaattttttcacattttcatcttatcatcggaattgatattatattaaaaaaaaacaaactagtttatgtgtatatcgacgcgacatgcatatattgatgcattttcaacatatataagtccaaattatatattgatgcattttcaacatatactgttctctattgatgttatataatatgaactttatctggagattggtgttatatagaaaggtagcagaagatgttaaaatgtcagacaaaaaccaaacattaacatataatactaatataagagtcaaaattatatggtaaaaaaaaagtagtgtagtttggtcatctttaattacttacttggagtttataatgtagtgtagattggcaccataagaatactctaatcttaaaatgtttgtgaataaccaagcattaacagatgggaaaatgtcatttaaatcataaggttactattttcgttggtttaaagcatgaattcttgatctggtgatttaaatcctcaatttatgtagatatggtgatttaaatcctcaattttatgttgactttcaatttaagcatgaattctcgttgactataattgagactatttttaactaggtaaacgaaataatcagacatgtcatcgcatagtttttgaagaggaagatgaaaatcatgttggtgtagaagaaaaattatgtgatgatatcgtcttattgatctgtttagctagttaacgatgtacctcaattgactttgtcaacgagaattcataattaaatgaaaatcaatataaatttaaggatttaaatcaccaggtataaagttcatgctttaaaccaacgaaatggtaaactcataatttaaacgacattttttccactaacatatataagtccaaattatatggtaaaaaaactaagaaagttgagttactgttctctattgatgttatataatatgaactttatctggagattggtgttatatagaaaggtagcagaagatgttaaaatgtcagacaaaaaccaaacattaacatataatactaatataagggtcaaaattatatggtaaaaaaaaaaaagtagtgtagtttggtcatatttaattacttacttggagtttataatgtagtgtagattagcaccataagaatattctaaatcttaaaatgttcgtgaataaccaagcattaacatgttttatgtcaaaaaaaaaaaaaaaaaaaaaaaacatgttttatgtcagttataattaaccttgtaccaccaaatcaatacagattttgtaagtgtttaatttgtcacagtaatataaaaatacaagtttgtgtaagcgttcgtgttggtgttaagtagatcgtgtgaaacaaacgtgtgttcgttaagtgcgagtttacgtgcgtagcatgtagataaggattaggcacgcagatatcagtaagacagtaactactggatttgaaaaccttttatgaaagaaaaaaataaacctttggataattaatatgattgtgaaaaattcatgaaattaacatatactccatccgtttcaaaatttaagatgttttgagaaactttcttgtttcataatataagatgttttcaagtttatatatatattaatttaatattttcttattatttatattatgcagtttcattaatgattgttaaattttataaaagtggacatttcttaatctgcatagtattaactaaaacatcttatattttgaaacggaatgagtatcgttcttccccgtatatccgtaaccaaccttttatacattgattcaatttcaagtctcctaatacaaaagcacgtttgtttttttattttgttttttcgtcgaaattgagaattatattaatgagtttgaaaaatcaagatacaaaagcacgtttgtttttttataccatctatatatcaaccaattgagtaatccacttttggatatacgtatacgttccgttgtattttatatattgctttttagtataagagcctaattgcctaaatatatagaacgtcctaagatttctaatagcaatgattttaaaatgcagtcataggtgactcattttttatttatgtagaatttcgtaatagcttaacagatagatatatatatatataccttacatttttaaatattaattattaacgaaatgtgcagaagacgtaataaatcgatcaagagttggttgcattattattcacaaaaaaaaaaaaagagtaattggttgcatgagattagtagattacaaataacaactccgataaatacactgatgcaaattttaacgaaaaggacggtcgcgtcaggtgtcgattttcttgtaatttctttgatatatatatgtaaagaaaaagtattcatggattgatgtttttctgtatatagttgagaatatttgttttactctgtcgtcaatagcaactccgcttagcaaatatagattgacaaatgaaaaatgaatgaaaatatatgtatatatatctcatgtagattgtagacagacagacagtgttatctctgttccctttctcctttgtagaccaaaatgatttccgtctcactaaaccaccatagcgtgggccgtggggtacacagcacactacgtatatattgcaattcattttattttgtttttgtatgcaagtatggtttaacttatttaacgaaaataagtagtatatatatatatagatagttacaacaaaaaaattgaaaaatatatttgtcaacatctacatcataacttcattattatatatttttctggtagtacgtaatcatgttgtctacaaactagtgatacataatttctcatcaacattaacgttcatatatattcatatttactttacacacgaatgtattcatatcttcaccaatatcttttgcaattcacgtgctcaacaaacgtaagcatgtgctgctctcaggttctcaacaatgatgaaaccttttagtgttcaatgtaaattttgatacaaagcttttattttctataaaaaaaaaccttctacgtttaatatttaacatgccattcaacttatattcatagatgtagtaattatattataagagattaagagtgttcgatctaaattatttaaaccaaaccaggaaatagataaataaataatctttgacaaaagaaaccagaaaatagaacaagatttaatttaatgaaaatagttgtttttggaacaaactaaatcagcaatcttgaaattgaccgtaattaataaattgtgacaattttcttttgtctctaaattatgaaatttaagtatttaacagttctggagatgtgtctttagtcaagtagttatatctatttgactccgctttctttaccggagttcgattccactaaatcgcgttaccacatgtagtaaaaattggttataaatcgggctttgtcgattcgtcaaataaaaaatatttaacagttcgatattatgttaattggaccatatttgtggtcaggattattggaccacgtaaaaaacatttaacgaatcaattaaaccataaagaagttgtcgaaacaataaaaataaaaataaaaatatttgctgccaagctctgaatatctggaaataacgcagattaagagtatttttaatgggggtttcttaacaaaagtttcttaaataaaattaaagtgtaaatatagataaataatattttttaattatagttatcttaaatttgaagaaataattggactaagtttctccaaatttaagatacccatataatatttaaataatatatattttattatttattaaagatcatgtttagaaaccctcagtaaagatggtctaactatccacgtcgaaaacatgtgagacacgtggcaatatatatatcagagtcagagaagtttgatgcacggaagctgttccttttttaaaatttggtgcaagtctacgttatggcactcactacacttttctccaaagccaaaaactctaaagttgattttatcatccttttgcttttttaaaacattattgcgatgcaaatatttcttataatctataatccacatgaacatttaaaaaccataaaataatatattagaaaatatcctcgttttaattggaatttcatcttaagtatgttaagactctgtatatcatatatattagtcttttagagaaccactctcgtaattatctcctactttagtactttccttgacacgtttaattcttaacacaacaatgctatttatagagtaatactttcaaagtcagaaaataatagatctatatctctcttaatttttcatatttctgttcagtactttatagttttctactttcgcattttctccgtactttctgtttcacctaatattttagtcttgattttcttttttacttgctttatcttttctttgtatttctttcttcgtgatcactggaaacagatctaatacaacaaatatataagccaaataaattgcaaacaatcgatgtatgaaggagaaagaaaacgattcctggtttgccaactccttggatattgaggaacatcggtttaaggccaaactatagcgatcggtggatatatttgaatcaaattaagattcgaatagtggctccctgaagagcaagtctcggtaatacttttcctctaaaccatttgatctcatctaattcctctcttaaatccacaccctaatgatggcggccatccacgttacataagtttgtactgtatataggtgtttctttaacaatttttctaaaaatatttaagaagatcgtttacataattttgtttttgttttttctttatagattaatcccataaagtcggtcaatgaagcaaaaaaaagttgttcaaaaaaaaaatgtactaaagtataacacacttttaattgatttttgttgttttcgcgaacacttttaatttaaggtatctatgaaatcgtcaggtaaattgaatactaacgttccactataatcaacaatatataaaacatctctctttaatcagtctgtaattccttaattacatagccaccccacaagaattattcgtatgcatccgtttttagatactgacgcttggcacatatagagaacacgtgtattgttcaggtattcgctattcacgaaacgtgccacatgatacctacatgacgacatacttacttgtattgtatgtatgtaacttctttgtacatggtacctaagattgtttgaattgaaaccaaaaatcaaaaattattttatcctagctattttatcctagcttatgttttatatattaataattgctttagtttttatgtgctttcaattcaatactaattaacactaactggtttggtctatcatttatatagtgtagtactttagagtttagactatttgtaaaatttgatgtggaattctaacaaacccaaatataaattaattaaattaaattatagactaaatactaccacgaaataaactcacatcaaacttttgataaacaaataaaaaatacaaaatgtatatatggaaaagaacaaaatgtgataaaaatataataaagaaaaaaatatataaaatgacgaataaaagagaatccaatacgccaaatataaataaaaggaatatattactttaattacagttatttatttttcatattgtacaaggatgagctagcagatagaaaagctagagatggtccattttagtgatatatactgcatgcttttgcatgatttcaacatatttataacaatttctctttcttgtatttttcttttgtaaaatacgataaaacctctttttcgttaaaattaagggagactcacaaaaatacctctttttcaatatctttttttaaaaatgctccctttggctgtccatttttaaaaataccccttttatgtacaaaatgactaaattacccttcttttaataaaagatattacaaatatataaggaaatataacaaaatttggttcacaaaaacaaaatatttttggcgggaaaagtgatcccacaatttttcccgccaaaaacacttgtaaaaacttgtaaaacctttaaaataccttgtaaaattttcccgtaaaattttttcccgccaaaaaattttcccgccaaaaattttttttgcgggaaaagtgattccgcaatttttttggcgttaaatttttggcggggaaaatttacaaggtattttaaaggttttttacaaggtatttataaggttttacaatgtattttaaaaggttttacaacgtatttataaggtatttataagatattataagattttacaagctattttataaggttttacaagttataagattttacaagttttttataaggttttacaagttgtaaatactttataaaaccttataagtaccttgtaaaaccttttaaaatacattgtaaaactttacaaaacacttgtaaatactctgtaaaacctttaaaataccttgtaaatttttcccgccaaaaattttcccgccaaaaaaatttcgccaaaaaaattgcggaataacttttcccgcaaaaaaatttttttggcgggaaaattttttggcgggaaaaatttttacgaaaaaattttacaaggtattttaaaggtttttacaagtgttttggcgggaaaattgggggatcacttttcccgccaaaaaatattttgtattttgtggacctaattttgtttcaaataagggtaaaatggtcattaaaaattaaaagagggcaaacttaaaaatggactctcaaagagggcatttttgaaaaggggtattgaaaaatgggcatttttaacaatttctctaaaattaaagatgttgacccaaaaaaagaggaagctaaagagatacaatagacattagtgtttaattataagtagaacaaatcagcaaaattaatactccttccgtttgacgaagagtgttattttgacacatttcacataaattgagaaaatattgaattatacatatatgctcctatttaataagtgattaataatttaaattcaatgaaaagtagctttaagctgaaggtaaatcatgaaattctgtgtaaaattcacattgaaaatgttgaataacactctttgtaaaacaaaaatcaaactctaaaatgacactcttgtgaaacagagagagtactccatatcagatcttttttatacttttctgttttttttttcactactttccaatacattatgggggggttttttagaacataaaaaaggatatttgtgtataatttttttcacaaagattactatttttaaggaatacaatgagtatataactatattttaattatctctacggaaaatatttggttatatagttttaatttgattcgtataacattagaatttagaaaacacatcactcgaagaaacagaagaagtatggcagaaaaaaggaagaactatttgatttaatatatatatatatatgtgagtacacatatctacccatataagtgtgaagacaacgattagaaattccaaatatggaaattaatcgctgccattagtggaagttctcaaacacccaaaagctaatgattttaaaccctttttttttttactcaagacgattttaaacctttataaatacgaaaataaatctcacaagtcatcaacaatcaccttaatctctactctcttacatacaaataaccaaatctctcttctcctctactctctcttacacacagaggcaataaacacataaagacagtttctaatggatttagaacagaagacaagaggactgagcaagtcatgtgcccttctcataggtaaatgattttcaccttttctttttttgtttgtttcaacattcagacttcattgaaactaaaaacagatgtttctttttcttacataatgtttctttgtgtgtatagtgattgcgggaatggagagatatgcattcaaaggagttgcatcaaacttagtgacatatctaacagatgtagtgaagatgagtaattcaagagcagctaaaacagttaatacttgggctggtttcacttctatgttgcctctcttctctgctcctttggctgatacttattgggacagattcttcactatcctcgcttcttcttctgtctactttgtggtaagtagaatcaagtgttaagtaagtcctgaaactctcctccaccgtcagaaaataacggtcaggcggtgagggaatgttgtttttatttatcttattttataattggcttgttaaaagaaatttgattatattttgatatatataatgttttggtcctctagtagatgtctatgtatatatgcttgtttaaacagtagttaagtgataaactgatgatgggtatgtgcaagaaaaactggtatatctaaggaagttataagttaggtgttgggtcattttccgagttaaggagtagatcaagtagactatcttaaagagtctttaagaaatttgatatttggtaaccgtccgattagaattttgttttacctctaatggtgtttatagggatccttctatagttgtgttgataatggaattttgattataatgttgatatagtgcttataatgggtcttatcggatcttataggcgaaaaagctagcttagtggaaattcgaaaattttcctttgttttatatttttgtagtttttatctaataatatattatctctgttttttcttttaagggactagtgggattgacatggacggcatttgctgggtcacgttcagctactaagacaatctcttcttactttctctactcttcactatgtcttgtctctatcggtttaggcgtcttaaacccttcgcttcaagcctttggtgcagaccagctcgaccacgacctcaataagaatttcgagctttcctcgggtgatcaaaaggatgctaaagctacccgaaagactcagtttttccaatggtggtactttggcgtatgcaccggcagccttatgggtgtcacagtcatggcttatattcaagacacttttggttgggtactcggttttgccattcctggtatcgtaatatccctgtcgattttgttgttcatgtcgggttgcggaatatatgtttatgctccgggtaccggtctgaagatgaaaacaactactacacctttagagaagattcttaaattcattaaagggggagtagtgaagcagagaagcatatatacacttgcagatgagaaagatttggatgctatggagcttgagtaagttcggaaaaaccatgatatttcatgaaactaattagtcttttaagttttactaatgatgacggttcttgtttatgtaggctacaagagaggcctctctgtaaatgtgagaccgaagacattgagactccttcaacaacccccaaaggattggaaggtgatgagagctcgaaaacgggtttctctggaactgataatgttaagttagtgattcgccttttgcccatatggatgatgcttctcatgtttgcggttatcttccagctaccagcaacctttttcaccaaacaaggtgtgactatgaagcgaaacattgggtccaacttcaaaatcccacctgcaaccctgcaaagcacgatcacattatccatcatccttcttatgccattatacgataagattttgatacctattaccaagagaatcaagaaaaacggtacaggaatctctgtgatggagagaatgggagtcggaatgtttctatccatcattgccattgtcattgcggcaatagtcgaaaggaaaagactagccataagccaaaagatgaaaactttacctgattatgatccagaaaccgtcccaatgagcatcttctggctgctgcctcagtatatcctcttgggaatctcagatattttcacagtcgttgggatgcaagagtttttctacagtgaggttcctgtcagaatgagaacaatgggatttgctctctacacaagtgttttcggtgttggaagctttgtgagcgccgcactgatctcaatcgtcgaggcttactcgagctcaagaggtgaccggcaaaactggtttgcagatgatatgtctgaagctcggcttgacaaatactactggctgcttgctcttacaagtacaataagctttgtggtctacatagttctatgcaagtttttcaagagtagcagtgatcaaggcgatgaaaaagaaggagcccctaaatgaaagaagaacaactttgattcctttgacacagtcaacttagataaccgtttgccacaagattccacgaatgatctaactgtagtagtagctttagaactaactagcaaaccataaagagatagacaactgttctccacaagatttttattcataagaaacaatatcttataatatcaaatgcaaaagattcaacattattattatctcgtgtgtttgattacataaaatcattaatcctcccattgacgaacaacatttctaaaatggacagatacgaaacaaacaaacaacaaagtctgaaactttgatttgtacctttaatcgtgtgagctgattccattgagaccagcttctttagctacgtttctctgttctcgaatctcgtcttcttcatcagaatcgagagtgaaagtacttaaattctccatctcagctccgagaggccgatatttagagtgatcgtcagggagataacctttcttgttagcaacgacagagaacaatgcagtagctaaaactaccattagagccaaatgacagttaaactgaagagttgcaatagcttttgctcggtgataatcaccgtgtcctttgcacttgatcgtgaaattgcctctgctcttctcgtgaaatgtacagttattagtgatcaaaccggtgaaaaacgatatacccatttgcagaaaccatgttccttgaagaatcagaccgatcccacgacctagtttcgcgtatcgatgcgtggtcgcatccgatttcagctcaaaaatcgtggagaagacgcagatggcaatgggtacgagcatgagatcgtaatagcgattctcgattccagaaacatctttcttttgcaggtagaacattaagaactcctcgacgaagccgaagagaagcaccaaagtcgtaatcgaagacggaagagtaacaaagacagattttttggagttgaccagatatgttaaaatggcgtacactaggaatagtactgccactgccaggatctgtaactggatcatcgacccgacccgatcgcgggaattgattgagctgaagaaggtgaaaatcgagttcgcaataaacagatacgaaagcaaagctacggggatggaagatgatccaacagattttggcggcgaagctctaatctgagccataggggaagatggattcggatcaaggttcgatgagtccagtgactcccacgcgccgattactgccagtgactcccacgcgccgattactgcaaatccaccgccggcgacggcgtaactcaatatacccatgacttcaattctcagaatctcacaatcttacaagatctctgcgaatcaggttccgccataacagaatcgatcgaccttagtcctggtaaaccggaaagatccgacccgacccgacccgagtaccaaattgggataggttgatgacccaataatttaatacaggcccattgggtcttcaaatagcccatgtttaaatatcgctaaggataataactatcacgtgacagtcatgtgcctctacggatatgacgcatattttatttgcacagtgtgctccgcttgcaaaatccagttgcttggagagagatgatgcttcctctgtgtcaccagcagcagcagcaaccattaactcttcccaaaacctttcccgatcgaattttcccgccattccctgttcccaaaaccctaatttcgcgacgcaatgtccgtcgagcgaactccgtcgtcgtctgtagttctgcttcttccgatcggaagactcttccccaatcggctatccagagaatcgctgagaagcttcgtagccttggatttgtggaagagaagcatgattcaccgactaggagaaccacgggagaagaatctggtaagaataattccccaggagagatattcgttccgttgcctaagcagcttcccattcaccgggtcgggcacacgattgacacgagctggagcacgcctacttacccggttccgaagcccgggtcgggtactgccatttcaaggtaccatgagttgaagagagtgtggaagaaggaaacggagatagagaggaagaaggaggagaaggttccgtccttggcggaattgacattgccgccggcggagctgaggcggttgaggtcggcggggattaggttgacgaagaagctgaagattggcaaggctgggattacggaagggatcgtgaatgggattcacgaaagatggaggacaacggaggttgtgaagattttctgcgaagatatttccagaatgaacatgaaacggacccatgacgtcttggaggtttgcctctctacttttgatttcttctgggttacataatagggatttgatagttacactaaaaattttcagattgatttcgtggaaattttatgctctaatgtgtaacatttgacttcttactcaaaattcaatgacagacaaaaactggaggcttagtcatttggaggtcgggaagcaaaattttgttgtatagaggggtaaattatcagtacccttattttgtatctgatcgggatttggcgcatgattcctcagtggaaactacttcaggagtatcatctatggatcagggagtggttgatagtagagagaaacagagtattgcagaatcttctgccctgagtattactaataaaatggttaaaccgatgttaatgcaaggcgttggttctccggataaggttcggtttcaattacctggggaagtacagctagtagaagaagcagaccgtttgttggagggattgggtccaagatttactgactggtgggcatatgatccccttcccgtagatggtgatcttctgccagccgtagtacctgagtacaggagaccatttcgccttcttccatatggcgtcagtccaaaactaactgatgatgaaatgaccactataaggagacttggtagaccactccctagtcattttgctttaggtaagcttattttcacctgattttagctttaatttaggcacaaaagattgttaacttattctggcttttcttttctgagacttccaggtagaaatagaaatttgcagggactagctgttgcaattgtcaagctttgggagaaatgtgagcttgccaagatagcagtgaagagaggagtgcagaacactaatagcgagctgatggccgaagagttaaaggttgctgatttacttctagaagtatcaaactatttgtggctctgtttgcgaacaataagaaattatacccgtcggagtcccatataacagaagatattttattgatgagaggaaaatatatgtctgttgcagtggttgactggagggactctgatatctcgggataaagatttcattgtcctgtacagaggaaaggatttcctaccagctgcagtttcttctgcaatagaagagaggagaaggcaaacaatgataatggagaaatctagtgtgcatggtaataagctgactgaaaacgaagaagaaataaaacctcgggctgttaaagacgatattgaactagaagctaaggatcagaaggatcatattcaaacccatcagatgaaaccaagacagcggaaatctcctgaggcaatccttgaaaaaactagtatgaagttgtccatggtatgccctaacagacaatttatacttgcgtcccttgggtttgcaagaccttttttagttctgaacggttagttttgtctttaggcgttggaaaagaaagcaaatgcagaaaaaattctggcggatctggagaatagagagagtcctcaactttctgatattgacaaggagggtattactaacgatgaaaagtacatgctccggaaaattggcttgaaaatgaagcctttccttttactaggtaggtcattgttttacctctttttccaattgaaagcagtccgttcaagtctttcatgtaattattcgtggtaaatgagtaactgtcatggactcatctctttgatgtggtttatgtaaatacccccgttctgacatatcttgttgtgttctcaaggtagaagaggcgtctttgatggaacaatagagaacatgcatcttcactggaagtatagggaacttgtgaagatcatttgtaatgaacacagcattgaagctgctcacgaagtagcagaaatcttggaagcagaaagtggtggcatactagttgctgtggagatggtgagtaagggctatgcaattattgtgtatcgtggaaagaattatgagcggcctccatgtctacgacctcaaacacttctcagtaagagagaggcgctgaagcggtctgtggaggcacaacgtcgaaaggtaaagaaaaaatcataacaaatccttgacatgacaaaattttcctgtaaatattatcttatctggaaacttcaaattagttttatgacttcctcacttgaatttttaattatttttctgctcaaactgatgcagtcattgaagctgcatgtgttgaaactttccaacaatatcgaggaattgaaccgtcagttggtaagtcatatgtttggctcagcttgatttgcttaaacagtccttgaagattgacgtaacattggaatgctgctggttggggcaggtcgaggacagcgcaaccaatgaaacatggtcagatggggaatcaagtaacaggatggtaaattatttacagtttcagtaaactcaagccaattcttgatgcttctatgattttctcaattctccatattttaatgtaggccgaagaagaaacagaaaatcagcatactgaacctgacaaatcaagagaaggaattgaactcggctattcatgtgacttatcagttccttcctctggtgaagaaaactgggaggtaagattgttagctcctacttgaagtttcttgcaaattacacagttttgaattctgacactgcattggggaatatattcgaaggatgacagcgaaagtgaagtagacccatttactacgagcagtcatgagtatcaagaagatgaatctggatttggctcgtctcagagacacgatggtaactctctcgattcatctgcaaatatatctgtgcttgcggaaagcagttctgccaatgcttcttcatttcatgatagatccatggtaatgtctaaacctcttctctttccttgttggccctgtgcgtagctgtatttacttaattaccctttttgtgaaatttttagccgcgaaaaagctttctgaatgctgagcgaaagttaccagctggaaaagaactgggatcatcaactggaagtggctcaggagtctcagctctgagcgagaggaaaagcaaaaatgatgggttggtcacagatctgtccaatagagaaaggctcattctgagaaaacaagcccttaagatgaagaagcgcccaccctttgcagtaggtgagttttactatcttctatactctttcctgctaagagaccacctgatccatatcccaaacccaatacttttagattgtttttttgcccgataaagctcattacataaccacaatgccttttgtgtttcacgtataggtaggctcagttggaaccgtatagttcctattatcgagaatgactaacaagtttccaatcttttattttgtaggaagaagcaacgttgttacgggtttagcaagaacactgaagatgcattttcagaaaaaccctctagcaatcgtaaacgtcaaaggaagagccaatggaacatctgtgcaagaagtcatcgcaaagctaaaggtcaattgatgtccacattacaacttaaaaccaaaccattaattagttctttcttgatgatccttttgggattcgtttataaaaggtggttttgaatttgattatgcaggaagaaacaggagctcttctggtgtcgcaggagccaagtaaagtcatactttaccgcggatggggcgcagaagaagaaatgaaaagcttctacccaaataacaatgtcaaaagctctataaatctaacctctacaaaaagctttgttgaggatcctcctcatgtgtctcctgcactcattgaagccataagacttgaatgtggattgtaataatgtttaaaattattagatgtaaataatttaatgatttaacatttgctagaaagtgaaatgtttcaaactccaatggaacgagaatggctctgtctatgcacactctaagttaacacatctgtcacttagatcttgtggtttccggattggctcaagaatcaaacagctcttcttttcctagatgatctgagcatgaacaaacttgaaggaagttttcccaaatggttggctgatccataattttgtcagacaacaaactctcaggttcattgcctcctagtttgtttcagtctataagcttatcggttcttgcgctaccaagaaacaacttctctggtcagattcctgatacggtaggcaaaacatgggtcatgatattgatgctgtctgaaaacaacttctcaggatcaaggtattggatctctgtgagaacaatcttgatggatttctcccttcatctcttgggaatctcacaagctctgaaagaatctctcccgagctcgtcttcgcttttgcctttcatgtacagcttcactatcgaaatacacaacttagcagagtgaactggaagaattcaaaacatggtcttgcctatagaaacctctacctctacattctgatagacctctccaagaacaagccccattttttaacctctcatacaacgacatctctggattgatcccacaaagttttgcaaatcttgagaagaactttcacacaataacctctcaggcgactatccaagctcagcgagctgaatatattggagttgagcaacaacaaacttacaggtagaatccctgagagtcctcagctagacagactgaacgatccaaacattttacgcgaacaacaacaaactatgtggaatgcaaatccaacaaccatgctctacacagaccaagcagctagaggaaggaaacaatcttttcatgaaaagctgcagttataggttgtccttgtggatttctaatggcagttgtctaaatgtatatggttggctatttcaagaacagaggactgaagaaatcaaaatctctgttttcttaaaacgaaatggaaaaaattataaaaacaaagcagtttgtgagcaatcctttttaaaaccacagtggtcaatgaagtggtgatgttatcaagagagttaaacaaagtattgtcaaatcacttttcaaaaagttgtcctctatttgtttaactaactctatgaaaacagaatcgtttaatgaaacattgccagcatacagattcacaaaattatgtgttcttttggtgacatgaatggatttcaaatataacccaaaacctccaatagaatcaattgtatctttagaaaacaacaacttccatcagattgagagaagaagacgaaaaactaaatggagaggagctagcaacatgtatactatttcactttttttagagtttttcagccaatcagaaggctctatttcgcaaccactcgcacaaagtgcgcgttgcgtgagtgagagcaattcctgaaggggtttacctttagaaatcatgcctattttaatcgacgcacttctctccaaaatttccatcgcgtgactcttttatttttttgttctctaaaccagtgtaaaccgaacccaaaatcaattcttatttcaataccatgtaaaccgaaccgaacggaaaatgaattttaaaaaattgttaattagacatttaagaaaatacttgctctagattaaactttcaaattacaaaatctgagtcagaatcaggccaagaagattcccgaagatttctactttcatggttccaaattagaaaaaatccacatccaatagaggaagaagaacaattcactgcttcaattaaacatgacaaacgattgaacgagcttagctttactagtttttgtcggcaacaaagtcagaacagatatggacaaaccaaaaatttcataccagaacagtagattcgataagaacaaggacgatttgcaataatttaaggtttatacagattagactcaccagtcgaaatctgaaagcatgaatctagctagttttgtgctcttcgtgtttttggctttagtctcctttctttttcttctttgagtttttcaacatcactttgctgcttcgagatatacgaattaaaagtgatggggtaaatcaagaatatttagatttttaaggggctggatttgtaaaatattaaaaagtaaagatcaatcagatattaagtacattactacttgtaatgaacatagcaatgaagctgctcaagaagtagcagaaatcttggaaacagaaagtgggttgctgtggagatggtgagtaagggctatgcaattattgtgtatcgtggaaagaattatgagcggcctccatgtctacgacctcaaacacgtcgaaaggtaagaaaaaaatcataacaaaaccttgacatgacgaaattttcctgtagaaaactgaaactgatcgaatagctctaactaagaactcatttgctacatgactgtcacacagagagaaaaaagcgagttttgaaattgtggcgtttcagagcgttttgagggaaggagaggtagagagtggcttgactcggatgcttctggtgtagaggtttgtgagagcaaagagtaaaagcacaaagaccacttgagcactcactatcccaaaatggcttatactattcccaatttccatccagcttcctgtgtttttcacctgcaacatatttttggttgcatcagtgaagaagaaagagcctttaacaccaatatctatatgcttcattttgacataatcacagtaagcaaatgaatgtttgtttacttaccaggaagaagaaatggatcgtcattatgtctgaaaataagatcacaaggaagtaacatcccagtcttggcattctcactaatttcgttattgcactgaacgcacatctgcaattcacagcaatttggacaaccataggtttaaagactagttttatactaatcattactaatggcttgggtttagtgtttacactcacatgacaagcatgaacggtatgaagagcttgaatataagaagagctgccatcaaaaacggctgtacggatgcaccggtttaaccataagactttatggaaacacagattataagagaagaataaaacaaacgataatgcagatacttacgctgaagattgtgataaaccggtatacagatgatatctcaaaacttgctatacttgcaaaattcccagttccgaagaaagccacattgaacaaaaccatctacagaacacatgccaaatacgaaaatcatatgtactgctattttatcagatgtaacagacttcataatctcgctcgcatcataataggaccaatgaaacaaagaagacgacttacaaatatcaaaggaatccgcacatcagatagctgcaagtatctctcatcgcttccgatagtgatatgttcctctgtgtttttttctgacagagacgaatcttttactttgttagaatgatgagaagcattctcaaacaatatccacgccataagcacaacggcaagtgcactgtaaaatacagcttcatatctgcaaacaaatggtagaagcatgagaacaaacaatatccacgccataagcacaacggcaagtgcactgtaaaatacagcttcatataactaagtcttgtaaagagacatacccaatagacaggagaaggaatggaggcgcaaaaccaagaaatatggaacttaatcgagaaaggatgccatttgctgaaaacaacggaagaaccattgaagaacctgcaaagatagaagacggtttaaccggtgactcaaacacaaagaaacactattacgcaaacagaacagaggtctgaggatataccggcaactaaccagtttatgaactgatgtgatgaatgtagttcttgattctgtgttcggtgctttgtcgacagaaacaccatcaccgatgacactccaaccaaaaatatctgtttcccatttgcaccaagaaaaattgaactattagacgaagaaccaaaatttgaagttataaaagttaaaaaatggtttacctgtatgcaatataacattgagcacatcggcgtcctgctttcatgaaaagtgatactctgccaaaatttgttcccttctgcatgtgtgtctagccactttgcagcaaggcttattactataataatagctccacttataactctgtaaccaagagatggtaccaacatgaaacactgagcatttcacaagtaaagaaaatgacgctagagagcaaagatgcttaatgctgtgttcaacataatttctactcttatgattctattgaacaatcctatacaaagggagtgaagacttcttctaaatgagttgcagctcaaaagttactagctctgctaagtgataaatgtggtttaccaaggcatcagtgtcatgtaaaccacaaaacgtaggaaaaacaatcagaggaaagttcaagcaagggtaagcaaaataacttacactaagttgttattatcaggaatttcagctggcatcagagtgaagacagacaggaaccaacaagataaacagacaaaaactggtatcccagatcggcaagggattgaaaagtgcaacaaaattgaagccacaacacctgctatcaagaaaaaccaagtgtaaagctttctctcagtgaagctatgaacctgcaagaggttcaaagaacaaacgatcagggaaaaagccttcgcttcagagaaaaactattggaccatccaactactcataccaataattccacaatgacaactgccacagctgcagcaaatagaagtttgatgaagtagtcagccctcctctctctcaaatatctccataatcctcttattaatcgatattcactaaagatttgtgtccatagaaaaactgtcattccaatatatgcatggtaaagagggggggaatgctccaccaaatttagcaccgagagaattaccatcagcaggcagcctgatatatatacctgcgtcaaaatgatcaaaataaatgagacagacagagatttcacatgaaagtgtagatgtttaactataacaaagaaatcctgcttaaccaagaatagctaaaaaagaagagtaatctgatcaaagtgaagatggaagcgtttacttttccggagtcttttttctgcactgataaatgctcctttttggacaaatctcctgatagtgaactataacattgcaggacatgcagggcaagtacgatcatccatccagtgtatccaagtgtaattacagtcataagcattagccagtcatacgtttgaaaataatgaaggccctctagtgacaagtttctgaggtccacagccaatttcattgcagcttcataacttttggcggatattaactcatcaatctgactcagcgatgaggaatggtgaaccaacggcttaaatggcttgaaaaataaggagtttgagcgttttatatctaattttgtcaaggagaccacagccaggataaaaactaaaaagagcagaatataagcaatgctaagaaacaactctaaacaacagactatgaatcggaacaaagatctttttcgatcactgtaagagtaagactactgtactatagcatgaacaatgtcaagggcttgaaagcagggaacgatatcagaatgagaagtgatgctacaatacaaattataatcttcaatgcagaagttaagctaacattagagtgtgagcaaaggatacatgatttacgaaggagctgattaagaatttgtttggtattggctagcacagcttcaacttcttctgcctaaaaatacataaaaaacaataaagcatcataagtcttgacctcccagccatatttctattcatattttaaaagcagttcccaattgagtttcgacctctcacccatgaaaactcaatagggaactggtaaatacctaatcatgtataacatacctcattcaacttcatataaccaagtggtaggtttccaacggagttcactgggcatggcaaacccaatagcgttgactacaaatattaacaaaaagtgagaccaaagaacttgggaaacagattcacaattttaagttgtctgactgagaggataagatatgaggtaaagtccaaccataagtggtgctatgtcagcttggttgacatctactctctcaacacgacgaaggccccagtcataaggtgtgggcatatcatgtgcatgcttgtcaacaaatgtagtaacagaatcagagtgactatttccggatgctgatttggggtatttaatcccagctccccaagcaactaatggagtatcagtgtttgtaggatgcccatctccatgacttcctataagtaacaacaggttcatatagtatcattaccatcataagctcaagacgaagcaaagaaaattagattgaaggtgcagatgaaacctaaccagatagctaagagaagattaatgatcattccaaatatgacacgaagtttgagttgcaaagcaaggcaggaataaatggccacttgagaaaacaactgtagctgaattgaaatataaaccccaaaacatgtcatcttagtatcataaactatcctatctcaaaacaatccaaacaaatgatagagcaaatatcttactccatcgcagtatattctactcaaattggctcccaaatcgtaagtagcctaaccacccaatgtgccctaaagtgttaattaacgagaaggtttgaaacaaaaggaatgacacaaagcaaaagcagacctttgtcgctcatcccatgatcagcagtaaagatataagaagtgcgattgtctctgtagtaatcctccaagagatggtagaccctttcagcaatcttatcaacaactttgacattgttgagatagattgatgagtacggccgatgtgcatgaccattggaatcacaaccaagaaggtgaagaaagacaacgagtttgtcctggtggaggagctctttcaactttggatcttcgtgagacctattgagaaggctctcaaattgatcgaaagaccactcatccaaaaaggaggcatctacaccaagatacatcctctcagttctctagtaacaaaaatgttgcatttcacaagcaataagcaaattgaccgcagagtcaaatttaattccagatactgatacatagtttttcaaacaactaaactaacctgtagcaaagtcttcatactcgtgtgggtaagaattccaagtgctgtgaggtaaggcactgcagaatataggaataatatcggggctcccaaaagcaaacgtatgccggctctggttaaaaacagaatcaaactcaacaggattagctttccatcctgcaaaacacaagtgcaacacaatttgatttcaaaagccgctactaacttgacaagactaggtaagtaaatacaatcatatatacagaagaagaagagaacctttagtgacagcactaggatcttcatagaaaccagcaatgatagcaacatgtccaggtctagattctgtaggaggacgagcatgagacacaccccaacgcccctgattctttatgacattcctcaagaagggtgctctgtatttgccttcctcgtccggctcaaagaatttgtcagcacgtaaaccatccgctgataataatgtccatcagtaaatcagaaatgtctcgagcagaaccagaatcatatactctaaaatctactataagctataactgaaagaatcctgagcttgaagtaagaaagacatttcagtgtgaggactacgtacagatgagaagaacaagtcgcttcgctggcggctcagagaatctgggaggcacaggatccatcccgtggactatcggcgttttgaagtaaatgtcgaagatgcttaacatgtacacggcgtgaagagcaactccgagaaccaccagccacgtttctcgcctctttagccatcttcgtctactcgcgaccacgacggatgttgatcgattctgatccgaacctccaactcccaagatcccgtcgctcctcatagatcttcccaattctccgaccaaaaacttttctccttattagattttcttaaatcttcactgttcactatcttgtgtccgtaaaacactgttaactaaagcccaagccttattttgataacaaagctctgatataataagcccaagccttatttattgtaacaataataataaaaataaataatccatcgagttcctctgctctcgaattattattacaacgttgttccaaagatatgaatacaaagagtagagagataaattacaaagaagcagagagaataaataggaacaataaaataagatggaatctctgaaatccagaaacaccacacgagagaaagagagcagatcactcaaaaatgactcccacttttttcatcatcttacacaaacaaccttctttttttttactttcttagaaaaatatatcagttcttcactgtggtcacatgcttcagaagcatttccacaacatctttggaaatcctcgttgcttcgttcttcaactgctcgattttggcatcagtctcttgctccaacctcttcacatttgcaccagagtcgccacttgtctgttttcacattatgatgattagaagacagaaaaagcaaactacactacttttttttaatttccaaagaacatttttttcttttccaattatttacctcctcaagtttcctctggaagtcttgctctgttttagctttgtattcggcaatctctttctctgcctcttccttggcttgcttcagtcttgccatttttgctgcagccaatagaaagataataaagcaaattcaaaacatataaaatcaagctctatacaatatgctccaagtgctacacataactacattttcatttctataaatatgcaggctcccaagaatgtacttggatgtaatatcagtgttgggcaaactttcaattctaaagtataataagtgaacaacaaacaacacctttcaatgttgtagagtttcagatatgtaaactaaattggcaaaggaagataagctaatgattaccggtcctggcagcattgacaatgtgttgagcttcaacctcagcagcaagcaactgttggatcgaaccttgacctctgctggactccatgctttattacacaaaattctacaaaaacaaaatctgttaaaatctaaggggtcaaataataacaacaaaaatttgaactcgcataaagtccaaacatatctataaatttgctcataaacctacactacacataatctcacaaatcaataactaggtcaatcagatgaattattgagactgaccaactactaaattaaggacagagtcaacaggattggagaaacataattaatttacccataaactcgaagcagatctgttactctagcaattcataagtcggaatcaaaactagacagatctaagattccgaaataggattaatgagaattgaagaccaccaagttagtgaaatcgatgtagtataaattagatgatcttcatacaaaaaaaatccaactcttaacaccatcctaacaacgatcctaccgcgttgaatcaccgggattaacggaagtaagtcaaaacacggcgaaacagtttgacttccgattgaaaattcgcattacctttgctgattccagattccaaggacgagagatgagaggagagaagagagaagatcgaggatctattaacacgtctgtctatccaatctgctctcggtacttgtattgtatgattaacttcagcagtgggcccactttgaatagaaattgaagcccacttttataatgggtcttatctacaaagcccaaaataaccggagagaacaacaacgcctcgtaataattaatgggaacataaaatatttagacatgaaaaccattaattaattttataataaggtattattcttgctctctctctctctctctctctctctctctagctcattcttgctttggctacctccaaacaaatattcctgacagaccagaccactcgtaagacagaccaaaccctaactaaaagcatccacgttttttttttttttgatggtctgatctcatcatatccatggagatggagaatcaccgccccagtttcacctacatgggccgcaaattcagcgatttaagtctcaacgatgactcctctgctttcagcgattgtaacagcgacagatccggcgaattccccactgcttcctccgagagccgtcgtctcctcctctcttgcgcctctgagaattccgaagatctcatcaatcatctcgttgcgcatcttgattcctcctattcgatcgatgagcagaagcaagctgctatggagatcaggctcttatccaagaacaaacctgagaatcggatcaaaatcgccaaggccggtgcgattaagccgttgatttctctgatctcttcttcggatcttcagcttcaggagtatggagtcactgcaatcttgaacctctctctttgcgacgagaacaaagagctgattgcttcttccggtgcgattaggccgcttgtcagggcgttgaagatgggaacaccgactgctaaagagaacgccgcatgtgctctgctccggctatcgcagatcgaggagaacaaagtcgccatcggaagatccggagcgattcctctcttggtgaatcttctggaaacaggaggattcagagcgaagaaggacgcgtcgacggctctgtactcgttgtgctcagctaaagagaacaagatcagagccgtgcaatctggaattatgaaaccgcttgtggaactgatggcagatttcggatcaaacatggtggataaatcggcgtttgtgatgagtctgttaatgtcggtgccggaatcgaaaccggcgattgtggaggaaggaggagttccggtgctggtggagatagttgaggtgggaacacagagacagaaagagatggctgtgtcgatattgctacagctttgtgaagagagtgttgtgtatcgaacaatggtggctagagaaggagcgataccgccgctagtggctctgtcgcaggcaggaacaagtcgagctaagcaaaaggctgaggctttgattgagcttctaaggcaaccaagatccattagtaatggtggtgcgagatcatcgtcccaactctgatttgagcttttctttttatcttttttttttaccacactcttttctttctttttactgttaatgcgagggtgtatacaaacaaccagaaaaaggggggaaaaaactgtaaatttgtgtagaaaattagtggggttgttgtaatttatcttgagtttggctttttttttttttgtgatccaatttcataaatttcggtttggttgtttaacagtttttaaatctttaccaatttaccctcccatgtgtataatgatctactagatacatgacccgcgccttgcgcgggaggaggttgatggtaagaattttctgtatgaataagaaaattgttcaatctttaaaaagattgaatattttgtgtctttcaataaatttctttatatacatataaaacagtgtttttacatccgatctgaattgttcggtatgttcggttaacctgcaactcgttcatttctcctgtttaggtttaatgttagtgtccgttaatttctttctttctttttttcctgcccatatgtctgctaaatttcaaaaccgaagaaaaccacaaaacatatgccattaactcgcaacttgatgaacctgttgaactaaccgggtatcggatcaaaaattaaattatttgattttgaaataaaatataggattttagattattttttttgtattcactatttagttatttttagaacttttcagttttcatattccttagcatattttatggttttagttggatcaaaaatatttaatcattttattattaatgtaaaacatgatatgattattttataaaactatataatctctatatattttaaataaaataaaaaattaattgacccgtgtttgaacccggttaacctagtgactcagaaagaaatctgatttaccgtttggatcggatttaaaaacgttgatacaaatgtataagataattgcatgattatagattttacactactacatattattgaacgtattatagcatgattataagttaagtaaaataaatagtaaaacgttaaatgaataaaagaaactaactttagcatcaatcaagattaattttggatgctttcaccaacactagcaaagtattgtctccaaagccttatgttcttgacctttaatttccacatgtcttaaaaggtttcaagtgagcaacactaatgagatgtttttttggtgaagtgtttaattgaaggtgatatagggagtgtatttataggaaggaattgagacgtaggtttagagagttttgtattttgaaaatttagaattcctccaaaaagaaattcagatttataattgttaaactaaataaatgctgtttatattttttatttggaaacaattttatttataaatctattggtaataacttattaagactattgaaaagggattatccgtgtggatattcctttattcatttaagtttaagaaatctaaaaatttagcaaagatgtcgagatttggtggtttcaagtcgatattttgtagtttcaaacctttaatatcgactttaaaggtttgcaatttaaattagaaatttagcatcattatttgcaatttaaattagaaattcgttttgattaatggagtatatgtatgtaaaatattaatggcaaattctgtaaatagtctagtaaaatttgaataattatttaaataggcgacaaattattctgagagcgacacgtcagcatggcaatcttgttaataacacgttaatgtaaggtttatttttagagtgtttctctattaatatataggggactagattttaacccgcggtacaccgcgggatgatttaattttaaagttagtataaaaatattttgtaaattgtatctccttataacatatttatttatattatagtttacaattgttattaaataacggtataccacgagtccacgagataattattaataaactgaggatttaacccgtattaaagcggtatataaatattgattcaaattcgtccgccatataaatcatttccgaaatataacccgttccgtaatttcttaacccgtcctgtgatttgtattaaaaaaataaggattaaatccgtattgaagcggcggattaatgatattttaatctttttattattgttgattcaaaaacctgtcccgccaaactcatcccgccaaaaaactcatttattttattaatgttcttatttatgatatgattctgaatcattgtctaaatattttaatcgatgtagaatgttgaacacacattttcgtcaattggataatatatgtccgtttttaaaatttcgaatcacagtatatgcagaaaaaaattgatttttttttttactttatgtattatatgatgattcaaaacagttaaaaacaaatcaaacaaagatgataggagaatcataattataaatcttaatcaaatcttctaaaaatctaaattattaaatatggaatatccggtgtatgagttgggttaaatataacccgacccagcaaattttttgtgaaggaatttttaaaatggatcggatatccgatatacccgaaagcttttttacccacccgtcacaaaaagtgctgcgattatactagtatagataagtagggctttgaataacataagggagacattcttatttggaaattattgaactagaatgtaagaaaaaaggagagaaacatagacatgttgttgcgaatttttaacttaagcgaacaagtgactgaagtttaaacatactggggacagagcaaaagagtagtcagaacatgcaaggaaaaaagagaaacagtaataaacgttttcttagagaaatttaaacttagagaacaagtgactgaagtttcaacatgttggggacagaataaaagagagaagagaacatgttcgttcatcttcatgttcatgtttatgcctacacagcatgttaaagacacgattctaggaacaagaaaacaggaatatatatatatatatattaactaattctatcttctagctgcctgggatcaccaccgtttgaccctctggatacgcattgacaaaagaataaagattaagaacctggtaagcttgatgcgtatggatttcttccaatatccacttttaaaacaaacaaaaattagatagagttcaattagatcttaaactaactcacctgccagaccaatcgcacagttagcttgtttatcagcttcagaattcaattcctgcacaccggacagcttacaattactcgcaatgaactcaaagatattcagttctaattcgcactaaaactctcaaaaccaaacatgattggatatctaatggttgttacgcagacaaacaacagagttgatcacaactcagcactagaccaagcgggtttgatggcttaccctgtcaacgtgttcgatatggaatgttttaaacttgctcttgagctccttagcctgtttgcacagctcagccattttcgggtgtttggttttccatgcatcttgaacctattccattgacgtatccaagtaatcaaaacaattaaggcactaacattgaatcattcaaacaaaacaaaaagatagagtgaatttttatatctggacctgcataaccacaagcattgagtctccttggacgcgcacatctttaaaccctttgtcaagagcagacctcaaaccaagaatcagagctcgatactctgcaacgttgttagtggcaatgccaacgccttcccgtaaatagaagaggacacttgcgtctgaagcacggagaacagctcctgcaccagccttccctgggtttcctttagaagcaccatcaaactcaatggtacatgaatcctgagggcgaatgatagataaaggaattatgaagatgcagaagaaaaaaaacaagcatatgactgaataattttgttggatgttattacattttgaagtataggtgcccgagttaggaaactggaaggaatccgacgaaccatgtcattttcgatcttaagatgcttctgcggaggactaggggaaaacgaacccgattcactacttccctgaaagatgagaggcacaagaattttcatcattatcttcaagagattgcaaaagataaagttactaatacatattacccgcagcaaaggcaatgaattatgtgtctataacagacaagatttacagtttttaccatatcttgcaatctcttagacggggaagatttgttgagagattctccttgggaagaagatggttgctgaaaagcaaaatcaaaagtcggaacataatttagaacagtaataatatctccactggaataacctcggagtacacaagcaactgagtatatgttcctgtaaaatatgatatcaaagatcactctctcttataagagaatgttacttagataaagattcggtgccaaacctgaacaggacaaggaatgagtttcccaaaagcatcatctttgacatgacttgcattgatagaaaagagagcgttcttaattccaaaggaagataacaagtcctctgctccttttggccaaccatatcctttgtacacactcattgcaggatgtgatacctgaaaccaaaacaaacaaatctaagtaagtcctaacaatgcagatgtcaacagtgaatacagattcaacagatagaagaaacggagaaattacagaagaaccagcttgttcttggcattcgctcaagcttcgatagacaccaatgatgtctcccttacggacgatgtaaaacgcatctttttcatcctccattgtggaacccataaaccaatcaacactctaatatctcacaaaccctaaaatcccaaatcttcccgagttagcgaaatcacagaagaaccctaaaacctagtaaaacgaacaaagaccaaactaaaacaagtccccggaaagcaattcaacagagacccagaatccgaacaggcaacgcgcatcgagagcgagagagagatgaattggttttcgaatttcaaacttatgagtgctgctgcgatgcaacggagcacgacaaaaatatttagatgggcttccgcgggaataagcccaatataatattacgggttcaacacgaacaaaactacttgccgttccgtttcacacaaccaaaactacttgccgtttaatgttattctcttttaagagtaattgttgtatatgggtttgaacttgataataatcttctcagtgaatgtgtttgtatataaaaaaggtcaatggaaattacattaattgttgtaaacctaactccacccattttactttttcaccatatcgaatctttcttattttagccaaaagcttctctcttaagaatgccttaatttgatcagtttttgctttcaaccactgaattaatttcatgtggtatatgggacattaaaaacaatgtgcttagcaaattgtcatctgtataatgaatcattaactccaatcaagccaggaatttacgttatcagttttttttctactacattcttaaaaatgtgataatttaagatagttttgggttaatttgactagtgaatatatatatatatatatatatacacaacatagttatatataacatattcacaacttacacaaaattgagtaacctagaattccaattatatttagcaacctgattttttatctctctctatatatatattttttttttatacattagcgactgactgaaataaaaatcatcattccacatcaattaaaaatctttacaacaacaaaaatactatctttaacttgaactaagtagaccatgtcacgtacgtaatcgttattctttatttccgttttgagaataaaggtatagagagaactaacacggttttgaatttatcatatataacttgatgtgatggtgaatcgtttaattatgaaaacactttatctatttcgtagttactacttttttcttttttttttttgagataagacaaatgtatgtggacaaataattatttggtggaatgagagtggtttttgactaatgttcatcaccaaataaatatacatttcaaatattaaggatatactagctagcatcatacaactacgaactagattattaaacattcacgcaagactatttttgtacatactttatacatacatacttctgctttatatatattgtgagttacaaagactgaccgattttcttaggtttagcagcttcaatttttctctaataattcttctgctttatatatattgtgagttacaaagactgactaaagtttatcaaaaatattcatgtgagttgccaaaccttatacatacttcttagtgacaaatgaagattcattcataattgggcttgatccactaaactagcccaataatgttttctcttttcttcattaactcttcttcaccttcgaaggaattcctctacgacaaaagaaaagcatcgtctctcgtttctcttccaatttcaagatta

SEQ ID NO: 5338 - DNA, 21670 bp, Arabidopsis lyrata
  Intron number 4 from transcript 487839 (locus 487839) deri ved from phytozome v7.0 (chr-ID scaffold_6; pos 4015821 to 4037490 reverse strand)
tacgaaactatataaaataaagtatttgcaaccttttttttggtcatctgttgttatattagaatgcataagtgtgaaacaagttacaaaattcgaaccacacctacacctgcaaacgagacagaacctcacacaaactgcaactaactctaactcctttgaacaaatcaaatagcctatacaaaagaatggatacaccacaaaagatccaaacagggacaataacaaaaattacaaaattactcaaacagaggctaaaactctctcatcctcaaagtatttgcaaccttcaaaaatatttctcatgttcacgacgagaaaaaggaatttgtagtatgttctgttgtttattagagcatgattattagtagtatcttagaaatacattttagcaatatttaagtaatatatgtataaaagtgattgttaagagatagtatttttgagttaagatttttgtattattaatggtaggttcttaaaatgtggttcttagaaaaaaaaattaacatagaataaagtttataattatagaaaatttaataatggttgcaaattaaaaaaattaaaacatacatgagatacaatgtataacataaataacagaaagcataaatattttaaacttaatttctggaatattttgtccatatatgctcttagctaagaaatgttccttagccaaggaacgtttcttaaagttaaagcacaaagttgattaaattatattgctttaaatgttaagaaaagcttaagatttctataagagcttgcctttaatcatgctcttagaatcataattagatgcagcctataattaagagtataaatgatcattgtcaagatattaaaaaagattctctctagatatttgtcaaacaaattaaatttacatatatttaattaaaaaataaatcttaagaattaatatcagtggcattacattgtaaataactgtaaactccagaatttatttcaaattaaaaatgcctctgaaaatgtatacatactagattttaccccgctgtacaccgcatgtccattttttaactaaaaaattaaattttatattatattttttaatattttttattttgttaagtgtttaagattgtataactgtttttttattgttaattttaggatttcatatgtaatattaatactgtcccgtattaatatcgatcaaacccgtcccattatataaccccgtcccgtgaaattagatatcatttttttatttttaataatattttatttaatagacatataatttaagtcaatttaaaattttgattttatatatatatttttaaattttagttaataatatttaattctatataataatttctgaattaattgcgtatgatcgacggtcaagattgaagattaaaacccggattaagatttgaatggccatgattaaatgtagggattgttaagatcttttaaagaaattgaattgaatatggatgtaattgtggcaaggattagttttgcttaatatattaggttaagatttttgaaaatgattttttatgttaatatctttgatttaattttaaaaatctaaataattaatgtcaatggcatttgatcgtaaataaattagcattccatgatttattttataaatgtctccaaaaatgtatatatagactagattttaccctgcggtaagtcgattttttaactaaaaaattaaattttaaattaattttttaatattatttattttattaagtgtttaagattgtataattgtattttgattgttaattttaagatttcatccgtgatattaatatcgtcccgtattaatatcgatccaaatccgtcccactatataacctcgtcccgtgaaattaaacattattttgttatttttaataatattttattttatagacatataatttgaatcaatttaaaagtttgattttatatatatatatatatatatatatatttaaatattagttaataataatcaattctatataaggatttctgaattaattgcgaatgaccgacgaccaaaattgaagattaaaaaccagattaagatttgaatggctacgattaaatgtagggattgttgagatcttttaggaaatcgaattgaatatggatgtaattgtgtcaaggattagttatgcttaatatattaggttaagatttttggaaatgattttttatgttaatatatttgatttaattttaaaaatctaaataattaatgtcgatggcatttgatcgtaaataagttggaacttcagaatttatttaataaatatctccaaaaatgtatatatagattttccattattttagattttagttactttattaatacaagatcttaaaacaattttattgtcttgtataggtagatagatgtaactagagtatacaagtagattttcaacttgagtactctaccgatttaaaaaaatactctaccgtactaaaaaagaatttgaacttgagtacaagggaacaaaccctttttcacaactaggccaccacatctttggtgcaatgattcttacttcttagtccttacacatatcatatcctacatagctacgttcacaaattcaatacggaaacttatgggtttctagtgtaatttcgttattatttaatctaggtcatggacaatgagaatacatatatatatatattagtaaaactgagtattggtgatatgtctacatcgaaagggattgaaaacacatgcagctttattgtgatagttagtcgcattatacacccaaaagctatggacaaaaagctttgacaataatgaccatccactattattgatttgctatgacactatacgtatagttattacttttcttttgtacacatatctcagctttcacagagactacgtgcatgcatcggatgatgttctagccactcttatatatgtccatctatgtaacatgtacatatgtatgtattcaattatgtctctgtatataccatctatactgtcagatttccaaaagacgtaagcaccaattcgagtaagaataggaaacagtaacgtaggaaagtcagagattatttggcttgacatgtacaatttatctacttgtgtgctgtaatttgtctaagtcgtttataattctacggctaaatagtttgcggacaatagtactgtaatgcataggcaattgtataagtaaatatcattaaagtttatgtacatactccaaatatttcaagcattattattgtaaaaaaaaatacaatatcgtgattattttaatggttaattgagaaattatcgactttgacccatatgtctttccatcggaaccaaaacttctcttaagtgacacttgaaccaagagagcacgatttctcacttatttgaagagaccatgtgtatgctagtagaccaaacaccacttggtcatattctgtaacacaactagatataaattgagaagtatgagggtttcagtttcaagtttcacatctagttgttctattgttacataaatggatcatctgcaatacatcgaaattagtttatttgattacttcaaccgggttattggaagttggaacgggactaactaaatattgtcagattagagttcaagtcgacaatgcgttcgtggatgagactcatttgtccaaaaaaaaaaaaaattatcgtccctgacctaaaagatataaagtccaaatatacaaatggatatatttacgtttgtagagaaaaaatatcatccattagaaatgcacaaaatcatttaaaaaaaaaaaaaaaaagaagcgttatcgcattaattatcatggattggaaacacaactacaaaatctgctgctacaaacgatataacaaatttgtctcgtaccagcaaataaatatacagagcgttcgtaatcagggccaaaggacatgcacgaagaggaacacgacttgacccaaaataacaataaaacaaaataagacgtccaactttccagagtttgcctttgccactacgagcaagaataaaagtaataaattcgtggttttgaagcggtttaacttggttaggttgattcgtctatatatactggtgaaaagtacgtcccagacagatttgaattgataatttagtttcacttggaccccatgaggctatgtgtcaaagtgtcagtagacaagtacacaaagtgagacaaatctagatacatcaaagtatcaaacactttcaaattcgtcgcattatatccacatatttaactattttactaaatatgtgtcacatacaatttacaaataatagttaaatatagtttttactctgtcatgcaccgtctccaaatgtaatgtaaacttttaaattataaatattatatacatatatagattgaagaacatgggaaataaaagagaaggagctagaaactatagctatttcagtaactaccaaacattggcataacatatactttcacaaagattttcatacgaacaaatctctttattgttagatcgatattttaatataattctcaaacaagacggaatgtacgtcagtacgtagataccgaaaacccgttattatattaaaacgcagagacaacgttaaataaaacttctttcttaattaacatatttgcttttacaaagatagttacaacttactagactgctggaaacaaatttgtcacctcttttcttgttcatcttttttttttcttacgaaaacaaaataagattaacctaagggggcatattaagacattgccctatcctttaccaattacaacgttccaagataaattaattaggcatgtacatattcattatacattcaccaatatgtccactggcatttcgaacattgtcattcgtttattatattatcctttcacattcttggctgcatttgtttccattccaccaatcttcgcaagaaatccatcacctgttcatttcgtatttaggagattgaagttagctcgagtagaaaccattaacagcttaatacatggataggtatattagtatattgttacacatatatactattaattaatcattatatatttagacttgcctcggatggatcttgcaaagaatacgaagcatcggtatccttgggaaactgtttatttcaatcatgaagatgtgatgaaccggcttacggtcctgagagggaagtgcatgccatcacaatatgcgtaacaacgcttttaaactgaggcaaaatctgtaatcttagggcgcgggctaaacttatgcattttatatcgatatatattcatcaggagctatagaaatggattcgtttggaatgacttagcagagaacgatgtgatttacccttcggactgtgctgagtatgtcttgaaaggatctgaaatcaccggtaaagttgttaagataatcgaaaatcatacaaatttgaaatttgtggttttgcaagggagtttttttttatcttcttgtttctaaattttttttcagacaaatttcaagaagtacatgtgaaccgaccattgtctggttctattgaagaaactccaaaaagtcgacttctcaggtcaaaactcaaacctcaaaacagaacgacgtcgtttgatgactcagagctctacgtcgaagaagacggagagtacgaactttacgaagagaaaacgagttatacatcttccacgacgccgaaatctcgctgttctcgaggcttatcgacggagacaatcgaatccaccgaacaaaaaccgatcttggtcaagaaagaacaagatttgcaagtacgttctcacttgtccgagttgactcgttccaacccggtggtgaagccttgtcgactcgacgtttcgacgcgggtcgaggacggagatccggtggaacccggatcgggtcgtgggtcgatgtggctccagatgatatcgtgcgggcacatcgccgccaccaagtactgcgcaccgagcgtgatgaatccgagacaaaaagaagagaatcttcgaaaaggagttttatgcaagaacattgtgaagaagactgtcgtcgatgacgaacgtgagatgataaggttcatgtcggagaatccaaggttcgggaatcctcaggcggaggagaaagagtatttcagcggaagcatcgtcgagtcggtgagtcaagaacgagtcacggctgaaccatcgttgagacgatccaactcgttcaacgaggaacggttagtagtacacacagagtcaactcaaattacaaaaattgtgatctgactaaatatttggacagatcaaagattatggagatggctaaggagacgatcaagaaggaagaagaaagatcgatcgtgaaggtgaaatgtataccgagaacgtgtttaatgtcatcatcgaagcaaatcaagaaataaaaaagagtctaatactatagagtaacgaatgattatggactagtatttttactgctacagacagaagcagtaaataaatggtaatgaattttaacgactgcatgttgttgttttactatggggaatatatttcctccactttaattgaccagttgtttaaagagaagtggaaatggcaaaatccgtattattcgagttgcaaaaccgtaaattcaatctaattgtatgggaatatatctttgtcgttttcgaagattgaaagttgaaaacttgaaactataatattagaattaaacattgatatataaattaaaactccaaaacatggagatgccttgaaaaagagatttttttttttttttttttttgctttgaagaaaagataatgggcttgacatatccagaatagggaaaggaggtaatgggatgattggatataaatcatatgcccattcacccatcgattcgaagaagtacttttcgtattaagtttttattaaaaatacgatattgttgtgaactgtgtctttcattaatagtataaggaatatatatataaggataatagcaggatacagagaataaggtaaaaccctaatgggctattggccggttatggagtccatccatatggtttataacactcccccttggaagacataaccgtgcccgatactaaaccgggatctctataatgcgctggggaatattgtctcattaaaaccttaccaggaaaactcagtgggacaaaaccatggtgaaggaaaaagagtacaacacgcattactccccctgatttgagtatcactgtagatccttaagtccgcgcatcccgatctgatgaatgagcttccggaacgttgaagtcggcaatgatttggtgaataagtcggctgaattctcacttgactggatctgttgaactttgacctgaccgtccttctgtaattcatgagtgaagaagaacttgggcagaatatgcttcgttcgatccctcttagtgtagccatccttgagttgagcaatacaagatgcgttgtcttcaaatatgatggtctttgatgtagtagtagatgcgccttaaggaaggctgcctacgtacccttggaaaggatcaagccacacatagttcctattcattgatcataccataatctgatcttatgaatatcctgcattagtaaatcaaactaaaccaaagcaaactggaccttctttggttagatcagtatagaataaacccaagtaaataacgcaggaagaatagactttaaaacttaatcaaaccttcctttaaacctttccagtgcctttgggttgatcatgaactaaatttagacaggagactcacggcaaaacaaatgtttggtctagtgtgtctagccaaattcattagaactcctatggcactgaggtatggcatttccggactgaatggatcactatccaatttgaggcttctcaccaccattgggcctggtcaatgggcgggcctggtccttattaaatttccttgaatactctttcagtgtatgccatttgatgcacaaggattccattattcacgtactcaggttgtaatcccaaacagaacttaattattgcctaggtctttcatttgagattctttctttagatatactcaactgtttgggcgattatccagaggtttaaatcattcatatacactgctatgattacaaatcctttgtttgcaaacttcttgataaaaatacatggactgatcggatcgtttttatagccttctctgatgagatattcgcttaaccggttataccacatacgtccgctttgtttcagtccatataaggatttgtccagccttatgcagtgctgttctcgaaaatctttcttatctttgagctcaataccctctggtaatctcatatattatccagtggacttatataaatatgcaggcattacatccattagccgcaaatctttctcttttatatagccagacttagcaaaaatttaaatgtcttagcatccaccttaggggagtatatctcctctatttctggtctttgtgtgaatccttgtgcgacaagccgtgtctgatatatcacgctttcactatgtttatttcacactatcacaaagactcatttgtcccactggctttacattgaatggtgtcctttgtattggaccaaacacattcttcttcttaatgattcttagctccacgttttatggtcttgtaccattttaatcaatcaggtctttgagtgcactctagtatagacgtgggctcctgatcctcattcatttcagttgctaccttgtgcgcaaatatattatcatttatgtcgacatttttttttgttccattgtattctagacatgatatagtttatagagatctctttacaccttcaggaccttgaggtttggcgtcccaaacctcattgattggtaccttagggttatgtctattagccggccatgtctatggtttcttgaaccttctcggtttcccttgcacctttctttgatttccgagggttcttatctttggaaccttttgggtctaccacgtttcttacgtgttgtagcctctgtagcaacttgattatgttccttgtgaacatcaatatgtactggtgcattacaagctggtatgtacgattttgttactctctttgggtcattataggaatcttggcaactgttttagctagcttttgcagatatatagtcttttggatctctgatggagtccgaggatcttgccatgtgaaggatgtttgattccatgtaagttctttgaccagcttgttagtctctccacctagtcttgggaaaacgattcattgagatgacaatccttgtatctggcctttggctcgagatacttaatgatggtgggagaatcatttttaacgtatattcccatccccttttgaggtcccattatttgctctctgtggtggtgctatgggtaaataggtgacacacccaaatgtctttagatgggacatatctggctcctgacctgtgagtagttgggatggtgaatatctatgctcactagatggccgaatgcgtattagttaagcagcgtgtaaaactgcatgtccccaagctgagatcagaagctgcgacctcatgagtaatagtcgagaaattagttgaattcgtttaatgagggattcagctaatccgttatgtgtatggacatgtgccacaggatgttccacacttacccccatggccatacaatagtcattaaatgcttgggaagtgaattcaccagcattatctaaacgtatggtcttaagaggaaaatctggaaaataggctcgcaatctgatgatttgggccaataacctaacaaacgcttggttcctagaagacaataggcaaacatgcgaccagcgggttgatgcatcgattaaaaccatgaagtaccgaaatgttccacaaggtggatggatcggaccacatatgtctccttgaagtcgttctagaaaatgtaaggtctctttagacactttgactggtgaaggtcgagtgataagcttcccttgtgaacaggctatgcacgtgtggtgcttagggaaaactcggttttctttaagggtgtgccctttagaactttgaattaatttacgcatcatattcgaaccgggctggccaagccggtcatgccattagtgaatttctcagtaagcccttatttgtttactttattagcctttatcatattgaccttggcatagtaaagatctatgacgcgagtatagtctctaagaccttctcatggtcttgggtgctcttagtaatatatgggaatcctttgttcccttcacccttagtttcaatgtgaaaaccattcaaacacatttctttgaaactcaacaagcccccttgagctaggtgaatatgaagcatctgaggatgcgtgcccttgggaatatgggcctgccatgggcctgcccttagcctttactaaatttagctatacccgcaatttagctaatgaaccatgtctttagatatttcgtttattgaattctcataatcatctatctcatggtcgaaatcttcttcaccatcgtgatgaactaaatgagcttcttgattcttttcaaactctcttgatagagatcaacgagatgcttaggtatcctgcacgtcttagtccaatggtttccccattactcatcagtagcaaacaagtttatttgagtgttgtggtttgggtataccgtggcctacctcgattacgaccaaagtcgggtcggtggccttaaccatatgaatggtttccttgatcatataaattatattttccacttctaccacgttcattccatttaccatgactgtggccatgatacttatctctttggacgtggttagactctttagtctctttaggctctttaggctcttcagcccaatgggcttctgataatggggtaggaccaggaggtctcatttcactatttataactcattgttttgctcagcaagtagcatatcagaatcaatgttctcatcacggtttctccaaagcctcactccttagcactctctacagaggagtcctccccaaaaacaagagtttagacttgcatatgtggtaaaaacctttttcacgatattgttgctgaggcaatatattgtttgtgtgaaaggtcgagaatgctttctctagcaagtcattctcagtaacttcctcatcacagaatctcagtattgacactattttaaatagtgctgagttatactcattcatggatttgaattcctggaatctgagattctttcgatcgaatcgggcttttgggtaatagcaccgtcctgaggtccagaggattcttaatagtgaggtactgattttgagactctcattgaggtgatggcgtatgttagtaatcgccttatatctttctcttttggtgacattgttttcttccacaatagattcaccaagcccctttttcctttaggataatctcagtgtccaaagcccattgtaaataattgtcacgagaggcattgagtgccgtgtattcataatagttgatttttgacatctataaaatatagagttaaatgagaactcatgtaatcggttagaccaagtcatgcggtatttaagaccgaaccatgcttgtcttcagcaagtgttttctacacaatcatgttatatatatatggatgaaatcaaccctagaagattgatctagtatgcaacaaaaaataaccaaacaatcggatcatactagattaggatattatgattttgcggttaagttttagggttttagcatccgcgatttatagtactagggttttttctagggtttcggttttatgtatggaactttctatttatggaatctttccttatatggaactttccatttatggaaactttctatttctcatctagaaagaaatcctaaacaaacgtgtactttagggttttggaatatttccttatgaaggggtttcctattttggttactttccattttgggaaacttgctactttagggaaccttttattttgggaaacttgctattttacgaaactttctatttctggaaactttccttatatggaaactttctatttatggtgattttatatttatgaaaactttctatttctggaaactttccttatatgggaaacttgatcttaaaccgtgacttagggtttattaaaccggtttaacctaggatttagggtttcggtttactttcggtttaacctagagtttatattaaaacattcaatctatcatgccatgcattaaacatctttccattcactaacttctcaattaattctccaatcataaatcaaatcacatgtgccaattttcatgcaaattttatcttatcaaactttaattggatcatgtatataaagcataataaataaatagcacttatcttaattggagaagataacagagacccgagatctgatacggagattggaaacagttatgtctcttagctggttgggacttcctacaaaatctcaatatatataatcctgattcctgagaaactcaaaattttgctcatggaaatatggctattacattagtaaaatgaaaaaaaatagggtttctgtaatatactgcataaaacagttcagaatcaatagcatataatccgtgcataaatcgtacaaaaatatagacaggattgataataaataatctgtgcaaaatttgtgcaaatctgcagacagaattgacaacaaataatctgtgcaaaattcgtgcagaaatacagacaaaattgataacatataatccgtgcaaaattcgtgcaaaactacagacagaatagataacagatcatctgtgcaaagttcgtgcagaaatacagacaggattgataacagataatccgtgcagaaacaaatatgaacagaaaacttatctcgatagagtttagaattttgtttgcagagacggctagagttttggttttggtttttgtgagagagatttagggtttcggaatttttaatttttagggtgaaagactatcgtgctgataacgtgttgtgaactgtgtctttcattaatagtataaggaatatatatacaaggataatagcaggatacaaagaataagataaaaccctaatgggccatggaccggttatggagtccatccatatggtttataacagatatctatttttatctgccacataattaatacagtagtaaacattcccctttgtttttcaaccaacatttttccatcgtttggaagtccatgaaaatcatttggtcagtaaatttctgtggtgatatccagtgttctttacctttgttttatgcgcaatcttaactattggtctgatttgcaggaaataaaatttgcatatgcaataagaaacgagcaaatgaatgcaaatcttgtgaatattatatactaactactaagtacaccatgaaaaaaaaaaaaaaaaaaaaaaaactactgagtacaccaacagtatagacatgtagctataatgtggcaatgataaaaaaaaaacaacctgattatgcgagggaacaaacttatgcttacaagatctatagaaactttgattttagtacacttttgtggtaaatacaatccaattgaaagtctttgtaggtttggtttggtccaatgaaattgtatgcgagttgagcaaaatagctttagttcaaaacatcagatatgtaatggtctacatcagatggtagccaaagatttgggttaaatttagaataaagatcaaagaacaaatgactgaattccttatgtgtggttgtttatgtaaaagtcttaactcgtgtcttaccaaattatgaaaaggtgttatacaatagctagcgataaagagaaccagttttaaggttttgatatgtcgacgacagagttcaaagatgatggagagtgggggtttagagctctttctacaatagttcaatccgcaggggaaggcaacgcaagagcagcaaatgcgctcgtcatgcggtacacgtggctaccttgtcttcaaaacgcaacgtttttagtcacatattttttttttcatcactctcgtttaccccaaaaaaaaaaaaaacttgcccaacgaagaaaaagtagataggcacaaaaaatagaaagaaataaaaaaaatagaaaaaaaatagaaaaaaaaaaggaaagagaaaaacgcttagtatctccggcgacttcgaacccaacctgaggatcaaattagggaataaagccctctcggagacagaagccatggggagaaaaaaactagaaatcaagcgaattgagaacaaaagtagccgacaagtcaccttctccaaacgtcgcaacggtctcatcgagaaagctcgtcagctttctgttctctgtgacgcatccgtcgctcttctcgtcgtctctgcttccggcaagctctacagcttctcctccggcgataagtacgcctcttccttatctggatttcgatttatttcccctttaatcttcagttttgtgctctttacttttctgaaaaataaaaataaaagacaaaaataaaaaaacaattaataaaccgttttttttttttccggcgaatctcttgttgtttcttggttctgtgtttgttagtgtctttttctatgaccatgagagatacatgagataacctaatttaaggaagaacaatgtcgtgatgaagataaagcttctaacttttgttcatttctctctctatatttcttataaaaaaatttctgcatggattttattattttctttggaaataatttgcatgtccttcacgatttgtttgatacgatctgatgcgtgctcgatgttgtttagtgaagtttcaagccatctgtgattgttactttgctttagagattccttaagtttttgaagagttgactaatgattaatgtctctcttttcagagtgattaaaattcattggatctctcggatttgtatgcaatgcaatgcacctacgggagatctataggattgatatggggttaatgctgaataatgtatataccacattctgcagctattgactatataagactatttgttgatcttctatgaattcctatctttgtcgtggacctattacttggtgattatctgaatccactaccttgtaacttttgttgtgaaaatcgacaatcacacaacctttgtatcttgtgtcttttgtcatagaaattgtcaataacacagccttgtttctttggtgcctctaggaaattgaaaatccctcaaaacttgtcttcatataagaaataagaacctctttggaacgtatctataatgaatcattataatcctataagttgtcaaaattgctggtgtagtgtttaattactacaaccctccaatatattaaccaagtggttgtagtcgtttggccatgttggtcaagatcgctggccgattctcacttgatgcatacttaggatttgttcaccccttatatactgaaagtttggtccagccttggaatagtcgagacacctgactagaactcctggtcttagttatgatttgataaagaaggagccttttagaacgtggaaatagttactcagtaactcatttttgcatacttagttttgacttcacaatggaactgatacctattaacaaaaaaaaaaaaaaatgaattagtggaagtgttgtcaaatttgttgggtcttgtataaggtcattatgtagtttagttttatctgtcttagtcgcttccttctatagaagatatatttatatataggtatgataggtttcctagtaatataagttagtgtaacttcaatggcagaaaactctttacttttattgcttgaatttggggtttaaatataggaaattggaacctcaccgtttctacaaacgaggaataaattgaaagtgaaaatacaaatacgaagaccggcttcctatatattcttaggagagtcttttgattatttgcaaaaaaacataaaatagaaatatgagtttgtttaagactcggtccatgtatttggagtttggattcctcatatatacttatggtcatctgcttaccgccacatcatcatgatcatgttatggctcatcaatactagcgatatcgctagaaagaaccttgtcctcaaggttcattgaaaaattcgaaaagttttctcgtatatgttgatatggtattactttgaaacaaatagctgatgtcaccgttttgacacgagcttactaatgaactcatgaagaggcttttttaaattcttttctaaaccattgtttcgtagtcccgatcaaatttcataaggaaatggatatgatagaatatagagggtaaataggttgatttataatgctattgataccacgatttgtaaagaagatatgtgttgttttgatgctaaaagttgtagtatggatcaaaaccaaaatggaagcactgatagaggttgcaattagaataatacaagttgcaaatgaattgcaagcagtcttccactgttttctatttttagggaagtgtctttcaattatttacaggaaatatgattccgtaagactcagtccatgcatttacttggaatttggcttcctcatacgtagtggacgtcagcttacttcaatgcttacttcaatgtcatcactttgtggctcatcaggtgtatatgtgtataatttcataagtatatgatttctgtaacaaacaaaaaatagatgtgtgtgtacacactctcttaagcctcaattgcttgtttccatttaagattacggctgcgtttacatgtttatattgtatcaataattataacatagaaacacaaacataaatgcatagaaacaatctggacagtagacgattatgattagggttctttgatcaacattattggtagattcttaacttgtggttcttaggaaaaaaatatattaatataaaaatataatttcaacgaaatcatatccggtttcgtttttcggtgaaatcgcgtaagagagagagggaaaaaaatgtttccgatttttttctactttatatatttactgtaggcctaatttaacccattaatcactcatacacggacacgtggctgtctcttagtttcagttttgactcttctctaagagacgtctcttaactataagcttattttctgaattaaattaaattaattaatgtctaagatctacctataaatttgttaagagcttgccgttaaggatgatcttatatacattaagttaagttaatgtatgattaaggatgattttaactagtttgactttaagttaatgaaagccagcgctatatatacattaattaatagatcacaggataacatctgcatgccttaaaatattagtattacttttctttgaggaaaaagttattttcaatctgccaaaatatatattccctccgtttttgaatagttgtcgttttagagttttttttttttttaaattagttgtcgttttaaggtaatgatgtaatttatgccaataactacccaaattaccctcattttattgaacacaaattatttgtaaataattacttatcatttttatgagattaatatagtcattgtataccttttcttaatttgtccaaatacagttaaaacgacaacttttaaaaaacagagggagtaataaatacatgtaaacccacatattgcatcggataatcaaacctcgaacaattcttggtaaattttaaagttcttttcttttcttgagagataaaaagatcatatatcagaaaaaaaacctaggttcgatccacctggtaaggaagaattggggaaaagttggaagaaattaacccaggttcgatccaccctggaaacaaaaatcatttttgtgtgggaagtctaggctttggttttggcccaagcaattcacatggtatccgggattagactaactggatacccccaagtattagtgagaaagcattctaaactcggggttagacagtgtggtagtccaacacctaggtgttggcgacgagtccacatggtagcacttcggttcgttcctccggggctgaccggatcagccgatcgaatatataaaaaaaagggtgcaaattcagatgtgccggtgcttaaacatgaatactaagattattgtttttttttaaaatgttaagaatattagtggtgttatatataatatacatgtgtaaaaattaaggtgttgtctcaaaatgtctcttctgatgccatatacatgtttcatttccagtggtcttttcaagggttagctatagtagttttgatcctaacatatatatatattttttttgtcttctctccagcctggtgaagatccttgatcgatatgggaaacaacatgctgatgatcttaaagccttggtaatacaaacattttgaatcttttcccagatggagttttataaggagtaaatttactattattagtttaccgagtgatcctaaatataaaatgaggtggtggctccagatgcatatcaaaattctcgtagcccttgtcttttaccgcttcttctgtccctttttcatgggcaggatattcagtcaaaagctctgaactatggttcacaccatgagctacttgaacttgtggaaaggttagtactaactaagactatatttgaatacaaaggaattagggttttttgtcaaactatgaatatatgcagcaagcttgtgggatcaaatgtcaataatgtgagtgtcgatactcttgttcaattggaggaacactttgagactgccctctccgtaactagagccaagaaggtaagttgattctgtaatgtctactcttttctgaattttgtttgccgtaaacaaccgtgctgcttttatttgttgcagacagaactaatgttgaagcttgttgagaacctcaaagaaaaggtcaaatatttgattccaagtttatagcacatcagatatattgttttgtgtgttgtcatttgtttctctaagtcttcttaacgagcttgcacacatctttgcaactacttcccaatgcatatgttttggattccaaaatctgaagaagttaggtttagaaacttgatcagtatttgctgaaagtgttggtctttttaaaacaggagaaattgctgaaagaagagaaccaggttttggctagccaggtaacgaaagctacatttcctatacagagtatatgcataactaggaagcacttcttgtccatgaatactacatatagacattgcacttcaagcattcactagttagcactttctcttcttcttttttggcagccactactcaacacatttctgtcttgtattctagaaaatacttctcatcaagattagggcattttggttgttggtagatttggtttatcagggtgagtgagattattactaaataagaacagaaattcgattcgggctggtccgtttgagttaggggaaatcttgattccgatttaattcggattttagaaagataggtgaatagttttaagataattttaagatagtaattttattgataaagctatctaatatatatatatatatatcagatgagaagtcaggattgttacaacaacaaaagttactgtataagttaatgattacactataatttttaagttattcttttttttttttaataaagagtaagaaattacattattgctatatcattttactaaatatataaatatatttttcggttgttggacatcgcataactaggttttggttctttttttgtgtgtaaaggtttatttaggttttggttcagtttgattctctttcaggttatatggtctggttcagtctagtttggttaaatattggtttccttgaaagttgtgtaaacgttgtctttattttaatttaatcaccctttaacgaaaaaagagtctatgaaccgattagggtttattttttttgttatggtttaggtttggtaccaataattggctcaactccaagtgtctgtctaggagtagtgctacttttttacatgctataggttagattattaactggttggtaaaagcttaggtacatgcttccaaacttaaaagcttaaacgtaaaaggcagacaaaaaaaaaaaaaaaaaaaagataaccttatgtgtttttatggttgatagaagacaaaaagaagaaagtgaatagtgattttgacctatgattatcgtacagatgaagaagaatcatcatgtgggagcagaagctgagatggagatttcacctgctggacaaatatccgacaatcttccggtgactctcccgctgcttatttagccacctttaatcggcggttgaaattaaaatccaaaacatatataattatggaaatatatatatatatatatataattattccgctgataagggcgagcgtttgtatatcttaatactctctctttggccaagagactttgtgtgtgatgaaagtagacgagatttaagtcaatattatatgtcttaagacaaaaaggttgatgaaactttgtaccttattcgtgagagaattgcatcgagatcttgcgtgtacgtgttcttctcttctctctaaaacttgtgtttgcttcactgtgaagaagcctacggcctattttgcaaagaaaacgtggctctctcagtgcgttttttttctcgtcgtaattaatttgtttttatcctaaaagcgtatggttggaatgggtttcttgggcccatgtcggtcaccttcggcccaatagattcattgttgtttacgtgaccgacctcttccatattttcttcggaccagcatcacttccgtcatccacgaagaaatcccttaatccacatttataaaataaatgataagaaatagtatgtatttagacattgcagtaaatattatacatataattcacatatattatacaaagagattcagaactgtattttatttagaacaagagtatcagacgccactgtgaacattaattaatcatctttaacgaatctgatttttactaaatataatctatatgtaaacaaccaggctacaagataagatctagagaatcgtcagtgttcaaatgcactcttacgttaagaggaaacataagcacgttctggtcagaccgaagctaaccagcagtttcatcactctctctatttgacaaactttttctttttgttccaatttttttttttcgataaagattattgttccaatatacaaaattttcattattttataacctaaagtgaactgtttgtaacgtaatgctccatcttatacgacttaggctatgaaattttgaggatttttaagtgatttttagattatacagaaaaccccttcactaataacaatctccaaaatctacaatatcgttctttcatttatggagatggctaaattatttgtacctctgatcgttgtgttactgcgacacttgccgctttggattcgagacccaccaaatacatccgcggtccgtatttatacttacgtacttattatcattagttcacattgtatacatgtaaatagcataatagtataatgatgatattcagactttgcaagtttttaccaatcctatatttttgcagaatcaatcgtggtggtttttatatttccgcaaatttaattaatcctcatagtaaataaaatcaaattaaattaaatcaaattaatgtctaaaacttcaaattttagtttacgtttaaataattttgttaaaaaaaatccaaaagtctatatttagaaatgtaattatttatcaaaaaaaaaaatcgc

SEQ ID NO: 5339 - DNA, 4316 bp, Arabidopsis lyrata
  Intron number 14 from transcript 475732 (locus 475732) der ived from phytozome v7.0 (chr-ID scaffold_2; pos 10914579 to 10918894 reverse strand)
taaatatctatctatgtattatttagtgtatgaatactattgtttaggtttcaatttttgaagtatagattcgaaaacatacattttttaagtaatgatgtatggtagattttaaaattttgaatattttactccgcagtataccgtgggtcgatttttttataactaaaatttttaactaacatataaaatttttataactaacatataaaagtttagtttatagtttagacacgtgggttatatattgaataacaaaaaaataatgcaacgatatggaatgagtcctcctatttaaaaaattgtattatatcatagtgggataaaaaagatacgatccaaaactcgatctggatctatacaatacaaaatttaaaaaaaaaaaaaagattaacgaagcctggttggcatatcaaaaagaagacattagatgagagatcctttgattagctactgttcttttaataataaggtttaatctttgattagctactgtgaactacaaaacaatttatatgggattaaaaatggttgatttaaatttaaaaaaaaaaaaaaaaaaactgaaagagttgaatgaacatttattaatcttttaccacttgaacttcataccaaaaaaaaaaaatcttttaccacttgaactgaataagttggaaaaataatttaattgattcaactaaaaagagtagaaaaatgtacaaatcataaaggaaatataaggctcaattttaaattcattcatctactaatttacagagaaatgagttgaatgatactattcgaatatagaaaattgagccttaatatttttttttttggaatgaatttgaaattttattcatcaaaaaattctttattatatacatcaagtcatcagttatgcataaaccaaagtatgaggagatcatcgtactttatactgccggagttttgaagtagacttatcttagccagtaaaaattgagccatattatttagaagcagatgcaacaaaagattgagaactttattttttggacataacactatttatttaaagacacgtttttatattatacatcccacgcataatataatatgtttcaaagaaagcaagaacacaatgatcgagattatgcaatgaatcattctatttaaaaaataattttactaaacaattatagtttagtcactcattaccaaacaatcaaaatctctatataaagaactccgttttagatgtaaattaacagtcaccataaacttatttttttcaacaagacaaaacattaaaaccaaaatggcattgcaaaagtttcctctcatggggctgcttttgctcctaaccatcgtcgtctcttcgacaatagccgtcgatgatcctgtttgcccgactacgtccaaactaagccgagcaagtttccctaacggttttttgtttggcacggctactgctgcgtttcaggtacaacatatttactaaagcatagcttaaaaaaaaaaaaaaaaaaagtatcgttaatattgtttagccatctaaatatgaatttttatataaaagttttcatgctcgaaatatgtgataaaacctatcaactaagatcattggtgcatgtgaatatttcatcaactcatcaactattttcgttatgtcattaggttgaaggtgcaattaatgaaacttgccgtggaccggctctatgggatatcttttgtaggagaaatccaggtgagtgctcgtataatctatgtttagatattaaattaaactaacttattaatatcaatgaatagtcattcactttttctttacttttaaattacagagagatgtagtggccacaacgccgatgtggccgttgatttcttccatcgttattattaatgtaactttaattcaagtttctatagccttgtccattttataggagatgttaatgaaaatttgtctcgtcttgaaaaatgtttgtaggaagatattcaactaatgaagaatctaaacacagacgcattcagactctcaatctcatggtcaagaatatttcctcgtgagtatatatatgtgctaaagatctctagtttaatttataatctgaatttggtgaatttagatttatgtgattgttgaaatatcaataactaatgaaacaactaatgttttattagatgggagaaaggagaagggagtgagtcaatctggtgtgaaattctaccatgacctcatcgatgagttcctaaaaaatggttagtatacatataaactaattacttaacaaaaaaagaagcaaaaaggtatcattatttaacatttctttctattttacattgtaaccaggcatacttccttccgtgactgtttttcattgggacactccacaagatttagaagacgaatatggcggtttcttaagccaaaacattgtgtatgtttttgtaaattaaacgaaatacattaagtttctcggacagtccaagtagaatttattaacttaatatctttttttttttgcaaaaatacagaaaagatttccgggaatatgcagattttgttttcacagaatacggtggaaaagtgaaaaactggatcactttcaacgagccatgggtcttcgctcatgcaggttacgacgtaggcaagaaggcaccaggacgttgttctcgttacgttaaaggttgcgaagaccgagatggacgatccggttatgaggcttatgtagtcagtcacaacctcctcaacgctcacgcagaagctgttgaagttttccgccaaaaggtaagttacatttgatataaatcacaattaattatcagctttcggatttgaaaatagtttgttttgtgttgtgtttatggacataggttaaaggtgggaaaatcggaatcgcacatagtccggcttggttcgaaccacatgaccttaaagattcaaatgacactccaactgtcggccgtgtacttgactttatgttgggatggtaagtatatattttgttagacaatgagttctcgtatagtatagtttcattaatttaattaatggagttctgattattatttgtaggcatctagacccaactacttttggagattatccacaaatcatgaaagaccttcttggccacagattgcctaaatttacgaatgcgcaaaaagcaaaattgaaagattcgaccgatttcgtaggacttaactactatacttcaacattttcaaaccataatgagaagcctgatccgtctacaccaagttggaagcaagattctcttgttgcctgggaacgtaagttttttttttccttacatgaaaaccaaaccaagaaactagaagaaaatatgtttgttcctcttttgaactactaattgatatgtatacattttcacttttattttttcagctaagaatgtcgatcacagcgccattggtagtcaggtaattaagcgataattaagcgtttaattaaactagtcctagtttgagattgttgtaacaactaaacattaatatacatttctccattgttttatttcagcctcttactgctgcattgcccgtctacgctaaaggttttcgaagtcttttaaagtacatcaaggataaatacgcaaacccggaaattatgattatggaaaatggtaactcgtgagatttattgttatatttgtgtgtttatttaggtttagagtaatatatattgatcttaatgttgtttttctaggatatggagacaaactaagggacaaagattcggttgaggttggtactgctgatcataacaggaaatattatcttcagaggcatcttctggctatgaacgaggctatttggtaagcattttattatttgttatttgatagactaacaattctattgaatgatctaactaagaacatttaatttgtgtatgcgcagcatcgacaaggtgagagttacgggatactttgtatggtcattgttggataactttgaatggcaagatggtgagagttacgggatactttgtatggtcattgttggataactttggataatagattcggactctattacgtcgatttcaaaaataacctcacacgttatgagaaagaatcagccaagtattacaaagatttcctcgctcaaggtgttcgtccatccgcgatcaagagagatgagctttaagttatattttgaggatttggttttatgttcaatgtttgttttctatgttttagtttgtgattggaccatgattcatgaagatcttggttaataataataaaagtattttgttttccttcagtctctagcatattttacaagatcaaaattgctttaattttaacaacattatcctt

SEQ ID NO: 5340 - DNA, 19140 bp, Arabidopsis lyrata
  Intron number 7 from transcript 486427 (locus 486427) deri ved from phytozome v7.0 (chr-ID scaffold_5; pos 19413265 t o 19432404 reverse strand)
ggcctaatccggccaaactcgcaaacttccccgaggtaagttaacaacggcttgtcattgagctgtaattatcaaatttagatatgtcaaatgagtaataccttttcatgtcttgtgtttttttcttcttagtgcgatgttttcatctacttctcttgtgcccgaactgctcttctagatagcaaagagttcatgtcccctgtcattactccattcgaagccaatcttgcttttagcaggtacagagagaaattattataatgcgaaaatcgttatagtttttgtattcgatccacgagttcctgaattggtgtctttagtgtttctggttccacagagggagtgaatggacaggtgcatacctaatgcatttccaagatgtgatcaactctgtaaaatcggaatcagaagcacgtagcgggcaagaggagccacggttctccttctttcagggtggttacgtagaagatcacaaaacaaacggtatcatagaattgggatacattgttcagtcaacaaaagccttttttgttgattccatgagtttgagaaacagtgtgctacttgatgcagatcaagctaagaatggagaagaagacacaggagagacaatggcattggtacaaaccgcagagaaagcattgcaattgaaaggaaatgatcataactctcagtaaacaaaccgctgtgaaatctggaccccgagtatttcctcagccgagcttatcgcggtttggagataaatagtgagaaaactttgccggagccttatacagttgggagaagcgggaaggcgtctggatacaagcacgagtagtaactccaagaagttcagtttgattacaacgaaagatttgtgctatgtcagaagctgttttactggcttcctatgagattgttattatattaaattaaataaattactctttaacttttctgtttttatttcatcgtatattaaaatgaggtatttgatattttaatttagtagatttatggaagcagtcataagatgtctctctttatttccattcctttaatcttgtagattgctatgtaaaaagtaatgaagtttctacttgtcctctgtatatgggaacccaaatccaagattaagaaaccatctctcggagagactagagaggattggaataaacagaagaaatagtccttggcctataatgggcgattttaatgagctgctaagcaatacggtcacaaaacacagatgataaccggaagaacaagatgaaaataactcaaacacgatcaaggaaatccgaaacagaaatcacatataaaaggaaccttaaaccattttgataaccataggtccataactaagagaaagcattgaatttatgtatatctaggaagagctctacttcttgaacacttcttaagagaccagacacgaaccagtcctacactttcaagaagtacctaataaacctatacgttaactaaaatctaaagtaataactaaagcataactattacccgatcaaatttctcttcttcagagatcagaaatcagagccctctccattaatcaatttagaccagtaccagccagcatctccacttcgaagaagaatagggttagcatcttgttctgctgcaacaaagactgtaactcctctcgacttcaacgtagcaaccgtagttgcaaaatcgggatcactcgataggacgagcatattagctggcgtgccaacatccatgcgatagaagaacatggactgaaccaccaacgcatcagctaaatccattttacccttataacgactaccatactgatctgagaacgaacaaaaaaagagagaataatattagagagagagagagagagagagagagaaaatcaaactatatttcaaaactgttgttaaagatttactaccttccggttcatgagattctatgactttaccacaacccctacgggtacatgtacgagctcttctttccacatggcaaagtttgaatccataatttttcataacagcaatctcatgatggtcaaaaagtctgaaatttccatatccgagtagaccaatgcaaaagtagtcttgattacgtgttttaagggcagctccaatgatatagtattacacgtgtgggttggcacgtgcggattcaagtggcaaaataagaagagtctggcatcaacgcgtggcaagtggtgattggcaaatcgtagatggccgttagagactatatgagcactgtttagctcatcgttttcattatcaaacaatttgtgatttctttgaattctttggtaaacttgtatggctaggtttctctcttctcgagagctagcattttgatcatttggtgtttcatgaacgtcgaatcgatcgtttgtattctggatttaagtaatcggagatttgaaattgtgtttatcagaatctattgtgtttatcagaatcgtgagttttactgtatcaaaggtatcagagctgcgtcgtttctcggaaaatggtgcttagaaggtctcaggatggtgaatcgaaaggaaaagaggaggaagtggaagatccgatggcggcgcgtatgtcgcggttggaggagctggtgaaggaacaaaatcagaagttttatagaactctttcagagatgattgaagcatcaaacagatttaagagagttagatgatccaattgctgagttaaagcagttaaaagagatgaacggtattgttgagtatcacaaaaagtttgagttgcttagcacaagagtgaatctgagagaagatgacttagttagagtttatttggatggtttacaaatagatactcgagtgaatgttcaaatgtttcagcctcaaacgattcagcaatgtttctcaattggaagtttatatgagtatgcacatcctcgaagcaacattgataacgttgggagccttccacttaagagggatagtgaactgaaagctgaggaggataacgaagaagacgaaattgaggttgaaatggaatcgattggcttagaagacaatttagtacatggagcattattggaggaagaatcaactccacatgtatcaattgctaattctgagattttgaggagtaatgaacttagggaagccaatttacggtttgaaaatattgacaatgtggtgatgaatgagaatctggagcatgaatggattcaaaagaacattcataagatatttgaggttcacagtgatgttgagaagagtcataatgtgataagtaacaccaaaaattgttgtgcacaccaagtgtttggtaaaaggtctcaggctaaagacagactgacattgaagaaaaggagaaaaggtttgaagtcttggatgtttaaatataaacaagagaataagagactatggaggctgcgcaatcatgtgttctcctttccaaaattgtgtgatcgtaggattgataggcctcgaacaacaaggaaggtaaagttgtttggtggaattgaaattgtctatatcaagaattttttgagcttagtcgttgttggagaagttcatgaagcaccagagatcaataagtcgtttcgacataaagaaaaaatgggaacaaagaagaaaacaaaaagggtcaaatcttggatgttcaaattcagaaaaaagaagactgatgcaggtcatggagaacaatctgtgtatgatcggattataatggagagcagcgagttgtatacagataacaaaggagcagtggaagattgcttagaccattgccaatcgcaggtactgatgaaagaagaaccagaatctgtgaacttaaatgcagtgaagttagagatgcatagttgtaatttgaaacaagacttgattcaagccaagatgatggtgacaaagaagaatttgctctgtaacggtgaatctgtctatgttcttgaggaattatcatctgcaattttggagaaaaagcaatccctattatattgtggaagtgattgtgttgccttccaatctgatggcgttttcaagttctggaaattcacaggttttgatataattctactaggaagaaaagggttggcaaagagacgacagaaaacgttttacaagtttaggagattgaagttcaaacatcgagtagtactaagagatttcaagtctggttttgaaatcaatgctaacagatgtttggagacttatctccggtgtatgtgccatgctagaccgcagttgtggagtaaatggcttgctttggcagagtattggtataacaccaattaccactcttccagcaggatgacaccatttgaaattgtttatggacaggcccctccaattcatttgccatatctaccgggagagtctaaagttgctgtgatagcttgttctctacaagggagagaagacatgattctgttcttgaagttccatttgatgagggcacaacaccgtatgaagcagtttgcggatcaacaaagaactgaacgtgattttgctattggtgactatgtttatgtcaagcttcagccgtacagacagcagtcggtggttctgcgggttaatcagaagctttctccaaagtactttggtccttacaagattattgatcgctgtggtgaagtggcgtacaaattggctttaccagctcagtctcagattcatccggtcttccatgtgtctcaattgaaggttcttgttggtaatgttcctacttcgactcggttaccctctgttcttaatactctgcagaggcttcctgagcaaatccttgaacgtaagatggtgaaccgtcagggccgagcagcaacaaaggtgcttgtgaaatggagtaatgaacctatagaggaagcaacttgggaatttctttttgatcttcagaggaaatttccccagtttgatgcgtagaaccttgaggtcaaggttgtttgaagagggggagatttgatatagtattacacgtgtgggttggcacgtgcggattcaagtggcaaaataagaagagtctggaatcaacgcgtggcaggtggtgattggcagatcgtagatggccgttagagactatatgagcactgtttagctcatcgttttcattatcaaacaatttgtgatttctttgaattctttggtaaacttgtatggctaggtttctctcttctcgagagctagcattttgatcatttggtgtttcatgaacgtcgaatcgatcgtttgtattctggatttaagtaatcggagatttgaaattgtgtttatcagaatctattgtgtttatcagaatcgtgagttttactgtatcatccaatccttcttttaaaattgtttaccgcataaccctcaggcaactttgtcgtaccaatatcccagaaaccaaaaaacccaaactttcggtgagtttctttcatctcaaactctggaagtagtacagttcacagcctacttgaagcctcattaatgccttcatgaaatctttctaacgagttaggaggcctcctagtcgaacgggaaggacgagcagaataagggttgtcgagcttgttggtgcctagacaaaggggaaaagaaaaaaaataagaactatcagttcaaatcgatcgatcgattgcatcgcaacaagaatagagatcaatatcgcaacacttactttctggagacattgtttgacggaaaagagattagagttttttttggcctgggagttcgtctccgcccgtcgctgctacgtcactgtcaacaaatgtgttgaaaaccctaatttttaatgggttgggctgtaaatttgttacttttaattgggttgtaattttttttaatgctttaaatgattgtaatgggtttgggctttgtttttagcccattattcatatattttttgtaattcggttaaataaaccgaaatagaaaaaaaatcagtttaattcggaattatttttaaatcttataaccgaaccgaataatccgagtaccgattgacccgaaccgaatttaatttcggttcaattcgggaggatttttcaaaaaccgaattttctcaaaaccaaataacccgacccgaataacccgatttcaccgaactcccagacctaggtttttttggctgagtcagtttttcgcagattcgcgttttgtacagacggcgtggtttttgttgggggatttgagcttcgacctacagcccaagtctaggttttccttttagttgaaatgtagtaggccgacagaaataggaaagaaaaaggtattgagaaagtatgggcttttttttctatgtaacgaacaacaattagggttctttttgacaaagacgaaagctaaaaccggcgtcgttcggatagtatatagccactatatcctaactaattaattttagtatcaacggaaaaatcagctttttgttttcatcatattgtgctattactatttaaacccgtcatgtatttatgattgcatacgaagattgattcaaattttacatcaattgctttaaaacatatacaatcataaaagagatatgataagctcaactatcttgaggttgcttcttgacgataatcacaggacacttcactcgtttcgcacaatactcgctcacactccctactaaccccctatcaacgaaacatacaccaaaaccatatcaaataaccaattaaatcaaattattttgtgtcttataaaaagattgaacctttacctttccaagaagccatagtcatgtgtgcatatcagctccaagttttctgaactgggttgcacataacttcttatgcatctcctcttccaactgtctctctctctattaatctgcaaactaaatcacacataaaacatgaatctttccattatatcatctctacacacacaacctcgtattctacatccccaagcctgcactaatgtttcatctttcttttggaggccgtatataacgatgatttcaatcgccattcccactgcaatcaagcagatacagaaatttcatattgctgtcataacctggaaatcagaagaagaaaaaaaactcttcaccgaagagagtgtggacaccagtagctataaaaactgcttcaatttcaccttgcttgcaagttgcaccagagtacactgaggaatcgggatttttggtcaccggaagagattcacctgtgagtgctgactggagaaaagagagaactagccaatattagtcgaaagagagatagggatgcagtgaaattataaatttctaacgaggatataaactgactacatataattgaagatagtttaagttagtactgaccaaaaagtgcagatttgtcatctgtctccacaccaagcccctgaattggatcacttaaatgaatcaaaccaaatatgtatacactacacggacatggtatgtggatgaaaatagcaagcatatattgtgaggcgggcagagtaataccttctttatagccttgagctgctcatttagcacgtgacggcgttgctcaccgctaattctttcttcaattgcttttgctatggatacctataaaaaggctcagtagataagaatctgatctcattcaaacctttagcagataagtagtcccttagtgggatagacacaagaataagggaatgaagtacctgaatcttgctaatttccatttccttttttcatcaattccagtgtcaaccgtacgtttgtgaacctgggtcaatgaaaacagagtgagagattgaccaagaacggaaaatcatacacttacaacaataatgaagctacttacatccagttcttcaagaacttcttgagcttggtgcttatttacaccacatatcgcaactacacaagttgaaagacatcaactaagatacttgtaccctgagacctttttaccagcacaggtgaaagttataaagagaacatgcctgggtatatatctgaacgtgatctctccatagtgaacttgtctttagtagaaccctaagagttgaaataacttcaaaagatgttgccttgatgacatcatcgtcccatgtcaaacggattatcctgtacaaagagtgagaaatggttaaccaaacagtagtctcatattataagaggcaaatgatcaactctgacggtaagtggttcttcactcacctgtataaaggaaaattttctcccttaacaaaaagtgacttgatcaaccaaagaacacatgtgaagacgtactttcaaggctttggaactttgaaattctttcttaattgaaaattctaccaagtatgaacgctgttactctactgagttatcatctctctgctatgccaagccgcctgtgaccaacaaggataacttggtcccccttggatacttgaaatctggaaaatgggtaagtaaatcataatgctagtcatggggaaaatggccattttcaaccccaactatttgggggcgggtttttccaacccaaactaagaccccccgtcaatttctacccaaactcaaaactaatttaaattcaaaacctaaactaatgaaaattagccgatttcaacatgacagaagacggtgttagttcgggatttaacggctgctgagtcagcgatattgtggcattgacgtggcgggaaaacggccattttcaaccccaactatttggggacgggtttttccaacccaaactaagacccccgtcaatttctacccaacaatgtttatcgtttagggttacgcaagtgatggagttacgaaatagtttattgacgttacccaattgatttcagacaagtttccagatagaatgtctgtacaatgattccactgcaagaagaaagacaaaatctttagacggacacaattgttagaccaaactattcaggaacaaattttgctttttcttgctattgctacattactttcagattccggttacagtgcctgtgtattcataaagccgtttgacagaaaaggagaggatcataatataagtgagacattattagcaactctgcatcagctagtgctcagacgaatctttgctatgctcttccacttcacgttgctcgaagtcatctaccgagcttacacaaagacgtacctcttctgatgcgaccttaccaggctctgctaagagaacactgtaacctcttttattcaaataagaaagagtcttgacaaacaacttgtgttctgagaagttgtttgagatgatcatcagatttgctggatcaggattctccactgcccatagaagaatgtccaagaacatcctagcaactcttttatgctttgagtaatctaataacaacggagatctagattagattctagacctatacgtaagtaaaaacagagaataaaagactagggttttttagtcacctttgggtacggatgagattttgactccagcctcacgaaatatatctagcaagtcatccggtaacgtttcattctgaacataagctgagattgacacctcaccacgacaaccgttattctcaagagctggcttgatactctgataaatcatatcaggatacccgagtgggtaatcctcgaggtcccagaagacgcatgtggtaatcactttcacttctgcacaaaaacggagaaagcatcatcatacaatcggatcatgaatacaatcgattagaaccattaaaccattgatttactatacaatcggatcatgaatacaatcaattagatccatccaaccattgattttactatgacagattgatcgattataatttagtatgatagatcgacaagagcctgattataatcagaaacaattccgagcaagaaaaatacagataggttataatcagaaacataggtgcaagagacagagagatcttaccgtcgcgttcatccgacatgatttcgatggacaagaaaattagggtttagatcggcggatgagaggctaatgttgggcactggctatgggaggggtggctttatatattgctgcccatgagagagagatcttcggcatgttctcttttcagccgttggatctccaattatctaatttgtcggcttttgtaaattattaaaacatatcatttttttattctagatataacatctatcttaaaacaaccctctaagtcaatttcgtttgtaaatttaccctctaaatctggattatacaaatcaacctcacaatctcaaaagtcacccgcaatacagacttcccgtgataacgatgacgtggcacgcgataactctgtttgaatacataagaattttgtgcaaaaaaaaacctcaatgttatttttttttttaaacaaacctccatatcaaataaatacaggtcaaaccacaatctaaaaagtcacatgcaatatagctcttctgttgtatagatgacgtgacagtcgataactcattttaaaacatgtgtaacaggtagagattttatgactctctcaaaatataatttaatttagttatttatttaagttttaaataaaatgggtagagatgatactcttctgcatttcctcggtctcgtataaagtgctcttaaatggctcacccagaggttccattagactgtccagaggaatccgccaaggcgatccgatctctcctttcctgtttatcctgtgcacggaagccttggtggtaaagcttaaagatgccgaatggaatgggcgtattcaaggccttcagatctctcgggctagcccatccacatctcacctcttgtttgcaaacgatagtttgtttttctgcaaagccgacccgacccaaggccaagaaatcatcaacattctccgcatttacggcgaggcttcgggacaacagttaaatactgctaaatcttcgataatgtttggccatgaagtggataatgcaacccgaaataccattaagtcatctatagggatccacaaagacggtggcatgggatcttacttgggtttacctgaacaaattcacggctctaaagttcaagtcttttcctttgtgcgagacagactccagaaacgactaaacacttggtcagcaaaattcttgtccaaaggcggcaaagaagttcttataaagtctgtagcacaggcacttctgacatacgttatgtcgtgttttcttctccctaaagctattcgctcaaaactaagtagtgtcattgcgaacttttgggagaaaaccaatgaaaacagtaatggtatccactggatagcatgggataagctatgctctccttatatcgaaggaggtcttggctttagaacgcttgaagaatttaatcaagccttactagctaagcaattatggcgccttatcagatttccaaactctcttatttgttttttcgctgagtggcctacattcgcagcagagttggcctcttttcggtatcttatttgttttttcccgtcttttaagattagatttattcctcgcgagtttaattgtcggactgattgtttagccaaaaaagctcaggttcgtaacaattttttttcctatgtaagcttgtcggttcctgattggctctccttagcggagagtctctttccgataacttattacaaatggtgtttgaggaaaaaaagaagaagaaggaaacagaaaaaaattaaggaaatggtggagtgagagagaaaaaggatatagtggacacggttgaaacaatgtcttataaggctcaacagaaacggcaccgtttcatcactcatcattctacttcgtctggtttgtttttcttcaaccgcaaatccaagtcgacgaatacgattttagttattcggccagaaaggttgacaatttccggtgattaatctatggagttggaatttgaatcacagtatgagattaaccgtacggcggagttcattatcagcaaaagcttaaccatatttcaactatattatttataatatacaataattaaatgagaattttttttataacatcaatttaaaagtccaataaattataaattattatatgaaatacataaaataatattttgccccgcggtgtaccgcggattaaatcctagtaccaatacaaaaaaaattccaataaatttaaaattaaaattaatacaacaaactatttttagaagatcactaacattataaatacaatgaccaatggagttttaacttgcaaatccaacaagtactataatttccaagtttttattagtttatcccacttcttacttatgcttttgggtactaaatttcggattgaaataaaaaatataaataaatttatttgtttcaaacattgaggatggaatggttaattctttcttgttgatgtaatctactctgctgtttcactacttgatactaggtgcatgaaagtttgcagaggatacgagaaagaaagcttgttaattttattgagtggggacctgcaagcatacaggttctaacctaattgtgtatgcaaattagttattgcttttggcttgaccatggacttgcatcataatttttcgcatatcttactctcaacatagggtaatcttatataactgtatcttattcaacgaagactcttatcttggtggtgtatttgatatttcaggtcagtggtcttatgttagcaagccacactagtatcaggcacctattcagcaaatgtttgagccaatatgataagttgaggaagaagcaagtaaaacatgttgcagaataatacttacgttagattccatgtatgaagttgcggtattccaacacctaacgaacaatcgccagcttgtttccactgaaggtcctggaaagatttctgcaggaaacaaacaagtggcatgggaaaatttgcattaagaaacattcgatgtcatttcctgatataaatatcatatgggacagttttgttaagcgtttgtaaatgcttacctttgaattccaagcaaagtacaacaagttgatatacatccggttgaaggcaactgaagcgcgcatggagagccactgctgatcgattagcttgcaggcagtgcaatgacggaagtcagatgtagattcttccactgttaacaacacaagtcaaaaatcgaacgtagacatacacgcttagtaatctataatggttgcagcattgtctgagaactaccggataggagtctcagaagattttccaaaacagtacgtcgtggtatccctgtaaaattgaacgatggtttttattgctagtatatacatattggatactgtcataagctcgaaagtaattgtcacaacagagctgaatgcatgtaagagcatagagctgtaggcttacaaagtaataactatgcaatcatggaaaatgtttaaaagtaaagccatggccaattagaagatcaatactaggagtgaagattatatatccaatcatggagaataacaaacgtggttgtacctgcttcaagttcaagcctctcgatgagcatgacagtagtaatattgatcccggcaacaaagttgcggtattcagacgcagaacaatcggcagcctgtttccactgaaggtcctggaaagatttctgcaggaaacaaacaagtggcacgggaatatttgcattcagaaacattcaatgtcagtaagaaacaagtccaactcctagtcaaacatgtgaatatgctaaaataatacttacgttaaattcaatgtatgaagcgcccctggagagccattgctgacccattagcttgaaagcaatgcaattacaaaggtcaaatgcagatccgttcactgtgaacaacaacacaattcgaacaagaataaaatgcattgtaaccttaactactgacaagagaaaagagtcatgaattttgatcagcgttgtctgagaattacccgaagggaccttacgaagctgcggtattcagacacagaacagtcgctagcctgtttccactgaaggtcctggaaggatttctgcaggaaacaaacaaaaggcacgggaaaaattgcattaagaaacattcaatgtcatttcctgatataaatatcatatgggacagttttgttaagcgtttgtaaatgcttacctttgaattccaagcaaagtacaacaagttgatatacatccggttgaaggcaactgaagcgcgcatggagagccactgctgatcgattagcttgcaggcagtgcaatgacgaatgtcagatgcagattcttccactgctaacaacacaagtcaaaggtcaaatgtaggcacacaagcttagtaatctataatggttgcagcattgcctgagaactaccggaaaggagcctcagaagattgtccaaaacaatacgtcgtggtatccctgtaaaattgaagggcggaatttattgctagtttatacatattggatactgtcataagctcgaaagtaattgtcacaagatagctgaatgcatgtaagagcatagagccgtaggcttacaaagtaataactatgcaatcatggaaagtgtttaaaactaaatccatggccaattagaagatcaaaatcgggagtgaagaataactatccaatcatggagaataacaaacgtggttgtacctgcttcaagttcaagcctctcgatgagcatgaccgtagtaatattgatcccggcaacgaagttgcggtattcagacgcagaacaatcggcagcctgtttccactgaaggtcctggaaagatttctgcaggaaacaaacaagtggcacgggaatatttgcattcagaaacattcaatgtcattaagaaacaagtcgaactccaagtcaaacatgtgaataggatgctaaaataatacttacgttaaattccatgtatgaagcgcccctggagagccattgctgacccattagcttgaaagcaatgcaattacaaaggtcaaatgcagatccgttcactgcaaacaacaacacaattcgaacaagaataaaatgcattgtaaccttaactactgacaagagaaagagtaatgaattttgatcagcgttgtctgagaattacccgaagggaaccttacgaagctgcggtattcagacacagaacagtcgctagcctgtttccactgaaggtcgtggaaggatttctgcaggaaacaaacaaaaggcacaggaaaatttgcattaagaaacattcaatggcatttcctgatataaatatcatatgggacagttttgttaagcgtttgtaaatgcttacctttgaattccaagcaaagtacagcaagttgaaatacttccggttgaaggcaactgaagcgcgcatggagagccactgctgatcgattagcttgaaggcagtgcaatgacgaatgtcagatgcagattcttccactgctaacaacacaagtcaaaggtcaaatgtaggcacacaagcttagtaatctataatggttgcagcattgcctgagaactaccggaaaggagcctcagaagattgtccaaaacaatacgtcgtggtatccctgtaaaattgaaggacggaatttattgttagtatatatataggatactgtcataagctcgaaagtaattgtcacaagatagccgctcaatgcatgtaagagcatagagccgtaggcttatagagtaataactatgcaatcatggaagatgtttaaactggttgtacctgcatcaaggtcaagcatctggttgagcatgaacgtaatgctgatgccagcaacaggaaagggagattcggacgcagaacaatctccaacctcagacaaaccagatggttgagaatccgttgggctatctggtgatggttgattagaaggccgaggatctggaatgttgtctggcatctccacagtcccgggctcctggattatgatctctggaatatacggcctaaacaacagccagtatatagctcgtccatgtcccattatagagaattgagttagcctaaaaaaaccgttctgaactatcgggaaccttaagtaccaacttctcattcttacattcgctgcagcccacctagtctgtatatgcctctaaatggattgtatatgctgaggaggttcgggttcagatgcaaaaagaaacagccgctctctttcatttggaccaactgcaaggtcgaagacctctccttgctgccacggatggatgaacaaaacatgaaccggaagtataggtgctccacatggaaagttcagcagtgtgcctctgagacattttccgatgccacaagttgtgcgtgatcagtaataccgtctactattacagctgccctcgtgtcggcttcactagacactgcaaccgttttatggatccccatgcaataaggaaggaggcacctatggcaatcccaaaggtgacattgcaagtctgcccgacgaggagcaagatagggttgttccattatctgcaaaaaaaaaaaacaaaaaaaaaaacaagattcagtatctgagaatgaagtaagaaatggagatgcacataaatatgtaaggttattaggttttaagaggttaccgagttctaaaatcgattctatgataaactctacttctaccgagtcaatctacgagtctaatcgatcgattctctatggtgtgaaccgagtttcgcgagtgaacaacagtttagtttctaagtaacctgattctaatgtatcgtgtgaagaaatcgacctcaatccagcttcaaatcgcaaatcctaagaaatctaaccgattgaattaagcagcgaagaaagaacacagaaatttgtccagttaacctatattttggccggagactcaccggaaaatcgcgaaaccttgcgatggacagagcattcctttctcaacaactgcctcaagctttctctcaccgataacagagtctctgtgagtccagttaacctatattttggccagagactcaccggaaattcgcgaaaccttgcgatgaacagagcgctcctctcccaacaactgcctcaagctctctctctcctcaccgataacagtctcgctctcactctctgtaacaaacaaaaaaaaactcgtactaaaagaggtgagtagcgaagaagattctcagaaaagaaaattacccttttgcccttgttgtctctcacgaccctttagctcttgagtcgatcttttaataatttacttattcaaattcactctattaaattttgaattcgagttggctaaattaatttaattgacattgttacgaaaacagattatatatactagtatttaattatatttcataagtaaccaaaaatttatctgctataaatttaaacatattcaaaagtaatcaaaaatgtatatatagatttcgttccccgagggataaaacgatgtcgctttaccttaaccgataaatatgcttaaaccgggtttggtaaataaggaaaccagtgattcgccggtgtgtttgaatttttgatagtccccataaggctcaaccgaaacggcaccgtttcatcgatcatctggtttgtttcgtctccagccgcaatttatccaagtcgaaatacgattttagttattcggccggaaaggttgacaatttccggtgattaatctatggagttggaatttgaatcaaagtttgagattaattgtacagcggagttcattatcagcaaaagcttcaccagaattgctttacaggtaccaaaacttttctccgtgactccagtttctgaatggagaagtttgattttgtttcttagctaaaattgttaatttaatgaatatggagatgataaagcttagttttttctttgtcttgtttctgtgatagttcccggatgagttgttaaaggattcgactaaggtcgtgagtgctcttaagagcaaaactcgtttgcttactgacagagaagtcaggttctttgtaatggctgacacaacttatggtagttgctgcattgatgaagttggagctttgcatattgatgctgaatgtgttgttcattacggtcaaacatgtctaagcccgtgagtcgtaaacccttttcttgatttatgtaattgctgtaaattcccttgttgaaacaatgtcttgttgtgaggttttatgttttcgcaggacatcggttcttccagcattcttcgttttcggaaaagcttcgataaacgtctccagctgcgttaagcatttggagcctattatgtatatgaggctagtttatctttatgaagtacatattgataaacatgttctgttttctcaatctttgctttgttttcagattctttatggtctacaatacacgcatgtgattccccatatccaagaagaaataggattatcgaagactgagtctcagttgaagttatctgtagccaatgtcttgtgttcattcattagtccatccaaagatcctagataatccatggagcatccgagatcatatagcgaaagtgattctagtgatagcttatcctcatctaggagttatagactaggagggctaacttgggacttgccagaaggaagcaaaatcgaggactatttacttttctggataggttctgacagttcagcttttgccaatgtagtactgaccttcaatggttgtgacataggtatatggctttatccatggatatttcttgatctagttcttggttatgtcaatcgtttttgagtaacttgctactgtccatttttcttaaacaaatatccaatggatcgacatagacatgaatagcttatcttcttgtttatgtttgtttgttgatcttagtcagatatgatgctgaagaagattctttggtgatggaattttatcagcaaagaaggatacttaagcgacggtataatcacttgtttcatgcagacattgtacatcacaatatgaaactttgtcaatcctttcgatcttctttattatctctgtggatttacatttcaagtcctcattcagagttatgtgttgcagatattacttggtggaaaaagctaaggatgcaaatattataggtattttggtggggactcttggtgttggtaagttcctattcttttgcatttgtgatgtcaagattgataagttcattaaatgtctaatgtcacctggcaatatatgcagctggttaccttcatatgattcaccatatgcaagcactcatatctgcagctggcaaaaaatcttacattcttgccatgggacggcctaatccggccaaactcgcaaacttccccgaggtaagttaacaacggcttgtccttgagctttgattatcaaagtaagatatgtcaaatgagtaataccttttcatgtcttatgtttttttgcttagtgcg

SEQ ID NO: 5341 - DNA, 20570 bp, Arabidopsis lyrata
  Intron number 1 from transcript 471447 (locus 471447) deri ved from phytozome v7.0 (chr-ID scaffold_1; pos 5356571 to 5377140 reverse strand)
gaagaagaagaagaagaagaagtgaattatatcataacattaatattttaaaattggtaagaaatatttttcaataattaagataatgtggtacattttgcaagatttccatgtgcaaacttaaaagataattacaatgaaaatatttgttttaaaaaaattggttgataaatcatataaaattaggtagagataatgattaaatatttttacgaatattgtttcctaaaatttccaaatatatttagtttattttatatttcatcccttgttgctagatttttattcttattgtatcttttttttttaatgttaaaatatcgaatcttaaaccaaaaccagcagaatttgcccaaagaaaaaaaaaaaccaaaaccagcagaattgttttaaggctttatttggtttgactaaaaaaccggaactggataatttaaccgacttttctttcttaaggcctactaggatcggatctgcggtccaccgcagaaaaatattgatttacgtacgtcgattttaatattgtgcatgtttttaatagaacgaatcgtgtagtgtacttataaatattcttaataacaaattgtaaagaaaatattaaattgtttataattaaaccaatcatattaattatgatttacaaaaatggaattttgtgttttagaattcaaaaattagacgaatcatgggaattaaagcagtcaaaataggtccaaaaccgcgggtcgagctcaaagcatctcactattgagcagatttgggaaaatatattaaacccgcaaataagcgggccacatggattgattcgcagtgggtcatcggttttcatccgcgggttggcggatcaaccctcatgatagtatttattgataaaaatataatttattcaacatgtggtagtttaaaaacttttaataaacgaaattataatatttataaatataatgatatataagattataatctctaaattttttctaatttatttatttctttaaattttggttactctaaaattatttaaacaaaatccacggataaccccgcaaatcagcatacattcgtgcgacaggtttatgtttcatatatgctacccgcgggtcatgcggacagactaactacatgtcaaaatatattttgcctattgcaaaacaggcttaacgggatgaatcaactcgttttgacagctctaatggatatattatttagtcatacaacacaatggagtttggacataggaataatagaatatgtatcttatttgttagatgaaaaattgaaaggtgaactataatgattaaaaaataattaatatttttcatgattcacaaaatttaataaatatttatcatcttgttgaataattctaaaaatcatattcaagaaatctttataatttgaaaattaaacttctttggtaagctttaagtatgaaaataccataatttcgatttaatctaattaaattaaaattagttacatatatttcatatctatttaatttacatgaccaaaattaaaaaaaaatctatttaatttataaaatagatgggttagttgtgataaattttctagaaatctctagaagcaagtaagatatcttttaattaatgataactggctaaaataagcaaagttaatgtgatgaaaaacgttgattattatggaattagttccaaaagtatatgaacaaatatattatacgtaattaatgtataatattgtttggaatatgattttataattagttaccataagtacaatcaaattttatttgatttccataaacatttgattttagttcgatttttcattattaattcgaatttgtattccaaaaaaatttcaaagatctgatttcagaatttcgggtcaattttctgattttgacccgacctatttacatttatacttctcttagtatagagatagagattattacttttcccgtttgccgcgtaaaaaccctagagattactgcaaaacgctgccttcgaaatcgacgttataaccctaaattccacttttccttatgaaaccctaatttcaatcggtgaaaaatgacgaccagcaggaagaagacaagaaagcttagaggacacgtatctgctggacatggtcgtgtcggaaagcaccgtaagtatcccggaggtcgtggttgtagttttactcttgacagagataaagaagagaaatactcaaactttcatattattatctcatagaaaaaccctagtacaagctctcacttttatatagacaggaagaactatctagatctttgatgaggtgtcaggtgacagctatgactctagatccaatagagatgcgaatctatttgagagtagcattggatgagctgtctctgtcgtcttcttcccattgctttggcgtgagcttgctctgctttcagtcaacattaccgttggaactttgactgactgaagattggactgctcttgggctttgttgttgtgagctggcccagttgatgatgaggctttaacattcccccgcaaactcgaggtgggtggatagttaactccgagtttgaatctgaggtcaaagaagctggcttgtggcagaggctttgtaaatatgtcagcgagttgcagtgtcccaggaatgtgcttgatgaccagtgttcctttagctaccatctctcttgaatagtgaaagtgagtggcaaagtgtttacttcttgtatgcagaaccgggtttgctgctaagtagactgcagaaagattgtcacaataaatttcaggaggtttctcttgtggcagtcctatttcttgaaccagagcagtgagccaagacacttctgcagcagtatctgagaggattctgtattcagcttcagttgaagatcttgctactgaatcctgccgttttgcagaccaggatatgatgttagacccgagaaacgtgcaaaaacctccagtagacctccttgtttctttgcaacccgcatgatcactgtcactatatgctcgaagagttgaatcagtttctgaagtgagcatcagtcccatctttactgttcctttcaagtatctgagaactcttttcaagagattgaaatctgacactgatggtttatgcatcttctgacaaacgaagtttactgcatattgaatatcaggtcttgttaaggtcaggtactgcaatttacctgccaatcttctgaaataggttggatcttcaaaaattttatcttgatgaggcagtctgtctagctgaacaggaagtggtgtaggcattggagcacagtccaacatacctgcagtttgaagaagatccagagcatatttttcttgattcatgaatagacctgttggtgtgaactgagcttgaattcccagaaaatacttgagaggacccatatctttcatcataaacttttcattcagcttacttagaagctttgaaactaggcttgaatcatttccagtaagaaccatatcatccacatacatgagcaacaacaacacactctggtcttgttgaaagatgaacaaagatggatctctttggctgcatttgaacccaaactcaatcaaatatgaactgaatttgtcgaaccaggcccttggtgcctgtttaaggccataaatggctttatgaagcaaacacacatgatctggtttctctgaatcttcaaagccaggtggttgcctcatgtaaactgtttcctgcaattccctatgtaaaaatgcattcttcacatctaactgtttaatatcccatctttcagttactgctgtgtgtaacaccattcttactgtagctgtccttactacaggactataggtttccagaaagtcaatgccttcttcctgttcatacccttttgctactaatcttgcgcagagtttatccaaagtcccatcagcatttagttttgttttgaatatccatctgcaacccaagagatttatgtctggggttctgggaaccagactccaagtgttggtagcatgacaagtttctatctcttcttcacaagctgctatccatcccggatgacttagagcttcttgaattgattttggctcctctggtatcccttttatagtgaataagacatacctaggatttggtttatgaatcccgtgcttccctctggtgatcatgggatgtgtgggtgcagcttgagaagtatctgactgtaaatcctcagaattgacacagctttgttgttgtgattgttgttgtggtgagtggtgctcagattctgtaacctcttgatgtggtggtgtcactgtttcttgttctgtaggagtatacaccaactcttcttccactgttctgtcttgcagacactcttcaattctctgagctgtacccaatgaccatgcatgtagcagaggagtagttgcagcagacagtagattcttgtaagtatcagtatacggaaatcttgtttcatcaaagaggacatgtctactaatgtaaactcgacctgttggaggatgaagacatcgataccctttatacttctctgtatagccaaggaaaacacacagcaatgacttgggatcaaacttattttcactatacggtcttaagtatggataacacgcacacccaaagactcttagtgcagtatagactgggcgagtaccattcaaaacttcaaaaggactctgcatcttttcatgtgatgaagttggcaagagattactcaagaaatttgcagtaaagacagcatctacccagagattttgtggaagatgactgtgaaacaacattgacatacctaactccattatatgtctatgctttctttctgcaagtccattttgttgaggagtatgagggcatgaaatgaagtgttgaataccacagactttgaagtgatcctgtagtggtctattgataaattctcctccaccatcactttgaaaaatcttgattttgtgattaaactgattttccacaagtgtttgaaagctcttaaaaacttcaaaaacatcagatttcaactttagagggaataaccaacaaaatcttgagtaattgtctatgaatacaatgtaaaatctgaaaccctgaactgaagcgactggtgcaggaccccaaacatcacaatgtatcctctcaagtggttggcttgcttgaaactctgatcttgaaaaaggtagcttgcatgtctttcccaactgacacgcttcacacattgacttagtagtcttattgaatgaaatagcattaactgaagataggtgttgcataacttgatgatgaggatgccccaatctcttgtgccaaattacatcactggtagtctgttgtctggatgaatagaacgccaagaattgaggattctccaacttatacaagcctttaattttgcttccctgacttagaacttgatttgtcactttgtccttaacacacacagattcagagtcaaactcaaacttacagggataatcatctgtcaacttagacactgacaataaagattttgctatttctggacatactaacacatccttaagaggtaaagtgccagtgatacctgttgatccaacatgagtgataggcaaaaagtcaccattccccactatgacagcttctgttccatcatatggctgactaacattcagatttgcaggagtattcgtgatgtggtgagttgctgctgagtcaggataccagcctcctccaggatactgaggtgaatcattcagtttcatagccgccattgcttgaggaaaggtctctacttcagtctgaaaattttcatcgaacctcttatagcacttataagcagcatgaccgtattttccgcatatctggcaagttggacgttgatcattggctccataattgtttttgttgcttccttgaccaaattgttgcggaaagcctcggccttgagtggtataggagctgcgacctcgtgaaccacccctgttttgacctcttcctctaccagagtagcctccttagcagtatagaaagctttgtgtgagttttcttccatagtagtatagaaggcttgatgaggattcacttctggtggagtttcatacttctgcagcttgtcatcaaagttggtgagcttgtaaagcacatcttcgaaactaggacttgttggaagatccatcgattcctcaataactgtgactatagactcatattccctaccaacaccagacaagacaccatagattttctcttgttcagaaataggagcaccaatcgagtctagttgatcacagagtgctttgatttctgacaagtactgagccagagatctggttcctttagtggtagtctgaatcttcctctgaatgtcaagttttctagtagctgaaacccggttatacttcttagcgagataaaaccatacctcctgcgaagaatcgagaccgtagacacttttgagagtgtcttcagacagagatccaaagatccacgccataatgagttgatcggtctgcatccatttgagaaactctggattgttggcctctgtgacttgttctccatttctgacaaccaccgtaggaggaggacgagccaaagcacctgtgacatagcccagaagcaactgactgttgagaaactgctcaaactgaagtttccaagacaagtaatttgtatcatttagcttgagtgtgacacactgagaaatagaaagagtagctgtagtgacagcagaaggttgtgccgccatggctctgataccatgtagttttactcttgacagagataaagaagagaaatactcaaactttcatattattatctcatagaaaaaccctagtacaagctctcacttttatatagacaggaagaactatctagatctttgatgaggtgtcaggtgacagctatgactctagatccaatagagatgcgaatctatttgagagtagcattggatgagctgtctctgtcgtcttcttcccattgctttggcgtgagcttgctctgctttcagtcaacattaccgttggaactttgactgactgaagattggactgctcttgggctttgttgttgtgagctggcccagttgatgatgaggctttaacagtggtaacgccggaggtatgcatcatcaccgtatcctctttgacaagtatcatcctggatattttggtaaagttggtatgaggtatttccacaagctcaggaacaagttttactgcccgatcgtcaatctcgacaagctttggtcgatggttccccaggacgttaaggataaagcaacgaacgacaatgtgcctatgattgatgttactcaatttgggtattttaaggttttaggtaaaggtttcttgccggagaataaacctgttgttgtcaaggctaagcttgtgtcgaagacagctgaaaaaataattaaagaagctggtggtgctgttgtcctcactgcttagatatgtattatgtttattcaaacaatttgacgagttttaatgaatttatagatttcgtttagtcgtttatcttatgatatttgtgttgcttaaaaccgtgcttgataggttaggttttgattttaatgttgaatctttctggaatatgcatgtgttataagatcatgatcactcttgctcagcttatgtttgaaagttagatatacttttggtttttggggtttattgcttgtcttgattagtcttctcgggtcttgggacgtttgagtctatactcagcaacttctgtcgtgtccgagagattagtattccactgatttgataaatataattttcattaagactccaattctcaaaagtcaagatgtttatagataacatatcttgtcgtcagcgtttgatgacataacaagttacagcttttttttagaaagagatcagaaccaaattgcctttaaggttctcgtatacaaaaatgtgatttgaaaaactccttaacatgtcttttgagtaaaactcgttttagttcaaaagagtctctttctctgctattcctccccattctcttatcctttcctctgccattgcagcctacaaatatataattcaacagattatattaacaactgatcagtgagccagatcttgttgattcggtcttataaagtgttttggtttcttacctctttctcccaattggttttgcagatcatccaagtcaggactatcgattgaacaaaagttcccgtcatcatcccccaccaaattccctgatcaatataggtttccacaacatcaaaaactccaatctttcgtcattccttaactaatcaacaaggggtttaactttaagataaaaagctgtgaatttcattaccattactccatattcaagcttaaatcccaacaatagaccaaatgggactccgaacaagtagtagcatgctatgttcacatacgctacaaccgcttgccatcccgctcccacagccactcctgcgtaatcaaaatttatcataataacacatcatcagatcaaactcgatacaaactaacatataattaagtgtcataaaccattataatatccaatcggttttaagttggaagtttatgtacaactatattatattggagtccactaacaaatattaccagacaatacgggttgaacattgttgatgacaatgcagaaggcaagcattggcgtgagttctctaaccacatttctaacgacttcatcttccacaaacaaaaccgggtactcgtttcggaagaatagtaggccagccgctataaccatcccgatcgttgtcgataatatcaccgccacaactagagaaaacttagccgttcttgggtggctagctccaagctcatttgacactctcacactgccaacaaaaatgtattattagcttggcacttgtgagatgtgtaaattttgtaaagagttagtttccacacgcttgaatttaccttactgctgcgtttgtcccaactgaaaccatagctgcccatcccaaaatgttcatgcttcacattccacacaccattaaggacaacaaataattagatgatgctttgcaaatttgcaataatggaagtactcaatattttgaatttttaatacattattataaaaccctatactatctttaaaagttaaaacggtccgtcacactaggcaggccagcaacatagattaaaaatctttgaaagatttaaatatattatcgactattaggcttttcttgccacaaaagacaaaataagagactactacgcacgttgggtctagtcttattcagagaatctctatgattatataaataaatgaatcaaataagaaatcatgtaaaccttaaatgttgtgaagatgttaattaatttaagagaagtgtctatcttaagagataataaattttaccatatggagagtgcagctacggagacttcagcattcttcaaatatccggcaaataatacgagtgccataaaataccaaatctccaaactacaatagtaaataaattatatttaaaatatgaattaaggggattatattggatcaaaagaaaaatgtttgcactcaccagagcatgacagcagaagccaaagacaatttaacaaacccccacaaattgtgaaaagcctcccacgtaaatccagaccaagcctctccacacgtaccattaaagatatacacaagttgtgccacaacgatgaaccaccacgacgtgttaagcactaaagctaaaccaggaagtccccaatggaacttagacatgactagccacgtgaggaaactatggatcacaagaaccacaccggagattcctgccataaccatgatcttgctttgcgattgcaaaaactttgccgatggaaagttgatagcgtatgcaaagatttgtgggatcatgtaaatggagaatatccctgccgtggccgagattgcagcggtttgacctataaaggttaggattggagccgcaaagatatagattagagaaaggaagagagcggttatgcttagaataacccacgagcgttgtaagtaaacgccgagcattgatactttccctgctccaaacgcttgtccgcatagcgtttccaacgcacttcccattccaagctaatggcaccatacataaaaatcaaagccgtaagaacttttaaattttgcatataaactatagtaatcgattacactagttttttatatagtacggctaatatacaacaaatgataggttgttatatagattgtaacttttttcatcgttaagttcatagatcgattgtaaattcttaaaactttgaaatttaatttaaaagtataataactaatttagtctagtcgataaagagatgcgatatttttttttatatatgattgtaataaaactatgtatatcacaatatttgaaggattttccagcatctgtgcagtaaattaaataattgttggtccttaaacatgcaaaagatttgtcaatatactatatatataaaaaaataggatgggaaaaatgtggtcaggggagatatatcaatgtaaaacgtaccatgataccaaaggagaagccggcaatgacggagttctcaatggagacggcggcaagagcaatagtgctaatatgtccggcgaaaacttgagtgacggctccgagagagtactggctcatcgatgtaaaaatggcagggcctgctagtttccatagctttttagactcaattctaaactctctgacaaagtctacgacgccggagattggagggatatcgacggcggtagaggagaaggagacaagagaagatgctctgcttccgactccaagataatccatcaatgctttttgggtcatcgggtcgagctcctcctcctcagttgacgccagaaacggatccgtgaagtcattatccttctccattctccgaccacaagagagagagagagggagagaaagagagtgcttagaggtaacaagaagaatgaaatcgaggttcttgcgatctttaggaatcaatggtttatgaattatatagaagttaatagctagagttgggtacgtcggagtgtttggaagagtggtaaaagacagctttcacacttaagtttttgttaatcagacagctttacaccagttaatcctattgacttagcgtttcacagtagaatttaatatatatgtgtgtgtctgtccattactgtataagtataactgtcatgtaaaatcaacggtgactaattttgatatttcatcgcacgactaggctaaacaatacaataaaatcaaatgcagttataattcataaatggttataagaacatgcgacaactcttcaatttgttttatatctttgaccattcagagttttgtgtcgtggactccatatggcctacttcttgctacgtgcaaagcaatcaatgtggtatattgggaaacatgataaaagattttattctaattgtctaaaggtagtaaacgaaaaagtaataggccaacaagagacataatgaaatgggaataggcccatagtggcttttgttagcccaatagctgagcgagaagattacaaagtttttcttctctctcaatctgaacatattaaagatgttgggctaaaaagatatttgatctattgaagactgtcaggtttcatggtatttgtcatataccaaaggttttttttttttttttttttttttttttttttttatctcatataaaggtggtaacggaaaaatttttgggccccccggggccttatggaaatgggattgggcccttatgggttttttttgccccataagtgggggggaaaatttccaaagtttttttttttttccatttggaaaaatttaaaaagttggggtaaaaaaaatttttatttttttaaaaccttccaggtttctgggattttttcaataaccaaagtttttttttttttttttttttttttttttttttttttttcatataccaaagttatgtcatctttcaatgaacttttgacataaagacaaaccattttgtttaaaatatcgttcgtaaagcggaattaatgaaatttttgtttgttttggccaacaaaaaattctttgttcttaatgatgtattactaaataataataagtaaatataaagttgatttcaactaatctctatatttgttttcaacacattaaatatctaatagtgaaataaaataccaagttgtaactatgtatttgtctaagttatttgatgtgaaagcgcatatgaatatcgaaacgtcgatccatagtttacattttacaaggttgaatgtgttattgtgaattatgaatctaggtttgtactattgtggtcaaatcattatcatcacgataaacaaaaagataactaaataaaaaaattatgaataccaaatgaaaatacgttggttcatttcatggtgaacaaacatttacaaaagtcttccatacaaagaaagtagtaaccagtaggttttacatagcatacacaacttatcacagaattataaataaaatcaagaaattgagttcttgaaaactcttagaaaaacaacagataagaagacaaaaacatactcaacagtccatacatataaacaaacaaaaaaaaaacccatgactttatcaagtttggggatgagttgtggctcgacctctttcgctaacgctggtttccgcgaatttttggcttgcaagatgtaagttcttctctctctcttcggagttccattcggagagataatagtcttcttcagttacatttttggaagagggtccacaaaacatacctccccattgcggaaagtaaatcaaacatattggtaacgtacatgcgattgacataatccccattagagttatacccgtctctctcgagtatgtcgatcctttgaagaatatcaactgcgttaagaccgcacctacgttgcctcccgcaccagtcattcccgatatcaccccaagagatctacataaccaaaacaaaaaacattgttggataatataacccaatcaaacaattcaataccaaaatatatgcaatgattttataccttctggaaataaaaggaacaacgccaaaggtaagtccacaagcggcttggacgaagacagagaagatgagcataacaactatagaccatgtcaaagaagaaatcatgccaagaaatgcgcataacacacctcctagtgtttgcacaatccaccaagcccacaaccttcctctcatgccaaaacgtctagccattagatcagagaaaattcctcctccaggtctagcaaaaaaattggccagtccaaaactcgctgctataatcccagctgtctgaagctttaaatggaacctatcgaagaaatattctgcgatgatgttgtcaatcgtaagctctactccaaaacaatagccatatgctaatgctgttatccatcccctatagtttctgactccattatggatcactttccccacatcatctttctccttctctccagatttatgcatagcccaataatctccatcaggaaggtccttttaaatttttttaaaaataaaaaaaattagtgacaaaataaatgtatccttttttcagttccttgtaataaacactatttagatgatttaaacagtttttgtccatatccaacgaagttcgaccatgagtaaccgactaaaagattctactacatgaaccgaaacgaaacccaaagcggtatcattagaccgatttgtcactacaaagtaaattttaccaaaaccaaaaaatctcggtcaaaaattctcaaaaccggataaattgaataaaccgaaataactgaaccggtgagtgtgattggtttgttacctgaccgaacaagagaacggcgaaagcagagagagtctgaaagaggccagggatgaagaaagcgatcctccacgccgtgaacttggtggctcccatattccgaatcaacgagaacacgatgggcatgatcagctgcgtcgcacctcctccaaggttaccccacccggcggcgattccgttagccgacccaacgacgggtccagagaacatagagctcatccagaactgtgtcgagacaaaagtggccagagagaatccggcgaagaatctcaccatgataaaccctatcggagactttatcccggaggtgaaataaacggcgggagcggtggagagggttaaagcggcggaggcgagacgtggaccgaaaagatcacatgccgtgcccatgacgatacgagcgaaaacagagccggaaacagaggcgattccggcgtttccgatatcggtggcggtgaggttaaggttttcacggatgacagggaggagaggtggagctgcgaaagtggagacgaagcagcaaaagaattgaaaccatgagagatggaaagctctcatgtgaggtttagcgagtgagaatagtcggaaagttgtggatttgttctcggcatccaccggaagtgcgaatctccggggtgcggtggtggtggtggtggttccagattctcctcctttgccttcgacctccatttttgtgatctttgtgaaggttcagagaattttagatgtttagggtttaaggaatgaggaatctaaggtttgaggttatgagtatttatagaggaggagagtgttaaggttctgacattttcatggatgtgtgtttttgtgaagcgttgatgtcatcatttttataattttttttttggatattggatgctatatttttctttttaatgcacttgtaaaaaacaatcctagaattcttatataaaggttttctgttttaatttctagattaaaaataaaatatattggtttagtatggtgtttagttttagtttagatatacaaattttattttaactgatttagagtgtaagcaccgctctttccgaagtattaagagctgggtgcggatcacggttcactcgtggcaacatcgaagatttcttcgtgtcttcttccattagagcatgctatctcctttcgtttatttttttttatttttatgggttttctgtcgcgtattgttgtttgctgcatagtttttggtcttctctgtttctttcgttttatttccgtgatttgtaaactaatttagagtgtaagcaccgctctttccgaagtattaaggactggtttcggatcgcggatcactcgtggcaacaccgaaggtttcttcgtgtctttatctgtcagtgcatgctagctcctttcgttaattttatttctatttgtggtcttctgtcgtattgatgtttgctgtataattttggtgtttctttacgttttatttccgtggtttgtaaaaagtataaatctagtataaactttaatattttgacaaaaaaaataaaaaaaatattatagtgtacgtaattcaattttaagatcgaaagattcatttaattaacatatcaatataggcaaaaaatttgtttggtttttctattttaaataaacaatccaaaattctgatttgcgcataatgatttgtgaaaatatagatcattaagatcaagttagggaaggtaagagatgaaaaaatgagtttgaaataaagaaatttcacaattaataatttttgaaagtttacaaaaactaaactcccaaagtcttaaataaataactaacaaaacaatcaatgactatgatattgtcatattcgtattgtttcaatattttttacgcgaactaaaagaaaattttgtttcatattttttaaagaaaattatatagagaaaatttaaatattttatatcagaattgatgctaaaattctaaaacaacacttatttattttcatattgcatccatgaaattaatatttgaattttttatcatcatatatataatatttgcataagatgaaataatttaattagaatcttttagttcccttttgttattgtgattgaatgtttatttgaatagcaaaaactcaaaatagtagtaacataagtattcaaactattttttgggcatactatttactttttaaaatcttataatagttatttagatatcaattaccatactttatatatatatatatatatatatatatatatatatatatatatataccctaatatttgttttcgaagtcaatacttgagactcggggatcagttgcttcttttgggctccttaaccatggcaaaggtaaagtcttcgaagcattaactttggcaaagtcttactcttttttgtttttttttttcttaaaacaaagtgttacaaaacttctcaacttgttgtttcttgtctatatcgcttgtatgaaatgatttttttcaaagaaacaaaaagagggaccaatttgatggtttgtgttcaaaaacagtttatgaatcttatcaacaagtttatgaactcaagcaaatacaaccactaatatagaattatcaatatatatgttaagtactacataagaaaagatcatacggttttttaggaactacatataaatacacgtccaaattctcatttcactgatttgatctctaactttgaaattaacatctcatatcctattagcacttaaatctgttttttttttgcttatttattttttgaaatgtatatatttcaacatacaaataattgtgtatccatcaaaatgaatacaattatatataacagaaatatatacacaaatcatggtttttaaagatataactgaatatcattatgattaaattttagtaggtttatatgtatgtcatctttataaaattcaaaatacatcttgaattttataactatttctctataatttttgaaaattcacacagttaattgaatgtaaaaaaaagacaacctaagacaaaatcatatctaaaaattctcatttttcaaggaacatttaacataaaacgactactcattgatatcataaattttgttttttctcttttaaaaatatcactatatgcattgtgaaagagattaaaacgtaatgtttaagttggatagacatcgaattcgatgaaaggataaactcgaaaaatacgattttctttttgttttgaaaatatttataatctccatatattcctctctttttttttgttgctatttataatgtttacctcatactttgagtaaaaacaaaatttatgatatcaatgagtcgttttatgttaaatgtgccttgaaaaatgaatttttttagatatgatttcatcttagattgtctttttttacgttcagttaattgtgtgaatttccaaagattattaagaaagaattataaaattcaagatgatttttgaattttataaagatgacatgcatataaacctattaaaatttaaccataatgatgatattcatacactttcagttatattcttaaaaaccatgatttatgtatctatttctattaaatataattgtattcattttgatagattcacaattatttgtgaattttcaattattgtatatacatcaccacctcctaaaataaatcagcaaaaaatatttcagtgttaatactttaaaataggatgtgagatgttaatttcaaagttttggatcaaataagtgaaatgagaatttggtaagtgtgttatataattcttttcatatattgttcttagcatatttcgaaattaattgttttatttccttaaagttcaaaaactttgataagattcatgaccaccgtttctttaaacacaaaccatcagaatattaaaatagttaagccgtttatttggactaatcaacgattcaaatggtttgattaaacttgaggaatattctgtaggtccctaaaaatgcggacttttgttaatgtgtggaatcttattagcatctccttctcctctggacctcgttggaatcctatgaaagtacttgtttaacttgggagatagattctctctttcttttgacatttcaacatttgaaaaaccaaaaaaacaatttactcttgtataccaaatatgacatcagtgaaacctcatcaagattatgatgaactctcttctttctctcaaaaacagttgagaatatagacaataaatttgaaagacatgttatttttgatcttacctttgtttccattgacaagaattttcttccgaagctttctatatttggtaaactttatataagcgaaagcatctacttattaatttttttttttttttttgttacggaaaccacaaaacagaatcgcacatactagtcctcaaaatgaatatcatgatgataaaactgaatatctgatactcttgctgtgattaactattgttgaaatcagagtgattttttggtttgtttattaggtacacttataaaatcttggattctttatttaaaaaaactcctaacctgaatgtacggacggtactttggcgatggtgaaaagagtttacttctttcaaaacgattttagtattcacatattgcatgattaatgatgcttggatcaattatatactattatttctcagctgcatattccaaaagtcgtctaaattattttttaaatcaactatctgaatctctcaatagagtataaaaacaagttatccaaaataaaattgcaatttgaataattattaaaatcataaacaagacctggctgcacgattgaactaggaaagatgaatatttcatttttttaaatatataatctcgtattacacacttaactttttttaggaaagatgaatattttctcagtattagacacttaacaagattgacaatatagtagtgatatagacatgaatcaagccatggattcttattggtcaaacagaatgtggactattcttattcgacatgaaattaattctttaccactggttttagatactttctccacggcatgttctactgatggagctaggcctgggcattcggatttcaaatcggattcggatcggatatattcggattcagataattcgggtatgagagtttattatccgttcggattttatgaatttttggttcggttttggttcggatatattcggattcggataatttgggtaggagaatttattatccgttcggattttatgagtcatcggttcggtttcggttcggataggtgtcggattcggatcggtttttgggaaaaaaaacttaaaaatagttcaatgttaataaaaattggtttaatctcactaaaatttaattaaattttgcaaaaatatgtataattttaacaaatataactaaaatttttccgaagtctaggatatttaggatatttttgttatttgctataaaattacaactaaatataactaatatttttggatatataatttttatttccggttttcggatatcctttcggtttttggttcggatcggatacggttcgggtaattcggataggagaattcattatccgttcggattttgtgactattcggttcggattcggttccgaatttttcggatcggtttcggatcggttttcggatttcgggttttatgcccaggcctagatggagcccgcaaggccggtctggttggcatacgaagaatttagtgtcgacttttttttggttataaaattcttgcacatcgtacatacaaagagaatatatataaacctttttttttttagtagaatgtttaagagattgattaattatgattgtatttataaagtttttaatgaagcaaatatatatagtaacattacatctatgtggatgttaaaatccagttgtgatggacttaaactatgaaaaagagatcaggaacaaagtttctttgattaacacaaaatcaaactagaatggacaaagaaaaagatcgagagatgttgaaagattgttcttgttgacttaagataaggctgactgaattacactttgaagaacaaaaaaaagaagctccaaaaaagttgtagtcgtgtagttggaaaaagagttgtccatgtctcgactcttctccctcctctccttacatagcttttttggttgtctattaatgtcatagtgtaatgcatctagctcgatatccataattaatctcgacatatagtactgagaattaaccatgatgtcgatatgattatttgataacacagtatgctcggtgtgaactcccaagtgtactttgcttactcttcgcttatctcactcttcttggcatttgatcggcttgttattttttatagtattaacttactaaatcaagcgactatcttggtttgggtactgaatgggtcattagagaatacaatggtccctaatgggcctttaaagcctgctatagtgttctcaaataaatgggcaacatttttatccagatgcttttttttttttttgaactaattgtttcttggttgaatagttaaattttacactatattataattaattttaagctttatccaatttttttttgtgatttttatgaaccaaaatcaaacagctaaaagtgtttaataatataaaataaataatttctcgtatttaatttatagttcttaaagttttaatagatgttttaaagtcacttttttttttttctttttaaatttaactgaaatatcgaatcgaatccagcacagggagaaaaagaacagaaactgattggattcttaaaaaataattaaattaaaaaaaaatagagtggaagaagaagagagaaagagag

SEQ ID NO: 5342 - DNA, 25060 bp, Arabidopsis lyrata
  Intron number 9 from transcript 475538 (locus 475538) deri ved from phytozome v7.0 (chr-ID scaffold_2; pos 8500857 to 8525916)
cacaaatttatttttttacctagcagtctttaaatcttatgatcgcacgaggatacattttataaatttgtttggctatcttcgcagctgcatgtggatatatattatttggttgtaacttataagtcacgcggaattaactgaattcggaatttatgtggaaatatcaacgaggtttaggaagatatacgtctttgaagtgagttataagattcaaatctgattgttaattagcttatgttgttgtagctgcagctgctaagagacgatgaatcaacagatcttcatgtagaaccatcttgtcatcatttggttttatgtaacctttaattttaatcctaggtcggtgtttttgtactcagcaaatgagaaataaaaaatctgcgaacttgatagcatctttgttaactagaggcttcatgacatctcaagaataaagatattgagcatcattcttgttttgattacttttgacctctgccaccacgtgtttgtcaatttgtatttttattgtttgaatttgttagtaaatttaatggaagtcaagtagttaaaaaggccatgagagaaatcatgcatctcagtgagagcatcaagaaagcttccatttgacaaagctcttgttctgaaatttgatccatcttttctagcatctttggatctgcgatctcatccatgtgtcggtcttcctttaattttgacagccaattttgaagacgtcttctcatcttactctcaaattcataatcagtaccataatcttcaccttcaccttgttctttttcttcttctttttcttctagataaaaatccaaaaagctttccgttccggttagaatatttagtatcataaacattccaatggcaaagacatcggtttcctccgagactacgccatttctcatgtatttatcgtccaagtaattatatgttcccactactttgtcaacctcgacaaatgtttctccttctggaatcgagacgcaacaagagaaatcactcagcttcacgaccccatcttcatccaaaaatatattcccaagagacatactcgtatgtacgaagggccttgggaacgcagtgtggaggtaagctaaagcagtagtgatatcttccgctaacttcattctccttttccacgtctgttcacttaaatttagtttgtaatgtctctttacaccatgataaaccattactggattttcagactcaagacaacatccaaccaatttcaaaaagtttttgtgaccgctcacaatcgatgaaactgctatgtcgcggcacaaatgtccctgtcgatagttatataagccatcgtcagctttcttgatgagtattttgtggtggttctcgttcttacctgaataccatttgcagtcaaaatcagataattcgtaaacataattcgactcactgaaattgtcggtggctttgcggatttcatcagtagagaagagttttatgggattggatttgccatcgcaacatttgatgagatcttctaataatattgcccctctcttgtgctctatatcggactttggcttcttcttcctcccccaacccatctcaagagtcaagaccaaaggattgacgacctcacactgagttgataacgaagattaagtactaatttgttgctgaatattccataccgcgtcatgggcagaaagagtggggtggacgggctaatcaactctcgtattatgggccgggctatttgaacctaaccacaagcgaagctcatatctatattattgacttagaccatctctagtgtttcaccaaatttcttccaataaaataaaatgaaaaacatttaaataatattattttagtcaattttgtatagaaacgtttctcatttgagacaccatgagaaactctctctttcttccactgtcacttttttattagtttagttttctttgtaacaaatcaaatactctatagtttataacattaactaaatactttatatgtttgttattttttaatttaacttttttaaaaaattataaaataaaattatctatatatcaagctccattatgtataactttaaattatataataatattattttaaattggtgttagttaagcttaatacaaaatattaaattaattttttttaattaatacaataatattatattataaatttaaattaaaaaattataatttatattttgcaataatttttagattaatatataattgtgatttcagatatatgtatttaaaatttaatcatcaacaactaaaagccgacttagttgagcatatatggcaaaagtttgacgcatcatcaagtgaagagtaaaacttatattatctattttggttttgtatgtttttatttgcattttaatttatgttatcatggttttatatgtaattttatgtttaatttatatatctttaatatggttttatatgtagtttaaagttcaatttatgtttaattgtggttttaaaaataatagtctctttaatatattatttataattaatagtactattaattgttgttttaaacattattaatattcattatattatttacttctataaataaatataattatttagtttgaatgactacatttaagatataatttgatatgtttcaaaatattattgaaaaattaaatttaatataaaaatataaatattatattgatgagacatctatagagatatcttaccaatgtaaatagaattttagtgtgagtttctctaaaattaaacataaaatattaatactatattggtgagacatccatagagatatctcaccaatggaagtagaattttagtgtgagtttgtctaaaattaaacataaaatattaatattatattggtgagacaccctatgagtgtctcaccattggagatgctcttaactcatcataattccgaaaccctaagtagacaagagagtatattaagttattaagtcttaactcttaagggacacaaagctctcttgattttgattttgcgttaagttctttcgatctagcttccagacattagtactgagaaatttggttatctcttacctcatgattttctcattaaatttcagtttttctgtgccttttcgtttgatcatagtttcacattctctagcagtctagctgtttaagtgttgttgtatgtgattttatatgaaaaacatgtgtgtgatttttggttatatgatttgaacatttatatattctcaagttgttgcggtttatgattcaaaatgaaaaccctcggataactttgtaaaatcaaggccggagtctctgatctactcttttgctagaaaccaaatttggtttctagctagaaacactctaatgagcttgagatttggatatcttaatgatgccataggcctttgatcgagggagcatttcgtttcatatttccagaattcctcaagagtatatttatgttgtcacaatttttttttttggtaacaatgtaaagtatttataccattttcaaatttgcgatagctattaaagagataacaaaggagattgaaagagactaaatacatggagattgaaagacctaaaactacaactaaagacatacgaatacaagagaaaacacggcaaggaaaaacacaagcaaaaatccagaatgggctcgaagaagaaacaccaatcctgaaccgcgaagttcggacatttgcgaaattgccgcagctcgaaagaagaaacaccatttgggctcgaagaagaaacaccaatcatgaatcatcattgttgccacgtgcaaatctttcctaaagcaagtcctcaaaacctctagaaagactgcctacagcttctccgaaaactaacgcaaaaacgggaacgctagagaacctttctgtacccggcggcacgagagcatcaacggatggccagagagaaaagaagaaagcacgtttactccaccctcaagagagtaatcctacctcatgttgtcacaatttctctgcaaaagtcctgatttctacttcttttcattatatgttctcgtacatagctgatttgattactcctctttaaatgttatacggttttttatcatttggtacagaacttacaatctcttaccttattgattcacagaacttacactaatgatacatgtgactttttttcctgatcttttcaaagttattgccagagctccacaagaaggaaacatgtgaagctgtaactataattgagacacacctcgctccaatggttgttgttggtgttgttgggtatgtgaagacacctcgaggtctgcgttctataagcactgtttgggctcaacatctgagcgaagaagtgaggaggaggttctacaagaactgggccaagtcaaagaagaaggctttcattaaatactcaaagaaacatgaaactgatcaatgtgcaggaaggtgccaacatcttggcagttagttcgatactgtgtttatctcgggtagtttacttatcctttcttgccttcggtctagattctgatgtactgataagttatgaatgcagatgatgtaattgttggaacttattttgattggttgcgccggactactttttcgggtaactttcaaagttgaagttcgtttgaatgagaaatggaggtccgaagtggctagcttggatagcttgaaatttgactaaaggatcaaatgtcgcacttcggaagttaaaggagaaatccaaaccaggcatgtgtgccgagccatgttgtatcgtgttgagccggaccgggtttgagattttgagatttgggaaatgggcttataacccaaatgataattgttaattacccaatgtgtaagttgattaagtcaacaattatctcctttaatgtgaattataaattgtgtaacaacaaaaattaattcacaacaattaaaggtgatggagtcaatggcattgatgttgagaattcattctcataacaataacattctcacctttattgctccattatagtgttgagagcttggactataaaaccaaggcttcatctctccatttttatctcatggacatatggatcaaaaagatcacaatctccttcttcttctcttctctagttatcgagtctgagagtacacacattactagagttcgttaggcttctgattttgagtgttgcaaatcagaagatggtgcggttgtatcctgggattctgattgcgtcaagccgtcacactacgggcaattaaagaattaaggaaagagtgtctcgcctccgcacaaaccgttctttgtttaacaaatattggtttcggttgttgtaatttatttctggttttatcattatctattgcaattattcagttttgccatgtcgtagaaatcgtggtcttacagtcttaattctttaaattttcgttattatactaacgaaaaaactgattaattgtgaagttttgataagaacaggttctttcatcgatcgattcaatctcgtttggatgtgttatcaggatcgattacaaattggtggattgagaaccctggaaaaaatccagaatttattttgaatttctgcaatttattttatttattttgctgattttttgggttaactaatctgctttatgcaatatatatatataggttatattgcttgcaggtggcgttttatggttctgaaatttgttgtctttaacaaaaattcggagcagttcattgttattattgagcgaaatttgatttgtttgaccgatttagaaagttccggtttggctcttaattaccaagcatgatttgtttttgtttttggacacgttctcttccagtttttgggaagtatattgtgttaattgttagcacttagcaggtctcgacactgtttgtttatcattgttgtttatttgtgttgtccattggtgataattggaacaaaaacgttagtgatcttacttagtcatcgttatgcaaattttaatcaatgattgcaatttattctagtagtttaaattgtattattgtggtttttgcattaataattaaattgttaatttctgaattttctaaatttgagaatttttaatttaattataatttgtaatttattcatatttgtttaaattacttgatctttaatttctggtttttttgtttagtatactaatttgttgaacagattcgattttgagtatgactaaggaaaaaaatcccagattttattgacggttagaacgatggtacaccgctcattgatgaaaccatggaagcgaattttatgatgatgagtcttgtgagtcgataccccatgttgggagtggtcaaccacatatgattttgtcgattatttagactagatttttgatgtttatctgaatgtctagatccaatttataccgtttgcggtggagttgttattgcttatgagtctagtgagtcgacacaccaaatttagtttggtagtggtcaaccacttgtgattgtgccatgttctgatgttgatcagattttaagatcagttcttggcgcttttagtgcaagattgatgcttaataaaaggtcaaaaaaaaaaaaaagatgttgccaagagtggcttgtgggtcacaagattgacgaatgtcgtagcgatgctaacgaatggcgtagtaaaaattgacccatgataatccaaaaccaatatgattgaaacatgcatatgcgttgtagtttctgaaatcaatatggttgggatgaatctcttaaagagatgttgaatacaatgttggaggatctgggttactccaggaaatgtgggggaagcgttgcttaccacaaataatatcctcaacaagaagctacataagttcttggcgagttcatagctttagataattctaaagaagctatgtagcctctgaactttttgggtaaaaaaaaatcaagtgcattgtgatagtcgaccggctaaagcttaggcactgagtttttctttttgggtaatggttagtcatttcttttaagaagatgatgtaaaaccattagaaaactgatctcaattttgtgtaatctcgatagattatatcaaattgaatgacaacctattggattcatttattaaaggtgtgtcatgaggtcaagttgtaaatcatcaagaggaatgggtttaaagcctatgacttatgaggaggtttgatggtaaccccacctacgtgactggagatcccaagatgtaggttcaaggggaaaactaaatcaaactgaatctgttaagcgcactgtgagactctagtctcttcccagttcctaggatgatgaacagtgcttcctgtatgtacagaggataagcgttgcttttaatgatttgagtccatagctttgggatagaagggagtattgcaggatacttcttaaaacaaagctaacatggcaaatcaccttatgagtgtgaaatggggccgtttctaggagaatatatgaggctatattttccaagttcactcatgattaaccaggcatgttcagggccaaaatgaacacaacaagagaacctagttctgtgagaaaatgaagctgtgacatagctgttgtctaggtttacactaaagcccgggtggttcaagacatcatgttcaccacctggccgagtaaatccgacagatattaaaatgagtggttcaatgctgaaaaatgctaccatctcagatacagtggattttttcgttgttactctcaaaagtccttctgtcgagtcttgtctagttaggtcaagtcttttgagtcgtcatatgtttagagtcatttctattcatgtgggagattgttggaacttattttgattagttgcgccggactactttttcgggtaactttcaaagttgaagttcgtttgaatgagaaatggaggtccgaagtggctagtgatactaggatttttgctatcaattaccctaatatactttcatgtcattgcagtataagaggttatcaatccaatcaggcgctcttactatcaatcaagatatgctcagagaatactaagtcaagccaagcagaatagaggtttgttatttagcaatcctaagcgaacaagcataaagagaaataactacagaacaggagtgatcatgcataagagaaagaactatcaatactaagcagcaataaacaagcaagcaataggtacagagaataggtaaaacaatagagataaaaaggtcctgaggaatggggtaatcgattatgacagtctcttaatctacctaggtggttaacaaactcaatcaagctatccctagacaatagattcaaatacaaatcaatccactctcgtgacagagattctcaagctaaatcactttcataatcaattctcattgaagaaatataacctagcaggcattatgattcaatctaataaagtcaataagcattctaaacatccaatctcttgggctagagtatgcaaatctctggaatagtttgttcaaacatttcatcaaacaccttgtgggtgtggaaatgtctgagatcaacttccaattgatcaaagaggaaatagcattaagatctactaaaccagaagggaaatcaagcaattctacacttaaacacctaaatatactaaggattccacacctaatctaacccatcctcaagaaccctaatccactactcaagaacactgaagaacatcatgcataaaaacccagaaaacatttcaaacccagaaatcattaaaaagcaattatgttatagatgagaacgagatctacaactttgatgaagaaacaaaatccaaaaactcaaaggatcaaagggaaaaacgattacaaaactagggtttttagagagagcagcggaatatctcctgggtaaaaggaatatccgctggataatagtgtgtgcccctatttataggaataataggttgccctaatttggctacaagacaaaataagaagtcggtgggtggtccaactcgacgtgtcatcgagtccgtgtggtcgagtccgtgtccagacagcttcctgacgtcctactcgacgtgtcgtcgagtccatgtggtcgagggggagtgattcttcaaagggtgctccttgatggtgtcctactcgacctcacgtcgagttggtgtggtcgagtccaacccttggtggtttctgagcgcctgctcgacctcctgtcgagtccaaccagttttctgcatatgtctccattaaaaccaccataattcttgcatcaaagctatgattcgcttgaaatcatctccgttggaatggtaactcaatttcctataacttgtatgaagagctctgaagctaaatcgcaatgaaagacttccatctgagtcgatctttgagggacttcggactggttctgaatcatcaattctcttctttgcatccattaagtcccaaataagcttcaaatacctgaaacacatccaatatgcaatatgctatgccatgcgatgcaaatcgtactaagtgatgaaaatgttatgaaaaggactctggatgcaatgaaagagagatgaaacttagctaaatgtacgagaaaagtgtgcttaaaagtggtaaaatacagagacatcaactcccccaaacttagctcttgcttgccctcaagcaaacaaatagaactaagctggagaagaggtttgaaggtggagactcagaaccaaaaacatgcatatagggtaagtgaattcaatgtccaggttgctaattctagaatgcaaggttgactgatccctacttaaaaacattagtcatctccttcacatctcaacctaacctctgccttaatcaattcaagcattcaaatcagcacactccctttaacattgattaagcaggaaccgtgaatcatactatgcagtggatatgaacacatttggcttaagggtaaagatttagagacaaagaaggtcccttagagatctggtttaaatcgcaacagggatctctcgagaatgattgagctttagtagaatgctaaaggtgagtatccagttatacatacaaggataagaccccatctacccagaatgtaatcaatatcaacccaaatagaggtcctatttctaatcccagaatcatgaacttaactctacccttttgcactcaaagcatttacagactttactcaaatcattcctttctttcctttgctttctatcctaggagaagctttcttactgctctgtctagcggatcaggatactttaacaactagggttcccttttctttctttttataacataaggctttttaccctttctctttaagctattacagaacccttttctttcctttaacattcccaaatcctttactagacttttcttactttagctacttctcctaagaactcttttcccttttcttttctttcctttgatgaacacaaccttttctttcttttaaacacaacccaaacccagaattaagcactcacctagtcctatctggtccagataacgtgaaccagaactacatgagatactatccttgtcgttacagacctaacactttctaccaagctcaatcgaaataaggcctcacattcacacacaaatgataaatggcttgaaagaaggttaaggctaagggtggggtataactgctccaaagatgggagtcagctacttggactagcaagagtgatcaaaaggtaaaagaaagtccaagtattttaaggtacccatgagttcatagcataatgcacatcatgataattataagtcaaaattcaagttcaaatagatagggaatagcatcagatcaaagcgagattcgactaaaaacaagaaagtcaagcgttgaattcaaaagatggtgcggtcttacttcaagttcaatcgattacgcattagagaactaacaacctgggcactgagttctacttagtgaataatcatatttacaaggttataatcatcataatctccaatgcaaaagcatgatgcaacagccctaagtgaaagcatactaaaacaatcctaaaatgacaatgcaagctatatgaacactctgtttttgtgaaatcattttcgaaaaatttcaaatttttatggtttctatgccttagatgcaataatgcaaaatttgaaataaaaaaacaaaacacaatgtcaaatactccctgagccctcccctaaacttaaattacacagtcctctgtgtaacaagcatttggaagagagtactcaaggcaaaccaagagagaaacaaaatgaaatgtggtatatacaatggtgaattggagttgttacctcatggatgggtgaacaaaagaggtgattgacctggtactggtgggcttcatgggctaactcgacgtctcatcgagcaggtacatcgagtagggcttcggttttggtttggagtgacaccaaggggcaagctcgacttcacgtcgaggagggcaggtcgagacaaggccactcattctgttttgcgccttggcttccttaaaactctttatcctgagacacttaagcaaaaacatcaaaaataacaaggaaataactaatatttacaaggatagacatgggacttcctcccaagtgagcttgtttaaagtctttagcttgacttctcacactgaaagagcttagggtggattgtagagagcaaatgaggtctcctctgtcacccagatggatgaatcatcaaacttagcatgctcgcttgacaaatcggcagttgagtactcaatggcccttttctcatagtaagcttcttgttgatcaactggatagtcttcttctatagaccattctgaagtgaattcactccccttttttctgaccagagtggatgcttcatcagttgggacgtccttgattgggagtggtatttggttggctatcccatggagcttcttgatttgatccttcagctctctcacagtgcctgttagctcccttatggctttatcctgccatttggacctctccttgagttctaaccagccatctggagcagaattgctagattctagcagcttatcacgatgtttggtcgagctagagttctccagacgagttgtaggcttgctcaaatgtatactcgagtcagttggttgagcatgtgttgagcttgcttcatatgccaccttaacctctgtttttgactcaaacaagtccttgaagacctctgaccctactacttccttgtgtgaatctagtgacttaccacagctcaaggtttcagtgagaagatatcctgcttcaccactcttagtcaaagaagtttgttggtgatcttcctcagcaacctcctctagctgttcatcagctaggcaatccattaccttgactacgaaggtctgtccttcaattgttggcttcctcgtggcatcattgatgtcaaacttcattttgaaatcatttcccagattaagatcaatcgtttcattcttaacatcaatgacagctccagcagtggctaagaagggccttcctaagattaaaggatcttttggttcatccatttctagcactatgaagtctgtagggatttcagcatttccaatcttaataggcaaatcttctaataacccatgaggaaatctgatagactcatcagccaggatcaaggagatgttgcaaggtttatacttgctaaaacccagtctcttggccacggagagaggcatgagacttttaaaagcacctagatcgcagaggcagttactgaaggccaaagtgcctagagagcaaggtaaattaaacgaaccaggatctcctaatttcttgggaataatcatcgtttggatgatttcactgcactcatgactctccatagccatcccttgcacttcctgaattctctccattatcatgtcctttagatacttgtgagagtctggtatcagcttataagcatcaatgagaggcatcttaacttctatctctttgatgtgcctagcaaacattgctctgtacttctcaattatatcctgcttgaaccttccaggaaatggcagtttaggtttgtacggtggtgggatgaaagctttcttcttactcttatcaacaattggttctttgatctgggggctctggacttgatcactaggtatagtctattggtctatcttagtagtgtcttctacttgaggttcatgctgaatgaaatcctccccctcttgaatctcactgtcctcagtgacaggagctatgctaggtcgagtttgcagctctcgaccactgcgaaggtgaatagcattaacatgacctttctgattctgaatagctttccctgacagttgccctggattcgtaggcgcagaagtagaagcaatttggctctccacgtacttcaacctggagtttagagcctcaaacttgatattgagatcattgaaggagcagtctactttgttgtgaatctcagctattttcttatcaagagctattgcaccagctgcttgaccttgtagaagctgctgaagcatttgtttcatctcttgatcttgtgcaggtggagcgtgctgtgtttgctgtgtataaccgggtggtggattctgttggtgaaaacctccactgaactgttgcttgggtgcaaacccttggttgtatggtatgaaaggcttggactgattctgttgttgttgagggtaaacctgatcatgagggtttgcaacattcgtgctccggtaagatagattaggatgagcatgctggtaggggtggtcgcccttgttgtaaccagcttagttctgtatgtagctgacttctgcagcgtgagtagtctccccttcttggagttgatagtgctcttcttcagtgatatagtggacttgcttctgttgagtcagcagaatcttatccaacttatcgttgagagccttgatatctttactatgcttcgcatccgaatctccaatacctttgttggagcgatcaaaatcttcattataatgactgtcagactgagctaagttctcaaccaattcccaaccttcttcaacatccttattcaagaaattcccatttgaagcagtgtccaggaccattctgaacttgggcagagctcctctgtagagtgtactgagcaaagaagctttcttgaaaccgtgatgtggacattgtgtagtgtagcctttgaatctctcccaggcctcacaaaaggattcagactgtttctgggtgaaactggagatttcattccttagccttgcagttcttgaatttgagaagaactttgtcaagaaggccgtcttacaatcgtcccaagatgttatggagtcaggaggttgtgttttctcccattggtgtgctttgtctcccagcgagaagggaaacagacgcagcttaaaaaccgtcttcactaacaccatttatcttggtgaggctgcagagcctgtcaaagttatccaagtggtctaagggatcctccataggcaacccatgaaacttgtttccttgtatcattgagatcaatccactcttgatctcgaaattgttgttctagacaggaggtggaactatgccctgtctctgttgatggtttcttggtgcatccccagcaccaatgttccttggtatcccaacgccttgattatcttgttcttgtggttccatggctactggattgtgcagttcacaaccatctctggctctacgttctttcaactcacgggctaactggttgatgttgtctttgtagctgatgaggttgctggagcctttagaacgagtttgcatacaaagtggttagtctcgacgtggcaggctcgacgtgaggtcgagttggtacctggagcacaaaaacaagcagctgaagagagtagttaggaaccaaagtaaagaaagaacttgatcttagcaattctaaaatcttgaatgtaacaagcagacacccaaatggcaacggcgccaaattgatactagagttttctctctaacaagtatcaatccctaatacacatgtcattgtagtatatcaggtttatcaatccaatctcagtgtgactgcaagcatttaagatatgcacataaagcaaataagtcaagccaattatggaagggttttgtgtgtttctattgatcctaagcaaccaatttaacatgcaaataccgaatttaaaagcataaaaagagaactaaacagcaagtaaacaagagcaagaagtgaactaaagactagaaactatcatgcataagctttggaaaagaaactaacaacctaacaatccagagaaacgatctaggcctaacaggtcgagctaagcaacaaaaactaacagaaacaagatttaaacaatcaatagagataaaaggtcctgggaatggggtaatcgattatggcagtctccttagtctatctaggtggttaacaaactcaatcaagctatccctagacaatagattcgaatacaaatcaatccactctcgtgacagagattctcaagctaaatcactttcatactcaattctcattgaagaaatataacctagcaggcattatgattcaatctaatatagtcaataagcattctaaacatccaatctcttgggctatagtatgcaaatctctggaatagtttgttcagacatttcatcaaacaccttgtgggtgtggaaatgtctgagatcaacttccaattgatcagagaggaaatagcattaatatctactaaaccagaagggaaatcaagcaattctacacttaaccacctaaatatactaaggattccacacctaatctaacccatcctcaagaaccctaatccactactcaagaacactgaagaacatcatgcataaaaacccagaaaacgtttcaaacccagaaatcattaaaaagcaagtatgttatagatgagaacgagatctacaacttttatgaagaaacgaaatccaaaaactcaaaggatcaaagggaaaaacgattacaaaactagggtttttagagagagcagcggaatatctcctgggtaaaaggaatatccgctggataatagcgtgtacccctatttataggaatactaggttgccctaatttggctacaagacaaaataagaagtcggtgggtggtccaactcgacgtgtcatcgagtccgtgtggtcgagtccgtgtccagacagcttcctgacgtcctactcgacgtgtcgtcgagtccatgtggtcgagggggagtgattcttcaaagggtgctccttgatggtgtcctactcgacctcacgtcgagttggtgtggtcgagtccaacccttggtggtttctgagcgcctgctcgacctcctgtcgagtccaaccagttttctgcatatgtctccattaaaaccaccataattcttgcatcaaagctctgattcgcttgaaatcatctccgttggaaaggtaactcaatttcttataatttgtatgaagagctctgaagctaaatcgcaatgaaagacttccatctgagtcgatctttgagggagtttggactggttctgaatcatcaattctcttctttgcatccattaagtcccaaataagctccaaatacctgaaacacatccaatatgcaatatgctatgccatgcaatgcaaatcgtactaagtgatgaaaatgttatgaaaaggactctggatgcaatgaaagagagatgaaacttagctaaatgtacgagaaaagtgtgcttaaaagtggtaaaatacagagacatcaacatcaactcccccaattttagctcttgcttgccctcaagcaaacaaatagaactaagctggagaagaggtttgaaagtggagactcagaaccaaaacatgcatatagagtaagtgaactcaatgtccaggttgctaattctagaatgcatggttgactgatctctacttaaaaacattagtcatctctttcaatctcaacctaacctctgccttaatcaattcaagcattcaaatcagcacattccctttaacattgattaagcaggaaccgtgaatcatactatgcagtggatatgaacacatttggcttaagggtaaaggtttagagacaaagacggtcccttaaagatctggtttaaatcgcaacaggggatctctcaagaatgattgagctttagtagaatgctaaaggtgagtatcaagttatgcatacaaggataaaacctcatctacccagaatgtaatcaatataaacccaaatggaggtcctatttctaatctcagaatcatgaacttaactctacccttttgcactcaaagcatttacagacttttactcacaccattcctttcttgtctttgcttttctatcctaggagaagctttcttactttgctctgcctagcggattagaatttctctaccaactagggttcccttttctttctttttataacaaaaggatttttggtctttctctttaagctattacagaacccttttctttactttaacattcctaaatcctttactagacttttcttactttagctatttctcctaagaactcttttcccttttcttttcttccagtgatgatcacaaccttttctttcttttaagaatgtcccaaacccagaattaagcacccacctagtcctatctggtccagataacgtgaaccagaactacatgagatactatccttgtcgttacagacctaacactttctaccaagctcaatcgaaataaggcctcacattcacacacaaatgataaatggcttgaaagaaggttaaggctaagggtggggaataactgctccaaagatgggagtcagatacttggactagcaagagtgatcaaaagttaaaagaaattctaagtattttaaggtatccatgagttcatagcacaatgcacagcatgataattataagtcaaaattcaagttcaaatagatagggaatggcatcagatcaaagcgagtttcgactaaaaacaagaaagtcaagcgttgaattcaaaagatggtgcggtcttacttcaagttcagtcgattatgcattagagaactaacaacctgggcactgagttctacttagtgaatatgcatatttacaaggttgcaatcatcataatctccaatgcaaatgcatgatgcgacagccctaagtgagagcatactaaaacagtcttaaaatggcaatgcgaactacatgaacactcttcttttgtgaattcattttcgaaaattttcaaatttttatggtttttctatgccttagatgcaatgatgcaaaatttgaaataagaaaacaaaacacaatgtcaaatactccctgagccctcccccaaactaaaattacacagtcctctgtgtaacaagcaactggatagtcttcttctatagaccatgctgaactgaattcactcccctttgcgctgactagagtagacgcttcatcatttgggatgtccttgatttggagtggtacttggttggctatcccatggagcttcttgatttgatcattcagctctctcacagtgcctgttagctcccttatggctttatcctgccatttggacctctccttgagttctaaccagccatctggagcagaattgctagactctagcagcttatcacgatgtttggtcgagctagagttctccagactagttgaaggcttgctcaaatgtatactcgagtcagttggttgagcatgtgttgagcttgcttcatatgccaccttaacctctgtttttgacccaatcaagcctttaaagacctctgaccctactacttccttgtgtgaatctagtgacttaccacagctcaaggtttcagtgggaagatatcctgcttcaccactcttagtcaaagaagtttgttggtgatcttcctcagcaacctcctctagctgttcatcagctaggcaatccattaccttaactacgaaggtctgtccttcaattgttggcttcctcgtggcatcattgatgtcaaacttcattttgaaatcatttccgagattaagatcaatcttcccattattaacatcaatgacagctccagcagtggctaagaagggccttcctaagattaaaggatcttttggttcatctatttctagcactatgaagtctgtagggatttcagcatatccaatcttaataggcaaatcttctaataacccatgaggaaatctgatagactcatcagccaggatcaaggagatgttgcaaggtttatacttgctgaaacccagtctcttggccacagagagaggcatgagacttttaaaagcacctagatcgcagaggcagttactgaaggctaaagtgcctagagagcaaggtagagtaaacgaactaggatctcccaatttcttgggaataatcttcgtttggatgatttcactgcactcatgactctccatcccttgcacttccttaattctctccattaccatgtctttaaagaacttgtgagaatccggaataagcatgaaagcatcaatgagaggcatccttaattcaatctccttgatgtgtttagcaaacatggctctgtacttctcaatgatatccctcttgaatcttcctgggaatggtattttgggcttgaagggtggtggaacgaaagctttcttcttactcttatcaacaactggttctttgatctgggggctctggacttgatcacgaggtacagcatcttggtcgagcttagtgatgtcatcgacttgagtttcatgctgaatgaaatcctccccctcttgaatctcactgtcctcagtgacaggtgcggggctaggtcgagtttgcagctctcgaccactgcgaaggtgaatagcattaacatgacctttttgatgctgaatagatttccctggcagttgccctggattctgaggcgcagaagtagaggcaaattggctctccatgtacttaatcctggagttcaaagcttcaaacttgatattgagatcattgaaggtgcagtctactttgttgtgaatctcagccaatttcttatcaagagctatagcaccagctgcttgaccttgtagaagctgctgaagcatttgcttcatgtcttggtcttgtgcaggtggagcttgctgggtttgctgtgcaaaaccgggtggtggattctgttggtgaaaacctccactgaactgttgctttggtgcaaacccttgattgtatggtatgaatggcttggactggttctgttgttgctgaaggtaaacctgatcctgagggtttgcaacattcgtgctccggtaagatagattaggatgagcatgctggtaggggttgtagccctttttttaaccagcttggttctgtatgtagctgacttctgcagcgtgagtagtctccccttcttggagttgatagtgctcttcttcagtgatatagtggacttgcttctgttgagtcagcagaatcttatccaacttatcgttgagagccttgatatctttactatgcttcgcatccgactctccaatacctctgttggagcgatcaaaatcttcattataatgactgtcggactgagctaagttctcaaccaattcccaaccttcttcaacatctttattcaagaaattcccatttgaagcagtgtccaggaccattctgaacttgggcagagctcctctgtagagtgtactgagcaaagaagctttcttgaaaccgtgatgtggacattgtgtagtgtagcctttgaatctctcccaggcctcacaaaaggattcagactgtttctgggtgaaactggagatttcattccttagccttgcagttcttgaatttgagaagaactttgtcaagaaggccgtcttacaatcgtcccaagatgttatggagtcaggaggtagtgtcttctcccattggtgtcctttgtctcccagcgagaagggaaacagacgcagcttgaaaccgtcttcactaacaccatttatcttggtgaggctgcagagcctgtcaaagttatccaagtggtctaagggatcctccataggcaacccatgaaacttgtttccttgtatcattgagatcaatccactcttgatctcgaaattgttgttctggacaggaggaggaactatgccctgtctctgttgatggtttcttggtgcatccccagcaccaatgttccttggtatcccaactccttgattgtcttgttcttgtggttccatggctactggattgtgcagttcacaaccgtctctggctctacgttctttcaactcacgggctaactggttgatgttgtctttgtagctgatgaggttgctggagcctttagaacgagtttgcatacaaagtggttagtctcgacgtggcaggctcgacgtgaggtcgagttggtacctggagcacaaaaacaagcagctgaagagagtagttagtaaccaaagtaaagaaagaacttgatcttagcaattctaaaatcttgaatgtaacaagcagacacccaaatggcaacggcgccaaattgatactaggatttttgctatcaattaccctaatatactttcatgtcattgcagtataagaggttatcaatccaatcaggcgctcttactatcaatcaagatatgctcagagaatactaagtcaagccaagcagaatagaggtttgttatttagcaatcctaagcgaacaagcataaagagaaataactacagaacatgagtgatcatgcataagagaaagaactatcaatactaaggagcaataaacaagcaagcaataggtacagagaataggtaaaacaatagagataaaaaggtcctgaggaatggggtaatcgattatggcagtctccttaatctacctaggtggttaacaaactcaatcaagctatccctagacaatagattcaaatacaaatcaatccactctcgtgacagagattctcaagttaaatcactttcatactcaattcacattgaagaaatataacctagcaggcattatgattcaatctaataaagtcaataagcattctaaacatccaatctcttgggctagagtatgcaaatctctaaaaaattttgttcagacatttcatcaaacaccttgtgggtgtggaaatgtctgagatcaatttccaattgatcagagaagaaatagcattaagatctactaaaccagaagggaaatcaagcaattctacacttaaccacctaaatatactaaggattccacacctaatctaacccatcctcaagaaccctaatccactactcaagaacactgaagaacatcatgcataaaaacccagaaaattgcataaacccataaatcattaaaaaacaagtacgttatagataagagagagatctacaactttgatgaagaaaagaaatgcaaaaactcaaagattcagcaggaaaaacgattacaaaaactagggtttatgagagaacagcggaatatctactgggtaaaaggaatatccgctggataaaagggtgtacccctatttataggaatactaggttgccctaatttggctacaagacaaaataagaagtcggtgggtggtccaactcgacgtgtcatcgagtccgtgtggtcgagttcgtgtccagacagcttcctgacgtcctactcgacgtgtcgtcgagtccatgtggtcgagggggagtgattcttcaaagggtgctccttgatgtcctcctactcgacctcacgtcgagttggtgtggtcgagtccaacccttggtggtttctgagcgcctgctcgacctcctgccgagtccaaccagttttctgcatatgtctccattaaaaccaccataattattgcatcaaagctctgattcgcttgacatcacctccgttggaaaggtaactcaatttcctataacttgtatgaagagctctgaagctaaatcgcaatgaaagacttccatctgagtcgatctttgagggacttcagactggctctgaatcatcaattctcttcttagcatccattaagtcccaaataagctccaaatacctgaaacacatccaatatgcaatatgctatgccatgcaatgcaaatcgtactaagtgatgaaaatgatatgaaaaggactatggatgcaatgaaagagagatggaacttagctaaatgcacgagaaaagtgtgcttaaaagcggtaaaatacagagacatcagctagcttggatagcttgaaatttgactaaaggatcaaatgtcgcacttcggaagttaaaggagaaatccaaaccaggcatgtgtgccgagccgtgttgtatcgtgttgagccggaccgggtttgagattttgagatttgggaaatgggcttataacccaaatgataattgttaattacccaatgtgtaagttgattaagtcaacaattatctcctttaatgtgaattataaattgtgtaacaacaaaaattaattcacaacaattaaaggtgatggagtcaatggcattgatgttgagaattcattctcataacaataacattctcacctttattgctccattatagtgttgagagcttggactataaaaccaaggcttcatctctccatttttatctcatggacatatggatcaaaaagatcacaatctccttcttcttctcttctctagttatcgagtctgagagtacacacattactagagttcgttaggcttctgattttgagtgttgcaaatcagaagatggtgcggttgtatcctgggattctgattgcgtcaagccgtcacactacgggcaattaaagaattaaggaaagaatgtctcgcctccgcacaaaccgttctttgtttaacaaatattggtttcggttgttgtaatttatttctggttttatcattatctattgcaattattcagttttgccatgtcgtagaaatcgtggtcttacagtaattaagttattagttttcagtttgcgaattttatcggggattgaacatattttgagtcctaatctagagtacagtattgcaaaccctctttctatattatgcttatgtattttcagcagaagtggactatctattaacgttctgtaatatatcggcagaaactttattgaggaaataccataagaggataagacatgtgagaatatggtcttaggatcattgtaaacattacataattgtgtgactttggggtgtggtttggagtgaggagtgttgggtgtctactttccatgttttgtgagtttgtttgtgtgtctctaattgactttccgcacattctaaatccctttctgtctgcttgtgccccctatatatgagggtaagcgtccttccatggaagtgtagtcttttgttttggattgattagagctaattgtttcctctaataaacaaactaggagatttgctggtctctctaagtgttcctaatagtgaaatattttccgatagaatattccaagcttgggttctattacatctcttgtctacttgaactccaaaaccttataattatgattgaagaaggtaacattttcgtaagagcttctgactttgattatctatgctatctaatctatgtttctctttttttgcttactgtagccagcaaaatggtcctgaaaagcagtgagcaggcgccaaggtaaaacaattgttgcgttttttaaatcaaatggcttaactttacatgagcctgcacatctatattctacatgtgttctatatagcatgaaattttttgtcagttcatcaagttatatcaataaacagctttgcttccaccgcttagcctaataactaatattttagcttatccttacctgactgtttcacagaactccaatattcactgaggagattctaggcggtgagaatgtagagggagaagttgaaccgccaccagagagatcattttgggcaaaatatgtgagtaatacaataaagatcttttgatgatttttattttgttttaggtcttgatgtaaatttcatatgatacgcagtggatgtatttgataccgctgggactcgtagtgatgaacgctgtgacacaagcatcaaacatggctgaagaaccaacgggtggacaagcaggaggagcacaagtgcaacaagctgccatgagaagatgattccacttaaacttctcccaaagcaatcaaaggtagaccacggcgcaattactaaacaaatttctttttttacatagcagtctttaaatctt

SEQ ID NO: 5343 - DNA, 1506 bp, Arabidopsis lyrata
  Intron number 11 from transcript 932263 (locus 932263) der ived from phytozome v7.0 (chr-ID scaffold_4; pos 1355608 t o 1357113)
aacagtattagtggctaccgatctctcatctacaggtaagagtttgatacctaaatctatttttttaagaactacctgatcaaaatattcataatcaaagacatcgagccaaaccaaattgaatcaaaccgaaattgttattatttcacttttgaaaccgaaaatatgaaaccaaaactggtttagtgaactgaataaacaagaatttattaaaattcaaaaaaaaaaaacaagaatttattaaaattcaaaaaaaagaaaagaatttattaaaattgtaggcacatccatattacgtatataccaaattaactaaatttttttgttaagtatccaataaccaaagacatcgactttacctaggtgaatagaaaacaaaccagagagaagtgagtttgtttaccctgttcactcccaaagaatagctacgtttgggccgagaatgtgactcgaaatctactggtttcaaaaccgatattacaatagaaactataagttaccactttaatgacattcattagcacttaaagcttactctatcagttcctatgtctagagaaaaccagaatcaatttatgctattacaagttttctcttttctcagtgtaaacctcaattttctcacactcactctgtaaccttaaagcacctatttataactagacaagtaggactttcttgtgcaaacgtaagtcgcttgtccaagacatgttttaacccttaataaagaccgcaagtgcaaagtacaaacgaaataatatttagggatcaaatctactgagacgaaagaaacacacaatacactatatagatttagatttagctagaacaaaataagagttataggaacttgtgtaagattttcagaaataaaataattaaaataaaataaatactaaataaattatatacaagaatattgaatctagagaaatcatcagggagctcaaataaaaataagtaattaatcatgaaagcattaagattcattattgaatttgaattacttaggtttagttatcatgctctcgcaagttattattaactacgaaagatgttttctaaagaactcaactattgtttattttaagatattctaccaagctttaagaagttaatttaataaactcacaaaacacgataatatcaacttttggtaggttaaagaaggtttacctatcgaatgatagatccaacaattcgtcaccacttatggtggcttgatgaattcaattatagacattagttaaattggcctaattcaacgaaagaattaagaacaaccaatgatagagaactagaagaacaatccataaataaaataactagattacatcatcatgaaatgaagcaaaccaaagtacaagtaaattttatttgcttgagtttctctcgaatatcgaaaaatcaaattgaaaccaataccttaatccatagtgagcattcctacctacaaattttaagagattataatttttgcgcggtttatggtgaacagtggtgatc

SEQ ID NO: 5344 - DNA, 3563 bp, Arabidopsis lyrata
  Intron number 1 from transcript 481790 (locus 481790) deri ved from phytozome v7.0 (chr-ID scaffold_4; pos 13014188 t o 13017750 reverse strand)
tcacttttcgttcatttgaagcttcgatttttctggtatggaatttttttttagtttccacgagccttattttattttttgcgtagttaacaaattttcactacaagaaatatctacattgttagcatgagagaagagctattaaatgtcattaatagcgatttcataaacgctatgttatgcccctgttatggtagacctcccatatacaatagcattttttccgaatgctattataggccgttctattatagcactaatcaattgttttaaaatactttcttgtagcatatatttagtgttgctttatattgttttataacatttttaatcgatgttttgttatattgtgtcgtaacacttattttgctattttgttatttcgatttatataatttttctattttatattttacagaatttattaaattagatttatcaataaatttatattccataaatcatcaacataaacaataacaatattacattacccaaaacaagtaatacataatattataccaattcttatactaacttacattactaataacagaaaatatagatttcaaagccgactgtggtagaaaaatcgtagctttcctagatacatccaaatggttggctcataaacgttcacgaactcaagtacacagttgttccgagagtagttccttacaaagctcttgatacccgtagactttgcaaattcttaattttcatcttcctgcagccatgaataaggtaataagcagtcaagttatctataagacatctcaatatccaacgaatcaaatataagaaatcattgaatagagacaagtacccttcgattggggtttttggtgaacacaattatctgaatgcagagacaactataagtgcactcctcataacaaatatgaaacatctaaactccatgacctcagaaatctgttcatagaagcctcacaaaaatacatgaatcacaaaccaacctctagagtaaaagctttgtgcttgaggagagataacttaaaagaggttgacgtagaggagcatccaatgagtatttcttcacagaagagctacaagcaccaaattaagtttaaaactcattactttctttcaacaaaatcagaaatccaatcatgaattgtaataaaactcagttacatatagacttgttcaatgaaactgctaaaagtcaaagacttttctctaaactatcaacaaatcaatacccatttagatatgtttaatcaaactgctaaagtcacaacctttcataaattaaggaaaagagataagaaatccaacaaaaacttaagcagaaaattacttatttctagactggggaaaaacacccatcccaaagatgcaaaagtaagatctagttggaaacatcttcacttacggtaagaaacaaaaccccatcaaagataaaccagaactctactctactcttctataggttagtgacaagaatcgtaagcacctgaaaggttcaagagcaacaccacaaaaccaaaatcaacacaaaacaattaagaaacaagccagccaataatgaggcaattcgtcgaacaccttaagggcatgaaaaggttcatcagaacatacaccactccactccggtcaaaagcttctaagaaataaatccaacccaaatcaatcaaaacctaacaaaatctaacccaaaagcttttaagaagaagaagaatttggggataagatctaaagcgacaaagagtgatagaaattgatataacccaatagatctaggggtgtacaatcaaaccaaacctgactgatgcaacgaaaacttatagctcaatggaccatctgaagttaagagataaaaccaaacctgactgaggcaacgaaaacttattctcttaaaagataaacaagttgaaagctacgagaaagaattcgacgaacctgactgaggcaaagtaagaaacggagtaggagagagccttgactgcgtcacttctagagactcctaaggttccatctctctcttcttcacaacttaccaaaagaatacaagttcaaaacaaatgtgatctcaccatatatatccaacaaacagaggatactaaccgcacatactccatttctctagcgtcaaaagattcattcaccctataacaaaggcaaaacaacaacaatcctcatttccgatgaaaccaacatatgatttttcatgtaagctgtgtttgattcaaaatccggttaatagccatggcagtagcctttttacacatataccaaaactaagacaaagtaagcttacgatttttctcaatatcaagaggtaagaattcagaacctacaccaagaagagattgattaattaatctgcataactgagaaaaacaaatagacaaagacattttcttagttcacaaatcttaccatgaaagagtagtttgtggccagagaagaagcaagagaagaaaaagaaaaagaaaccaccatacttcttctctccaggaacattattcccaaacactgcaaaattcagcccaattcaatatttgtacatgtctgagaagctttaagaagatacaaaaaataattctacttcagtactacaacaccatgacgataattcaagatacagatttggaagaatatttcacacgaattcatgaaattctgagaatcaaaaccgcaaaacaacagattcaagaaaggaaataacagaaactctatacctgagaagcgaagacctctagctcaccatgaaacaaacctcgtgacgattcagaaacaaacttggtggcctctcgatctcgatctagatccgtgtcccgattggtgttatctgtatcggaggaatcgaccatgtgaaccaagctggaggatgaaggataaggatggaatggacatgaaatgaggtcggcgaagagctttacggtggtggagtcggagttgaagagacagaggttttcgatttggggtttttttttttttatgttttatcattgagagaaaataagtttattatttgctttggctatacaccatgacacttaaaagttttagatctgaaattatttttggcgcttaagtgaaattttcaccaaaatattagcggaataagtgattttagcttctgatttggtgatgttcttacttagcgtgattttagtgctattatatcgtaatcaaaaataaaagttatctatcatagcagttacgaaaaatgagctatcctcttatgctatcaatgtagatatttcttgtagtgtttgtgggactcatcttcatgtttcatatgattattattttaatttacatgcgtataaatattgattccaatcttctattgtcatcaagatcagaagagtgattgtgtacagttttttttttttttttgttttccatcaagcttcttagtgatcatcaggttaattaattctctaatccgtgtgattgtgtatgtaaatgcatgcgtattctttataaaaatcttatgatgaatctctctctttttctttttttatggttttctaaatctcatcatgaatctgtgattagagtttattaaatttgattcaaatttgcagaaa

SEQ ID NO: 5345 - DNA, 359 bp, Arabidopsis lyrata
  Intron number 1 from transcript 482947 (locus 482947) deri ved from phytozome v7.0 (chr-ID scaffold_4; pos 19068699 t o 19069057 reverse strand)
ccgtttctaagtctgaccacaaaaggtatcgcctttcgagcttcactattgctacattgcttaactgtttgtgtttctgtttctaatttactatatttgagggatttttttttgaaattgcggtttctctctgttagtctctctgctctcgatttgctgagcaaaatgccgtctttttagatcactagttagttgggaatctaatgatcaatgattgatttcatctaatagtgagatttgttagattgcaataagctacaaaaaaaattactgagattttgttcgatttatggatggaactgaaatattcttagtagttagtactgaggaagttaatgtggttggttttatgaacaggg

SEQ ID NO: 5346 - DNA, 698 bp, Arabidopsis lyrata
  Intron number 3 from transcript 947287 (locus 947287) deri ved from phytozome v7.0 (chr-ID scaffold_7; pos 19492456 t o 19493153 reverse strand)
ttaccgttcttacagctaaatatccaggtacccatgtaagtatacaattttatatttttcattaagatatattagatattaaatcatcacccatatactacgagattttaagatatatataattattttgaaatttatattttatttaaaaccccaaaaaaaatatttttaagaaatagtgtagctaagaataaatcttatgtcaagatccattggtgcaagtggcattgccatttctgcagatctttgagcacaagagtcttattaattgggacctgatacataaagggtcttttgtctaagaggatgcacctaggcccataaatgtttttgtcaacaacaacataaagggttttactaatctctagatttggcatttgtatgatttgcacttgttctttcataattttactttttgtgtttcaaaatttaaactgattcataacttttaaaatttgcccatgaattttaaaatggtaagaatgaaaatagagaactacaaaattttacttaaattcaacattacaaaaaattgtatatgtaaaatattaaacacctatcataatctagaaaattttcacacatggttgaattcttgcaaaatgcattgaaattcatataataaggcatagccaaaacatttacatatgtaaaattaatatgcatattagtcgaattgacatttatagattgcggga

SEQ ID NO: 5347 - DNA, 35992 bp, Arabidopsis lyrata
  Intron number 15 from transcript 497092 (locus 497092) der ived from phytozome v7.0 (chr-ID scaffold_9; pos 1154097 t o 1190088 reverse strand)
aatttacatataattcgtaataaaatctgtttggtttcactttgatgaatttttgtaacacactgaacaaaacttcactagttaacttttttacatcatgacttacatattttcaatttagaaaaatattgtaaactagaattttagaaaaattaccctaaatcaaattgtttctatttatttattttttagtataactatttttttgaatttaaattaagtttattaatactagggtttattttaccatttatgaaaatgtgggagtttaaaaacccacaacaaaaattgagacggttttttctatgtttttaagaaaggtgaggctttttctacccatttttccaataataataagacaggggataaaaaatccgtctaactaaaaaacgaccatcttgatctcttccacttccagtgtatccggatcagcaaacacctttgagacaggaccatgagtcacaatcttcgaattagctctatcggttaaacgccagaagacgagtgcgacaacaatattgcgctgaccaaaactccgaaagtaagtttggctaaatcaatgaatactggagcagcatcattatcgagaatctccaactcgccaccatgtaatgaagaaaagccattatacatttcgtaagcctcagctgcggtaactagccgattatcattcagtgtcccacttgcggaaggtcaataacatcatccccagtcacttcgtctataatattaatattggtatccgtgttaccttcgcagcctgtatcttgtacacattctgtagtgtacgtacattggtacaaaccatgttgacacgtatgtcttggagtcacggttggtgtacagtcacccgaatgagaaatgttctctccgccaggtacggtaactagccgattatcattcagtgtcccacttgaggaagcgccaataccatggtcgataacatcatccccagtgactttgtctataccattaatattggcattcgtgttacctttgcagcctgtatcttgtacaaattctgtagtgtacgtacattggtacaaaccatgttgacacgtacgtcttggagtcacggttggtgtacgttcacccgaatgagaaatgttatccccgccaggtacacgttgtcttgtgtacgtacactctgccaatagacgactgaattcccctggatgttgaacagtttgttgagtgagaatgacgtcctcctcaacattccctattccatattcttctacaattacatcgttccacttgttgtaatcgtaatcttcgccactaccttcactaccgtctatagtaggatcgagggtacttccccccatagatccatggtcaccctgataatcatcatacccatcaccatcttcggtgtcctcctcctcttcatcctcatctgttttatcgtcttgtacgtcgtcttgttcatctacggcctcattatttgcatccacatttgaagccgctacgataggatttggtgtctttgcactcccacacacacggtcactttcagcatcgtcaccatcagtcctagggacattattcccgagtgccttgacggttgtaatgaaagagataaacaaattgacactaggatccccaccacgaatcaaaaagaacgtattcaggctcatttgattgataatgtagacaggagggcgtttactttctatcatgattgacatctttcccggcatccagtaactaattatgggattgcattctgtggacttcaaactgaaaacctcgtataatgtacgtacaaattccgtgtacgtcatgttttccttaacacgtacacaacgaccaaacatgccttcctctggttcaaatttccattcttcttctttgcatctccactcacccaccgtagtaaatacgggaatatccattacccacctacatcataaattcagcagaaccccattaaatgcaactgaatacatgattatatctacaaaaaacaaaaagaatttccaactacacacttataaacatatatatatttcctctgaaataaaaatttctgggtttttatataaaaaataatgttaatttcgaacacaatcaagatcctactgtgttataacaaaaaacttcttaaccaaatgcattacttacacgatcaatgcttgtcttggctccacactttgtaaatcaacaggatcaaaacttctccagcatcacattcgttcagactaatttttttgtttgatggtttatgcttatctcttacaattattcaatgaacacgtataaactaatattacaacaagtgtaatgatgagttttgcattaaatgtgacaagagtcttgtctaaactttttagccattaaatactgatgtctccttcttttttaatattattatttctccttttcactgtacagccgcacaaaacccatgaaaaaacgaaattatcttaaccaaaccggaacagtgtacctaactgaaccgcttaattgaaccgtacacggaacagtacgtcggtacgctgacaggggtaaaatggtcagattttggctaaattgtcaaaacatgaaaaccaattctcactttgccaaaccatgaaattaaaagatggtcttatgccctgccatgcaatttaccctattttttactagttttgtcaaaatatttaattttccttctcggcgtttaccaaccaaataaatagagggccaaaggtggtagatgcatgagcctctaacaccaccacaactccaacacaattaaattcgtctctctatctttctctttatctctctcttctgttcaataacaaaatccagaactacatgagaccttgttttcacttaccaccttcttagaggtatctcatttatttccttaatttctcagattttccggtctaactcttgaaccggtctctgtttttttatcacctaaagctctgattttgatacaatgggtttgtttctaatgagtttgtgtacaatgggtgtgtttagttttatcgttgttgtttctgtttctgtggagaagactaatctattctcatatttggcttcttgtgtgtgttttttttgttctcttcttgattggtcagatcgtttcctattgagtggatcaaatcccaagccttaagagcccattaacccatcttctgttgactctggtttctagatttagcttacgtttgtgagaatccataaaaaggtggccgtggtaggttttgttcttattgaggggttgacttgatttggataaaaagtcttcctttttttttattgattagtcaccaatttcccttttcatcgagaacagattcatatcttcacgtactttgatgggtttgatgagctgtttaattagacttttgaagaaactaaagtagttgttcttgtcggatctacatgttaacttttacactttatggtctcaaaacaccaaaaatatggttaatgaggctttaagttgacatattttgtgtaatcttacttaatttagacgtatggtgcttctatgtttctttgatatgtgctttgtttgtggctataggagaaaagtaaaacattcacgatatggtgagcttacgaagacgtaggctattgggtctttgttgtggtaaacaatgttcttgactaaatgatatatagtctaagattaggcataatgatcaactagttttatttctctaggaccaaatggttatgtgacgccacttccatttttaactgctgaggagatgatcactgggattccaaatcctaatgccaaatcagcttataatcccgggccagcagaaacgtttaaaacggctatagaggtacggaataaatattttgagtttatggttttgctaattgtatatcgaggttactttaacaaatgtgtaagggctaatgcaaggggattacatataaattactcacagcgtcctaaaggctcttatatactttttttccggtaaaaacattataagtttgaaaatctatgcaatgttacattaatgcgattcaagtggtctaatatatcgatcgtagtactggatatttatgttctcgtatgtcatttaatatgatcggtaagacatgaatggacgcaatatgtagtggtgatatatatcccttttgtgttactttagcagtttagactgctttagtcatattccagtgaccaacagagaggacatcagaatatatactccattctaacaattaagccttacttctttttgtttggcagaaaatggctattgaagaaaggagccgaataactcggtcgaaacatatgcatttcaggtctgattactcagatatctcaccggttaattccgattccatctcaccaaaatgtgagtagaacatatgcgactgaggactaatatcttgtttgcttactaattgattgggttgagtgagaattgaccaattatttcatattatttatctcccatttatagaccagccgccgaaacgaagaaagcagcatagaagaaagcgagtacataaccaagaaccatgtttgatgagaggagtctacttcaaaaacatgaaatggcaagccgccattaaagtcaagaagaaacaaatccacttaggcactttctcttcacaagaagaggctgctcgtttatatgataggtaaaactcttttgttgtcttttgcaatcatttgattccagaaacttcaagtaaatcattgccattgataattatcacctctattagggctgctttcatgtgtgggagggaaccaaactttgagatctcggaagaagataaacgagatcttaaacagcgaagctgggaagagttcttggattgcacacgccgaacaattacaaacaaaagtaaggttttactaacaataaaatgtagtatattttgtttgataaccttttggtggactctctggatatgcagaaccaaagattaggatagaccatgaggataaggagatcaatgcgagcatgccacatcaaccagaagaagaagagcaagactaagaccaaatgtgataaattgtgccaaagatacaaccagagtcatatacaaagaccaaatgtgataaattgtgcaaaagatacaaccagactcatatacggagataattattattcatcaaaagaatagtaatatatatatatatataaaagcatagtcgtaaaaaaaaaataacatcattcatagaagagtaaattaagagaaaaattagagactcgccattaagaatatggaaactaatagttcaactacttttatttcgaaacaatggctggaaagccactttctagggaaaaataggctggaatgccacccttctattttagtattattatatgaattagatttaaatccacaattatgaaaagaccaaaaaaccaaagccaatatctaacgtcagacccgtttcgatttatttgacccaagcccaacataataactgattatttcgatcgaaagcccattggaccaagcccaacagagagataaaaacaaaaaaaacacgaaacggtttcgttttctctcattcccgattctcttcttctccgaaaaaagagaaaaaatcctaacttctccgatttcacatcttcttctccgatttcttctccaatttcttcgatttcttctcgcttatctctgtcgcagtcgaattttgcaccgccgttgaaatttctggggaattttggcatggatcgtgttaaagacgccataggtgaatatgaatctacggcggcgaatccgagagaactagcggattcaagtaccgtggtcgaccgtacataagcaaccagagatccgagagaaccagaagatgctgaacctggaagtaaaaccgttgggatgcaaactgatccgacagaataagcagcagttgatgcttccgagagtgaacctggaaacaaaatcgtcgagttggaaaggaatgatgctgaaggacaagcagcagttgatgattccgatattcaacttggaaaagaaagtccgatagaaccgagtaccgaagcagtagaggctgcagaggaggaactcgtggatgcatcagaggaagaggaagagaccgttactgctcaggtatacattagtctgagaatggatttttggtattcatggtacaactagttcaactactgaattaggttgtctttgaatatgagtatatatagttttgaatttatttcttggtataattgaatcggagaatatataggtttgaatttatgtgtcttgatacaactagttaaacttctcccgattatatatatgtttgaattgtgtgttttaatataactagttcaactacttaaactcagggattgtgttttgaatatgcaggatacattggaggccgaggaagaggatgatgctactggtaatgctggtgaagaggatgaggatggtaatgttggtattggtaaagatggtataggtgctggtaatgatgaagctagtaaggatggtgctggtaatgatgatgatgatgatgaagatgattctcagccactgccgccagagaagatgtttttagatagttcagaatacacccaagggtgtaaaataggaagtaggtgtaatgtcactgagacagtgaagtggatagagaaagagtttaaagaggaagccggatggttcagaagccaccctcagttcaagcatatattccacatgcctagggtgccaaaccacatgactcaaggcatgtggatgcttatgctgcgcacagttgagacagatatggtgagggagtgctggtttgtggttaatggagtacctattaggtactccatcaaagagcatgcgttgctaactgggtttaattgcaagggatacccggagaaacatgagaaaatagggaatgagaagtttgtgaagagaattttcagaaggactgagaagataaaggcatctgatgttttagctaagttgaaggagaagtagagttggaaaggagatgataagaagaagttactagtcttgtatttcctatgcaaggtagtaaaagcaagctcaaaaagtgatggaaacatagaatcctttctcttaaggattgttgatgatttggatgcatgtgagacatatccatggggccgctattcattcttcgaatgtatgaaagggattcgtaatatgatgaagaatttgaatgggtctgtcaaacctaaagctcaacctagctttagtggattcattgtacctctggacgtaagcctttgtttttgatgtctgagtatttgaagttgtatatatggttttatgatattaactgtgtgtgtttttttgtagattctgccttatgagtgtattccacatcttggactgaaatatagagtacttgtacgtgcagcaaatgactatccaaggatgtgcaagcacaagtttaaagaatctgccatgaaaggtatccctttggaagaattatatcaagagcttgggactagtaaggttagaatttctgtcttcattagattatttggtttgtgtcatgtatttgagaaagagtgtaagttaaatgtatgtgtattcacaggatattgacagcatcttggtaccagaccaatatgagaaatctctgttggctggaatcattgaagataatgttgatgatggtctagggcatattgatatcattgttgacagttggagagagcgtctagtagaaaagaagaaagagatatggtgggaaggaatgtaccagctggaccaagcgtcccgagagattggaaataagtttcttgagaatgaagacccttctcaagaagtccctgagcaagaagtccctcaatgtgacttccctgagaaagagagtgctgatttggcggctgttgttgcatctattaccttactaacataggtggtgaacaatggctttcaagacattcaagagaagtttaaggacatggacaatagagtgaagactcttgaagtgtctgtggcagctcagggatatcatagtcctcagtatccggcatatgggtcgcctctggaaacacaatatgggacaaggactaattttgagtgtgggcagccgagtcaaaccatggatttggttttgtataatcccatttctccaactgttccggaacaaggtaagtgtagaagtttcttggttatttattgaacttttaaagtggactaataaactgttttctttgtacattgtatgaaggtgatgaggaggagaaaaagaatgaggaagagatgaaaggaaaagagaagaagaagggcaagaagaagggcaggaagccgcaagagggtggacctgtaatagcaaccggacagaagcgaacaagggcagcttcccaacatattaagacatcatttgtggaagtgcagccaaagagaaggagaaagaagtaagaactgtggttgatgtgtgctggtggtgtaggaaaaaactttgaaatcttttggacacaattatttgtgttttgaactattaggaactatggttgttatgtaggaacaatcttttggacataatttgtgttctcggatttactatttcttgttactactaggaacaatcttttggacataattttgtgtttgaactactaggaacaatcttttggacataatttatgtttttggatttactatttgttggtctaactggtcaagtcagtataactggtggtacaactggtggtacaactggtcaagtcggtacaactggtcaagacggtacaactgtgtttattcggtacaactggttaagacggtacaacttcatggtacaactatgtcaaagcaaaggcaaatttagaaataaaacttggtcaaatactttttaaacattgtcaaataaacattgttataccaagtagctagcattgttaaaatagttaaacatttagcaattatgttttacataaggaaatacaacaaactcggtttcttaagtcctacaaccaactaccacttagctagcaactccctcagcttgccaatctcagtttctttctcctccaaacgcttctgaagatcatcgacttgagcacgcattattcgaacagactcgcgaagggactccaacataggattttggtaagcgtggtggattgattttttctgggtttcaaatttgttatggacacagtaaacttctcattaaccgcatcatcccaccacttttgaaggtgttctccaccatcctaagcataagcatctttcatcaatcataagaaaaatgaattcatcatcaacaataattaccaaaaattcatcatacctcaaaatttggacatttgtattcttttcttccttgattattgctagtggtacacataacaagcttaacgtaggttccacagaaacaatatctcggaatactcttattaccgtcagctcttgcccaactcatatcctcactcggctccgagtcggagctttgagtataactgattggcattctcactgcagaaaatcaagaagaatcggaaattttaaaaccctagataaaaccctagatccaaatccgaatcgacaaacccaaaccctagatctatgaattacaaatcaaaaacggataaccctagatcttatggaattacaaatcaaataagaaaaccctagatccaaatccgaatcgacaaacccaaaccctagatctaggaattagaaatcaattaaccaccaaccttgttagaaagcagttgttcgccgaaatctctgctctcgccgccggaatctacgctctcgccgccggaaattttagaaaaaaatctctgggtttcgaaaatgaaagagagagagagaggctcgagagttaaggtaagagagagaagatatttaaggtaagagaagacttcgaaaaccctagatctatcttccttttctttttaaaaaatatttaaaaacaaaaattcttttaataaaaaattgagtttggcggctgtacttatttaatagtgggacccatgatggctgaatatactcataattgttcagttgtactaggaacaacatagttggacttttaacactttttcttgtttgcagttggactaatatttaaataattaattatcagttggacaaatgatttctctgaattatttggcatatccaaggtttaaataatattatacttaccaaataattgttttcacgtctttcactacgatttaggttatcttatagtaagtatcccttatactagaaggggttgtttgtgtgagaacatcattttccatagattttttaaaaagttgtattcgaatgtttaaattttctttaaaagttatttctattatgattctattatagaattattcttttattaatttttttttttaaaatgttattttataatactaacgtagctgtacaagttgaaccagttgaatagtgaatgcaaaacttatgtaacatattgaaacttacttgcaatagatgaactcagtgtagaactgaatacaaatacaacttaaaacaaacagacatgttcttagctgaactcagttgaaccagctgaattgttaatgcacatgcgagaaatacaagtaaagcacagaaactaaagttaaccattctcattattgggagggggctgcaactaactctccaagttaatgccaggctgagcctttttttgggtcctctttcgtcgcttttccccggtggatggaaaccgggtttcttgatttcttcctttctttggtttgtaatccgccggttttgctatcttctcctcgtagtcagctggaaaagtccattgagactcatgcggtacaacgtaaatcgttttgtaatatgccaatgcccacgtctcgatcaagtaatatttcgaacaaagaccatatatgcttacttccgttgttctcgaatcattccgacaatgcttggctgcggatataccatggatacaagggtacttgtctatatcaaaacacctacaagtacaagatttcatatccaagtccaccaaatatgttaaaccatcaactccaattacgctatattcgcgttggtagctgttaagctcagtgaccgtcaacttcgcagctataggacatcggatatgtaatatattctccacaacaggcaccacttgcgttgtgttcgatgcattggtagaatcttttcgatgtttgttgaaccattcagaaaacttctccaatatcgcatcaatcatcggtaatagatggtacttccttacttccctaaacacagtgttcattgactccgcggagttgctagtatctatgttgtacttgtctccctcagcatgactcctagcccatttttcaaccccaatagaattatccagatattcagcagctttaggataccttctcctaaaatcaccataatgaatgttgaactcggtcttagtatatacatgagcgcattccttgaatttctcaacacctacgtccttgtccctagtcaactttggcctaaggttttgggataaatgccatatacaatgaccatgtgatgcatttggaaacacatccatcactcccttgatgatgctttgatgtctgtcgcttatgaaaaccaaaccatcttcatccggtactacctttctcagcattctaaaaaaccaattccaactagcatgattctcactatcaattacaccaaacgcaatggggtaatggtaacgattaggatcttgagctgttgcaataactaacatcccaccatatatagttttcagaaaagttgcatcaatcactaacactttcctcattgccttaaacctttcaatgcttgcgcctaaagcgataaataggtacttgaacctctcttctacatccaattccacttccgttactgtcccatgattcacctctctcaacaagtggagataagcatacaacatcgtgtagcaagcttcagagttcccacgcatatcactaacatgttgtttttttcctttcaaggcggtggagtaggaacaatccaaaccaagtcttcctttaacaagagtcatgatggttttaggatccggtgttttcaaatgaccacggaagtcctcatgcaaaacacttactactgatcgtggtgtgcctttttgtttaaaatatctagtactctcctcacacgtagagcatgtatgcatgtttttgtgaactcttacactccaaaaatcagatttttgtattctggaaactcttaaataccattcacaacccatgaaatcttgactgcattcaatcgtaagtcacaccgggtccgactttacacatctcacaccaaacaagtttgtctttgcagctctattaaccaaatcccatattgcctccttagaaggaaattcttgatctttttccagatccataccatcttcccattctttaactgttttctcacttagttgtacaggccgtgaaaactcaacatattcatgcctaacatcattctcacaatcttcatttacaccattctctatcatgagctgttcaataatcggttcatgaactatagcaggctgtgtctcttgttctgatgtttccccccatctaaacgtactcaagattgcttgattatttacatcatcagtccttagatcatcagtccttacatcattggcagccgcttccccataattcaaaccgcatgaacttcttctctctactcttggtacttgctccaccatctgattactttcaagattgcataactccacatgcaaaactggtcttaatccctctttatccaatgatgttaagaatatacaaacatcctcatcatctaaaatataagactctctccttcctttacatatcatgtaactcaatttcagcttccttctcgctccatctataccaatcttcttacagatcttatctactaacaccgcatatgttattctctccaaagatgttgtaaacctgttgcaacaccaatggactccactgttcacttacatgcagagagtggggatattttaccagatgcaacagtttacagagctttaataggaaaacttctatatcttacaatcaccagagcagacattacttatgcagttcataaactgagtcaattcttagctcagccaagaactcaccatctagaagcagctcatcgtgtgataaggtatttgaaaggagatccgggtcgtggattgttttattctgcacattctgagattcgtttacaagctttttcagacgtagactggggtacatgtcaagatacaagacgatctatgacgggtttctgtgtttttcttggaggttcattgatttcttggaaagcaagaagcaatagactgcctcaagaagtagtgcagagtcataatacagagctttggctgatacaacttgtgaattgctgtggttgagtaaactcttgaaggatcttcatgttcacatcagtggtcctgcaactatatactgtgatagtactgccgcaattcacatagcctctaattcagtttttcacgagcgcacaaaacatattgagattgattgccacatagttcgtgataaactgagagctggttttctgaatctcatgcatgttaccaccgataatcagctagctgacttgtttaccaaagctttacctcccaagacattcaagcttctcatgtcaagatatgcattttcaagtctctttcttcccgcatgaagaattcagacaaaatgagactaatcttgcaaatgatacaatcaaactcaaagaaatattttttttaaatacaagaagctcatcggatatattaaagttaacaaaaattttgaatatttatattgattcatataatatatggatagaaaaaatctaactcacggtaaaggaattacaacttgatatatgttgcaaagatttattatacttcaactagggagttcaatggcaacaaaccgctccccatgatctctctgaaattagcagttatatcatccaccaaagatataagtcccacctactcaaaactaagaggagatgctgcctacatcagttttttgtctattttttctatccctctctatcaaacaaaatagctggcttgttaaaaagcatggaaaggtatccagaaagcacaaggaagttgaatctagcggaggggtctttgcttttgcgtgcgcggagccccaacgaggaaggtgttagtggtttatcattgggtcaataatgctaatccctcatattcttattgatagggatccccattcattcctagattctcgtcagagacgtcattccttgtggcaaccacttgaatattacttgggtaagagtttcgcgaatgccccaacacttttaaaaaaattatgacttgaatttgatcattttattagtgtttaaatgtttatttttgaaaattctttgatatcattttttaaattttgttttttgaaaaataactactttcatatatcaaacctcgatcgaattacaatatgatcccccaggtattttaaatcatgctttgagcgagaagttattgtgggaagaaactcaaatggatccgattaaattgagtgttaataggaaaacactggctcaatcgacgcaatcccttagctgtcggattgatggttcatggaaatctacggatccaacaatgggactagggtggtggtgtttacaagaaaatgatcaaacaatacttcttggtgaaaagtgttttcggaggtatccctccccctgcattcagagatggaagcttcaatttgggctacgaaatatatcctttcaagaaggaaagactgtcaggcatttgaaacagatggtatagagttagtctcgatggcgcagtctcctgaagaatggctagctttctccaatcaactcgatgagtttggattgctctgtgatttctttctcctttttcgatctcctatatttctcgtttatgtaattctaaggcggattgtctaacttgatactctagattattactatctgaagtcacgtttgtaaactcgtttcctccagattgggtaacaaatcatggagtttagcttttaattaatatgtggttattaaattttttaaaaaaaaaaaaaagaaaaaaaaaacctctcttataaaggaaaaaatggtcaactaatctctcttgtaatccttaaaactggttatttaaggaaatataagttccattctacatcttttatcatagcataaatagttaaaaacctaattcatgactgccgttttctcttttcacaaaaagcttcttcttccactccttgattccaagccataactacttcttttccttctaccgacaacattactacgttttgactcttgttcatgtcattatgacgactgttacaaaattattgcctctaattttcatgtatgggagagaaccaattaaactttaagctctcggaagaagagaaacgagaattgaaacatcaaagatgggaatagttattggattgcacagactgaaaaaatacaaacaaaagtacgactttattaataacaaactccagtgtattttgtctgtccaacatttcttggctctttggatatgcaaaaccaaagagaaggatctattactaataataggaattcattgaggcctctcaatgtgtccacatcagctattctctaaacactctatctaatggacacgtcagcagctaccaaaaaaaaaaaattaaacagaaattgcagcccaacagaagcacaaaacaacatttcatattaaaaaagataagagaagcctaacgtaataaagcccatacgctcaacacttgacatgaagacttaatactgtaatttctaaattacctgatattataattaacccatctaaaacctaaattcagtaacaaaaaaaaaaaagaaagaagagagaccattcatcttcaccatcctctaaaactgtatcgcttcagcttcctaacaaaacgaaaaaaaccattgttatcgattctccacttcctatcttcactctcccatacattcacaccaaatgaaataaatggccactactaccttcattaacatcgattcaagtttcactataaaaccacagatcacccatcacacaaagaaacaaaaataaactcctaacagtcactacgaccaaaacatggcaccaaataaagctcaacagtctccccagccattcacctttcagatttttgatgatattgatggaggtttctgtgagaaactgagaaagaagtcttactccgactaattcattattgggaagccgtgaatttgaagaaaggcgacatattgatgggtcttcaaggaaatctacaatgaccttccaaaacaaaatggtaaactacttaccctaacttccaaacaaagtatatgcaattcctttcttttcaaaatggtttaggtagtaattcaatggaattatactgcgctgctatagcatcaaatcatcccatggtacgtaattccaaatagataaattggggtgaaggagaaagtagttccggcgatgcggtgtttcgatagagccaagatatatgttagatccagagatggagggaacggtgtggtggcgtttaggagagaaaagtttgttcgttttggaggaccttcaggtggagatggaggaagaggtgggaatgggtatgtagaggttgatgggtctatgaattcgttattgccgtttcgtaagactgtgcatttcagggcgggacgtgtggaaaatgggagagggaagatgcagagtggagctaaaggagatattgttgtcatgaaagtggctcctgggtcggtggtgagataggctagagaggttgggagtgaggtggagggtgaggaaggggaggagaaggaggtgcttttggagttgctgcatccgggacatagggcattgttgtttccaggagggagggatggacgagggaatgcttcgtttaagtttaagtcggggatgaataaaggtcctaggattgctgaaaatggtgaagaaggtcctgaaatgtaaagtgtgtattttgcttcattttgagttggttttagtttagtgagttggttacaagctttggtttgggaccaacgtgtaaagtttgagacttaaagtattagagtttctgaaatggattctgtttcaggaccatcatggactttaaatttttagcatatataatatacttaacatggagcaaaaaatagtttaattaaagaataatcaccatctacacaaaatgtaacaaatatgctaccaaacctctaatgccaaataatgttttaagctgtatacattgcctgagaaaataaaaaaagttaaccaccaaattaagttactaatactacccatcatcccaaataatcaaccaattaaactgaacactacaaattctatatgtatatatttttagaagaaaaaacctcaaatgcacatgagtaaaaataaattaaaaagtgtcagaaattccaaagtttatttacagttattaaaagctatttctattacactcctttttattttgttaatattaattagcgtaaactatttcaagttcatatttatttttccatataggttgtatgttaaaacgtatagaaaattcccaaaagaaaagaaaacataaaagatttttgtaaaattattaaaatttactaatacgcccggattttcttctagtggaacataaagataaggagatcaatgcaagcatgcgatgtcctcccggagaataagagcaagattaaaacaaaatctatatatataatgggagagttttctctccatctagggtgtccacatcaacatccatgtcatcataatttattcttttgtgagctccacatatttcatttattaaaacaaaaaaaattaaactaaaactaattcacacattaaataaaaataataagtaacaacaattaatgaaatattatgaaaaaacgaaaaaaataaatatacaacttaaaatatgaaaattttgaatagagattgaataaatataaattagatcattatattttaacatataataagtaaatatttttaaatagttagaaatacgaaaaaagcaacttatcatatattttaatggtacaaaatttattttttaagagttataattatttagtagaataaataaaataagaggaaaaaaataccaaatttaaaggtttttacttaaaatagaaagcaattcatttctgaaaaatagacatttaaaatttgagtaccgattaaaaaataaaaataatttagaacatattattatttataattataatataatataagtagttaaattaatatattttctatattattaattttttctaaattaaaaagtgaatacctaaaaaagaaaaactaaatacctaaaaaagaaaaactaaatttgagtaccgattaaaaaataaaaataatttagaacatattattatttataattataatataatataagtagttaaattaatatattttctatattatcaattttttctaaattaaaaagtgaatacctaaaaatgaaaaaataaatattaatcagtgtttagaaaattaacatagattgaaaaaaattaaggtgatttgcaataaaacaaaaaaactatcctaaaaatcacaaataaaaataaaataatcttatctaataataaaactgtgtaatactaatatttgagaatactatttggaaattagaatagtaatggtagattgaagagtttttcattagaaataaaaaggattttaaaaaaatgtattttaaaattagaataatttttatgagttcgtaagtgtcacattttagaaaattcaacattaataatactttctagaatcataatatacgttaaattatatatgtagaaagagatttttgtatttttcatatggtcaagataaagtgcaaaatttcacgttgaaatcctatgtttatgaataagaatgaatctatatatgagatatgttttctataaagcaattttagatgcaccaaaacatggtaaaaaaaaaactttatgacaaacatctcctcagatttctgttttgatgttcactttaataaaaagatcataaaacttataaaaaaaaaattgagtattgaatgatatgaaggagaaaatagaaacgatctaaggagaaaagagagtagatgttgggagacgacgagtgaatcatagaagataacgagaaaaattgtagtgaaaaatgtgagaaactttttactactttggaaagataattcatatgggtaaagtaaaatcatttaaaattcaattgattatatttatactcaaagtataaaagtttaaaattaaatcccgtgcgtcgcaccatctagtgtaatgaattgtgcagaaaatacaaccaaactcatatacaatgaaatttattgaattaatacaagaagctcaagagataatattgtttcatcaaaaaaattaatcctttatcttataaagcacaagtcactacaccaataaaattttgacatatcagcaaaaccaattttaagaaaaaaagaattataaaacagaaaagggatcgtggagaagagggaaaaaaaaacattattttctcataaaagttaatacagttcctacaataaatccctacaacatctacagccctgaaatatctaccactctcctcacgatcttctccatgtttatatgcacccgtttctttttgcaattgatcatcttctttacgctaatctgattgcattttctaaaaacctcaccttcggctcgattattatctttccgtcatgatatacaccattcttattaccatgtgtttttttttccactttccatttcaaatcaacatgagtcatcactctacattttcattcgagatcaattattggtgaagacaagaaagagaacagagagattgccgaccatatttccttttaatttgcttctatctgttttaaacatatattttgtagattattctgacagctattgaagaaagtgataattgaaacatcggcgtacaataactctgtaataaaggaatctcaatgcccaagatctccagcttcaagtacctaaacatatttactaggccattgaatctccagaatgcccattagatcctgacgcttaggagtagtaacgtctcgccatgtacaacaaaaaaaacgaacatccaaagatctaaatggcattctgaaaagtgttgaggtgatttacaagtgtgtaggttaatggggattcttgtgaaaggatcattaatatttggtatgagataatttttagatattttggatgattcaagttataaggttgatcaaggttgagaagctgtttattactgaaaattatatgttgaataattttttggtatataatttaaattttcttctttcaattcatttgcgttctcattctatttccttactctcaacttttgactattgtttaagttttaactaaacagtaaccacaataacgttttcagaagaaattatttctatttatgaaattatttttgacccgtaggtagtacatgcttaatactagtataatataaatcaaaaaacaggaaaagaaaattattgtcatagatcactaagagcatctctgttggtttgctcatagaaaatgaagagaaaaataagagactcaccattaagaaaatagaaactaataaaaagagagaagagagagtgacaagagactctcaaatgcgctatctattaaaaaaaacaatttgataagaaaattattttttatggcttatttgagaggtcataagctggaatacaattgcatataaacgtaagttttatagacaaaataaagcacattatgaacgccattttagaggtaatggcggagatgcatcccttttaaaatatattgcatccatttttgcactatattcatatcgtagaccacatttaggatgctttaaaactggacggtacacctcaacctcagtaaaaaacttcatgttaattccttgcatgaaaagacattttatatgcgatcgctcggttccgtcatcaccgaatttaatggatcctgtaccgttgaagtttaaatgtctgactcttaagtttatttttccgaggtggcaattatattggagaattctactagaaccgagttggttcttaattacaatctcatttccctagcaagcttcattaaccacaaaataaatggcactaaataacatgaaaaatattactccctccgtttcataaagagtgtcgttttaaggttttatttttgtttcacaaagagtgtcgttttaggttttcaatgcaaaatttaatgattttttatgttttatgactattagtattctgcagattgttttactattgggcagattatgtttaggtatatagttaatgatgtttttgtttagaaaaaacaaaaaatttaatgttttcttaatctgtgtgcaaaactctaaaacgacactctttgtgaaacagagggagtagatgactcatttgttcagatctaaaataattgttggagtaacaagcgcatcaacatgtattatttatagtttctttgtgtggacgacttttttcctttacttagcaaataatggttttaaagtgttaactaaatttagaggcaaacatgcatgaacaaattagaaattttatcaaaagagattttagtgtcgaaatttatgattgaccaataagattaaaccaaatgaacgaaccatccttttattattaaaagggaagtacaaattgaaaaatggtctaatttggcctcaatttcaatttcaattttggattttgtacatggttaatcaaaatcgtcaagggtagtttggtcaaaaaaattttgactcttcattaatcgtataggatccgcgtgttttcaaaatgggtgggtcttggatcacataagatctaatcaatacacaattaactaatcgggtttgatcatctacaaaaatgctttcttgcaatcctaaccatttatcataattggtatgtaattaaaagcatattcgagcaaaaagattctctatatctcgcctaataagtaaaagatattcatgtaatattcattccaatataatcgtaattataaaagactccaaaatatccttatttctcctaaaagcgtgaatcattcattagtttaccaaatacgaatatatgttatttaccgtatcttatattttttgcttttttccaagattttcggaaatcttggatccaaaaaccctaacaacctactacactataaatagagaacgtcattatcgtttctaacttatcaaataattacttatattcgtaacaaacctctcattgttcctttttgtttttcaaacaatggcacaatcaactgctttccttgacgatgtcaagtctgcttggagaggtttgagtgcaggtgcatgtccttcgtacctagaaaacactcacgaccaaatttggtgaaaatctacttatatttttaataaccatctctgtttatggatgccagaaattaaactatcgattctatattttgaatgtatacaggttaccaaatgatggttttgctctcacaatctttgagagcaagtctaagccggatctgcaagtggatgtagcaggacattttgtatctccaattccctaagaaggacattaaaaaaaatgagagatggtcgaagtaatatatttttcttcctttaacttttaagaaatatgcaatagtactaattttaatacccttttgtagtgcagtctgagatggttaaggtgagtaggtgacatgcaccatctacatctcactcccaatgatttagttttcttcttaaccgtgcaaaggtaaggactttgtttcttcactttcatattgcaacatattcatttacttcatttacgaaatcacgcatgttagattgtttagcaatatttaatcttatgcttacataaatcgataaatgaccttaactagctaataactatatctataaagcgcctacaagaaatctgaaaacaagtgtttgtaatcaatttgcaattcatactcatacaattgaatcaggtatatttcacacaatatagatttcatatcaattaacatcatttccaattaaataattgattctatagccaaaatcgataaaaatctatagcaccatgtatatcaggcacatacatacagagagatagaattactgattcgttgagttactaacccgttatcagcaagattgattagtttcgggcgacacatcgtaatatcgtatcatgaacaatgatgacaacaaaagagttggaatccggtagatttttgtagaaatttgtggttaattgcagaagttctgcagatcagtgaagaaaaaatagggtttttcagatatgaataagcaaacagacgaggaagatcggcgaagatttgatttttgatgctcggatttaaacaacatatgggtctcttgccgtcaagagactgcttttttcgatagtaactaagaacaaaagatgtcgtttacaattctttttataaaaaaaaaaaattattcgccaatgatatttactttatttacacaaggccttattttccaatgtaatgtaaaatcaagcccgacgtttagtcttagattaaataatactgtttgcccatttaatatttatactttttttaaaaaattgaaaatcgagtatatttgaaatattctaaacaatcccatatatttaacttggtattccaaaaaaataattattctaaagtacataattatactttacttcattcttgaaatatataaataatgctcaaaattctatccattaatttcttcgattacattatgtttgtaaataatatatatatatatatatatataattatttattatgtatatgtgtgtttgtaaattcgatagactacataaaatactgatttattctattatattaataaaaaagatattacgggtcgggtaataattcagagataacgtgttgagtaaccgaacaagtagtaaaaaattcaatacctgatccttacccacgggcaataaaagtataataattactcgactttaaggtcactggtacccttattttgaaacgggccgaatatagataacgagttttattgtctggccttaaattactatacctacaaatcatcttattaaatcaatataaattaacacatttactttgctaatagaaccactaaaaatgtcttatattagttgactacattataatttctgctaacaaataattaatcaaccacacaaaaattcctatatttattttgttaaaaaaattacttaatacaatttaaaagatatagtataaaaacccaaataaaaaccttcacccgcggcgtaccgcgggttgaatcctagtacttattacaattgacctcgaaactaaaactaaaaccatatcaaaagtttattggcaaaatatgaaattatattttaaatgtgtagtaaattaaaaaataaataatttgataaacaaattatgcgaaaggcatggattaaaaatcagcttcacaaaacaagcaaatatcaaaattttgaacaagtgatcacacgatgaattattttggattaaattaagcaaagatgcaattgaagtttttgtcggaaacatggagactaacaaaaaataaaataatataaacagttgtaaatcaataggtaaaagagattaggcaaaaaaaaaaactatctatgcaatgaaattcctagaaattaagccgttatttgtcaatagaaattcaggcaagcattaaagtcgagtttgatttgtttatcgagtgtcttaacttccaatttcgttggttaaggacatttagctcacctatggtcattctagtaacacaacaacacttttgatgtaccgaagaattaaacctaagataaaatattggtgatcaatatagactaaacaataggaataaccatagatgaataacaaaaataatcaatccaaatgtaacaacctaacaatcattcaattatgaaatctcccttttgaaatccatgaacccaattggaaaagtactcaaccatagaaatagaagaaaaccaaaataatggagaagaagacatgacaaatttaaaacagaatatcaaagggttgaaagaagtctctagaaagaaagaatttcaaaagtaacaccctcgtccagagcaacaatagttagggctgggccaaatccatatattagggtccggatccctttttttttttaattaaaaatataattataataaaaaatttgaggcaaaaaaaaacaaactaaaattaaaatattaccataatataaatatcacctctttcgtttatacgataggtaaaactcttttcgtttttttcgcaatcttcggattctagacacttcaagtaaatcattgacattgataattatcacctctattagggctgctttcgtgtgggaggagccgaactttgagctctcggaagaagataacgagaactcaaatagcaaagctgggaagagttcttggattgcacacgccgagcaattacgaacgaaagtaaggttttgctaacaacaaaatgtagtgtattttgtttgataaccttttgctggtctctctggatatgcagaaccaaagattaggatagaacatgaggataagaagatcaatgcaagcatgccacatcaaccagaagaagaagagcaagttttagacaaaatgtgataaagtgtgcaaaagatacaactagacccatagataaatatgtttcatcaaaaaaatactaaactatatatatatatatatatatatataagcatagtcatagaaaacaaagaacatcactcaacgaaaactaaaaaaaaaataagacactcaccattaagaatatggaaactaaaaaaagagaggagtgatagtgacaagagtctctcaaataagagattttaagatattcgtatcacacttgtgctaacataattcgttcaattttttttcatgatttataatttaaataaaaattatattaaattactcataaatattaataaaaatttaagttagtttcttactaatagagatgctctaaattaacaactcctctagctttttagaaaattgaatctttttgattaaagacccagaaatgcaagcaattttcgttaggctgaattatttaaatatggtgacaataagaccatttaaagagattgggtatggataactcaagaaattatctacatgatctaaacatataacgaccattgatactctataacaacccgaggactaaacctccacacatagaaaccatcgatttggagatgaaatcacctttgtgtatcatgattttaaactctgaagttctctagaacacatggataattctttacatcatatatggaaccaaattcatatatggatgcttcacgtcccctaccattctcatgtgcttgacaatctttgtaatatatccggtgaccgtgcaagccacttggttagccaatggttattttgagtcaaatttttattatcgagactcataccatcttctcctgacatttccttttaattctctacagaaatcatgatataatattttctaatagataacaagtaattctaacaaatagatatagaatcatctcgtaaaagacaaaacaaaaaaatagtatatgaaaatgatgttttcttattacttaaaacatcgaaaaatatgaatagatatcaaatgagctatttattacaaaataaaattttgattatagaattagttgttatggcttaattagaaggtcataagctagaaaacaattgcattaaaaaaaaaagacatttttaggcaaaataaagcacattaagaacgccataaatgtacaggcaatgccggatattcatccattcgaagatatagtgcatctagtctggcaatatacacacgtagttgaccacattgaatatactttggaattgtaggatagtttaaaattggaaggtatgcttcagcctcgctataaaacttcatgttaatcccttgcctgaaaagacatttccaaatcgatcgcttggttccgtcatccttgaatttaatgattttcgtactgttggcgtttaaatgttggactcctaaattttggttccctgagcggcaatgatattggagaattctactataaccgaggttgttcttaattacaatctcattttccttgcaagcttcatttaccacaaaataaatggcactaactaacatgaaaaaaattagacgactcatttgtacgaaactaaagtaattgttggagaaacaagggcatcaacatgtagtatttatagttttattgtatgcggaagacattttttctttatttagcaaataatgttttttaagtgttaactaaatttagatgccaacatgaatgaacaaattaaaattttggtcaaaagagattttagtgccgaaatttatggttgccaataagatccaacccaaatgaaataatctaaattattataattgatctcgaaactcaaacaaaaaacatatcaaaaggttattggcaaaaagtggaattatatcataaatgtgtagtaaattttgaaaaagaaaaatgaagaaaaaattatgcgataggcatggaataaaaatcagcttcataaccaataagcaaacatcaagattttgaagaacatttaaggagagcatatagagcgtaggtggaggcaattctaggaagtatgtgggcttatactacgacataaattcaagggagctatcgaagaaacccattcttcaattgccttcatactttaagagaagttcaagagattcatacaaaatgagactatcgtggtttctaatgagtttgtgtacaattggatgtgtttagttttgtcgttgttgattctgtttgtgtggagaagactgatttattctcatatttggcttattgtgttttttttttctcctcttgattggtcagatggtttttattttaagtggatcaaatcccaagccttaagagcccattaacccatcttctgttgactctggtttctagatttagcttactgtgacaccccttgatgcgtgtgattttatcgctttaatcttttacctcaaaagaccacacgactactgcaagtgcacagttaatcggttgtagtatttaaggatcgaatcacacagagagagaagtggttcggacgaatctattagaaaaaagtaaagctagggcaaaacaatagagaggggttgttggttgtgtcactgatatgttgtgtttttatcggttttgagtctttgttttctttcttacatcatatgttttatcgagtcaaagtgtgtttttagagtcttttagtcgtttatcgagtctctacaggttttaggttacttcggaggaaaacgagctgttttggggtataaacacacttttgaagatgcagtttcgtttagaaatgtcagacgtttttcctcagatggaatacttcctaccgttagatctttctgcatttttgacacaagttagatgaagatgttatcttgagtttacaagtggtttgaaggaaatccaacggtgcattcaagagttatacctgaattagtgaagacaggtcattctgccgagcatttgaagcagttgcggagttggagaccagaagattcagatcgatcgatccacttgtggatcgatcgatcccatcctctgacggacgagaagcagtttccagtgactcgggatcgatcgatccacccaccggatcgatcgatcccttcccgagacgtacttttggcccagaattgacccgattcactccagatccgacccggctcgtttcctattgttttaaaaccctatgctcgactctttacacattatctttgttatttttgagttctagacttggttctttggtttgtaaataactttgggcaaaggaatccatcctcttgacacttggagaagatttctaaaccctattccttttctattttattgaatcatgttttctttcatatctatttgccttttctctttctctatgtgtgagtagttctccaattgggttttagggttccaattaggagattcaatgaattaatggattgattgtgttaggaattctcattctctaggttctttgattcacatgttcttaatgctagaataggattgatcaccctgttgtagattctaggtttttctatgcatcaaaagtgttcgatagaatgcctgaaaaaatgtggattgagcaatgtatttctagccaacgaaagttgacgttaggacgcattgtgaacttaatgaacttgtttggtaatgcgaatttgactaggaaattgcatgcgaaagtttagtaatcgaatagtcaaatttagtgattaatgtcttgaaagagaattggtctaaatgtgttcatgttcaagaacggttcgtaactattgaattcattgtctcatgtttccgttgtttattgatctctgaaataccctaatgcccaatgtctttaaatcttgaagttaaatcgtttaatttatttgcatttttattttacaaatctgaaaaccaaacaaactcttcgctttagctaagaacgagtctcggaaatctttagtgtaccattggttcttgtggatcgaccccgtatatactaccttgcggttaagtgtatcgggtaattagtcacggttgcaaagtaaagtaaatgaaagcaataagaaagcaaagtaaaaagcgagtaaataaagcaagtaatcaatgagaaacaaacgttgggcatcaaggggatcgcagggggttcaatgatcgttatctaagaaatactagaattaggtttgtttacttccaagtctcggacatacgaaacactaagattccgctaaccctaggttatagaattagtcggctaaaatccttatactctgttactcaacctacgcaggcaacgacgtatatatcaaagcaataagatcaagttcgattctagttcataaagccctataactaagtggtgtgtgcttgttataacacgatacacattcataagctaggttcgagcaaattaagcaaccttatgagccacttaaacacttgggatcacgagttaggacatgaatctaactacatgcattaagagaaaaattacttagaaagaatacagagtaaacgatcaaacaaaaccctaagtattgccacctagacgatcggtcattgttggtgtcggatcccgcaccagtagtccgggaccaaccaaagattgccacgtagtcaagacgaaggcccacaagggataaggcccattaggtctgtaagttaagggtgcggtcgaggtggtgacaccacaaagaaagttcgaagtgattgcacctcgatacgagtccggagtcgaagtcatagttaagtcggttcaaggttatttgggctgagaggcgaggcccatgaaggtcggaatcaattcaaattcaaacgttgagcattaaatttggagaccaaaagggacacattgaagagagaataattgtacttaattagccacttaaatgtcatttttctatgtataaatacgagggccagtggccatgtaaaggggatcttttttctggagaagaaatactatagcaattcttgtatcaattcataagctttttacatattcactttgtccctcaagaataatctttcctacttaataaaaatacttgagtgtgtgaatccgacatccacattttggcgccgtctgtggggaagaaggattcttgagtggtcagattttctttacaacatttctgagataagcagcaatgtccggaggagacaccgttgaaacatcattggctgaaaccctcaaagccatgcaacaaaccatgtcggaaatgtcccttacagcggattggaggatccaaagaactatctcgcagcttttctgatcgctgctggaagagtcgaattggatgaagctgatgaggatgcagggtactgcaagctcttttcggaaaatttatgtggccaagctttaatgtggttcacccaattagagccgggttcgatcagcaattttgacgaattatcggctgtgttcttaaagcaatatttcatccttatggataaaaacgtttcggacgccgacctttggaatctatcacaagggccgaatgagtcacttcgaattttcatcaccaagttcaaaagggtgctgtcgaagctcccaagaatctcgcagcagttagctttatctgtcttgcgaaaaggattgcgacatgattcaaggtttaaagaggatttaatacttcataaaccagacacaattcaagatgcactcttccgcgcaaacaactggatggaagtggaagatgaaaaagaaaattttgccaaaaggaataaacaagaaaaaccggcggtcactgtccctaccaagaagttcgagcctagggagagcaaaggaccaagaaaatttgggtcgcaacccttcaacagtattgtcggaaagcaattccaaggaaaaggaagatcaaacacttgggtctgtgatgaaagtttatattgcgacattcataaagcaaccggacacttaaccaaggattgtagtgtccttaaaaggtacctcgcggagctttgggccagtggagatctttccaaattcaatataaaagatttcgtgaaggaataccacgaagcaagggataactccaaagatcaaaattccaaaagaccaaggttatccaatgaggaggaaccaaaggagttcgaagggtaagatcaatgtgattctaggaggttccaaactttgctgagattcgataagttccatcaaaaaacataggcgaaatgttttactcaaagcaagtttgagcgacgaagtcgattttcaaggtgcatcaatatcatttaccgaagaagaaacgcggcacctcgaaagacctcatgatgatgccctagttattaccctggacgttgctaactttgaagtatcaaggattcttatcgatatgggcagttcagtcgatttaatctttttaagtactttagaaagaatgggaattagtcgggcggacatagtaggacctccatctccgttagttgcgttcacaagtgagtcagccatgtctctcggaacaatcaagctaccggttcttgccaaacaggtgtcaaagatcgtggattttattattttcgataagcccgcagcttacaacatcatcctcgggactccctggatttatcaaatgaaggcagtcccctctacatatcatcaatgtatcaaatttccagcaccaagtggagtggaaacaattcggggagatcaagaagcttcgcgaacatgttatctagctagccaccgtttgaagatccaatagcaattaacaaagcccgcaaaagagggactaagaccaaaatttcctagtgggcaaaaaaaagatgatgtagtaatcgaagtggtgttggaaatagacaaaccagatcggaaagtccgaattggagcaactttgactggccaaataaaagaagctttgatcgaacttttgaggaaaaacaaaacatcatttgcatggtcattgttggtgtcggatcccgcaccagtagtccgggaccaaccaaagattgccacgtagtcaagacgaaggcccaccagggataagggtgcggtcgaggtggtgacaccacaaagaaagttcgaagtgatcgcacctcgatacgagtccggagtcgaagtcatagttaagtcggttcatggttatttgggctgagaggcgaggcccatgaaggtcggaatcaattcaaattcaaacgctgggaagagttcttggattgcacacgccgaacaattacgaacaaaagtaaggttttactaacaacaaaatgtagtgtattttgtttgataaccttttggtggactctcctgatatgcagaaccaaagattaggatagaccatgaggataaggagatcaatgcgagcatgccacatcaaccagaagaagaagagcaagactaagaccaaatgtgataaattgtgcaaaagatacaaccagactcatatacagagataattattattcatcaaaagaatagtaatatatgtataaaagcatagtcgtaaaaaaacaaataacatcattcatagaagagtaaactaagagaaaaattagagactcgccattaagaatatggaaactaatagtctcttttatcttagtctcttctgtttaaacattagcataattcaactacttttatttctctaggaccaaatttgttatgtgacaccacttccttataatttcgggccagcagaaactgtaaaaccggctatcgaggaggtacggaaaaatgtttttgagtttttggttttaagaaacttttaagaaatccatatcacacttttcctaacataattggttcaatatttgttttttgaatataaaatttaatttaataaataactatattaaaattacttattaaatattagtaagagatctaagttaatttcttaccaatagagatgctctaaatgaacaactcctccaactattccagcctcttagaaaagtaaaatttttggttcaagacccataaatgcaagcaatttttgttaagaggaatgatttaaatatatggtgacaataaaaccattaaaagaaattgtgtttggataactcaagaaattattcttgtaaaaaaaaaacattagtatatgaaaatgatgttttgttattatttaaaacagagaaacaatacacataaatatcaaatgaactatttatttaaaaacaatttgattatagaatttgttcttatggcttaattaggaggtcatagaaacgaattgcgtaaaaacttgagttataggcaaaataaagcacattaaagtaatagtggaaatgcatatccattaaaaatatatcctatttaggctggcacaatatttacgtagttgaccacattgaggatactttaaaattgtaggatagtttaaaattgaaacatatgcttcaatctcatttttaaaccccatgttaatcccgtgcattaataaaaatttccagaataatagctcggttccgttatcctttaatttaatgatttttgtacctttgattttaaatgttggactctcaaattttgttccctgtgcgaaagcatattggagaattctactagaaccgagttggttcttaattacaatctcaaattccttgaaagcttcatttaccacaaaataaatatcactaaatcacttgaaaaatattaggcgactcatttgtccagatctaaaataattgttagagtaaaaaggacatcaacatgtagtacttatagttgttttgtgtggaagacattttttctttatttagcaaataaaagcttttaaagtgttaactaaattttgaagcaaacatgcatgaacaattaagaaatttggtcaaaagagattttagtttccatatttatggttgaccaataagatccaaccaaatgaaataacctaagctattacaattgacctcgaatttcaaacttaaaaaatatcaatattttattggcaaaatgtagaattatagcatattacgatatagtatagtgtatacttgtacatacatagttttatacatgtaatcttatttagtatataaacaaccttgtatacatatttacatcttaatgagaaataacaaactttaccttctctctctaaatctgatatggtatcagagctttctctctccttccgcatcacatttctcattcgatttcttcgattttgagcttcgatcttcatgatctgagctgatttttcttcaatccgaccatcgatcgtctcggattgctctttatttcgttggatttgagctacctttgctcaatcttcttcgttttcttgatctctgttctcgcgatttcttctttgttgcttcaatggcgaatactgttgtttcgtacgataatccgtactatctcaccaataacgatcattctggtttgcttttagtatcagatcgtctcacaggtgctggcgattttggatcgtggcatcaatctatgctcatggctttgaatggccgtaacaagctgtgttttgttgatggaagcctcccgaaacccgatgatggacatagagatgcagcgacatggtccatggttaacgatgtagtacgatcttggctcataaactctgtttcaaagactattggccaaagtgttctatacgtaaagactacacatggtatttggtcaaaattgttgcagagatttaaacaaaacaacgttcctagactgtatcgtgttgaacaaaagcttgctaatctgcgtcaaggatcattagacgtcaatacctattatacaaaattggtaaccatttggaaagaagtgaagagtgcacaagattttcccgtgtgtcagtgtaatggttgtgattttgaactggaaagaaagtggatggacctatttgaaaggaactttgtgattaagtttctctttggactgaatgactcttatgatcatgtgaaagaatcgattatcatgcttgatccattacctgatctagagaaaacattaaacatggtgattcaacatgaagatcagaaaggtattaagcagaatcctcaatcaggtgttgtttttcagatgagttcacaggatgttcaatcttctgatggattttttcagcatggtcaaatctctgataattactcaagtcagaatgaaattgttggagccgtctcaggagggtataaacataagcaacgtccggtgtgtacctattgtggtcttcagggtcacattgttaacaaatgttacaagcttcatggctatcctcctggatacaaacctcctaatcaatcttatggtagtcagcaaaatcagtttgttcctactcaaacttatggtggacaacaatctcagtttgttcctagacagtttcaaactcgtcctaatgttcactttcctcaacaacaatttgttccacagcagtatggtccacagccaaacattcctaatgcaagaatgcaacagaataaaggtccaagagagaatctggttggcaatgtaatcactacttctcatgcagttcaagatcattttcatcaggtttaaatgctctagctcagctttcttcagaacggatagaacaactggtttcttaattgaatactaaggccacttgtcaaatgccgagcatctcttagcagc

SEQ ID NO: 5348 - DNA, 714 bp, Arabidopsis lyrata
  Intron number 1 from transcript 350449 (locus 350449) deri ved from phytozome v7.0 (chr-ID scaffold_6; pos 5151132 to 5151845)
actccggcgaaaccaagtatttctccattgattttgacctcgactgatataatttggggattcttaagttaattttcccgccattcacttctgggttttaagtcccccataaactactccaaataaagccggtctaccaaattattatggaccgaatttataagcccaaataataaaggcccattggaaaactatgactacttgagtttatttctcttgtagaggatattcgtttccttgacttccaagctttagatctcgaattctttacgacctcacgcggcagttctccgtgtaccttcccggctgaggtacggttgttcttatcaacttctttttcagtagattcggtagttttgttttgttgggggagattgcataagccaataattttaggtcaataaaaaacaaaaatgaaattcggagaatctgattttgacgttcttaatgatttgatattcatggttttttcaaaatttatctacaatctgactttcatgtttattatatatatatatatatatatatatattttcccctatctatcttgtagaaaaaaatgtccagtccgatgcagaatgatttgcatttggagaaagacaattcaaatcaagctccggctgatgtagcaatcgttgcaccacctccagagatgagaattcatatcgataaaatagcacgtgtgggaaagggttgaggatagagagaaggatc

SEQ ID NO: 5349 - DNA, 150 bp, Arabidopsis lyrata
  Intron number 12 from transcript 923056 (locus 923056) der ived from phytozome v7.0 (chr-ID scaffold_1; pos 23802283 to 23802432)
caattcagccatgtattctgtctattcagagattgtttagcttttcttcctggcatatcatttctactaatcaagtcaagttgactttaactgcagtttgtagatgaagcttgtcaccaaatcgaaagaaatgaacttaatgtgagatag

SEQ ID NO: 5350 - DNA, 2620 bp, Arabidopsis lyrata
  Intron number 1 from transcript 932895 (locus 932895) deri ved from phytozome v7.0 (chr-ID scaffold_4; pos 6366387 to 6369006)
caaacaagtagcgagttcgcccttgtttctccctggcacaatctattatgcaacattcctaacaaaagctagtactatacttaactttcaatatttctacttctaattaaaaattttggttggttgaaaaatgctggtaaattcattgatgattactgaaactaaaaataagtatgaatgaaggccaatatatgctcatctgagatattttaaacttgtaaggtctctaattttacattttgaatccttaccatgtaaaacctactaagtttgacatctacgtcatattgtgatctttaatttgtcctctttgtttttgagggatatgatttgttgtgtcaagttgaaccatttattcatcatatacaaacttatttaattatagtcaactgttgttcgcgagtttagtgggctcaactgaaggtttgggctttgaatacccaattcgaatattggataggcccaataactgttcattcatttgaataggattctgctctggaaagtgtaacggttacagcgaagtaagtgaattggtggtaattacaggatgtggtaataaattcaagattcgaaacgggcataataaatgagccatgatttgcggggggaattgatgagatcgaatctcgagtttgtactataaataaagatggtaaaacattgtaaaggggaccgaaggttgaatgcgaaagaatcaatatatacaattttgaatcagttctttgttattcttttacgagcgatattcatcctgccgagactagagacccgtgaaaatcacaattatctgtatttcggattccgacatcaacctaatttctcagtaatttagataggcaaaacaaatcatgagcttttatagttcttactttttagaggcattatggactttttaggctttttgaagccataaatcatctaattcgttgttcaagttcttatagtttacctatccaaactagaaatataactttctgttaatttttttttttttttaattctagaaaagtgtgttgagtcaaaagcttctcccatttaaaactcaaatttgtgcttttgtaattatacatgtgatgtggtatatccaaagttttcttgatttctaattaagttcagtgacgttgatacttgtgtctgttcttacagatcttaacatatgctcaacaatcaaaaagagcagtctaagatttaacaagatcgagtagacgcattcaagaatttggggccggttctgaactatacaaccaaaagtttgtggctaatgcggagtcatttgatgttaaaggaaattgaattaaaaataccggaacaagtttcgaaattagatgcaaaagatatggatataagtttgaaaaagttatgttctacatataaaattttttgatgacacaaatttatagcgattacgcacacattaaataattttggctaaaataatacaaattttcaatttgttttttttttttaaatagtctcttaaactaatcctcgaatttactagttcgatttttggggatagttacagttttagaaaatgctaattttctaaaaatgatgaatttaaaattactatagtgatattttccaaattatttttgtcgaaattttaattggcacatgacatagatacaatctaatgaaagtttgtataaaaattgaaagcaatattttcttctccgggccttccttctttttcctggcttcatctttttactaagttgaagtaagattttaattttatggaaaaatattcaccaattagacaagataacattgtaggattggtaaagcagttgacaaagatttgtcattttttgtgctttaagcagttgattaagctttgtgtgacacgttgtaggattggagactccattataaattgaaaaagaagataaagagaaaaaaacagactttgtttgccaaagaaataagttgtgttcttattgcttttgggacctattagtttgagagtactctcagtgctttaaaacggcaaagtctttgaaaagacttgtgtttcctctttaaagttttattgattctcttaaacaaattccctcgagaccaacatggcatagtacgggaatatttacctgactagcgaaagacttaaaaataaaggttaattctcttaaatattatacttttttaagtttgttccaaaaatatctttatagattttttcaataatactacgaattcaatattaaaatgaatcaaaatatcttttaataggtggaaataatatcataaattggaaatacgaaatctaaacataatatttttcttgataaataaaaaaaaactaaatataatattttaatttatttctaatttattttggctgaataatttttagagaaaatgtgttcaaataacacttaaaagtgagttaattactgagataacacccatcaagggggatcttactcaaataacacttaaaagttgtcaaagtcttttaagcctctctaaaaattttatttacatttgtgccattttgaattaaaaaacccctcagaaaaaaaaaattataaaaccaagagcacaacaaccctaaacccaaaaatcatttctctcaggtttcgacgacaaccgacggtggcgaccgtctcct

SEQ ID NO: 5351 - DNA, 2181 bp, Arabidopsis lyrata
  Intron number 1 from transcript 915197 (locus 915197) deri ved from phytozome v7.0 (chr-ID scaffold_9; pos 1572274 to 1574454)
cgaagaagctcaaggtccagatcgaagattatcaggtaattcctttccgaagatgccatcaatttttccgataatcattgttggaggttttgggagaacttatatgattttctgacaaagcgatttgacttgttatgtgatttcggaaatgctctatgatttcggagatgctctttgatttcttatacaagatctagatacatttgatttgattcgaagaatgataaccaaattttttctgataaatcattgtttgaggttttcgtagatgtttgttttttgagattctcgtagatgaggtttctgacaaagcgttcttatacaagatctagatccatttaatttgataataggatgatactcaacttatttctgataatcattgtttgaggtttttggttttggtagatgttatctaatttctggcgaatggaattgatgagctgttatgtgatttcagagatattctgtgatatatatccattagattcacattatcattttttattcaaaaattatacagaacaattctcatggaggctcataatcttcactgtgttcggtttaacccctctgatgaagagattttccaaacctttttaatccccaagttggctcttcctgaagatgctctgttgcccaattcgttgattgagcccttcgacttctatcgctttgatcctatcacagctgatataagattggaactaatccaacttatgatcactcaatgatcaagagattccaagcttaatcccgcggaaggatggaaacgacgtggagatagaatgattgactcgctcaatcaatgggttaatcgactcactcgatcaatgaacgaaagaaggttgttgaacttatcaacaatcttgatccgcagattcaaataggcctaagagactcactcacttaagactaatgaataaacgacaaagactcaaactttgacaagaagaaaatgttcttattactttaatatgatcaagggtgaataaaaatgttacaagtgacatgagctttataggctcgacctctaggcatttctaacagtctaataattcaaaaaggaaagaaaatacacgatcaaatgaatgagaaatatcaaagggattgtctttgatataatgtagccgttaggcttgaatgcttggtccaaaaagggaaactcgtgggcttttatatcttgaaagcttctggatgattccatggcttattaatcttctaataactcccttaagtcgcaccaaatcagaagatagccgttggggttgggctttgaatcctctcgggtccatatatggtaactcttggtgtatgattaggcaagattgaatccacttaatacaatggctgagaatgaagcttgaggtgatattaggagcctctagttgtattataaactctcctggacgccaaagtttggtttgcaagtgactaaacccgtcagcttccaaataaggcaagccgagaatcatctggtttggaaaattaatatctcctaaaccaaaatcggttttgacttgattccaactcgaagagctcctatgatgagtcaagaatgcagaaacattcacttcgtagcttaaatctttctgttcgggtcggaatcctccaattactccgtatatgtccaaatcgggtaagctgggaatcacccgacttgtaaatggaataactccttcgtgtgaactcttttttggctgattcttcttcgaggtgctcggtatttgagctgagaatgcattccaagttttctctgggcaggatgaattgatcttggacttcgtctggactgaacaaggctcaggggtcttctcgggtaggctgaattggctttggcctgaagttttggataaaacttggttaaaaatcccacttggctgctcctgggttgttgcttctcgcccataatcttctccatggttggttcttgggttgatgaccgcatcaacagctgaaaaaccagggagcgaattctttcatgagggaaatttttggtattttgtgacaaggaccagactcaatgcacgttcaatgaagcccaacagaactattcgaattaatcccttccttggaaagtggaggaagtatggtgttactgagaagatcactcaaggagatgtgttccttggtaaaaaaacacacatatgattatctcaaccaacaaaatttgaagacagg

SEQ ID NO: 5352 - DNA, 677 bp, Arabidopsis lyrata
  Intron number 2 from transcript 926260 (locus 926260) deri ved from phytozome v7.0 (chr-ID scaffold_2; pos 13880055 t o 13880731)
tcccgttaccggcaagcgtattcagggtgtaagtattcttctgattcataccctctctgattcgatttggtacttgttgagcttaaagttgtctcctttgtttgattttggattgacccattgtatttgtttgatgcaaatgtagtagtttaggttgatttgtttgtgcttattgacggtcttgtgctggttagatgaattcaacatcagtagataactttatcataagctaaatttagtgccgctttgtctctttcaagttttctctaatgactaatgagtcttctttaatcttggtggcagaaatgttaaatcatcttggaaacttttcactatgtgtagatatgtttgttttgcaatcttgatggtagcaattgtattagtttggattttgtattgtattgattgtttcttgtgcttattgacggtcttgtgctggttaagatgaatccacatcagtacataactttatcataagctaaatttagtgccgccttgtcttttcaagttttctccttttgtatgtaaggaatcacttttatacttggtggcagaaatcttaaataatcttgcaaatcatagtttggtagatgtagttgtgtctgcctattccttcataatctaatctctttggttgtttagatccctcacttgaggccatctgagtacaagaggtc

SEQ ID NO: 5353 - DNA, 271 bp, Arabidopsis lyrata
  Intron number 4 from transcript 930576 (locus 930576) deri ved from phytozome v7.0 (chr-ID scaffold_3; pos 12064351 t o 12064621 reverse strand)
actcaccacaacgaggttagcttctttgctgattctactgacttacgttttaccaattttgctgagcttggaaatgatgattctgtggaaatggtgatgaatttgctgcagaatcacgtttttggagtagattttggttgatttagcagcttaattagttagtatagtggactgaattgtgtaggttgtgttaaagatgtggtgatcttagcttaatagcgacagagacgacgagctttgataacgtttttcttgatgggaatggcaggtt

SEQ ID NO: 5354 - DNA, 7521 bp, Arabidopsis lyrata
  Intron number 1 from transcript 474799 (locus 474799) deri ved from phytozome v7.0 (chr-ID scaffold_1; pos 32170299 t o 32177819 reverse strand)
gctacaacactcctgaacaggtttgatattgcccttcttatcttgattatacaataataaaaaaatctacaactacaacttacacacttacaaccaaattgtacaacaaataatctacagatacaaccaacaaatcacccacattgttttaacttttggtgtatagatattttataattagaaatgattgattaatataaaatatatgttaaatacttaaattaaaacaagttgttcatttcatatcatttgtctttttttagctctgggccttgtaaaaatttgagccgggtctgatagagaggcaagttttagaaaattatgaataggactcatgtgcaatacacatggcataggaaccaagacaatgagcttgttgctattgtttctattttttgcacacaaaaaaacttctttccagtgaaggaaatagtttccggcaacattagaatctagagtttcttggttgttgattttagttactacaacaaagaaaaaagataaaaaaaattggactttaactttaaaaataaagccggagcatgactagtacatatttgtggctttagaaaaaataaaaagggctctataaaggagttagcgcccaaccaatcacattataggtttgtttttgtagttgtgctatctgtagttgtagatttttctgtagatatttaagtattaaagccagtttggtaacgttagttaaatattatggatataaatattaattttattaatttgaaaatcttgcaatataattatataataagataaaaatgaataaatattgatttatataattttctattggtgaaaatatgtattataataagatatatatgtaaaataaataaatattgatttatataattttctatcactagtaaaattcctaagtagattttttgtcatatgtttaaagtacaacttagtgatatgcaataaagtaaataaaataattagatatttaattaaattttattgaataactttttacgttataaaaataacaataataattaagttttaagtatagtatagaaaataacatttatataggtcatactcactatagtaatacttttattcgtatttagtcatatattagggcgtttatgggaagtttgttatatgggtatacgaaggaaagtcggtcatttcatacctgacctaaattcaagtgtttaattcatatttaacagtttcttatgtgcgataatatacacaattttttaaaaaatttaaatttcatacctaaatttaccagatcatgcgaaattatgcattttattgacgccgatgccatgtcgttgatgatgttgatgacgcggctgccacgtccttggtgacatggcaatgacatcatcatcaccttagaaaaatatttttttatctgttaatctttttcttcttcataactatcatccgagagaagtgtgaaaaaattacattttttgatgtaagcatttaaaatcttattttcaatccttataaccagtatttcaaccgaatatattatttaaatcgagtttataaactcaaaattcgtaattcaaacaaccctaattgtcaatgactattaataaaaaattgtattatgttcttaaaatacaattatcccaataaatacgttgtagagattataaaatcggtttaaatatagtttattagtatcgaaataagattttaaatctttatataaaaaataagttttctacagttttgttaaatgatttaattgaagacgaaaaaagtcaagaaaaaataattattttctaaaggtgatgatgacgtggcaacgacgtcatcaagaacgtggcaaccgcgtcatcaacatcatcaacgacatggcatctacgtcagcagaatgtataatttcgcatgacttagtaaatttgaatttttgaaaatgttgagtatgtgatctaaatgtttagtgatgaaaaaaagatataaactaaaaataaagtgaatcaaaacaaatcctcaagactcaagagtgtaatttttagttattttagaacccattgagaaccagacaccagctcgatctttaatataaatgtcgattgatttctctcccaggcccacagttcgaggcgccgattgaagatttctccatggcttttctcaccggcgaggcttctccggcagcagctttcctctagattggcgatctctggtgtcttccggttccgttccggctcttccggcgttgcttccggtttgtttttccggcgctttttcgttttcttaccggcgtggtccggcgtttttccgatggtctttcggtcttgtatgtgtcttcctcctgtttccggagagatggctggttcctcttgggtggtatcccagaagcctgcgcatcttctttcgtcgaccctcctcacctctctcggactgaagcttcctccagaaccgacagttaatccacctccaccaccgtaccctccagtacccccaaatccaccggattctccaccaaggcgtagatgcttagaggctctcgtcaccacttcgctgtctcactcgcttcacctcattctcgacgcagctctcgccggattctccttggataaggatcagatctgttctctcttcagcgagcatccttggattccaatgtctcccctccccttcaacttgacgtcagaaggtttggtctctattaccctcttgtgcgttgtccaatggtatagaaacgatcctctgttagttcccttttacctctttatgaggttcgtacctcagtatgaggatgatagacttatcagatttgatcgaagccttgttagtatggatgtaatgtctcttatcggaagtatgcctctttgtagacagtctttggcgactgttggttttggctttggtgtgaatttgtttgtctcaggttatctctcggatcacttctatggtgacttcgattttccttgttttaaggacggtgttaggcttgttttaactttctctgtggttaaggatggtggtaaatttgaggtcctttgtgataaaatcttccatccattccagcaacctttacagatgatagaagagcatcaagacacctttgcctgtcttcccaacgcatcatggacgtctatgtccattggctacgggatggggtggttcatggaggcatggaggacccacttaaggcatcgatccaatttggatcatctctccgacccgttgtctcctttgctctggtagaggaacttgctttgaaggtggcgatcatcgcagccttagcggtgggtgtctcaaggatggcttattattcggattggcaagaattcccccttcttctcaatgtcggtggccatgcatttgcagttgacgatttcattgctgatatcaaacgtatgaagaccaagactctccgtcttcgtttccttttgttgttgcgttttgaaaacgcctttgcttcatgtattttctcctccttctatggagtttgagctaccttaattaagtaatggtttacaaaaaaaaaaaaaaaatgttgagtatattttaacacataagaaactgttaggtatgaattgaacacttgagtttagatcgggtatgaaatggccgactttccggtatatgaatatgttattggtacttgaaagttgtttttcgctttcttgagtatttaatgttgcatgtgtataaactttcatatcacttcaagtatagaatcaaatcttcgtttctcattctcaatcaattattgaataattgaatatataattaatcaaaaatcgaatatcatttattaagaaaatactaatattgatcgtagtggagtactaaaagtctaaaactaatctcttttttccaagcaatcatatatagaagaatgttaccgaaatacaccaaaaactaaataaatcattaatttaaaaacatgttaaacgaaaaacattaattatcgtttaacatgattaatttaaaaacatgttaagcgaaaaacatgattcattgctttacattcagttgcaaaaatctagtcaaaaacaaacaaatcccaaaagcaatcccttatttagcacacaaaatccgaatattccaaaatgttaaagaacacacaagattacaagaacaatccaaacctaaaggaaaatgttaaaaccaaaacatatctttaacgaatcattagtttaaattcgtttataaattcttcccaaaacaatcaaaccatattaaactatattaacttgtgctctatcatagaatcatgactaactcaaacttcaattatactgaaacaggtgcctagatttaaattaaagtatatcgaactgaaattatcaacaaaaaatattttacttcaaagcatgggttagagaacaaagtaattgcagtaatgattatagcttggtcatttatttgcaaaatcgaaatatggaaacgtcataaatatattaatttgtttcgcaaattaacttggatttttgcgctatttcgacccaaaaaatgggaaaaattggatttgcgctctctttttttgtaattttctttttaatattaaaataacgacgttttgagtgacaatgttgggttcgatcatacttttgtaattcatgtagtaaattcaaaattttaaattagttcatgtatatatagttctaggcatagcatctaagttcgtttatataaaatcatttggcccttatttcttggtagattttatcgtttccgatataaacattttgtatcggtgagcaagtaaactttgataacttgtctaaattaatttagaagcagcttccatgacaaaataattcgcaatccacaagaaacttattgctggaaagttattgatctttagtgaaaataaagaaataattcgaacccacaagaaacttagtaattgttggaaagttactgatctttagtgaaaatagccataaactcatccacaagctgtcatcatgcttcctcacatatcttccaagaaacacctcatcaagacagaagacattgaagagactttagttttgagcaatcttttggacataagagctttgatgacattgcaccttggtaaaatcctatttaccatgctgcatccaagtaccacagggatcaaaagcacgccctctcgtagccaattcattttctatacaagaaactcagtcttcctcttaattgactctgctgataaattatgacatggaggatagcacttgaccatcatcatgacctcatctttgttgaatcctaggcctaaaaatgtttcaacggagttcaatatattctgctcagaaaaaccaatacatcgcggatacttcttgaacatagagaggacctcatcttcgacctcatcttcgactaatccacactcttcaaggtttcaaaactctgagttatctccagctctgaaaaaccaatacattgtggagatattcacacttcttcaaggtttcaaaacattgagttattgtcttctccgagatattcagaaaaggacacttcttgaacatttcccatacatcaaagcctaccattttataggtaaagactctttcttctattgtttcattgcttaatgtgtaaacaacaattttagcatcgataattcttggggcgaacggatcgaaactcatctcaataaccttcataatggatttcttcaatatttggataaagttcgcataccttatagaaatcctaagtgttaaaatgttaaggtccctcttcagagtaagagacacaagaatagactggtagttaagagtacctatttttgttgttttctaatttcttaaatagacgaaagattacaatgaagcaaataacaagaaacagaaagtggagtcattgctcctacaaaacaagaagtgaaaagatggagaaatgctttcctcaaaatgaggatgactatttctcaattattgttgcaaacaaaacaaaagaaagaagtcgcaagacttcgtcagttcaggtacttgcgattcggctgacgtggactgatctccttgttgcaacctcacttgccatctcatcacccgcaccttcctcctctggtctcctatcacgaacccactgatataatggctttaacaaaatcatagtatgtgatcatatctttttcctctttcatcctcaagatattcggaactctagtaacaatgtcattgagcctagagcttaaaatttctctggacttcaaaaacttaagcttgggaccaagagaactctcagcattttccaagagcaatcttggaccagtcctaatgatgcgtgagatctgagaatctgtaaaatcataacttctaagaagattcagaacagaattgggattgcactcgtcctttaagctgacttccttcaagattgattctgcgagttttatcggtataccaactgaatcaacaaggtaagagactgtaaacttcggctctttttgagcatctcgaaggctcacatcatcagcactaacagaggagaaggaactggcaaaaacagagattacgttttgcacaagcttcactgaaactctcaaattacgccatttttgcaactcgatagatctttttccaagaagaatcagagaatacatgacaactgacaaagccttttcagaaaaattatggttgcctatttaagagtctgcttctctgttctgttcgttaacttccataaaaatccaaaagacaaaaaaatgggggaggcgagagataaataaaacattttttagggtttagacacaaaaccctaatttcgtttattattcttcattgacgacattttttttggtaacttaaactaagtaaatattaaaatatcagttagaagtaacaaattagaaaactgtaagcataagtataaatattctttctatttgttcctgattcctgaacaatatagatgatattagcaaactaaacgagattttaaaaaaatatcaataatatatatatatatatatattttttttgtcatcttatcaataatattcttaactaaatataaggaacaaaatctttttgtactagcatattccttagaattcgattttatctcttttttttgtttttttttaaaacacccttaattaacttatatataaacttcacctcattactcataaacacacaaccttagaaatcttagaagcaaaaagaaaaacttatcaaacatggcgaatcttgttatattcgcattcttgttcttaagctataccatagtgatcaatggtggaacaacaagtgaatttgttcgccaagctttaccatccattgaaatgtctctcgaaactttcccttcccctgctggttataacactcctgaacaggtttgatttagttattttaatctcgatcgagctagtaacctgttcttagatcatttcaaaaaacgttcgtcctacaaaattctgtatggtcatttgtgtgttaatatgtgtgtttcaaatgagttacatgaatggtttatcgtttatatcgtgaccaaacaataagattcgtattgatttttttttttattgttggtggtttttttaggttcatctgactcaaggagacc

SEQ ID NO: 5355 - DNA, 5142 bp, Arabidopsis lyrata
  Intron number 1 from transcript 936534 (locus 936534) deri ved from phytozome v7.0 (chr-ID scaffold_5; pos 3991696 to 3996837)
cgacgtaccgtcaagtctactcctcagagcatctggttccaacgcctatctctctctgttttcccttaatatttattcttctgaaaattgagattttccatttaaattttaaaaagtaaaaatagtacaaatgcctctggttcaaattcggattttggttcggtttcaaaatggtttttggttttataaaatattaaccaatgaaaaccttgttaatcaagaagacatttaacactaactaagtcatagttaagggttaaatgtaggttacttgggttactcgggttacaggttacttgggttactcgggttacaggttacttgggttactcggattacaagtctgaatgagggtgctattggtctttgtgcacaacccataaaccctagagagtgtgttctcatataaaagcacttgtgtgcctccactttgtaatacaacgtttatcttttaataacaacacttttcctctctactcttagtcatgtttctctctattcttcccacttgattcttaaattatttatatggtatcagagcaatcttacgattcttaacacttttcctctctttaatcttgcgttacggttcgatttctcactaaaaggttgaatcttggttgtacggaagcgagctgttcttcgtttctgggttttgtttgaagttttcttgagttgaagctttctgaatctttggtaaagcgtttctagtgaagagttttgggagtttttctttgaagttactcaaaggtctctaagcgaatcaaaacggtctcgtggctaaaggtcgaagctttctctcgggatggcactggtggttcaagacgcaagcaaagcctacaaggagctgaagttctcggttggtttgaatggaaacaactatctcttatggagaagaatgactacaaatgttttgggtggaagaaagctcacgaagcatattgagtcgacttatgaagagatgaaggagaaagacggaagcttggataaggatgcttgggtacaagaagacttgaacgtgttgagtgcgttacatggctctcctgaagcttcaatcttggaaggttactcatattgcgagacaaccaaagagctttgggatacgcttgctagtgtctttgtcaacgaatcgaatctcactcgtgtgtatgagattaagcgagctcttggaaatctaagtcaagaagagagtgacttcaacactcatttcggaaagtacaggtctctagttgctgaactagagatgcttaggccattcactactgaagcacaaacactcaaggatcgccgagagcaagaccgggtgtttgggttgttaatgacgcttaatccgaactataaagaggtgatacaacacattctgagggatgacaaggtccccaccttggaacaagtttgtgccaagatacaaaaagagttcgggtcacaagggctattcggcactaaaggcgagaacctcccaacggcaaacaaggcattgtttgtgaaacatgaagacaagaagactttggtgtgtgaccattgcaataggaatggccataacaaagacaaatgttggattttacaccctcatttgaagccggagaagttcaagaagctcaaatcaaaggcaaatgtggcaaatgcaagcgacggtggacaagagaatgaagaaagggcgattgtgcaatacggtcaagagaaggcgatgcaagccatgattcaagataagggctgtggattatcttctcaaagtcaagaaaccattgtgaggaacaaggcgaacctcgaagctctcattcactctattgcatctaaattcagtcccggcggtacctctctctttacttctaattcttatgattcaaagtcattagtattagactcaggagcttctcaccatatgataagtaaccctaagttgttagagaacattaaaccggcgttagggagtgttaaagttgcgaatggtcataatgtgccgattgaaggaataggtagtataaacctatttagtaaacggtctagtgccttttatatgcctaagtttacttcgaatttgctctcggttaagaagactactagagatttaaattgccttgctactttcagtcctaatgatgtgaaattgcaggatattaagagtggtaatgtgttcggacatattaacttcatgttgtctcataaaccgaataccaacccgtatccttaatgatcaatctccttttcaagttttgaataaccaaagtcctaacattgatcatttaaaagtatttggaagtctttgttttgtatttgtcccaggtgacctgagaaacaagctagagcccaagagtacgaaatgtgtatttataggatactcaacgactcagagaggttacaagtgcttcgatccggtcaacaataggtatcatgtatctagggatgtcaaattcatggaagacaaggcctattttggagaaaagagttgggaaagtgtgaaagatttgcctaattcaactttagatcgagctaagagtcttcaacatattctagaacatttgggtaatgttagtccgtcacaagaacgtgtggaagctacaccaaatgcggataccaatgaagctcaagagagtgatgaaaatacaccacaagagcctttggatatccaacaagagagtggtagagaagaaggttcaagtgaagaagtggtagagaaagatccgtctagtgaaggtgaaattattgaatcatcaagcgaagatgagacttatcaagctccaaaagtcacacaagatccggtctacacacgggaaaatccaaggaagagtacaagagagaagaaatctccttctgaatggaagaaagctagaatcccctactacaatgctcaagccgtggctcatccaatacaagaaacgtgttcgattgaccttcttcctgaagaacatagagcttttatcagtaagctagatgtggaattcataccacaaagctatgaagaagccaaggaaagaaaggaatggactaatgctgtggatgatgaggttcatgctatggttaggaatcatacttgggatgaagaagagcttccaccagggaagaagtgtgtgagttcaaaatgggttttcaccataaagtataagagtgatggtgaaattgagagatataaggctaggctagtggcaagagggtttactcagacatatggtgaagactatagagaaacttttgcgccaatagctaagcaacacacagtcaaggttgttctttctctagcggtgaatatggattgggaattgtggcagatggatgtcaagaacgcttttcttcagggggagttagaagaagaagtgtatatgacaccacctccgggtttagaggatacagtggctccagggaaggtgttaagacttcgaaaagctatctatggcctcaaacaatccccaagagcttggtatcacaagttgagttcaaccttgcttagagaaggcttcaaaaggtcacattctgatcacactttgttcactaaacaggataatcaaggaattgtagtagttttgatctatgttgatgacttgattatctctggaagtaacaaagcaggtatccaagctaccaagtcttctttacactctgcttttgatattaaagatttgggtgttttgaagtatttcttagggattgaggtgtgtagatccaaggagggactgtttctctcacaaaggaaatacgctcttgatcttctaaaacttacaggaaagcttggagctaaaccagtagatacaccactcgagcaagggtacaaggtcaatcgaaagggggagaaagatgacactccttatcattgccccgaacaataccgaagactcgtgggtaagcttatctacttgatatatactcgacctgatttatcttttgttgtgaatcaggtagctcaacacatgcaagctcccactgtttatcattggagtttggtggagagaattttgagatatatcaaaggaagtcccggcaaaggcatatggatgggaagaaactctagcacagagattgttggatattgcgatgcagattacaatggggatcgcaacacaagacaatcaacaactggtttttgtacattcattggtgggaatattgtgacttggaagtcgaagaagcagaaagtcgtctcttgttcgagtgctgaagcagagtatagagctatgaagaaactcacaaacgagttaacatggctaaaggctttgttaaaggactttgggatcgagcagaagactccaatcacttttcatagtgacaatcaagcggccatccacattgctaccaatcccgtgttccacgagaggaccaagcacatagagacggattgccacaagacaagagagaagatagaagatggtacgattctcccttgttacactaagagttcggaccaattggccgatatctttaccaaggcagcaagtaaccaagtttgccaatttattcatggtaaacttggtcttgtagacctgacacatccttgaaaaatattctccaacttgtagggataatactctttttccctaagcttggttttgtcccacgtggttttccaaacttaggtttttaatgaggttattcatacaagtgccaagtttatacacaattgggcattgtggtataaacttgagggggagtgttaatcaagaagacatttaacactaactaagtcatagttaagggttaaatgtaggttacttgggttactcgggttacaggttacttgggttactcgggttacaggttacttgggttactcgggttacaagtctgaatgagggtgctattggtctttgtgcacaacccataaaccctagagaatgtgttctcatataaaagcacttgtgtgcctccactttgtaatacaacgtttatcttttaataacaacacttttcctctctactcttagtcatgtttctctctattcttcccacttgattcttaaattatttataaacctaatctactatcgagcgatttcggttcaagattaatttctcatcaaatacgttaacgacccatcagttttttgtttcctcatatttagtatagctaatcagcaaaccatctaattcagtatcaaacaaaaaaaacttgtgacaggtacggaccagaccgtcccaaatacctaggaccat

SEQ ID NO: 5356 - DNA, 12171 bp, Arabidopsis lyrata
  Intron number 5 from transcript 897254 (locus 897254) deri ved from phytozome v7.0 (chr-ID scaffold_5; pos 11438959 t o 11451129)
ggtttcaagttcttccttcacagtgtggatgtcggatttacacactcaagtattttgttaagtgggaaagattattcttgagggacaaaaaatgaatacgtaagaacttgtaaattgatacgagaattgctatattatttctctctttagaggaagatcccctttacatggccattggcctctatatttatacatagctaaacgacatttaaaatgagtaattaagtacaattatttcttcttaaatgtgtccgttttgattcttcggctttaaggctcaacgcttgaatttgagttgactctgatcttcatgggcctcgcctcttttggcccaattgtccttgaaccgacttacccgtgtcttctataccgaactcgcgtcacagtgcagtcacttcggattcttgaaatggtgacaaccacttcgaccgttccttcggctcacgggtccaatgggcttcatcctttgcgggccattatcctgattacgcggcaatctttggttggtctcgtacttctggtgcgggatccgacaccaacaattagccccccaagttcttcgaagtgttattccaattcggaggactttaaatgctcaagtggccaaagattgcgctcgagaatctttctgatttcccgccgaaaatctcatcactcctttaattttggcactagccatttttaaccgagtgacatctgtcatcattatgaccgtatattgattaattactattaaaacgggaaaaaccttcccacttcccacacgactcccgaggcggtttcatcattagcttgaggtaacttcttttcaccattactctcttcttttacttttgtactttaatcaaaacctctctcttcgttccttcaccaaaacccttcttcgccggatcttgaatttttctttcttaccaatgacttctgattccgatagacccgagtctccgtcttttgacgagaggcgttctagtaatgacgagtgcacccgccctggtgacattgccggtccgcactataggtccacttgtactcttcaatccctcgagcgattgagagagctttgccggatcccgccggaaattatggcggaagcacaaatagcctcccccacagaatctccagagaaccatcgcgatggttacttctgtgtgtatgagatttatttcaagggttgcgggctgacctttcctcttcccgaagccctaattttatatctagcggctcttgaaatcgctcttcctcaattaacccccaatcttctccgtactattcttggaattataacagtcgcggcggaggccggttatgttatcggagttgctgaacttaatgagcttctgagcgtgagaagttcatcgaagaaaacgggatatttctcagcatatcctaatgccaacaggaacatcatttcacatcttccgaacaaggatgaaaattggcatcatccttggtttctaattaagaaaacccccgcttcgattggaaatctcgctgattttctcccttcgaagtggtctgcgaaacccggtagtgattaggttgcccgtatctttcccggttgtttctttatctttattgactaacaccgttgtttcatttcgcaactttcatcgcttccaacctcccatctgaagagttcatcgaattcttcaaaataattcttgaaggggaaaccttttggaattccttcactcttgaacgattcctggaagctaaccacagactcaggatgagtccgcctggtcatcttcaccaaattcctccccctccttcaactcaaggaatgtcatctcgggcccttgcggccaagcgtaagttgctttccaagccgatggctgaggcttgcgaggagaagaaaaagttcctcgcgacttctatagacaagaaggactacagtagaaccttgctggttgatgatggcagcaccgagggagctcgatttgtcgcttccttcagattaactcctcgtcgcgatcgtcgcgactcacgttctcctcggagggttcaatctcctcgccgtgattcacctcgtcctccccgagatgattttagtaacgagccaattaagaacttggttcgccggaagagagacaaatcctctcgcagcgattcttctccgtagagggaaaagtcgagggcccggactgaccgctcacctcgatcatctcctcctcctgaaccaatgggtcctccacgtccggttgatatgtcttcctcctcccaacctgatagtggaaagactgctcggagtgcgtctccgaaaaagggagactctgaatctcgagatgcttcctcgaggttaaaacctgctcttgtccctcaagtcaaatcactttcaggtttggtgatttacatacttcaactttttgtctttattaaaattccaatttttacaattcttccttcctcgcagctatggagacagaaggcagcgtcttccgatgcttcaagacccgttcgggttcgatcttgccagatttcaacaaatggcgccctgcaattcgtgaacgctatttgcttcacgcttaccactcatctcgggttagttccgtttttttttttttttttttgcattgccattctgcgaactggctcaccatccttggttcatgtataatgccaggcccagagcgaatttaacgacatgatcgaacattacgaagggttggtcatcggacgggagaaggagattgacatgtggaagaagaaattctcagctcttgaggctgacctcaactcttctgatggctctaagcacgatctggaggataaggtcgataggttgacgtcggagttggcgcaggtaaagggggaactgcaagactattatgaccggaattacaaactccaagacgaactgtctggtgttcagggtagacttcacgaatccgaatcaaccgccgacaccctgaacaaccaacttattgagcttgacgcgaagtacaaggcgctagccaagttgcgtgattctgagttggcaaggtcggcatcgaaggccagaaaggaagttaagggacgcgggatggaattgatccaaggggccattcgcttcatgcaaaccgagaaagctaggtcggacttggagtcagacatcaaggagcacgaaagcaacttgattctgctggaccaaatccatgaagctgatttctccgaggagcaagaaaggaccgagctgtcgactaacctttctgaaaaacggagtcgcttagcagctcttcccacttcggtcttcaacccgcttgacttcgaggcattctttactgaatcacctcctatcagtgaatcgggtttagattgggcaggtaatgcttggctcctgatatttattacctttccttttcttgcacctttgactgactggaattattattcctaggctcaagtgaggcggaggacgttgtcccgcccgtagctcctacagtatcggaggtcactccggaggttggttgtaccgcggagggtggtcaaggagcttcatctgatcaagcagctgccaaggacgcgaatgaagcttcgactgtcgagccggattccgaggtggctgctgctccgtagtggctgtgtccactttaaattggggattgtccctttatttttaagacttaatttattttggcctaaggaggctttattgtttctttcgaacaagatatttgcctgaggaggcttttaaacctttctaggttgtggcccaagggagtttggttaaaattatatgcgggtttgcaaagtccgctcttaaccttttgtggccttgtggcaatgctttcgagatttttaggctgatcagacctttctctttaaaatgcgagagctgagctcggcttaaagcgagttccccacttcgggtttagtcaactcggtaaacttgttgggcttgggccttagaaacttttgcagttgatgtgacggttgctttttcccttcttaaagagaacggctcgtcttttaatgtaataattgccttttctcgattttccaaaaatggtttaacccactcggaaacgctaccattaatggatttgtggttccaagacaaaccctaaatcattataaataaaggcttacttacctctaggctttattaaacatgactatagaatctcgcttgagaaatattttaagaatggaaaacgaagaagtagcccccatcgctcccggcagcccacttttcttgtccggcgacggatttgaaccggctggcgttctttttcctcacgccgtctttcacttcccttcaaaggagaagaaagaggcctgcgacttcatcgacaaggtgaagtttttttttttttttttgacttaaaaactttttcgttttgccttattcactcatttttatgctaggtcgtcgacaagcaccgttgcttgtgtgaagagaggcagcggctgggactcaaaaagcagacgctcgaggctcgcatcgcccgggtggaaaggaagatacgggccctggagagcgatccctttcaatgggagtggcggaactttgactccgttgctgagatcccgaagatgcttcggatgtatctccgcgctagaggagtcccgggtcccgtgaacgcccctgtctgcgatagtgaagaggaaggggacttggaggaggaggccagcaactgccggaaacgcgttcgagatcgtttcgaagtggatgccacgaacaaggcgtccacttcggaatctaaaccggcgatgaaggagtctgttcctgagcctctcccataaatgttctttaacttcctcacttttctctcttttttttttttttagaaaactcgtaatgggcttcggccctttttatttatggaaatatttgcaactttcctttctttccaaatattcttggagatgcgtcctttaatgcaggatccattcgagggcataaatctctccgtgaatcactccattccttggataaaatccgcagcttgctaaggatatggggttcctataaattataggttcgattttcctttacttctcatccttcttttcattttagcaggtatggagttcaatcttcgctgttcagaatctatgcccgacttctccagaatcggaatgatggatgaagatgtttcaaatgagccaaacaggcagccttccccacttcgcggcctctcgagatctcagatccgagccccatgtgctttgatcagggatctcccaatcagagaccaaggaacagcgacggcattcatagaggcacttgaacttcaacaccggaagcctacgtcggaaaagaggaggctccggaagaggattaaccggatgcaacgcaggcttactacggtgtcaagaaatcttcacatccttgaatctcaccccggagagtggattgagcttggaatctctgactttgctcgaattccggactgcatgatgccaatcctcgatcttgctggtcaaggaattgaagtgttctgctcgtcaacgaggatttcgtagttcaaagtgtacgatgagggacacttcgcccttttttttttttgaataaacgctttatttccaatctcttatatgttcgcatagccgaaccttcttcctttaataaagaaataaaacaaaaattttattaatagctgaactcgttttcgagctgcctacgtacccatttcgggatcaagccaaatcgtagttcatgtacataaacaatgcatgtggcttttaaacataaaacttctttaagttgatcacattccaaggtcgcttgactggattgtcttctaggtcttttaacctataaacgccgtttcgaaccacctcggtaataatgtaaggtccctcccaattaataccaagttttccagcaccttcttcttttttattgtcaaagacgcgtcttaatacgtaatctcccaggaagaacggcctacttttaactttagaattgtaataccgggctgctgcctgttagtaattctggatccgaattagagcttgatcacgcctttcatttatggtatccagtgaatcgttaagcattgctgaattttcttcctcatttaacggtgcttctgttcgacgaagtccgggcacattaagttcagctggtactaccgcttccatgccataaaccaaagagaatggagtttctcctgtaggtcgcctaggggttgtacgataagcccacaggacgggttggagttcttcataccatcctccctttagatgacttaagcgtttcttgagattgcttaatatcgtcttgttcgcggcttcggcttgaccgtttccttgcggatatcttggagtagaataactaacattaattcccaagtccgcacaaaaggcatcaaactcgtgtgaaatgaattgcggtccattatcagtgactatttcgtacggaactccatgtcgacatataatgtttttccaaataaaggtcttcaccgccgaatccttgataccaacatacgcctcagcttcaatccatttcgaaaagtagtccgtgaggactaaaaggtactgtacacctcgagttgatttgtgcaatggtccgatgatgtccattgaccacctcataaacgggtatggggcggaaatggaggagaataactccgacggttgatggattaatggcgcatggagttggcagcgcttgcatctttgggcgaacttaacacaatctgtgatcatagtgggccaaaagtaccccattcttttaactttaaaagccatagctcttcctgatgaatgacttccacataatccctcatgcacttcgcccatgacgatttcgacttcgggcccaaaaatgcataataggtaagggtcactaacacctcgcctatataacgcatcttttgataggcaaaattttgcgctaacgactttcattttcctggcctgccatttattctttgggagctcgcctgtcgtgatgtagtgctttattggctccctccagtcagcctcccagtctttagccggaatttgatcagctttgtgaaatatccgtggctctggttcgggatgttcgtttggctcaagaatattctcctcgagtaatggcttggtttctaacatcgtttctggaatcatttcttcagctaggacaacgggttccttgttagatgtatttgatccctttgactttcttcgtttgttgggtggcggttcgatctctggttcgccacggtcgcgtgccgctgctcgagaccttgtaacgacgagggtttccttgctgtcttgaatgcttcgctccgagatgcattctactggaataactctctttaactcaggatctgatgttgacgccaatgcggcaagtgcatctgcagttgtattctctccccgaggtatacggattaattcaaatttcgagaaatttttagatagatccttcaccacttcgaggtatgcctccattcttgaatctttagcctcatagtctccattaaattggttaactactaattgcgaatcgcaataagccaatatttccttagctccaactccttgtgctagtcgaagtccggcaataagggcttcgtattctgcctcgttgttggaggctttgaataacaatcggaatgactgttctagaatttccgatgttggagattccaacttgattcccactccggatccttgttttgttgaagacccgtctacgtgtaatttccaagtttggttctccggttgctctatcgttccaggtattggtagttcggtcaggaagtctgctaagacctgagccttcatactgacccggcttttgaactctatgtcgtactcgcttaattccaccgcccatttcgccaaacgtccggactgacttggactatgaagtattgttcggagtggttggttagttaatacttcaaccggatgggattgaaaatatggacgcagcttccgagccgaagttaccaccgcgagtgcgagtttttccatcattgtgtatctggtttccggatcggtcattgacttgctcacgtagtaaattggtttctgctccccacggtcttcccgaaccaagactccactaaccgcgtggtttgaaactgatacgtacaagtaaagtttttcatctacttccggtttggacagtacaggtggagtggttaagtatgccttaagctgcccaaaagcttcttcacacttctcatcccaaaggaatcctttgttcccttttagaatttggtagaaaggcaacgacttatctgttgacctcgagataaaacggttcaaagccgcaattcgcccagtcaaccgttgtacttctttgaagtttcttggagatggcatgttcagaaaggcgttaatttgatttggattggcttcaatccctctttctgtcacgatatagccaagaaattctccggatgggactccaaatgtgcatttcgccgggttcagcttcatttgatatttattgagaatatcaaaacattccttcaaatgtttaacatgatcttctttcttcaatgatttaaccaacatatcatctatgtagacttccatagtcttcccgaggtgattgtgaaacattttgttcaccaatcgttggtaagttgctcctgcatttttcaaaccaaaaggcattaccttgtaacagtagatacctctatctgtgataaatgacgtcttttcttgatcttcggggttcatcattatctgattataacccgagaaggcatccatgaacgttaacagctcatttccagcggtggactctacaagtcgatctatatgcgggagtgggaaactatctttaggacatgctttattcaggtctgtaaaatcgatgcaaaccctatctttcccattctttttcttgacaacgacagtgtttgctacccactccggatattgcacttctcttatggaccctatcttcaagagtttatccacttcgtcgtttactatttttgcccgctccactccaagctttcttcttttttgtttcaccggtttgaagcttggatctacgtttagttcatgacaaattataatcggatttatgcccggcatgtccgctgctgaccatgcaaacgacgctttgtttttccttaagagttcgatcaaagcttcttttatttggccagtcaaagttgctccaattctaattttccggtccggcttgtcttcttccagtaccacttcgactactacatcctccttcttctgcccactaggaaattttatttttagtccttcttttgcgggcttcgttagttgctattgaatcttcatacggtggctagctaagtaacaagtccgtgaagcttcttggtctccccgaattgtttccaccccatttgatgttggaaatttgatacattgatggtatgtagagggaactgctttcattcgataaatccagggagtcccaaggatgatgttgtaagctgcgggcttatcgaagacgacgaagtccacaattttcgatacttttttggcaaggaccggtagcttgattgtcccgagagacatggctgattcgcttgtgaatgcaactaatggagacggaggtcctactatgtctcctcggctgattcccattttctctagagtacttaaaaagatcaagtcgaccgaactgcctgtatctataaggatccttgatacttcgaagtttgcgacgtcaagagtaatgactagagcatcgtcatgcggtctttcgagatgccgcgtctcttcttcgttaaatgatattgaagcaccttgaaaatcaatttcttcacttaagcttgctttgagtaagacatttcgtctatgttttttgatggaacttattgaatctccgcaaaatctggaacctcctagaatcacattgatcttccccttcgaacttcttggttcttcctcgttggataaccttggtcttttggaatcttgatctttggagttttcctttgcttcgtggtattccttcacaaaatcttttatatcgaatttagaaagatcaccactagcccaaagctctgcgaggtgctttttaagaacgctgcaatccttggttaaatgtccggttactttatgaatgtcgcaatatagactttcatcatggacccaagtgtttgatcttcctttcccttggaattgcttcccgacggaattgttgaagggttgcgacccaaacttccttggtcctttgctctctctaggctcgaacttcttggtagggatggtgactgccggcttttcttgtttattccgtttggcaaaactttctttttcgtcttctacctccatccaattgtttgcacggaagagtgcatcctgaattgtatctggtttatgaagtattaaatcttctttaaaccttgaatcatgtcgcaatccttttcgtagggcagataaagctgattgctgtgagattcttgggagttttgatagcactcctttgaatttggtgatgaaaactcgaagtgactcattagatccttgcgttaagttccaaagatcggcatccgaaacgcttttatccataaggatagagtattgctttaagaacacggctgacagttcgtcgaaattgctgatcgaacccggctctaattgggtgaaccacattagagcttggccacatagattctccgaaaacagcttgcaatagcctgcgtcctcatcagcttcatccaactcgactcttcctgcagcgatcagaaaggctgcaaggtagctttttggatcctccaatccgctgtaagggtccaacttgagcttccgggaatctttgatcctcaaacttgcaattcgcgggataaaaggggttcgccttgcttcttcaatgactcgattgatgtctggcttcgaacttgtagcctgatgaaattttgatttcatttcttttaattcctggctaaccttcctcatggtctcgaactggtcgaggttctcctgctcgtactgagctgcaagttgttcttcatccccgagctgcatctcttcttccgacgtctgagctacattattagtagcaccgggagttgtttgtccgctggtttcatttcgtgcagcggaacttggcgagttgaatatccctcttcgggttcccaccgggtttcctgcacttaaagagcgaacacgagtttgtatattattgacgttttgactaagagatacctgggatgtttgcaatgtatcgacggccttctccacatccgaaaatttttgtgatatgtccgacatggtttgctgcatagctttgagggtttcggccaatgatgtctcaacggcgtctcctccggacattgtcgcttatctcgggaatgtagaaaagaagaaatctgaccactcaagaatcctgatgtccccacagacggcgccaaaatgtggatgtcggatttacacactcaagtattttgttaagtgggaaagattattcttgagggacaaaaaatgaatacgtaagaacttgtaaattgatacgagaattgctatattatttctctctttagaggaagatcccctttacatggccattggcctctatatttatacatagctaaacgacatttaaaatgagtaattaagtacaattatttcttcttaaatgtgtccgttttgattcttcggctttaaggctcaacgcttgaatttgagttgactctgatcttcatgggcctcgcctcttttggcccaattgtccttgaaccgacttacccgtgtcttctataccgaactcgcgtcacagtgcagtcacttcggattcttgaaatggtgacaaccacttcgaccgttccttcggctcacgggtccaatgggcttcatcctttgcgggccattatcctgattacgcggcaatctttggttggtctcgtacttctggtgcgggatccgacaccaacacacaggtaaaaggttttataaagatccaatagtgtttcgttagaaaggaactaatttgataaatactgattaccctcggttccaaacctaggagacgttaccatttgcttcttttttgttgttgcttgtggagcaagagatgagttttttttgtgtgtatctgaaaatgaaccttcactgtcaaccatttagtttatggatacgtgtatacatatgagtttatactttattcatccttttttacaactgcaggtggaatctgtgaaacgtattttcgaaagccacccagaaatggcattaatgtttcgagcaaagaaccaacaattgaggacttcatgcataaatgtcctcctcaacctaatcgagacg

SEQ ID NO: 5357 - DNA, 11760 bp, Arabidopsis lyrata
  Intron number 3 from transcript 496560 (locus 496560) deri ved from phytozome v7.0 (chr-ID scaffold_8; pos 21098993 t o 21110752 reverse strand)
agaactcaaagaaggagtatttacgatacctgcaagcgaatgcgatcgcggctctccagagttactcaaacactttacaagagcaaaaagatatcgtcctcactgcagctacttatgaagagtgtagtttcttcagacatacgatacccacggcgacaagcaacattggtaactacttttatgatttcatcaaaactttgcaagatggtttggtcgatgtgagggtgaagtcatacaacggtggggcgggtcctttatggtactgtgatcgctgcacctatgcaaacacttggcacgataaggagtgtgagatgtgctattatgatagtgcctctcttgtgggagagctaagtgatttgtctcttaacaaggtttcttaaaaccagaacaaacgatttaggaggcatgaaactttcaacttgaatatttgacaattgttttgctctgtaataatcgagactagttttcttcatgttcttaaacatttttggacaaataatgtttttttcccaacttcacacgtcctcttttgggaatcttcacaccaccaccttgacgcttcttcaagattttccaccactgcgtttgcttggcatcactatgcagcttctgattttgtttctttgagtgttttctatgtctcaccaatccttccactagcgcgtgaaagtggccaccttgatgttgttgcttatgtgtagtaagacctctggattctgacgtcgtccgtttcttctcatctgatttctctttgtgcttttggtgaaatttactctgcaaattcttccaagctgatggcttattcttgtcgtggtggtgatgatggtggtggtggtggtgatgatggtgaaatacttgtcctatcttattctttatccttttaaatcgtcccattgcatttcttctctgttttgcaggttctcttgatgcgtctctgtttgtatgcggaggagaagagctgacttcagattcagaagcagagtcatcactctgtggtggatataatgattctgactcagactcggtgtcattctctgcttgagtttcccagtctgagccagagcttgaccctgtttccccagagtattcttggtcaattgaaacttcttcgtcttccgactcagaacctgtcccagacggtgttcgttcacgctctgtttcaaaagattcatcatcccacgtttcggtttcttgatacatcaacgttggtttcatactaggcatcttttgtgacgttctgtttctttgacttggcttcttgaaaccaacaggtctcacagcaagaggcggtaatggctgcggtcgtgacgtgacccgaacaaactgatcattagaaggcaaaggaagatcaaacaaataatggagtcagaatcatgaagattttcagacagagttaagaagaagaagagatgcgagtaatggagtcaaacaaataaaccgattgcaaattataaaattttggtttcgtgtctgaaaagcaacgttggttcggacatcgtttgagtattcgttacaaacgacatcgtttatgtggttatgaaaaggatttgattcaaggctcagtgcacatgagatgaatcaagtagtcgacaaaggaatcaggtttgcagaatgaaaaggatgattaaaatcactgatacaggtttgtggtcttaacataggccatggtggagactgtgtgattgaacatttcataggtggtgaagcttttggagttttttctgttgaattaacaagcttgaggtgttttcttgacttgttaaatggagttttgctgagtggttacatcaatatataggtgttgaatgcatcatgaagtgatcgttgaaaagtagagctttatacaagtctgtataggagctggttttcacaactctggtgaactaaagatgtgttgatggctcaggtttagcagtgtgagtagtcacagctaaaatgcattgaacataagttacatgctgaagggtagagcaagtttatggtgtattaaactgctacatatcaaagataagtgatgactctaaggagcctagactgaatccaagaaagtagaatcatgtactctctttctctcaaaccatatgctggtgactatttgttgcttatgctatcaagtggagatttgtgaagatgatagcttgtagcacaagccaattttaagtgtaaaactcacaaccgttgaagactaaccaaaggtgatataaatcaaatcttggttgagttacttttggaccacattaatggggaaacagctatgaaggaaattgcctggaagtagcctcatatcagccataaggacattttgtctgtttgtgttcaaaaagggttgcaggttgctttagctcaaggaagccctagttagctatgtctatatataggtgcttatgttcattaagagaggccaagggagaagagagaatgtaatagcacaatgtagatctaagaagaagagttagacgagtgtagagataagagaaaacatgtattagtataagcttatcattgttattcttgaagtattataaagtgattataagtactagtgaaggatattagacgggtcacttgtagcttcttgtttgtaatcaccatcttcttcatagtggagttgtgatctatcgatcctaatcagacgtagcgattcgttaatgccctgcaccgggttaacaaatcctttgtgtgctcctcttcttccttcatctagctctgttttatcttctgcttcttctccatactttacttgatctgtttccgtattttggtgttgatgacaaatgagataaagcttaagcctttacaggttataaaaccttaacagttctgtaatatggttatttgatacaatgctagcttagcagcttttgtaatggtctgtaatggttatttgatacaaatacaatgttagtttaaacttgatgaaaatgctagcttagcagcttttgcaatggtctgtaatggttatttttttatatattggtacttcatacagctctagttcgggttaaaaaaaactggaaaaacggtctatttccccccaataactatcgcatcataacagatgcagcccaaactttaaccccggttctaatgtccctgaaatgtacctttgaggcctagttccccccgaaacggaagttcacttcttatttctctcctaatcaaatgttcgagagttagaaccacacgaatctgggtttaatcggtttactgtattgaaaacccaatgctaaaccgattaaatgttttattaaccagagtaaaccctaatgtaccaaaattcaacccgattacactaacttaaccaaaacccaccccgatttaaccccaaaatcgaaaacgcaaaccctaaaatcagaaaccaaaaaaagctcttcaatctccgacgaaccctagagagatcgaagcttccaatctctgcaatcgaaggatgtctgtagttgttcgtgaccccgatattggtgatgtcgatcctgaagctgaagacagagaccaatttcacgtcgaagaaatgttgaatgagtggaatgacgaacctccgattcgccatgatgtgtacccagagagcgatgctgaagagaatggcgatggtcctgagagagttcatactcatatcaggcgaggcgatggtcatttgtaccataagcaaactttcttcagtggagttgcgttcaaggaagctgtggttgattatgctcttaggacaggatgcaatctgaagcagtacaggtatgacaatgataaaattggcttcaaatgtgttggtaacgatggtaaagaggaaggagtacgatgtgaatggcaagtttatgccgcgattcttcctaaagataacatgtggaagattaggaagtttgtagataaccatagctgcatcccaaatggggagtgtgagatgtttaaggtgccacagatagctaggttattcgttgataagattagggataatccggaattctatatgccagctaagattgaagaaatgataaaggagcaatggaagatcagtgtcactaggaatcaatgtcaggctgcgagaaagaaggcaaggcaatggattgagaaggagtatgatgagcagtttgcgagattaagagactatgctgctgagattcttgagtcaaacccggattcacatgtagaagttgattgtctgaccaatgaggaaggtaaagacatgttcaataggttttatgtctgttttgatagcctaagaaagacttggaaggagagctgtaggcctcttcttggcattgatggctgctttttgaagaacaaggtaaagggacagttgttggttgcattaggtagggatgctaataatcgcatatatcctgtggcatggggagtagttaaagtagagaatactgagaattgggtttggtttgtgaagaatttgaaggaagatttaggattaggtgatggtgaaggctacatcatgctctcagataggcaaaaggtatcttcagtttcttttgtttccttctctttttggttttaaattctgtggtattgatatattggtttgttcttgatttcagggtttgatcaaaagtgttcaacttgagttgccaaacatagagcataggatgtgtgttcagcatatatatgggaacttgaagaagaatcatggaagtaaaacccgcatgaagccactgttatgggatttagcttgggcttataatgagaaagattataagcagaaactagagaggatcttctgctatgacacagttgtcttcaatgacatcatgaagacaaatccaatgagttggtgcagggcattccagaagagaggcaactactgtgaggatgtggacaacaacttcactgagtctttcaatggctctttgaacaaggcaagagaaaagccatttgtggctatgttagaggctataagaagaatggctatggtgaggattgcaaagaggtctgttgaatctcatactcacacaggtaaagcttctgtttttttttgtatacttgctatgaatttgggtctgttttgagatataaagctcttcaatctctttttttttgcaggtagctgcactccttatgttgcattatttctgtctgctgaacacaagctagcttctgaggcaaaggtgtctacaagcactaatgggatgtatgaagtcaggcatggtgctgattatcatcgtgtgtgcttaaagagctacacatgtacatgccagaagtggcagatatgtggcatcccgtgtgagcatgcatatggagtaattctggacaagaagcttgcaccagaggactacgtgtgtcactggttcaggacatctacttggaaaaaaaactacactgatggtgtgtgtccacagagaggtcctaagttttggcctgagactaatgctcctcctgtgcatataccacagccaccagaaggagagaaggataaggagatgacaaagaaggataagaagaggaagaagggtgtcaatgagtctcctactaagaaggcaccaaagaacaagaaaaggatcatgcattgtcgtgtctgtgggacagctgatcacaatgctaggcatcacaagaaagataaggtttgttttgttttgttttgttttgttttgttttgtgtccaatttgacaacatgtgatcttgtgtttcagggttctcaagatgttttccactcttctcaagctgaaccaagtcaagggtcactcactcaagcttagtggagtagtagctaagtagatgtagggcacaaatgtggttgtctctatctaattttcgatcacatatgacttgtgtatccctctgttttctaaaccttttgaatgtttctaggtcttttgaattaatgtctcttcggatggatgtagaatgaatgttttaaagaatgttggtttctcttaacttgaatttgattgttttgttctctgttatgaccaattcgtaaaaacacagaatgaccaaagccattctctttatccaaaccaaccaattctcttaatacaagacaaccaccattctcttgatacaaaacaaaaaccattctcttattacataatgtcttgatcataaatccaaactacaaactccattagcttaatcataaatctaaagctagaaccaaaacacaaacattcaaccaacacaacaactacaatgaagtgatcaatggttcatccgactaatttgatgattccaatcatgatcatacaccctatcacaacgacaatcatcatcttcttagtgcttcctttggcttcagacaaagcatcttccaccttctcaaatatctccttctctatcatcatttcgaccttctcgcaaacgatcttctcaatctccaaactctctgtcttaagctttgtaacctccttctcaagttcaacattcttttctttcaatgcatctatctcattgagcaaggcttcatcaacccatttgaacgtgtgttcatcgttccttagctacaatttaacatgtcattggtccattaagagaatcttaaacaagatacaatacaaaacaattgaaacaagcatgaaattaccctaagtttagcagcaacaccacaacgatagtatctccggcaaggattggaatcggattttgaatttagtgccacaatttcttccccgcaccaacatctctttggcaccccgacgattctgcctcttccacgaggacctgtagatcccgacgaactcattgacatattgctcatcttgcagcaactcgatttctgggttaatcaaaattttagaatctagggttcttcaattgtggaaaaacgatttcgaatttggggattttgattttggggtttaaaagcattagtgggtcgggtaaaaatatggaatcggttttttttttgttaagttacgaccaaaatctggtttggtctcgggtcaacgcaccaaaccgacgaaacccagacatggagacatttagatggtgaacttccaattcggggggaattaggcctcaaaagtacatttcagggacattagaaccggggttaaagtttgggctgcatctgttatgatgcgatagttatcggggggaaatagaccgtttttccaaaaaaactgaatacgaagttttcagtttagtttcggatgtgaaataaatcttgataaccgacccaaaaaaatcgagctttttcgaaaagtttatattgcataatttttttcaaattggattctcttgccacacacactagtttaatagttttgtttggccagtttttgcagcgtccgcaatgtactttaaagtgaatctcaggatccttgcaataaatacagccatcgagcaatttaccataacatcaagtacacatatcacttcataaattagttataaaacagcatcagaataacaaaacgacacatacatgcgtttactcttagtcccataaatgatcaaaccaaagatgatcaatcacagagtggatcatcataacataatttgtgagcttccggctccatctgatgataggctttcacaaagcctactccaaagccaagctgagctttcagtaaaaggcagccctttagatacaggctcggctaagagaacattcatacatgaccaatgtaaagcctgaagattactgaccgtctcgttgtctttgaggttttttgagagtacaatcaaattggagtgtgcaggattgtccagtgcccagaaaagaatgtccacaaacatcttatgaactctcgcatgaatatacgcctcagcaactacatatcaacagagatctagattacataagagacatatgtgtgtaaaaagagagagattatatatattaggtaaaggaattcactcaccttcgggtacgaaattgatactgattccggcagcctcatatttatctatcatttctttggggaggaggtttttctcatcttggtacaaccagattgagacaggaccattataacaacccttatccttaagagctgatctgattttcttagagatcaaataaggatcaccattagggattgggaaatccaccacgtcccagaacacacctgtgttaccctctgccaccggaaatcaaatttcaatacaatccattaaaaaaatttactatcaagtacgacagatcaaatattagttaacaatcagagagatcttattatcaaatataaagacgaaacaacttctagagatatagcgagatcttactggcgtatatctcggcccaataagcaccatccacattagacatggtttcgtcgggatacatggtttcgtcgggagacatggtttcgtcgggagacatggttcgagtttcgacggagagctacaaaattagagtcttctctcaacaacccaatagagacgtagacatatgcggctgcagatctgaaactttgtttattagggttagatctgataatatcttattgggtgatgaaaaaaaaaaaaaaaaaaacaattatcttattgggctgggcctcgcagatatcagtttggtcgtgttgtggcgatctctgcctttttcatacttcaactttaattagttatgttcattttatatccgaactagatatggatccgtgcgtggtacgaattaccggtcaagactataatttttttttttttccgtctaaatgatcatattaaaatgaggagaagtattcaaatacaaaagaaacagaacatgataacccaaaacagagcataaaccttaaacagagcctcacgctcacaagaataagcaaaaacactcaaagctttaaactacattaacgcctcttttcctcatcgatacgggactgcaaccacacatgaccaccacgagctaagtaggactgctcacgtccatccctcgtgacgctcgaagctatctctcgtgctatcccattcgcttttgtagatgataccttgaaaattactttaccaaactgaggaagtaagcggtgaattctgtcaagataagaatgataccgtggccaatttggtgaatcaataattgcttccactgcagcattgcaatccgaccaaacctcgatgttattcaaatgtagatcataaagactgtgtaacatccataaaaaccctcttaattcagcggcaatgcgatttgaagctggtaaaaacatttctctcgcatgaaagactgcatctccttggtgattccttacaatccacgttccaccacacatgtgagaatcattcaaccatgacacatggatattacatttgagcatctcaagcggaggtttagaccaacgagaatcaagtctaataaccgtagccctgccacttgaagaatgtgatggtgcctccattaacttattccacacctccgcttcttcaagtgcatgagttacaagagcattcaaatcaccttgagtcccagcgtattttataccattacgatgcttccatataccccacaaaaaccaagggatcgccatacgcatattgagagatactccatcattgctcattaacttcaataagaatgctaagttgtcatgtagagactataattcttaatatttttattttatttttgtaaggttaactaaaagtctataaatgttcatatgttgtattattgaattctaataagttatttacatctatcggaagagtgtgttacatcttataatttcaatgtaggcaagatgaaaataaaattatgacaataagaaaatataaaattatctactatacatttttgcagcagtttttggggtacccaaatcgggtcaaatttgtttaattttgacccggaaatcttcaatcggatctttccttaaattttggcaaaattaaaaaacgaaaataattaataaaatctaaaatatatatactttctcaactaattactatatttaaacgctttatttatggtatattctccacgatttttatagataaagaaatcaaatatgatgatttaatgataatataacaaatttgcactaatttcctaaaacctctctacctaatttaaacataaatatatgattcttatttcacttttatttgatcttatatttatattattttaaattattataaaatatataaatagttagtaaattttagtttttttttttctgcatatgttacaattcaaattttttaaaacggacatatattactcaatcgatgaataaaaatatgtgtgtaatctatattaacatttttaagaacaaattgagcatttaatcatgtcgttattttattcagacccgaaattgagtcattcggatctttctttaatttttacaattatctaaaatgggacagtatatcacgggtgaaatcctaattagtattttaagatacaattataaattgtttttacgggttggtccaaaaacacacactaatttaaaaatatacatggaaactattttaaagcaactttcaaattaactcgaattatatgacatttaaataaaagtgttattaaaaaaataacaaaatgatgtttaatttcattttagattatatggttggacgggtttgggtcaatattaatacgagacaatataccacaggtgaaatcctataaataacaaatcaaaatacaattatacaatcttaaacactaaacaaaacaaatacaacttaaatttttttattttagatacaacgcatgtgacccgcggtatacaacaaaaaatattatacacaataaattcatcaatttataaaaataaaaaaatcaaataattaacccgcggtgtaccgcgggtcatatcctagtatagttacgtaaacatatgaacaatatatgtataatatgtaaacatatagtctgagttacctaaatatagatgttttttaagaaaagtttgacgtcataataaaattgtgacaataaaagaagagaaaatatgagaccagagccggccctagccacaagctagggaggcatgtgcttgtggccccagatgtagttattaatatatcggccctcctttttctaaaattctcttatagctcaactggttaaatgctggccagaaggaagtgcaaggttgagggttcgattctcacatttgtagtaatgctttaacaatttttttgagaagaaattaggcctctctttttttctaagcttgtggccttcaaaatgttagagccggctctgtatgagaccgtctatatccatgtcatgtaactttacttgataatataaaatatcatcgatagaaagaaacaaccttataaaaaattagagaatatacactaaataacttaagacttaaaaaaatccataccaaaaaagacttaaaaaaaattaagaaaacaacatcagactaaacattatctatttgctacgtggctaaacaacttgtgtttgcaggtttcaccctaatgaaaaaaaattatctttcttttgcaaattacatagaattgatctatgtaagtcttgatcctactcttttgtggtatcttgctttaggcttcgtttctgttcgagatgtttgcgatcgaggaagcccacaaaattgaagcagtagactctggattctgtgttaaaacagaagtggggattttatgtgacgatcgctgggacgtgtgtcagaatttacttgagcaagccaaatccgatctagaagctttcgaggaatccaacatcaagaaaccgagttatttattaagggagcaagacattatgattataagagaagggttgatgttgattgttcaatgcagacgagtccttaaatggtgttgtttgtatgactatttccacacagagtatgagattgagaactcgaagaaggagtatctacgatacctgcaaggaa

SEQ ID NO: 5358 - DNA, 417 bp, Arabidopsis lyrata
  Intron number 3 from transcript 492039 (locus 492039) deri ved from phytozome v7.0 (chr-ID scaffold_7; pos 6176221 to 6176637)
aggaaattctctatcggtattggacagtgcggtgagttttcgatcattttgttcctgtttgttgcttattgaagatagggccatggtggtatttgtagttctgcaacttgttttatagtcacagaatgctgaaaacgttttgatatgaattcaaaagagagagttttgggttctgggaatcttttgatcaaattgttctgtcgatttgcttgtttagttaaatcacttgagctcttattatcactccgggataagagtatgagctcattcgatgtaatgttttgaaagttccaataggatcatacatggtattagcaaggaactgaaactgttaatggattatatagtagaatggaccttaactcgtttccttgcttcttctacttgcagtaacagcggttcttctgacgtttttga

SEQ ID NO: 5359 - DNA, 3460 bp, Arabidopsis lyrata
  Intron number 1 from transcript 327351 (locus 327351) deri ved from phytozome v7.0 (chr-ID scaffold_6; pos 21937162 t o 21940621)
ctcttctcggaaacaggtttgagctagttttaaccattttcttttatgtgtaattgatcatctgtcatgtattcttattatatactttctctgtcctattttataagatgttttgtgtaaaaatacaaagattaagaaataattaatgtttattttttataggaattcagccaataaaaaaaaactgtagaatttaattgatcataacatactaaataaacataaattatgtatagaaatcaggaaaaatcttgtaaaatggaacaagtaaaaaaatgctaaaacatcctataatttgcgacagagagagtatgtattaaccacaccgtctttattaataatctatttttttttctttctaaaacatgtattacagatatgaatccaaatatcgacgcagcgaagatattatcaaaaatagcgaggctatatatgccaaatctatatatatataatgggagagttatctctccatctagagtgtccacatcatcatccaagtcatcctattttaattttgtgtggactccacatattttatttattaaaacaaaaaacactaaaactataattaattcacacattttgtaatttaaattattatattttattaaacaaaaataataatttacaatagaataaattacatattaaaaaaacgaaaaaaataaatttataacacaaaatatgaaatttttgaatagagattagataaacataaaatataataattgtattttaacatataacgagtaaatatttctaaatgactagagatatgaaaaaaaaacttatcatatattttaatgataaaacaatcatttttaagagttataattattttgtagaataaagaaaaataagacttaaaatatattaaatttaaaggtaaaaagtaattcatttctgaaaaatatacatttaaaattaaaaaaaatagataattttttttaatgttaaagtatcaattcacgatactgattaaaaaaaaaagttgagtacatattattatttatattaataaaattttctatattataagtcttttataaattaaaaaagtggtgggttttaagaaaaaaaatcaaatgaatacctaaaaaactaaaaactaaatattaattagtgtttatgaaattttaacatagatcaaaaagtttaaggtgatttgaaataaaacaaaaactatcctaaacatcacaaataaaaataataataatccaatcgaatacgaaactgtgtaataataatatttgtgaatgctatttggaaattagaatagtatttgccatatttgccatattttttaatcaatcaattaaacattccataaaaaaaaagaagaatagttctggtaaattgaagagttttaattagaagtaaaaataaaagattaaaaatatattttaaaatttgaatgatttatatgaattcgtaagttacgttacgaaaatcaacattaagaatactctataaaatcatagtatacttcaaattatatatgtgaatttattttttgcatttttcaaacggtcaagataaattgcaaaatttgatgttgaaatcagatgtttgtgaatatgaatgagtccttgtatgaaatttgtagtctttttttttttccgtcaaacaccattttattaagtaatcggacggagactttcttctagagagagccaatccggagccgatgtgcttacatgggagaatagggaacctcgtgctcttgccttttttgcgaggcaatccgcacggacattgttacaacgaggaataaatctaatagagaaagaggggaaagaaagcttcaaaagcttaaaatattgcaattctactgctaaagtaggccaatcagaagggttattcaaaatggtaattagctcagagcagtcagtggcgaagtcaaaactcgtcttcaaatctgagatgaggcattccatcgcccaaataagtgtttcgaattcggcttgcagaggcgatagtccccgacgagaacttttcaatcccagcaagataggggtttcattatccataacaatccacccgtgcccactgagagtatccgtgacatgccaagaagcatcaatttggcattcagatggagcgtctcctgtgaatgtaagatcaagagggatcctcactaattcaacgaggggttcctccttagtatttgccgccttccaatctttcgcctcttgaaaggcatgatctagcgtattttgaggagattctcgaatattttcgaaaatcaagctatttcgagccttccatatataccaaagtatctatgggaaaaaatgtccaatttcctctccattcatcatcccttttgctctccagaacaaaaagtccaaatttgcgaaaagggactgactagggaatgatgggatcggcgacagagcccaagtttgaagcgctggtggacattcaaaaaggaggtgattgattgtttcttcctcagcgctacatcttgggcagtgcttctccttaccgatgtatgaaatttgtagtctataaagcaattttacatgcaccaaacattgtcaaagaaactatatgaaaaatatctcccgagatttttgaatgttcactttaataaaaagatcatgtaacttataaaaaaaatatgagtattgaaaaatatgactgaaaaaatatatgatctatcttgagaactaaatcatagtcgagtatattatatgtgaaccaatatatggtgaaaagagagtagatgtcaggagtcgacgaatgaatcatagaagataacaagaaaaattgtagtaaaaagtgtgaaaaaatatttactactacggaagataatgaaaatgagtaaagtagatttttcaaaaattcacattgataaaaaatttaaactaaaatcccgcgcaacgcgcggatacataatctagtttccccaattaccatatcatatgcatgctgttaattaggcttgtatttaatttaccaaaaaaatggttaatcttctacatatcacatgatagtcatcattatagtcatatgatccgaggttaaataatgttcacatatgtttatataattttttttttactttagtcggttttaatatgttacttagtgaaacacaaaaaaaaaaaaaaaaaaacctataacataagataatgttcggatcatatgattgaagagtttcataagaaaacgatatatatcttatttcagtttccattctttgaactaaagtcttctatattttttgttttaaaaagttgtgcattttatttcaaatttgaaattaacttcgagacaaagtaacgttcctcgcttccaaatagaatatagcttatatattgtcaattttcgtgtgttatattccaagacgcaagactttgacatctctaccaacaccttaaaccattattttttccaaggaaaacatattcagtgtaacttaacatatttctaaaaattcttttgtgtatag

SEQ ID NO: 5360 - DNA, 16823 bp, Arabidopsis lyrata
  Intron number 7 from transcript 489982 (locus 489982) deri ved from phytozome v7.0 (chr-ID scaffold_6; pos 21298575 t o 21315397 reverse strand)
tttccctttacgtataattttgaatatatcagagtaaatggaaaacccaacttaagtcaataaaataaaatattaaaaggaaatgtgaaaaggaaatattttcgaaagctaaagttgtgcctgtgtatgtttagaagttcttaaaccgaaattacttcttactttggctaagtagccgatcggttaggaaacaattttgtactgatcagtgaaagatgcgcaaggagcgtcatcaagttcacagccccgtttgtggtgcggtatgggctttatttttgggaagctctgtgggatatagtgtatactgcaacagagtttcataaagaggaatcctgaaaggaagaaggtatacgcttttctctcagcttcttcttgctacagccttggggaatgagaccgagaaagagtaacacggcagctcgtatgggacgcatttttttttacaaaaagaaaacgatgagattaaagaacttgaattctgatattcttagaaagatttgttgatgtctttgaacaaaatgattggattcttgaattctgattgtattaatgtattatagacaaatcggctgttatggacaacattttttttcttttgtgattcaacataaaattttatttagtcagattgcattactctttctagatatattaaaaagtacaaactctaaatttataggtacctaaaacagagaatataatagttgaaaattgaaatatgagatatagacaaatacgactagatttcaaataaagtgacaaaatatcacaaaaataagtctatcaaaggaatcatttcaaatattatatggaaaatatcaatggatatgctcagaggattgaaaaattaggtgagtaaaatagatactatttctacagtaataaaactaagaagattactatactatctttctttctctctttgtttttaattttttaatttctcacatttacctctctcttctcttcgttgcacatttccggagaaattgctccggccaagaattcatctcagtgaacttgaaataacaaaatctaaatggagtgagtttttaattccgtgatgggtaaagccatggacagcagttttggataccggcggagtctatggttcaatttttggttcaattgtggtgtcattcaagtaacaaaagcaagatatcatgtgggtttggaagttcatgaacccggcgagctgtcagtggtcattaatgaaaaattttgatgattaaacttttttttggcaaagttggaagaggagataaggaaatatggtgaaggatgtctcggatttcgtcccagaaaaataacgtacccgttaacccataaaactttgtttagaccgtaaacaatttggttaatctattaaactatcttttagtaatcatttattaagtttgtatctttatgtttttcttgtttagtaatgtattaacatggtacaaaaaatatgtaattcacacaaaactttttcttttaattaaattttgtatcttgttaatattttatatagcatgtttataatttttgtattgtgttaaatgttaaattttcgacatacaatttactttaccatgttaaataaataaatcaatatctaaactaatacataatcatttgttaggtatctcgtcggcatcctaatttatcaatatataatactatttaatgtattaacagattaatagtaatattatttgatatatttaatatcttaacacgttacaagtatgtgtagtgcgttatcattattgttatcgttatcattctgtgtaatttgtttataatatttttatcatgtaattagttaagcttttttaaaaatatatattaattcacaattctaaattaatataaaatattaatttttttatgatatggcaacttgtttaacacgataactatgaatgtaacacatattatatgaacttatcacgataatatatcatttaacatgtaaataaaatcactgttcacatagatgaacagtgtcgttatgtggttgataaatattatccggtgatgaacagtatcatcgacgccggaatgaatagtgtcgcagatttattgaagtaggaaaacaatttttttaatcaatggcattttcgttattaatcataaatagaaggagaaacttggtttattttttctttctctttcatacttacttaattactaggatatgacccgcggtacaccgcgggttaattattttatttatttttgattttttataaaatgtagaatttgttgtgtataatattgttattgtttgtgttgataaataaatctcgattgattgtgtgcggtttttagttagtcgttagtttacgatattatgtaatctaatattattttgtcttttacatagttcacatagaattatttggattttatagtaacaatatttttttttatttggctacatcacatttattatgtttgattgtacattaccaaacaataaatatcacattttattgttaattctactatttcacccgtggtatacaatcctatatttatatcaatccaaacccatcccgccatatattcccatctcgtgagaattaaacatcattttttatttatttttcttattaatagtatttgttggggtcggattccatcccttagcaccgagccggatttggacgtctcagggaacttctgaaggcacctcggagaagcataccaaccacttcggaggaagcaagccatcacctcggtgcaaagtgtcattcacctcgggtcagtacaacggtcgcctcggggaacgcccgtagcctgctcgggatctgccagcaagcttgtgaatccgagccggctctcttcgagtacccgagctggttcacaccagcacgcccgagctggctccttccgtgtgcccgagccgctttccctcggaaacccgggccgcgcttctcttatctccgagccgattgcacaagttatccgaagctaagtctccatcatcacccgaggcaaagacttagtaaatattcgtcttcaaagtaccatttccaggcaaggcgtcatttccaaaaaagaaggatcatttccgatagacccggaaatgataaggaagaatctcgaaggatcaactcgaatcaggaaatcttccaagaaactccgaagaataaggaaattatcctaaatccgcgatactctaagccgacttcaagataaatggaaatcttccgagaatatcgctggagaggtggtttatgatcgctatataaagagactcaaggctctcataggaaaacaagcaatatcgctctagaatttatactacacaaagctcttacagcacgaacacctttttcttttacgatcaaactcttgtacgatcaaaactactctttttatcaataaaatcaagaacaccatctttggttacaattgttttctgttgttctttgagaattcacgcttatcgtatccctaaaataaaaccctagacaaatctcgattgtgttagtttcgacttccacagtttggcgccgtctgtggggattactttagaattctcttaccctaagaacgcaggactcgaataccagagaggatggtgaacgaagacgatcgtcagacaccaccagccggaggagggaaccctaaccctccgaaccctcagaatcctcaggccgactcggcaatctcagcgaccctagccgaactgaaggatatgatggttaaattccagaagaaagccgacgaccaagaaaaagctaacaaaaccttggcgcagcgaatcgacgaaaacgcaacccgtgggcaacaaaaaaccacgcgtttctagactcggccgccatgagcccggagggatttgcccagcatcaacccaacaagactcacgttcgtgacaccaaccgacaatactagagtcgcaactcgagccgaccctgccagacgcgagaatcaggatgatcccaccgagccagacgcagtggacttgacgaacgaggcggatgatctgcaagacgagcgcacccgagccggagctaattccgccgagcgaactgatctcaccgatgacgaagaaactgaggaaaacataaagtgggccgaagaatccgaaagagaagacgagctcagcaagatccgagcctccctagccaaggcggaagctgatatgaagctcgtcaaaacccagatacatagcgtttcatcctccgcaccgaacattgaccgaattttggaagagtctcggaatacgcctttcaccaaaagaatttccgaaatgacgatgtccaatctggggaagttcaaaatcgactcttacaacggatcaaccgacccgaagtgtcacatcaaatcgttcgtgatatccgtggcccaagccaggttcaagcccggggagaaggatgctggtctatgcttactattcgtggaacacctcaagggacccgctttagagtggttttcaagattagaacgcaactcgattgacagtttcgacgagctgtcgacacttttcctcaagcaatactccgtgctcatcgaccccggaacctccgacgcagatctgtggtctctatctcaacagcccaccgagccgttaagagatttcctcacaaccttcaaatcgacactagccaaggtcgaaggaatcacggatgtagctgccctttcggctttgaagaaagctctctggtacaagtcagaattcaggaaagagttgaacctgtctaaaccaacaacaattcgcgacgcgctgcaccgagcttcggatttcatcgctcatgaagaagagatggcgttgctagcaaagtggcatgagccaacgaagcaggcgccccgagccgagaaaaccgagaaaacccaagcgacgccttcggtccagaagaagacgcgcgggagcggtacgtatacgcatcacgaagggcgcaatttctcgggataccataactaccagattgacacgccccgaggcagaggccgaggccgtaggcgaggaagagaatccttcacctggacgagggatcaaccaccgagcaatgataaagaatattgcgaacaccacaaaattttcggccaccatacttcgagatgccgaagtctcggcgctaagttagcaactaaattcctagctggagagctcgggacgaacgtcacacttaaggacctcgagccagagccagaacccgaacagaccaacccgggaagagaccccgagccaaggaatcaggagtcacagaaaagaacccgggggacgcaagacgaagaccgagacaatacacggcaaaaagtcctcaccataatgggtggatcgccgtaatgtcctgacaccgtagcagcaatcaaagcttatcaacgccgagccgaagcgcctagcaattggacaagatccttcgatcgacctaacgacgtgatcacattcgaggaaagcgagacgaacgggcttgacatgcctcataacgatcccctcgtcatcacattagcgataggagaccatgacatttaccgaatattagtcgacaccggcagcaccatcgacgtaatctttcgccaaacgctccgacaaatgaacatcgacatgtcacaggtaactccgaccccgaggccagtcctcggattttcaggagaaactttgatgacgcttggaactatccaattaccggtccgagccggcagggtgacaaagatagtcaacttctcggtcaccgatcaacctaccatctacaacgtcataatgggaactccgtggctaaatctaatgcgagcagtcgcctcaacatatcatctctgtgtcaaattcccgacccccaatggcgtgaaaacgatctggggcagtcagaagaattctcggatgtgtttcatggcagcacacaaactccgaaaccctgtcactgaagcaaaggctgagaccgacaacaagaaatcaaaacttggccggagtgaagagaaagctatatctaaacagttatagcaattacagattgaggaggcgcgcgaggagaagaagcctacctcggatcctgtaatctccattagtctcgataacgaacggcctgaacgatacgtggaaatcggcagcgacttaaccgaagaaataaagaccgagctcatctcattcctcaagaagaacatcaacaccttcgcctggtcggctgaagatctacccggagtaagcatcgacgtaatctgccacgagctgaatgttgacccatctttcaagcccatcaagcagaagcgaagaaaattgggtcgggattgcgcagatgccgtgaatgccgaagtagaaaagctcctgaagatcggctcgatctccgaagcaagatatccagactggttagcgaatcctgtcgtggttaaaaagaagaacggtaagtggagagtgtgcgtcgattttcaccgatctgaacaaagtttgccctaaagacagctttccactcccacatatcgatcgcttagtggaagcaaccgcgggaaataagttgctatcattcatggatgctttcgcaggatacaatcagattctcatgcaccctgatgatcgcgagaagacagcattcatcacagaccgaggtatctactgctacaaagtcatgcccttcggactcaagaatgctggcgcaacgtatcaacgactcgtcaataggatgttctctgagcagctcgggaaaacgattgaagtttacatcgacgacatgctagtcaaatcccttgaagaaaacgaccacatagcctacacgactgctttcgccagctcaacaagcacaacatgaagctcaacctggcaaaatgtcgtttcgcggtaaagtcgggtgagttcctaggatatctcgtaacccaccgaggcatcgaggcgaatccaaagcaaatcgatgctctgttgaacatgccctcaccacagaacaagcgcgaagtccaacgtctcaccgggagagtcgcagccttgaaccgattcatctcgcgatccactgacaaatgcttggctttctacgatactctgcgcagaaaaaagaaattcgaatagactgatcgttgtgaagaagctttccaggaactgaagaagtatctggctaatccaccggttttggcaaaaccagtcccgggcgaaccattatttctctacatcgcagtctctgatacagcgataagtggagtcatagtcagggaagacagaggggagcagaagccgatattttatgtctcgcaaactttcaccgacgcggaaacacgctacccgcaaactgaaaagctcgctctcgccgtaataatgtcagctcggaagctacggccatatttctagtcccactcgattgtcgtcatggcgcccgtgtcactccgaaccatcctgcacagtccaagccagtcgggatgcctggccaatgggcagtagagctcagcgagtacgacatcgaatacaggaacaaaacgtgcgcaaaatctcaagtcttggccaattatatcatcgagttgcccacagaaaacctccacgtcgacggatcatcctcaaaacaaggttctggcgtcggaatctgcctagcatcaccagagggcgagatcctcgaataatcttttcggcttaatttcaacgcgactaacaatgtggcagagtatgaagcactcatagcaggacttaagctggctcggggacttaagatcaacaagttgcgagccttttacgactctcagctcgtggccaatcaattcaatggagaattcgtggctcgcgacgaacgaatggaagcatatcttgccctcacgcaaaacttggtgaaacagttcagagagttcgagttaaccagaatcccgcgaggcgagaacacgtcggccgacgccttagcggctctagcttcaacctccgacccgaatctgaagagaatcataccggttgaattcatcgaaaagccgagcatcgaagacagtagcaaagatcaagttctaacagctcgggagacggaagaaccggaagaaatggacatcgaactgctagaccagcaaactatagacgcgaccgatcccgaatacggaagcgacgccaaatggatcggagccatctgaagttacatagccgatggagaagttcctgctgaaaaatgggcagctcggaagcttaaggcaaaagcagcgcggtttactctgatcgacggagaactctttaaatggcgattctccggacccctccttatctgtgtcgaaggaaacgtagctcggagagtcatggaagaagtacacggtggatcttgcgggaatcactctggcgaaagatccctagccataaagatcaagcgccacgggtatttttggccgacgatggtcaaagactgcgagaagttttctcagcggtgcgacaaatgccagagacacgcaccaaccattcatcaacccgccgagctcctctcttccatcacctcgccttaccccttcatgcgctggtccatggacattatcggacctctacacaactccaagcagaagaaactcgtcttcgtactaacagactatttctccaaatggatcgaggcggactcctatgccagcatcaaagacgcacaagtcgagaacttcgtctggaagaacatcatatgccatcacgggataccttacgagattgttacagacaacggatcgcagttcatttcggctcgattcgaaggattctgtgagaaatggggaatttgcctcagcaagtctacgcctcggtaccctcagggaaacagacaggctgaagcggcaaacaaaacgattcttgacggaataaaaaagcgcctcgatgcgaagaaaggccgctgggccgacgaattggaaggagtactatggtcgcacagaaccacgccgcggcgggccacggtaaaaacacctttcgccctcgtctacggcacagaatgcgtaattcccaccgaagctgagatcccgggaataagaagacgtttgctccccgagcgggaaaatccaacactcagatgatgctggacgaactggacttgattgacgaaagaagagattcggctttggtccgtatacagaactaccagaatgcaatggctcggtactacaattctcacgttaagcatcgcagcttccacgaaggagatcttgtactacgcaaagtcttcgagaataccgccgaacagaacgcagggaagctcggcgcaaattgggaaggaccatacacgatcgcaaaggtcatccgccccggcgtctacgaactcatcaacatgaacggcaaagcggtacctagatcctggaacgcaatgcatctaaggaaatattatcgctaagaacctaaggtacgcatgtacttgaactacggggtggcttgatccctgaaaagggtacgtaggcagttcgtcctcggacgagttcagctaccccccctaattaaaaaagggggggagtgggtccgtatacatatactcccactgaaaactttttaacagaattctctaagtgttacccttcggattttcaattttatccgcctcgacatctatcccgaaattcatctcggaaacctttacggtattcttatcgacctataaagctaaaagttcgttcggacgatggccacgtccacggacagaaaagctcatttcaccgcctcggttacagcgcgctatataagcattcgagacaatttggtcggagatatcttgccataaagaaattgtctttagaaaacccagtcgacttcgacactggtaccccagttcgctcctaagcactggcaatcgactatatcagctcgggtcgcaaccgataaagattagtcccacgcggccaaaacccagttatcctaacactggtgcacgattcgtttcactttcggctcggaggttgaaacgattcggaaaaattaacttcttaacgtcatgcttacgagaacccagttaccttaacactggtacgctattcatcgtcacggttcggaagttaaaataatcctagaagttaactcctactgaaccgaaagtcatctttaccaaaacccagttaacttaacactggtgcaggattctttttgtttttggctcggaagttaaaacggctcggaaaacgactaacttctcgacgaacaagccatattaacgtatcgaatgcagttcagaaatatctcaagataaacaagacaattcaaatacgactaaggggacacatgttcagatggataaagccgtccaggcataatttttacaaaaaagaaacttaacatgaaaaataggaagacaaaagatgaaacacctcgggctcattcatcctgctcttcatcggggacatctgtggccgcgggattcaggtttgtgcctgattggtcaagcaccccggcatcagcggcttcactttccaccgacctattcccaaagccgtcgtgagtagagtcgggagataccggaggaactttcagatccccgagaagctcggcccccagcctgacgtattcagcctccgcatctccatactcatccttccacttggcgacctcgaccttttcatcttcgatctttcccccggcctcgagcgcttcgatcagttcggcgttggccttcgcctgaagaaagtatacataccgctcagagactttgccgaactctgccagtttcgcctcggtcattttgacgttctcgtcgaactctccggcgatcttcctttcgccagccttccttgctcgagccacctcggtctcgcgaagagccttctcctcggtgagcaagcgcttaagacgctcgatttccgcctcggccttctgacggatacgaacgttcttctcggcctcctttcgccgcgtttcccgctcggccataatcagagcctcggcagcttgcactgcttgaatcgccttggtcgctttcctctctgcatcggttcgagcagcctcgaattgctccctcgccacggcgcattcacgggccgcggaatcgtaggaatgaaccatagtgttcatcgacgaaaaggcctggaaaacaagacgcgttaagtatgaaacaaagctggtttatcttggacgaaaaataagtcaataccttcaagaaattggccgcggtctcgccatatcgttccgccttgaccaaaccctcaggggcgggaagcaacggccaggcacaggatgcaataaggttggcagaagcaaccttatcgtgatagattgggcgagaagagctatgagcttttttcgacttcttgcgcccgtccgtagaatgctctcctcgggaacgtttccctttggacttcatctgcccaccaacgggcaaaccaaccaccagagcatttcccgcctcgggaacccggtcggcaacatccccgagtgggataccctcgggcacctcggaaagagccgcggtaatggtcaagtcgactcccacagaatcgacaatcacctcggggtcaacggtcgtctcgttccctccaaccgcctcgggcgggtttacaggctcgaaagctgctctgatcatccgctcctcttcgcgcgccttcttctcggcggccttcttttccctcagagacatcttgactccttgcatttctgttaaaaaacctagcctctgatcggaagaagatgaggaagcagagcaagacgcgccgtgaagaatcctcaacgcgttttcaacccttgcttgagagaagtgcttgatccaatgacacttctgagcagccaactcctcacgaacactgaaaaggtcctcaggaatacgatccaagaagctcgggccgcggtctgcaaaaaagaaaaagacgttagttaaggcaatcaagttataacacaaaacaagcagaaatctcggataaactaccaatctttctctatttcccaatcattttccaaggaaaccctcgggaacacagtcttcatcaagggcaacgaagaaaaaatgatcactgtacttctcatctttgctcgggaagccacctataaccctccgcttcgggcgaggagaaatatagtacctctccatctcgcagctcggaacacggtgaatctcaagcaaattcctcagatgatcaaggctgacattattgtacgtctcgaatccacgtaccaagatcccaaccaaatgtcgaaggcctcgggtcgtgatctgggccagagcaagcttgtacgaccataaatactcgatgatcggcctcgggatcgggaaccataggaagcaaaaatagaaaaatccttcgtacaaggtgaagaacccctcgggaggatcgtcggctctctcattaggggtgagcaatcgcagagtcaccccttcgccaaaattaaaacgtgactttagatcccgaagcgagtctgaagtcgacagagtggaaccagggggatcaggctttttcactttcttggctcgagttttcttcctttgagccattgcaccctgaattgcaaactgaaggagcctggctccctcctcgggatcataagcaaccatttcgcccttcacctcgggtaaaatcggcagctcgggcacatcttgccaacaagaagcaccagcctcgtccgaagccggaggacgcgtcctcctattcaagaccgcctcagggttatcagggagatcctcatcccgagctatatcagcaattgtatcttcccgagccacaaattggctcggatctcctcgttgctcagatgacgactccgctccgctgctcggctcgggtcgatctgatgaactggccttggatccatctgaactactccaaaccatctttcgcatatgaacatggatacttctacctcgggatgaatcacttgagtctgaaagggacattctctggctcagaacgattgaaaaaacaagacctaggagatcggcaaaatcaaatctagacctaaccacggcggagacgcgacggaagataaaatggaaaaagaaactaagagagaaatcaagatcagagcaaaagaaacgaacctttggatttttgctgaaaaattgctgaactgaagaaacaaatcgtgagacaagtatttatagaacacttcggcgcgtcagacgcgcgtgagctcggagagagtttcacgtccgccgaaatctcgggaataagcgaaaactttttcacttctcgagaaggaaactcaaccgtcacacgctagaagaagacgaaacgtcaagggaattcaaatcgtcaagagaataaggatcgccgagggacacaaaccatctttgaaacatggagaaactcctcggcatacaaggatgggctcggaacaaagtttaaaacggctcggactaacagtcgtgaagctcatcgtttgctcctcaaatcaaagagctgaggggctaactgttggggtcggattccatcccttagcaccgagccggatttggacgcctcagggaacttctgaaggcacctcggggaagcgtaccaaccacttcggaggaagcaagccatcacctcggtgcaaagtgccattcacctcgggtcagtacaacggtcgcctcggggaacgcttgatacgaactcccaaagattgcacactcttgttggtattgaaatggatagatccttggatgaacaaggcgaggaaagtgaatggctgcatcgagggctatgaacggcactcggtaaacctggtttgaaccgtaggctaaccacctaaggaacggttgtgactcttcggctaaccaccttggaatcgattgagatcaagaggctaaccacccaatgatcgaagtgatttcgttggctaaccaccaaagagatcgaaaaagttcacaaagaacaagagagaaacttctcaaaaaaattttagataaaagattattattgaaatgaaaggattacatgagtttataagaagaagaatgagaagaggctagtcaacaagactaccttgaaaatgaaaacaaagactaagaccaaagactaaaataaattagagtttgaatgacccttggactccaagttggcgagaatgttccatgggtttggtcatgtccttttgatttatttccaaccataatataaatgcaattcacatgagtttggaccgtccatggtaagcataagtcattgcctcgttaaaacctctactcggaaaacccattgggacaaaaccgagtataggaaaaagagtacaacaacttagcttgcggccaacctcaagatgaatccacaaatgatattgaggtgaaggtgcattgcgtaagttggtcttcctccttgttcctaacgttgccaagtactttccaaacagctccggctagcttccttgtcttggatcgcgtcatggggccttcgggaacgatcaatgcttcctcgggaacctcatccaaagcttgcgtatccatgatcatatcaacgcccgtagcctgctcgggatctgccagcaagcttgtgaacccgagccagctctcttcgagtacccgagctggttcacgccaggacgcccgagctggctccttctgtgtgcccgagccgctttccctcggaaacccgggccgcgcttctcttatctccgagccgattgcacaagttatccgaagctaagtctccatcatcacccgaggcaaagacttagtaactattcgtcttcaaagtaccatttccaggcaaggcgtcatttccgaaaaagaaggatcatttctgatagacccagaaatgataaggaagaacctcgaaggatcaactcgaatcaggaaatcttccaagaaactctgaagaataaggaaattatcctaaatccgcgatactctaagccgacttcaagataaatggaaatcttccgagaatatcgctggagaggcggtttatgatcgctatataaagagactcaaggctctcataggaaaacaagcaatatcgctctagaatttatactacacaaagctcttacagcacgaacacctttttcttttacgatcaaactcttgtacgatcaaaactactctttttatcaataaaatcaagaacaccatctttggttacaattgttttctgttgttctttgagaattcacgcttatcgtatccctaaaataaaaccctagacaaatctcgattgtgttagtttcgacttccacagtatttttatttaaaatatatataattcaagtcaatttaaaagtttcagtctaactaactaaaacttagtgaaagacaaataaaataattacactttgggctatttttggactatcattagtttatggcaagtatctttgtttgttatattaatatatagattattaagccaacaaatttttaattataaattgtataaaaccaaaaaataatcccatagtaaaacgcaaattaaatcatagttagtatacaacccagtttacatttttttttcaattggtataaatattttaatttttcatatcttagaaatactttaccctttagaatggtgaaattttctcagttttgcatcttatcatattttggaaacaaatatatgcaaattcaaaagaaacaaaaacaaaaaccacatcttaattcgtccacttcaaaagagattaaatgagatacacatacacatatagagaaagtattgggctcaaagctaataattggaagtgacccacttaattgataagtcacttttctttttccataactgccccattctcgatccaaaaactctaatcaccgaccaaaattgatcggaaaacctaaagctcttctgtttgctctgccaccatgcacagccggcgctagatcttcgtgcaatctccagattttcatcaaaccattgttctgcaaatggatcttgcaaaatctgtattaactcgcgattgctacctccgtatgtacacagagaagacccagaaaaaggtaagtaagagcaattaacaaatcgaaaatcaacgtacctttgtaaagatggttatataatagaggtgatggtataatagactcgcttttgggagtcgatgttcatagctgctgaaaataaaacgtatatatagtggtctaataagatgtgagggatatgcgtgagtgattatcaaaaatcttgttaggcaaatttacaaactttaaaaatatcactattaccgaattacagaatgatgtagagaatttagtatttagataaggaatatgtcattaataaggagcgtgagttttgaaaacagttttaatttgctatattctctcgattgcatgtataataattgttaaaagtattagcgtaaaaagaatctacaaatatatgcgattatcgttacattttataaagatggaaattggtaagaataaattattgtataattggataattatcaaatggtgattgcaatttaggtaataatctttaagattcggaatctttacttaatgattgacatttaaacgattttacatatggttagttgtttaaaatcacattatatggtatgaaagattttgttgattgattatctttattaggtaatattaggaaatcaaatattgttaaattgaatttttggatccaaactaaatagagattttcggggatttaatgtagagaatcgattaaggaatcatccgattcaaacaaattcgggtcaaaagatcaaaaatggaaggatccgattggcatatttccgtgtcgaaatcatttaatttccgggtcaaaattgaataaaatcagacccgattaggaaccccaaaaagtgttgcaaaaatgtatagtagataatattattatgcatagatacttaatttttggatagtctgggcatatcaattaatataacccatattatattcactctatttggccagttgaaataatgacatgaacctattagaaaacttggtaaatgggttaatcgaaggttacactcactctgaaggaattaactgattaataagagcccggatcactcttgattaattatatatatttaaaaaaaaaaacatttcaagtattatatgtatcaaagc

SEQ ID NO: 5361 - DNA, 14588 bp, Arabidopsis lyrata
  Intron number 3 from transcript 917012 (locus 917012) deri ved from phytozome v7.0 (chr-ID scaffold_8; pos 15925692 t o 15940279 reverse strand)
ctattttttggaaggtatacttcgcaacgtttgagcatatatatatattcgacaaaagtttctcaccattacattcctttttacttgtttacttctgtctccaggaaatctttcaatactcgaaatcgcgaccagtgcttcagtttcgtgacctatcccgcttgaatgttaaattttctaaatctaatcttgaaatgttgccaacccttcttgagagctgcccaaaactagaatctttcatattggtaatgaataactttaaccatttgattgatgaagatttgttgtgtaaatttctctaatcaatatgttctcttctatatttgttttcttctgtttttgcaggaattggttacggaccaattcatgcgtggtaaaaagaagaaagaaccaatggtgatgttttcaacagtgcctcagtgtttggtgttatcgctcaagtttgtggagttgaaacgttcgatctcagcgtatgaaggagaaacagagctaataagatacttgctgaagaattcgataatgctggagaaattaaggctcaatatttactattcaaaaaaggcgatgagtgacttccttaaagaactcgttgcaatgccaagatgctctagcgcttgtgaagtccttgttctttgattactttgctgaacatttcgtttaaggttaaatcttttggtcgttaaattagttgattttaggaggctatattaggctttgagccacaagcaaatattgaagttttaagtctttcttatgctactcatgtaataaccaccaatgaccaactttatttcgaatttgatggatacttccacaacttgctctagcagactagcacagtagcagtaattaggtctctctctctctctatatatatatatatatatatatatatatatatatatatatatatgttattttgctgttggcttgtttatgaattgtcaattagcaagaagctgctcgaagttggattctactgccaaattagatataaaaaaaaaactcagtactctagatttgtgaatttgtaatcgtaacatcaagacttgtaaaatgtttgagagtcttggaaaaggtatgtttgtttatgcatctcctagtaggctagtacgatgagtattcatatagtagtactagtacgtctaaaaatgtcgacaaacaaaaactctttacatttaatgggccatgttggattattgggcttttgcttaactacagtctttgagagaaatgttcagtagagagtagagagagtaccggcaagtgattccaaatttccaagcaagtgtttccgttcccgtcggcgaaattactgtctacagttccggcgtgtgattgcattccgccggctaaaacactgtatgttaatcttcttcttcttactttactttttttttttatatactaaatttcataagaatttgaaaaccctaaccctgactaagcgcttctctcaatgcaatttcatcaaaattatttctctgcaacttgcattttcatttttctgtttgcagattttgttgtcctgaaaatttttctacagaagaaaagacaatggttgatagagggaaatcgaaacaggcttgttccttcaaagggtttagtgagagattgaaggaagataggataagccaattaccagatcctttgatctgtcagattctttctcatcttcccacaaaggacagtgttaagacaagcgttttatccaccagatggacaagcctctggctttgggttccttgtttggaattggcacattgggacttcccagattccaatgcctttaggagttttggcgacatgtttttcgattccactagggcttcattcataaacaaagtcaaattaactattgatgaaactatgtttaaggaagatgtagatgatgaattgatccctcttatctcatgtcatggactgatgctgcagttaagcgtaagatccagcatctaaatctttgttgttctcccggtaattcaaatgaaatgtccataaggctttatacctgtgagacactagtatctttaaaactctatgaggtgatcttggatgatgtcgagtttgtttccttaccttgcctgaagactctgcatttgaaatatatctattatcgcgaagaggccagttttgagaggcttgtatcttgctgtcccatcttggaaaagttaaagattgtcgtatccgagtatgggaattaaatctctttcgggtgctctctaggtcattgaagaagctctgtatacagataataaatgatgaagaggattttggtttcagatttgtgattgatgctcctcgaatacgctttttgagcatcagtgataaaatagagagttatctattggacgatgttgattgttccaaggcgaaggtagatatctctctcccctttggtttggacgatgttaatgaagcaaacatttcattgaggagtagtagtagtatccacagttttctccctgggatttccaaggtcagagatttgaccatatgtcaagacgttttcaaggtatatatatgataattctggtattggacatatacattttctattataaaagtttttgacccacaatacttttgttttatggttgcagctcatatgtgaatacttgaaaaaagaaccgctgccacaatttggttacatgtcccgcctgcgtgttactcttcatgtatctgatttaaatatgttaccaacctttcttgagagctgcccaaacttgaaatccctcatcttggtgatgatctgcttaatcctatttctcatctctgtgaaagatgttgtctatcttttcattattttctctcctctcatttttcttcaggtatggaatagtaactctaagaagatgtatcacgaagagctgcgccaattcaacttttccgctgttccagagtgtttgttatcatcgcttgagtttgttgattttaaaactggcatctcgggacatcatggagaacagaagctagtaatgtacttcctagcgaattcgacaatcctcaagaagctaactctacgtttgaattattactgtacaaatgaaaagctcttcgtcaaggacgtcctgaaattcccaagacgctctaccacatgtcaagtcgtcatatattgatcatgttaagactagagagagaaaatctgcagcttaagctcttaccgcacaagaaatgcaggtgtagtcttttgtttagaatcggccagtgttgttttgggtagcggactattaagtcactcgcccgtctctagatactatattactctcttcgttttcgaatagttgtcgttttagagaaatttttttgtttttaattagttgtcgttttcagttttcgatgcaaaatttattactttttcattttttatatttatttttattatgcaacttgatttactattggttaaattatgtttaggtaaataattaatgatatttttatattgaaaaactaacaacattaatagtttcttaatttttgtgcatatagttaaaacgacaactattcgaaaacggagtgagtactattaattaaggttgctaatctggcctcttttggctctcaaaatatctaaggaaggttgtttataaacaagttaagcaatgctgttacttactctgtatgttcttttgtgtttgctgccttattttgtttgattgtttattttaaacatcaaatttctttaataggaattgaaatataaccagtcatcatgtaaaagtaggaaaatacaagcagggttcacaggtaaacttcataagaaaacctaccccgaaggtagctctctgttttcatggccatagcttcagcgtctaaatctgaaagtgtgcggtcttggttacagagactgcagatttgatacttcctgaagaattcaccaatcctggagaaaaacaaaaaatgcattgaaatgtatagagatgtcaattatgttaacccagatttagtgggctatgtttgattgttgggcttttgtgtaacaaacaaacactcattctattacccaatttggacataactactcttatagagaagtctgcagtggtaggtccgtgcttcccaatttccagattcccgtcggcgaaaatcacgacgtaaagttccggcaagtgattgcatttcggcctaaacgctgtaggttcttcttcttttatattggatgtagcataagggacactatgttcttcttcttcttctttactctttttgtctttctattatcagtttcattagaccttgaaaaaccctagcctgaatcaatgtggtttagtttttctctctcacactcttcttctttattcgtcactggaagttgtactgaaggattagtgttagttgcaatttatgtctgaaatttttatcatttcttatagatttctttgtctgaaaacagaaaaattgatggcttgttccaaagggttgaatcagaggttgaaggaagataggataagccagttacctgatcctttgatttgtcacattctttctcatcttccctcaaaggaaactgtgaagacaagcgttttatccaccagatggagaagtctctggctttgtgttcctagttttgatttggcatgttggcacctcccaaagttcaatgactttaagagttttggtgacaagtttttcgattccaatagggtttcatgcatactagaagttaagttatttattggtgatactggattaaggaaaggtgtagatgatgttccctcttatctcacgccatggtttgatgctgccataaaccgtaagatccaacatctagatgcttggtttcctccctgttcttttaagatgcccctaaggctttatacctgtaagacactggtctccttgaaactctttcatgtaaccttggatggtgtcgagtttgtttccttaccttgtctgaagactctgcatttgaaatatatgttgtatggcaaagaggccaattttgagagacttgtcacttgctgccctgtcttggaagagttaaagatttccgggtgtgtgaatgataatgcaaaagtctttcgagtgctctctaggtcattaaagaagcttacaataaaaacacgcaaagatgatcagggttttggttcggggtttgtgattgatgctcctcgactatgctttttgagaatcaatgataaattatcagagggttttataataaacgatgtggattccaatgccaaggtagatatctctctctcttttggtttggatgttattgatgaagcaagcatttcatcgaggagaagtaccatccgcagttttctacacgggatttccaaggtcagggacatgactttatgtagagacactttcaaggtatatatgaccattccggttttatatgacatttacattttctatcatgaaagcttctaagctacattatttttatttttggttccagcttatctgtcaatactcgaaaatagaaccgttgcctcagtttggtaacatgtccaccctgcgtgttacttttcgtgtatctgatatgaaatggttaccaacctttcttgggagcttctcaaacttgaaatcccttatcttggtgaggatctgcctaaccctatttctcatatctgtggaaggttttgcctatcttttcattaccttctctcctctctttgtcttcttcaggtatggaatactaactctaagaagatgtatttcaaagagctgcgtaaattcaattattccactgtgtcagagtgtctgttgtcgtcgcttgagtttgttgatatcaaaacaggcatctcaggacatgctgcagaacttcagctagtaatgttcttactaatgaattcaacaatcctcaagaaactgactgtacgtttgaattactattgtacagatgaaaagcacatcataaagactctcctggacctcccaagacgctctaccaaatgcaaagtcgtcatatattgatatgtaaaaggctagagagagaacatgtgaagcttaagttcttacctcacaagaaatgcaggtgtagtcttttgtttatgtttcttttggagtagagatacggatgaaaattgttagccatgtttgcaagaaactattagagactattaaggttgctaatctaccctcttttggctggttaaaatatctaagtaatgttgtttataaacaagttaagcaatgaagttagtttgattttttgagtaatgagtggtatcagtgcttgcagcggcttcggctgggaatccaattccatagaactgacaagagatattatttgagtagtgagtgacataagctgcgaatatcctaaggattgttggcttattattccggcaaggttggatcttgtctctttgcttgagaaaatctctgtttttatatggattttacacgaacttagttcttcttgcgccattggtttgtaagcttcaaattttaagttgtagagttgaagtgttactgctagaagcttttatcgagccctaaaacacaatctttgctgtttttgatgtagatttagttgattctatgttgattcacactggagaaacagagtttgtgtctacttgattatgatatgtgattgttgcgttcttgaggttgatctactgtccattaatgtttggttcttgaactttgagtttaggtgtatgatctgactccattcatagatgatcatcctggaggctaacaaaatacgttaagtgagatattgtttgagtagtgggtgacataagctctgacttgggattcggctgtgaatccaaatccattaagatgagtgatatataaacttcgaaacagaatcccaacccgaatccggaatacgaacaggcattgtcgttttgagagattatttggagttatgagggatacggatgagtgatttgagcttcaactccaggtccgtctccgccacgaatccatccatagaaagaatataggagcaaagatggcaatgaaattttgcaagtataattctgatcttcttagtcctcttagctaataacacatttcattacggcccatatagaaaacaattttaacccatattgagttggaatgttgggcttttgtgttataaacacattatatataccgcagaacataactactgactcgaggcttcatagagttcggcaagtgatttaaaatttctagcaagtgattccattccgataggtgagatcacgatctacagttccggtaagtgatttcatcctgtttggctgaaacactgtaggttcttcttcttcttactttacctttttcttgggtgaaaagtcatcttcataacaccttgaaaccctaaccctaatttgtctcaatgtggtttgttgtctctctatcactgtaattacttttttcatataacatgatgagtcttcttcgtcatgttgcgaatgttgatgttaatttatggattttgaattatttcttttcactggaacttgaaccgaaagtgttggttgcaagcatatgtgtgccctattaacttggcatctggaactttaagttttcatttttgaatattttatacagaagaatttgttggacttattttcactaaagccaaataggcttagtaaaataagaaatggtgaagagaaatggtggggtgggcaaagcctagtatcactaatggtggtagggtgggcaaagcctaaaaccatggaatggtggagttttaatcactcactcccactaatgatttgattagaatttgttgtggaattggttgaaggcaacaaaattcattcttctataaatgttgttttgttgtgttgaaaacagagaaaaaaacaaacatacgtttatacacaaagagagcaacaaacatacgtttatacacaaagaatcaaatcaaaaattccatcaaatctccaagttttgagagtaagttttgagagtatcgtagagttgttgttcgtgtagaatcgagtttcgagtgcttgcgaaatcgattagtgtggttgtatcttgggactcttgaatcttagattcccgtcgcactatgggtgattcaaagagttaaggaaagagttttataactcgcctccacttgttattttctgggtttatgatttcgtaaatttcaatcatctttcgtagtgttgcaatttttgctcctacagaattaagtattaacacatggcttgtagagggaaatcgaaacaggctcgtgtcaacgagttgagtagtaggttgaaggaagatcgaataagccagttacctgatcacttgatattacatcacatacttgatcatcttcccataaaggacattattacgacaaccgttttatcgaccagatggagaagtctctggctttcggttccttgtgtggatctgaattccaaaaatcgccagattttaatgcctttgcaagttttggtgacatgttttctaattcaggtcgggtttcaaagatcaggatgatcatatgtcaagacactttcaaggtatgtgtttgtcaatgcagggtattgcttcacatgcatgtgtgtttttctttaatgaaaatctcttagccacaatactttaagttggtttcaggtcattcatcactattccaaagtaaaaccactgcctcaatataattacatgtctcgcctacaagttacactctgcgtatccgatttagattggttgcaaccttttcttgagcactgcccgaatctaaaatccctcgtattggtgatgattattcatatctctaaaaagattctgcatattttatcgttatatgtttatcctctcttttttttccctcaggtatttgataattgtaagatgattcatattaaggagatgaatataatcaaatcagtttatcagctgtgcctcactgtttcttgtcgtcgctggagtttgttgatatcaaaaacaatatcaggagatatatgcttcagaaatagttgagaagctagtaagttactttatggagagttcagcaattaagaaactgactctaagttcgcaatggaatgtttatatagataagtcttcatcaagatgttcctgaacatcccatgacgccccgtcgattgtgaagtctttggactggtttagtcagctgatatcttgctgcacaagaaatgtaggtgtttctttggagtgaaatagagattaaactgttttaggtacttttgcaagaaatcatgatgtcttttatgcagtgaagtttataatttgtctttcttataaagaacttgaagaagtttatttcttaaacatgtatgtgtatataaatccctacaaaaaaaaaaagtatgtgtatataaatgagtttttgactttgttatgtatatcatcagggccgcccatggctaaagcccatgaagcaaaggctttagacagcaataattataactagttttaggggcatcaatttttgaaaatgttactgtggtctagtggtctgtctgaacaatattttgttactgtggtctagtggtatgtccacgtcatagtttcaatccccataaatgctaaaacttgtattttttgcttttttgacagattttgttaatgggctaaactttttttgttttaagcatccagagagtttgggccggcccggtatatcatcaactaattgacctatcggacatgctaatttaaaacgttaataacaaagaaggtttattcaacaacttttttggccggttgcacttgaaattgtgtgacaaaggagtggaaaaggcgatcgaaatcaagggccattaattcattcacagtggtaaaggcacttggatcgatgcgtccattcccggtgcttattaaactccattccgatgcgtcctttcttcttcttcttctaatagtgttcctttcgatacagttccggcaagtgattcatcctgttcagcaaaaacactgtaggttcttctttttcttacttcatcctctttttttttttttattcagtcagaagactttgaaaaccctagcctgacttaatgtcaatgtagttttgtttttatatcacactattccactgacggagagttttattaccaaatcagtctctcatgccaccatatacatgtcttcagcacttatctatgataatctttttttttttgttgttcatctgtgagctaggttttttttttgtttgattaaatgttggtcgtaaactctgtttttgtaattccaaatcgctttcaattttggtatgcaggttggtagagggaaatcgaatcaggcttgttcagttgttccaaaaggatttagtgtgagggattgatggaagataagataagccaattaccagatcctttgatatgtcagattctttctcatcttcccacaaaggagagtgttaagaccagggccggcccaaactatttgagtgcctaaagcaaaaaaaaatttggcccattagcaaaagctgttataaaaaaaaaatacaagttttaacatgtatgagattcgaaaccatgatctgtacaacaaaagacttcaatctaaccactagaccacagtaacattttaaaaattgatgcccctaaaactacttataattatttgatgcctaaagcccttgcttcatgggctttacccatgggccggccctggttaagacaagcgttttatccaccagatggacaagtctctggctttgggttcctcgtttggatttggtttcccgagatttctctgatttcaatgccttcaagagttttggtgacacgtttttcgattctgatagggtttcatccataaacaaactggaggtaactatttctgtttttgaaaatggtgatggtgttgatgatacaccttgtatcacgtcatggattgataatgcagttaagcgtaaggtccaacatctacatgttcctttacctccacttcattttaatgagatgcccataagcctttatatctgtgagacactggtatccttaaaactttatctggtggccttgcctgatgccgagttcttttccttaccttgtctgaagatcatgcgtttaaactgtattagatatccatatgaggccacctttgagagacttgtctcatcctcccctgtccttgaagagttagagattatacatgttatttttgaggcaactgtctttcgggtgctctctaagtcattgaagagactcactataagtctacagatatatgtgtgtgagtctggtacaggaattctgattgatgcccctcgactacattttttgggcatctatgataacttagtagaaagctttataataaccaatatggatcccaatgtcaagttagatcttgatctcagccctgttttgtttgtaatggaagcatatattttatccacgagaaatagttttctcacactgctttcaaagatcaggtatatgttcatacatatccacactttcaaggtatctatgtcaattccggtattggacatgtacattttctatgatgattgtttctgatacatatcattttattttcttgttccagctcctctgtcaatgcttgaaactagaaccgttgcctcagtttggttacatgtcccgcctactagtagatctctattattcccattcgaaatggttaccaacctttcttgaatgcttcccaaacttgaaatctctcatcttgttgatgatcttctaaacccaataagttatttcatctctatgaagattctatgtaccttttctcattgtattttaatattccgttctatcctcaggtatgctatgatggtgactatggggaaatgttctcaaaagagatgatgaatcagtccagtttttcacatgtgcctcagtgtttgctatcgtctctcgagttggttgattgcaaagtgcgacggggacttgctgcagatatggagctagttaggtacttcctcgaaaattcggctatcctcaagaaactcactatacgttttgattgtaatgcaattcataatcaagatgactttgtcaagaaactcttcaaaatcctaagaaggtctaccgaatgtaaagtcgtcttcctttgattgtgaggtcttcttatgaaaagacaaactgaatttgcgtcctagtttcattgttgattttgcttcttgtatcttattttttatttgctacttgcatggtttctgaatttcaatgacatctcatttggttcttctatcagctcaaatttgaaatctcttactatgagctactaaaacttaacttttgatgaagaattttaattgaaaatgagattaaacttgattttgtgctgcttaccgttgagtgaaaacgaatttaatcccaacccaatataaagccggatcgatttatactaaattttatggatagatagtcacgtgtacttatttaaccaaaaagaccaggattagaccagatttaacaatatgaataaaattgggatttccggtttagtccaaccggagagttggttgtttattggttctttctttgtgaaggttgcctacgtaccattgccattgacagcaaactcgtctccaatacttcttacgaaattaaaaatgtttgaaattgacattgaggataatgtttttattaaacgtatatatatatatatatatatatatccaaaagctatgatggtgttattcaatgatggattttaatagaattgaaatccaacactaatctagtgttattcaactaatgattctaaatctaactaaaaatgtcccacatcgaaattacgaagaatcaactagtgaagtcatctctataaatactattacaaactgtgttgtggacattcatataaaattcgatgaatctaaagtcgaatcttttgagacctagtaaaattttgtaaacaaatcagctagttggcggattgttgattctaagtgcttaattgctttaggcggctgataaaccagttcgacaattaatgcatgatttaagtgtctaatggtttaaggaggtcgcagtagataaattttgaccgcctaatcgggtaggcggtcggaatttaaattccaggtgcgtttttcttcttcttctttttataattttgtttgattcttagtcatccatgtgtttttttgtttcatccatgtatttttagttcttcttcttctttttttttgtttttattgtgtcttgattctttttcatctatgaggttttagttattcttcttcttcttttttaatagttgcttaatcatccatgtgcttttaggtcttctctttcactagactacttgattgaaatttggattagggctggtcgtaatttacatgtgtttgtatctcttaattagtttgatgcaagctatgtgtccgtatctcttcgaacttagatgattagttctgaaacttccatttttaaaatgtagattatagtggtgtgaagaaagagaaatggtgggtagaaagaagaaaaccaaaatatgtgacaacgtctcaacgttggaagataggataagccagttacctgaacatttgatttatgaaatactttttcatctctctaccaaggacgctgtaagaacaagtgttttgtccaccaaatggagatatctttggcaacgggttcctggattggacttaaacccctatgcattctcaaatttttataaatttgtgagttttgttgataggtttatttattcagacaatgagtcatcgatacgcaaactccatttttctattggtcatcatcatggtatgtgtgatatctcatcatggattgatgctgtggctaggcgtaggattcagcatatcgatcttagtttcgatctcacttatcaacctgataagataccacccttgaggttatatacctgtgagacactggtgcacttacgactctatggagccaccttagttaatgccgagtttgttcccataccttgtctaaagatcctccttttagatcaagttagatatcccaatgagtccactttggagaatcttatctcaggctcaccagttctagaggatttgaccatcaaaagatatccagcatataatgcaaaggttttacaagtgcgctctaaaacgttaaagagaatccacattgatcaatttggagttgtgattaatgctcctttacttgagtgcttaaggactatgatttgcagaacaaagaactttgagatcatcaatttgggatcctctaccaaactagatattgatgttgtctacctaagccataggacatacaatagtagcatgattcatgacctcatcaccgatatatccagagtgagggagctagtaattagtaatggtatttggaaggtataaattcaaacgtttgagtatattatatataaaagaaaagtttttccaagaaagtttcttaccataacatttttatgtgtttacttatgttaccaggatatctttctatactcgaaatcgggaccggtgcaacagtttcgaaacctatccagcttgaatgctagatttactaaaactgatcttgaattattgccactcattcttgagagctgcccaaaactaggatctctcacattggtaatgaaatatagctctgatttacgctacacatatgtctgtgaaagctttttttcttttttctgggaaagctttttatgtagctgtttactcaatttcgtttcctctgtttttgcaggaattggtcaaggaactatac

SEQ ID NO: 5362 - DNA, 10071 bp, Arabidopsis lyrata
  Intron number 1 from transcript 899437 (locus 899437) deri ved from phytozome v7.0 (chr-ID scaffold_4; pos 439506 to 449576)
aagaagagaatcgaaacaagaaactgaaagaaaaggttaaggtgtcgctaccaattccagaagaactcatcctacgttgcttcctactcgttcggagatgccaccacccgtcgcttccttcgtctcatgccaaagctctacgacgatcgcttgcgtctcggctacaccgaaagcgttctttatgcctgtaataggataaaccggtaaccggtttatcctattacaatgcctatatcgtacttcttccttctgatgaaaaccctagctggtacattctccatcgtaaaccctatcgaaacttgccgaacacgacttctttaagattgtgcaaactcgatatactccctttccctcccatgctttggggatttgttgtggtctcaatcggttcggatatctgagtcggcgaggaacgctcatcggatatgactctcatcgattgcaaatctcacaagtatcgctcgctaccaagaatgaaggtggctcgctgtcttgcagccgcaggtgtaattgacggaaagatatacgtaattggaggttgcttaacaacacgatcttcggattttatagaagtgttcgatgtaaagactcagatatggagtggaacggtgaagccgattgagatactacctagtgtgagtagatattttgaggcatgtgcggtgatagaggagaagatttaccttaagggtgatcaccattgttttgtttacgaacccaaagaaagtaaatggatgcgtttgaaattccttgagttgaatcttctgttcaatgaatcgtcttgtgtgataggtgataagttgtttctcattcatggaggaagggatttttttgggatccaatagttgtgtgtgatctaaagaagaaggaagtgagacccttgaagggtttacaagggtttccggataatataaacatggcggcgtctaaaatggcgaattttggtggaaggttggtgattttgggatgtaatcagcgtcagactttaactaggtatgaagaaaaaaaagaggtttggtgcgtagagattgaattggaagaaagggaagaaggaggtgagatttgggggaaggttgaatcagtcgatgttgtgcttactacaagaaaacaaggctctttccaacggattttctgacagcaaaaaaatggtcggaaatttttgacggtttaccgatactattctgtcggctttccgacgacagtcctcccgtcgcaaatccgtcgcaaatttccgacggcttttttgtggtcgaaaattcgtcagtgatttccgacgacattccgatcaaattaaattcggcgacgtatttccgacggttttccaaccaaaatatattcgttatgatccgtcggaaatccgtcgggaggcgaggttattttccgacggatttccgatcacaatattataatccgttggaaatccgtcgggatgctaaagctatttttcggtggaaattatgatcaaaatatacccgtaaatatagatcaaaataagcggatctccgttttatagccgttcgaaaattttaaaattcttcggtatccgtcggaaatccatcagatatttccaacggctttccaacgaactataagcaacgtgccatattaattattaatttcgtatcatgttcgtccgattaatagttaccgtcggaaattggtcgggcatttctgacgattttccgaccagtcaggctttagggtaatgaaattgttcaatttcattgcaaatttgtgaaaaaattagaaataaacttcatgtttgttgaatgagaaactaataaatccaagaaaattttgatttttcatcaatttctatttttgcaaaagaaacacataagtcttttaaaacttcaagtgttaagtgtagtgtattctattggtccactagtatattagtgttgtgtttaacatttgaagtactaaactatgtagtaaacttcatctaattaaatggttaagcttgtttatgtgcaatgaatcattgtacttcaaaatcaaatctcaaacccctaactggtcagaaatccgtcggaaagttccaacaaattttcgactgcgttttttgaagattttggttaggcattcgtatgcaaaataatattttatgttcccgacggatttccgagggattttttttgccgtcgaaaatccgtcggaaacgaaaataaatatttcccgctgagacgaaaagctaagcggcaatatatgatttattaatttaattctcataaatgttttccttttctctttggttttcacgcttctccatctttccaaaatgagaacccaaaattctctctcagatctctcaattctcactcaatctctctaagatcccttaaatcattcaatatccctcaaatatctcttaatactctcacaatttctttcacatctcaactctctcaatctctctctgtctccctcaatctctccacgtctgtctccctcaatctctccacgtctcatctcaaactctctacagccatgtaagtgaaccttctctaccaatttcaattagtgttttagatttcgttaatttttgttatgatttgttgaaattctggatgtgtaggttgatagatttatttgttagtgataggtttaggttcatagaattatattgtttatagaattgaacaaaatttaggatgtttggattaaaacctaagaggtttaggttattagatttggattaaaatttctgaattttaggcgtttaggttaaaagatttattaaacgaaattaaaaaaattacatttgtaatatattttgaaaatatagaacgtggctagaagttaatttaggatatattaagaatatgcaaaatctaatttttaataattatgtaaacgaatttatttatttattttggtatattaagctaaacgatattatagaaaatggattttaacaaaagaatggttataattaataaatttagaagtcttttggatttcccatttaaaaacaaattttactaagatatctaaaagtttttttgaaattagaaactttgattttattaaactgtttactaataatattattttattttgtaggggttcttaccaagattttcgcaggtccgaggatcgatcgaataatcaggcgcactcgacaaccccatcaccatcgaccgttcccgagtcgcagcagtccacggctcgtctaccaatgacagttgaggagctagtccaacaaccagggcggacacttcttcgacgactccatccaaaaaggctcgaaaaagggagcacatggtaagtaaattttgttttcctgttttaatatatacatattttaaagtagaaataatattacttctctatatttgtaggtttggttataccaaaaatggcatatccaaatccattttacggatgttgcacgggatgctcaaacatccgtatccgacttacagtgatatgcctagcgacgatcgagagctttggttcaggactttcgcagtaatgcatttattattacgtacttgattttgtattttttttatactactaacataattcttttggtttgtagcatgaattcgattgggatactgtccacacaccccttgtccgtgtcgcgtttacaaagtatgcttcattaaaatattcaggccacatgaatgcatggaaagaaaagtgggcggaaggcaaggagtgtccaaaaggcttgaacccagacgtatggcctggcttcaaacagtattgggggttgccggatactgctcgtaccgcggaaaccaactcaaaaaaccggaagagccaacaaggtggcaaaggtatggcggtgcacaatgcgggttcgacgagcttcttaagtcgtatagacgaattggtaagtcttttacttttatttgatttcatgttttctttacaatttaacttttttttttttatatatagacggagaaaaacggaggtgtggaacctgattttgtagaagtcattgaggatacacacaccaacaagaaaacaggaaaaattcaagatgattacatcgcaggcctcgttgagacgttgaagaaaaggaagacggagtgcctcacgcagctttctcaaaatgatgatggttcctcatcatccaacgtcttagtccgagaaaagatcaaccgcatggttcttgaggtaagctttgttttataacttaacatttttttgtatacattttaaagtttactaacaattattatatacaaattcagaaaattccgctaaagcgggtcgtgtggtgggcttaggtagcctaaaccaaagcaacggatgttcttattccggtccttcacagaattccgagatctttgcagagcttgaagaaaaagacaaggagatcttagcattgaaagagcaaaacaagaagattcttgacttcatgcgttcaaaattttccgattttcccgatgatctataaatgcttttgttttagtttaattttgttgtattggtaaacaatcttcttttcttttgttggataatatatgcatttttcaaatatttatttagtaaaaaaatttatatatttatttagtaaaattttcaataaatagttttttaaaaaatttaaaattaaaaaattatttaattagtgattaaatatgatccgtcggtaatccgtcggctacttaaacatcgtcggaaatccgtcagtaaaataccgtcgggaattcatcgggaatcactccatcagtaaactgtcgaacgttgataccaaccgattcccgacaaagttccgatgaaataacggacaatagttttggttaggaaaccgtcggaaagcatcaccgacgggttttcgacggtcggttccgacgattttccaaccgtttacccaaacgtagctattgtccgaaaaccgtcgggaacgagtcggaaaagctatcgtcggcaatttgaaacgaatttccgacgccttttaaatttccgacgagatcgaaccgaccaatcgagttcgtcgaaaatccgtcggaaacagccatttccgacgccatgccgacgccatgttacagtttgattcctctctgctagtgtcagatattgaaactgtaagactcaaaacagaacacaagaaacagaggatatatgaagaataagaagaacacatgtatctttagttactagctagttagctaggttttttgtgaagttctttccgtttgcttttcgatttatcttcttctgcaagttattgcaattaggcataacaaagcccaaatgtgcttctttgttatgagcaaatgtgtaatcttggtgtaaatgttagtgttacttaacaaatcttcactttctacaaaatcaaatttgatgaaatttaaattgagttgagaccaaagaaacttgtccgttgagagacgttttcataaattcttctatttgtgaatttttataaggtagcttaagagaaaacaaaaatttactgtttacaaaaaaaaaagactcactgatatagtttccgaagaaaacaaaacatatgcaaattatgttaccaaataccaattaatttattgttcactttttataaaaaaaaaaaaaagtaaaaaaaaaagtaagtgaagaaaaacacattaaagaaaataaataatgataatgtatgagaacaatattttaagaagaataaaaaaatgattctttctaatgcaaattatctctttggattttttttttttataataaaaatgatgaacattttctaaattataaatatacacaacaatttctatggaattgccgggggcgaataaacccaattttcgacgatcaatacgttacttgctcaagaagtttgacacggatatcctcgctctctttgaaactcacgcagaaggggagagagcgggcaggatatgccagcggttgggctttgacaactcgtacagggtggatgcgaatggccaaagcggtggtttatggcttctgtggcgatcaagagttgggcaggtcgcaattcttgaagcctcagaccagttcatacatgcaaaggtgggtgatggagaggattgtatccatttggtggcagtctatgcagctccaacggttagtaggagaagcggtttatggggaaagctgcgggagctcgtgagggacataagggagccattaatcataggaggtgattttaacacgattttgctgttagatgagaggataggggtaatggaagactctcacccgactcgcttgcgtttggtgaatggataaatgacctatcactaatagatatgggctttaaaggaggaccgtatacatggagacggggacgtatggagagtacagtggttgcaaaaagactagatcgtgttctttgtaacccacatgctagattgaagtggcaggaggcggtggtgacccatcttccttttttatcgtcggatcatgtgccgttatatgtacaattagagccgaagagtaattctgacccgaagaggagacctttccgatttgaggcggcgtggttgagtcacaagggttcaaagaattgttaatggcgtcttgggatccgtcattagaaactccaaaagcattggaggggctgcagagaacgttaaaaaaatggaatagggaggtgtttggggatattaacacaaggaaggagaaattgttgggagagatcaaggcggtgcaggacttgttggtggtagcacaaacggatgagctcttggcgaaggaggcggaggtgttgcagaattttgacgccgtacttgagcaagaagagactctctggtttcaaaaatcaagagagaaatttattgctctgggagatagaaacacaacgttttttcacacatcaacggtgattagaaggaggaggaacagaattgaaatgttgaaaaatagtgaagagctttgggtttcagataaggaagagttagagagaatggcgctggagtattatcaacaattatactcggtgggagggctaaccatagagagaccacaactaccgatgaatggtttctcaaatttaactagggaggagaagttaaagttagagaaaccgttcacggaggaggaggtagtggtggcggtgaagagcatggggaagttcaaagcaccgggaccggatggttttcaacccgtgttttatcaggagtgttgggagattgttgggatttcggtgaaaagctttgtgttggggttctttgaatcgggagtgttgccgacggctgcgaacgatgcgttgctagtattgctggccaaggttgcgaaaccagaaaaaataactcagtttcggcccgtgagtttgtgcaatgttttgttcaaagtgataacgaagatgatggttattaggctgaagaatgtcatctctaagttgattggtcccgcccaagcaagctttataccgggacgactaagtattgacaacatagtggtggtacaagaggcggtacactctatgcgtcgaaaaaaaggacggaagagggtggatgctcttgaagttagaccttgagaaagcctatgatagagtacgatgggatttcttagcggagactttggaggctgcgggtctctcggagggatggaggaggaggataatggaatgtgtatgcgatccatctatgtgtatattgtggaatggggagaagacggatgcgttcaaaccggagagagggctaaggcagggagaccctttgtcgccatatttgtttgtgttgtgcttggagaggttgtgtcaccttattgaagtagcggtcgggaaaggggagtggaagccaatcgggttatcgcaaggaggtccgaaagtctcacatatatgcttcgcggacgatttaattctgtttgcggaggcgtcggtggctcaagtgcgggtaataaggaaggtactagacactttttgtatggcgtcgggtcaaaaagtgagtctagagaagtctaaaatatttttttcggcgaacgtaagcagagatatggaaagattgatcactgaagagagtgggattggatccacacgggaacttgggaagtatcttgggatgccaatcttgcaaaagaggatcaataaggatacatttggcgaagttcttgagcgtgtgtccgcaagattggcgggttggaagagtaagactttgagcttggcgggaaggattacactcactaaatcggtattgttttcaattccggtccatgctatgagcacaattctgttacccgcgtcgacgctagaaagcttggataagttgtcgaggtctttcttgtggggaagcactactgagacgaggaagattcacttgttatcgtgggacaaggtgtgtcaaccaaaggcaaaaggaggactgggcctgcgaaaatcaaaggatatgaatcgggccttacttgcaaaagtgggctggaggcttttaaacaataaggaaagtttatgggcccgaatcttgaggaaaaaatataaggtgggagagctgagggatagcagatggcttaaacctaaggggacatggtcttcgacgtggagaagcatcggtgttgggttgagagaagtcgtcagtcaaggtatagggtgggtgcctgggaatggtaaatcaattcgcttttgggaggataggtggttgtcgcaggaaccgttgctaaattgggtttcggggctgctaccagtgggagagaaagacaaaagtgcggcagattactggatagaagggacgggctggaacaggcgaaggctagctgaatttctaccggtgaattggttgctaagattatattcagtggtgttacaaagctggccaggaatagaggataaaatcacttggatggggacgaagaacggtggttttacggtgagatcagcgtatacagtgcttacggcggagcagtttgaaggacagtgtatggcgcgtttctttgaccgtatttggaaggtagttgcaccggagagggtccgtgtgtttctgtggctggtggggaaccaagtaataataaccaatgaggagaggctgcagaggcatatgggagatacggatgtatgtccggtgtgtcgtggagctacggagtcaatcattcatgtactgagagattgtccggcgatggtagggatatggatacgactagttccggagagagaacggcgacatttcttcgccacaactcttttggaatggttatttgaaaacctaagcatgaagtcggactcgcggggagagaagtggccaactatgtttgctatggcgttgtggtggggctggaaatggaggtgtggaaatgtgtttggggaacgaggtcattgtcgggataggttacggtttgtcaaagacgtggcggaggaggttgttcaagcacacttgaaggtgaagagaggtggtccgacgggagatagagtggagaggttgatatcatggactaaaccggaggaaggatgggtgacggtgaatacagacggtgcttcgcggggaaacccgggtctagcaacggcgggaggcgctttaaggaacgagacaggtgaatggttaggaggatttgccttgaatatagggtattgttcagccccattagcggagttgtggggggtttactatggtctctatctagcttgggaggaaggatcgagacgggtgatattggagatagactcacggttggtggtgggctttttacagtcaggggtgcccgattcgcatccgctggccttcctggtacgattgtgccacggctttattacaaaggactggttagtccgggttactcatgtgtatagggaagctaatcgcctcgcggatggattagcgaactatgcgttttcgttaccacttggttttcacacttttgatgtatgtccggagtgtgtaaaaccggtgttgttagaggataggagtggagttgcgatcccacggcacgttggtggttaatttttttgtattgtttctgttctaataaattgaagtggacattgtccccttttaacgaccaaaaaaaaattcgctaccaacttcaaacctcgatggttttaatctctgaaacttccgacgacggttataatggcggcgatcatcgaaacaagaaacctaaagaagaagataatcgaaacaagaaactgaaagaaaaggttgttaaagtgtcgctaccgattccaaacgaact

SEQ ID NO: 5363 - DNA, 430 bp, Arabidopsis lyrata
  Intron number 14 from transcript 495194 (locus 495194) der ived from phytozome v7.0 (chr-ID scaffold_8; pos 14409340 to 14409769)
tccgaggttagaacattttgtttgttcgatttatgttcattagtttctctgctgtagatcttataggctgtaacaatttcatatttcatttaaactaatatcctccatgggttgttgacttttgtgtggttaaataagggaactggaatctttagtttgccacactgtgatcctttctagtgtccttaataatgtgaagagaataaaatcaaaatgacattgctgtggttgtggctgttaactttttgtggccatgaggccatcaaagctcaactgtagaataaagtcctggattatataggagtctcaaacctaattgaagtagttggttctacaatatattctatgtctttgtagtttttcctatttgatgattactcttagcacagttttcgaaatgttaatgttcattaaaaatctactcagatta

SEQ ID NO: 5364 - DNA, 32565 bp, Arabidopsis lyrata
  Intron number 17 from transcript 480186 (locus 480186) der ived from phytozome v7.0 (chr-ID scaffold_3; pos 14199151 to 14231715)
ctacaggttttgaaccgcttctctcgtttgttttcgcataaacccattgtactgttttatctgaaacaaaaaaaattgggattgtcagggcgttaaagcggtgatttctaaaagttttgagaggattcaccgaagcaacttggtgggaatgggaatcatcccgttgtgctttaagtctggtgaagacgcagatactcttggattgactggtcacgaacgctacacgatccatctcccaactgatatctcagagataagacccggccaagatgttaacgtcactaccgacaacggaaaatctttcacttgcacagtccgcttcgacacagaggtaaataaaatactccagtcttcaaaatgtttggtgaaagataaaaagaagaaaaaacacatttctatgtgaacgaactaataatggtaaataaatgcgcaggtggaattggcatacttcaaccatggaggcatacttccatatgttatcagaaacttgagcaagcaatagtgaaggaaccaacacaatttatggagcaaaataaaagagattttttctgtttaaaaatgtcatttttaaaaggcagataagtctgtctaggataggttaaaaaggtgagtgatctcatgcaatatgagtttgggctcccaagtttcgcaacttgcaagagttgaatattattgtttttggaatggaataagagccgatctcttttgacagacctttaaatcttcaaatagaggaaaaaatgtcgcggatataaccaaatgcagtgttagatttatttaaacttgtagacttgtgtagaaaactccctatctaggcgtccaacgttaaagtgacttaaacaataacaagtaactatattttttcgagcacaacggactaatccactaaacgaagctacgtcgtttcagtttagggttacatttgggcgtctctctccgagatctcaacgagagtcatcgtgattttgtgtgtttttgattatctgaaatcgaaacagctcccatagcttcttctcaattttcttcaattgttgttacccttctcccaaattcacgactttcttctgggttcgtcggaacactcacgtaagctctttttctgggttttgctttctcctctttctgggtttctctttctcgcaacgcttactgattaatgcctagtcctcctttttatatgtatttctcctcttttggggcaaaacttgagattatatctgttgtttaatggcttagggcatttggtcgtgtcggagagagatctcaacaagagtcattgatattcatttgatcgtcgcaacgcaacacttaataatggtaagctcctattttgttgttcatatatgtttgtaacgttaatggtgattgattaagtttttgaattgattttgttgttgaaagaccaactcttttcgatttagagattgaatttttccctatcaaagtgtagtctctgtgatttagaaaagctttaaaagagaaagagatgaactgaaaagtgcttgcattcaaccaaggaaattggtctcttaaatagaccttgaacttacaactggaatccgaaacttaagctactagaattactgaaacaaacttcgacgtggagctagtcaatccctataaacaaggatgacttattcaactaaaagaaattcaaaacaaaacagaatgttgcccgaatatgcaggaccttattcttcattccctcccctaaactggaatgtctcctctccagtttactcttccttaacgcatactcccatcctgctcctgagcttttcaaacacatcgagtttcacagcttttgtcatgatatcggatatctgatcttgtgttccacaatagtcaagctgaatgacaccatcattcaccaactcccttaaataatgaaacctgacatgaatgtgcttgcttcttccatgtagcaccgggtttttagacaactttatggtagaactattgtcacagaacataatggtaccttcctcttgctgaaaaccaatctcctccaaaatgttcctgagccacactgcttgacaagctccataagctgctgaaacgaattctgcttcggttgtagacaaagtcacaatcggttgcttcttcgagacccacgacactgctcctcctcccaacattaaaacgtatccaggggtgcttttacaatcatcaacatcccctgcataatcactgtccacatacccgaccagcttttgctctccaccaaacttatattgaataccaaaagctcgagttccttgaagatatctcagaattctcttagctgctaccatgtgttgttcatttggactctccatgtacctactgaccaaattcacagagtaaattaagtctggtcgtgtagcagttaagtaccttataagcttccaacaagttgttgaattcacttcttctccacctcctgtcttcgtcagcctttgacccggaaccataggattcttaacggaattgcagttctccatttcataccttttaagaatttcttctgcatatttcctttgatttatgaagatccctttctcatcttgcacaacctctactcccaagaaatatttcattttacccaagtccgtcattgagaattctctcatcatagagtctttaaactcttcaagcatctcagttgaatttccagtgtagatgagatcatcaacataaagacttatgattaaacagcatccttcttccttcttcacgaactgtgtgtgctcacaataacatttttcaaatccttcccgcagaaaatacccttcaatgcgactgtaccatgctcttggagcttgtttcaagccatacaacgttttcttcgacctataaaccttgtcagatccttcactgacctcaaatccctttggttgctccacgaagacctcctccattagttctccgtgtaagaaagcactcttaacatctaattggaaaacattccagcctttttctgcagcttttgccaatatcactcttattgtatcccatctagctactggtgcaaaaacttcgtgaaaatccactccttctttctgatgatacccttttgcaaccagtcttgccttgaacttatcgatttctccattctcgttgagtttagttttgaacacccacttaactcctatcaccttagctccttccgggaaatcgattagctcccatgtgttgttttcttctatagaagcaatttccgtctccattgcctttctccacactgattcttgtgctgcgtcttcgtagctctcgggatcctttgaagctatgaacaacgcaagaatctctccgttatcttcttctattaaaaactctgcatctcttgtgtcaaagtctttgaaccagactggtctcctaatcgttcgcttggaaccttctctcacaggaacctgagctgccggaattggttgagcttcctctacgacagcgttttcttcttcttcaacacggttttctccttctgcaaccacattctcttcttcagcgggttcaatctgtgaatcgtcccatgcgagttctttctcctcttgtttttcttcccaatcccatcctctggtttcatcaaagtgaacgtctctacttatcactatcttcttcgttgctggattgtagagacggtacgcctttgattctttgcttactccaaacaatacacaattgacgctcttctcatcaagtttaatccttctttcatacggcacaagagcatatgcgatactcccgaataccctgagatgactcaccaacggcttctaattgctccacttctcctccggtgtgacgtcatctaaggcctttgatggacttctgttcagtatgtataaggcatattgaacagcttctggccaaaacgtcttggaactcccatctccagcatcatacatcttgtcatgttcatgactgttctgttttttctctctgcgattccgttctgttgaggtgtatatgccgctgtgagctgacgtttgataccaaactccctgaaataatcatcaaactcccgagagttatattctgctcccatatcagagcgcaaacacaccaacatctgccctaattccctttctacaccagccttaaattccttagaaactctaaaagcttttgatttctctgacaagaagtaggtccaacactttctagtcatctatgaaattgatgatgtacctttttacgctttcagattgtggagtgattggtccgcatatgtcggtgtgaaccaattggagcactcaagttgatttccacacgctcttctttggaatgctttctcggttttgttttcctctcatgcagatatcacatacgacttcttctggttcttggctcagctttggtatcccaatcaccatgtctttttctgccagcgatctcaagcctttgttgttgaggtgaccataccttctgtgccataaatcatttgtcttttccatcacttgcagacatcggccatcttctacttcttttgctttcttgacaatggcaggaattacaaacatcctattctttgccattgtagaatgcattatcattcttttctcctctttgtgccattcttcacattctccatcttcgataatgattctcaaacctttctcttgcagctgtcccacactaaagagattattctttagttcaggtacgaagtagacatcagaaattacttgagttctcccattgatctcaagccgcaaatttccctttccgtcgacagacattctcctgtcatcccctagcttcacgcttctcttaaaggtactgtcaagctcaataaaccactcccttgagccgcacatatgattgctgcagcccgagtccaaaaaccagacttgttcctcttcggttttgacatcctcaatgcgtgccatcaacagcaaatcttcctccatttcaacataatttgcttctttgtcccactctggacattccgacttgtagtgccccagcttgtgacacttgaaacattccacgttctctttgttgacaaaaccacggcccctaccttgatatccacctctgccccttcctcaaactggatatcctcctctgcctctgctactgctcggtttccattgcccctcaactttaagagctttctcctctccatcgtgcctgatcatgttttgctcatgaactctcaacgagctctgcagaccatccactgtcatgctcctgatgtcttttgattcttcaatcgcacacactatgtatgtgaatttctcagccagcgttcttagaatcttctcaacgatttttgaatccggcatatcttctccaagattgcgcatgtcgttagcaacttccatcactcgtgagaagtactcttcgattgactctccaaatctcatctcaaggactttaaaatttcttctcagcctctgtagttgtgcgctctgcaccctatcattaccttgatatttcttcttcattgactcccacaattcctttgacgtctccttcttgagaattgttttcagaatcgtcttgtcgatggaatcgaacagatagttcttcactttgtgatcggtaaccgtcttctctgctatcttctttaacagctcggctctctgtgctcccgacagaaccgttcctctttcttgacttggaatccctgtttcgatcagatcccaccattccttcgagcggagcaaattctccatgagcatagcccaatgctcgtagtcaccgtcaaactttggtatgatcatcgtatctttgtctctcatctctttctctcagattattatcaagctctgataccactttgtagtctatgtgatttagaaaagctttaaaagagaaagagatgaactgaaaagtgcttacattcaacaaaggaaattggtctcttaaatagaccttgaaattacaactggaatccgaaacttaagctactagaattactaaaacaaacttcaacgtggagctagtcaatccctataaacaaggatgacttattcaactaaaagaaattcaaaacaaaacagaatgttgcccgaatatgcaggaccttattcttcacaaagctcttaagatgcatacacgttacacgctcaatgtagatttgaaggaagttgcgactctttaagctcttaagagtaaagcaaggctaagcttaaggaacgtttcaagactgggaagaacaggtggttctttactaagctcaggttctgaataacctttgagattttatctttatcgaattttacaactatctatctacttttttttgtttagttctataatgaatttggataattgtcatgacttttagttctggattttgtctttttacttatgatcatttgctatattgatgcctccatttgatatgttgtcactggtttaatagtttattgcttaccaaaccttgaagatggtcaaatgctgctctagactctgttgtttacttttagggaacatagagagccgtagaagcatttttgagttgtcatcatgttgatctttgacgggcctaaacgggcttttagaaatttggcgggcttaaacgggtaggagactaaacgggtttcaaaatatttagttaaacaggcatgggcctagcaaattctcttctaaagtggtacgccatcttctaaagtggtcgactggaaacttcatcctgtagaaccacgatttctacgatatggcaaactgaaaaattgttgtaaataatgataagaaacagaatcaaaattacaaactcgataccaaactctaacgaacgaagaacgatttgtgtggaggcgagacactctttccttaattctttaattgcccgtagtgtgacggtgttacgcaatcagaatcccaggatacaaccacaccatcaactgtttcgcagcactcaaaaaacagaagctaaacgaaccaaaattctgtgttgtactctcagacacaaaaggaaagagaagagaagagaggaggattgactttttattattgttcacgatgatgaaaatgaggtgaagaagccttacttataaagccaaagccttcaacgtacatgtagtcaaaaggagaacaagacattaatcagaatcaattctcatgttaatgccatcacgttaatgtcgtcaatgagacaataagttattgtcaataaccattgattttgttgttacacaaattcaattagggagagattctcatttttattattatttaaacaataataattaaaattgaatttgggaaaataagaataatattttgggttgtaagcccattttctatttccctaattccaaaccccaaatcctaaccggtccggtttgatgcgacacatcacaatacgacacggttcgggtttctcctttaacttccaaagtgcgacatttgaccgttagtcaacatttcaagctttacaagctagccactttggacctctatttctcattcaaacgaactccgtttttgacattccaatacactaccgcgtagtgttcgcagcaacgatctcatcgtgcccaagaaccggtcattccgatgaacgtcttcaccggaaaatccaccgaaaaatggtcacaaccactacgtcaaaaacaagttccaacacatcctacattaacaagcaagaggatgatgaagattggaagatttgaccgcgagataacgaccgcgagattggaagatttgaccgcgagattggaagatttgtttatggcttaagattttgtggatggcaatcaaagatagagtggtgttgtgaatcttgtgatgctctgtgtttggtttagattttgttctgcagcattgtgtttccggtttggtttttttttattattcttttgctttacttttctgattttacggatcgtttggggtcaataaattttgattttcaatttttactttgctccaccatttcaatatgattttcaggattatctgtctacttttcataatctcttgtgttttctggaaccttaggttagttgataaggaagcttctagaaattattcttggtgggcgtggaactatatgggaagatcagcttggagaatatgctttttcgaatggagtctgatcaagttagttctcgatgaagaatttaaaagtggtgagtttttcctgcaaccaagacaaaagaaacaaaaaaatattaatggtgattatatcaaagctgaactatgtgtttctcttttctattttgtgctaattagagtttggaaatatatactcattgttctaattattcaggtgattttgtgattctggttcatcatagttaatcaaggaagccgctcttagatttgttactaaacacaaagtacggttgtcttagtttattttccaaatatgttctcttcaatctttttttctgtttggtcttttgattttgttcttggagttcgatgttctgtcacgtttcttctgcagctgcaaattccagagcctatatataatcgttgggattttcagggtgttaaagcggtgattgcaaagagttttgagaggattcaccgaagcaacttggtgggaatgggaatcatcccgttgtgctttaagtctggtgaagacgcagatagtcttggattgactggtcacgaacgctacacaatcaatcccccaaccgatatctcagagataagacctggccaagatgttactgtcactaccgacaacggaaaatctttcacttgcacagtccgcttcgacacagaggtaacaaaatactcgaatcttcaaaatgtttggtggagaaaaaaagcatttaatgtggacgaactaataatggtaaaataaatgtgtaagtggaattggcatacttcaaccatggaggcatacttccatatgttatcagaaacttgagcaagcaatagtgaaggaaccaacacaatttatggagcaaaataaaagagatttttctgtttaaagttgtcatttttaaaaggcagataagtctgtctaggataggttaaatattatgtcgatcttataatttttttcttttatttctatttttatttcataagatacatcgaatttccttatatttatcttctttagattttttaaattgttttatataagatatatacgtataatttccttataaatgtttttcaaaacaaatattttttttggttttacacgttgataaatttgacatgtgcgcatagcttcctaatatatatttttaaaataaataaaaataaattttaatttaacacatgtcaaaatctgagatcaataaatttgacacgtgacacgatcctatgaattattaactttcaaaatcatactttatataataagaagataggtctcactttttaatttaggttttgaataggactatgatattgataacgatggattgcctcaaggctttaatagggagattatattgttactaatccgaaaaaatagcaaaataaaataatgaggaagattattttcgtgttatggtgataattatgccaatgattttatttcttttcgtgtatacaattcgtttttgtgtacataacaatatcccgacctttatggtcagaggaatacaatacaactttgatattactctttacttggaaagcaaggaaaacatttgaacttgacgagaactcttcaaacagaatcaatggcgactactcatgcagtgatgggtgtgatcaggtcaattatgcctgcttttcgcaataacaacgacaaagtcgctttcgtagttcacgcttctttcgtcgtttccggtttcatcctcactgcaactgggcgtcctgcctttgcctttgacgctctgtcgtcatcgaccactgagagttagtgtgttaggtttttttttttttttaatactattttttcctagggtttaggattctgatttgttcgattttcgatttttaggtttggttaggattgccgggtggaacgaattcgatgaggagtatgcgtttgtttataaaagtccggtgaagggatcgaagaagaatacagtgaagaaatttctggttaagtgcttggtgatgaatgataaacttcttgttgatgcaatagctgaggatggaaaagaatttggtcatctccaaatacagtatgtcattgtttctctttatctctttacttttgcttgaatctcaaggtactgaaactttcttgtttattttcttattacagagttgggaattatactgatgagtctagagaagagaaggattacgatgcacagttcaagaattttggcaagttagtgactgatttgaatagtgagattttgtgtaaactaaatactgtttctactacaaccaagtccagctctgagaaaaatgaagagcctagagattacgttgggataacttcatcttcaaagaaacagaagaaaatatgggtataactgttggaactcattttttacacaagtggctccggccaactttccggcaacttttctggtgacgtccgtcatcggaatgaccggataatggaacctttggattccttgtaatgggcactataagatagtgtatctatttgtaaaaattgaagttatattgaatgagtaattgaggtccaaagtggggagcttggaagcttataaatcacaaatgtaattttgtcccatattggaagtttggaaactttccctctagtatatatagtgatacacatgtgacatggttcactagctattgggaaagggagactatggtgaaggagatgcatgcacattatgcaacacgacccacacgcgcgtgcgcgtcgctgtgccgggcttgggcttgggcttgggcttgggctcttggggaatgtgggcctttggccaacaaaagaatattctttttggggaaaatacttatgaggcttttgttacataagacttggcccattaacgaaattcgaaagcccaataacgaaatcgaaacctttgcataattaaaggcatattcgaatattaaaagcatatccgaatattccttttccgaattcgaaatcgagaaacagaagtgataacgcttcctaaaatctcgcccacgatctcgactcggttaagtcttgcgcatcactccgattctccacgatctccgctaacattcgcgcgacttacggaccaagctgcttctcctctcgcctataaaaggaacacctcactctctcattttcttcacttgctattcgcaaaaaacacaaccacacaactctctccctctctctctttcttctcaaagtaagtctcaagagtatatcgtctatatcaagttcgtagattccgctatcgagtgaagcgataacggcctcattttgattgtatcatgcggtccgctgctcataaaaccgtctcatctacgggagctagtttggatcgactaacccatgtgcaagtgccgttcacatggaaccttcaaagttctcatttgaatatttgctactaccaccaagatatgcaccaacggcagctccgcccgggctcccgccctagttttgcagcgactgccgtgccctcctactcatcgaggcctggctcttgccccgactgccgggtataggtcacgcgcttcagcgccatccattttcggggctagttgattcagcaggtgagttgttacacactccttagcggatttcgacttccatgaccaccgtcctgttgtcttaatcaaccaacaccctttgtgggttctaggttagcgcagttgggcaccgtaacccggcttccgattcatcccgcatcgctagttctgctttacaatgcagtgttggtgctactttacacaaccttggacaactctatcttgtgcagcgaaaacttgaggaagctcgtgcgtgttatgaggtaatcacaatttatgttttacaaaacaaagcatctaaaatggattgcataaatagtccctttctaggttatttggatggatgtagtgttggtattgaagattaggaggtgtgtgtttgctgtgatacatgaaaaaattatgaggaattggagtcatgaatgttgctggctatgtatacgaaaacaaatttttcatgataaaagggcatgttacgtatcaaagtctagatgctagaatcagaaaattggtccaaaatatgttttaaaataaagagtgaactggcgcagaagtaaaattgggaaaagaaattagctaagagacatttgttatgaagactaaaccaaaattacatatatttgatgtctttctgaaagatttaatacaaaaagatttaatcttcgattctccggcttcattggtgggaacttatgtcaattttaaattaatttgtatgttcttcaaaaaaaaaaaaaaaaaaccaactcataagcttttatagttaattttttttttttttttaattttaaattaatttgtatgttcgtcaatttttttttttttttttttttttttttttttttgcgcaaaattgtaagagattacatagtaatttcaaatttacttgaagaattgttagaaatgcattcttttagatatctttttaagaaatgcattctttactcatcgacctctttttaagaaatgcatttttttagatatctttttgtgcccttttaatttttattgaccattttacctctatgtaaaaaatatttaagtcaacaaaatgaaaaagtgattttttcccgcaaaaaagttttgcgacaaaaaaatttccgtcaaacattatatctcttgctttttatttcttattattttattttataaatgcaatatagtttaataaacaataaaaatatattttgtcatattataagtgtttaatgattttactagttgtttattttattacactaatttcatccatatagtattttattttttcatggtcattgcaactattttctatagcttgtaaacaattagtttgtacagttaaaaatatgaagaaaaaaaaaatgttctccttagcttccttccacgtgtccaaactgtaacgcccgtgttctgaaaaataatagaaaaattagattttaacccgcgctacaccgcgagatgatttatttttaaagttagtgtaaaaatattttgtaaattgtatctccttcgaaaatatttatttatattatagtttacaattgttactaagtaacggtataccactagtccacgagacaattattaataaactgaggatttaacccgtattaaagcggtatataaatattgattcaaattcgtccgccatataaacccgttacgaaatataacccattccgtaattttttaacccgtcccgtgatttgtttttattttaaaatttaatgattatttattatataaaagtttacaaatcatatcattctctaaaacatttatattttaataaactgaagatttaatatatattaaagcggcatgttaatgatattttaaaattttataaatattgttattaagtaacattataccacgggacaatttttggttttatacaatcttttctaaatgagactgatttaatatgtttaatattggtgatattaaaaaaataaggatttaatccgtattgaagcggcggattaatgatattttaatctttttattattgttgattcaaaagtccatcccgccaaacccgtcccgccaaaaaactcatttatttactaatgttgatcttatttatgatatgattttgaattattgtctaaatattttaatcgatgtagaacgttgaacacacattttcctcaattggataatatatgtccgtttttaaaatttcgaatcacagtatatgcagaaaaaagttgatttttttttttactttatggattatatgatgattcaaaacagttaaaaacaaatcaaacaaatatgataggagaatcataattctaaatcttaatcaaatcttctaaatatctaaattattaaatatggaatatccggtgtatgagttgggttaaatataacccgatctaataatttttttgtgaaggaattttaaaaacgggtcggatatctgatatacccggaagcatttttatccactcgtcaccaaagtattgcaaaaatactagtatagatggatgtttatgtcgggaattgaagtagagtcggttcaattcaactggtttactgaaagggtcgatttattaattaaacaaaagaggtggtttaattaattctcggtttagtaaaatcttggtttgatcaaattaaaccagggaaccttatttttctctatatcaccacacaagcctcctcttctcctgtgtcgtgacctgcaaagaaaaagagagaaagagagcttgttagtgtgagaaagagggagaggttgaagtttggtgaaaggagaagagaggcagacaggacacgttttggtaaaacagagtttcgtcatatcaattcgtttccaaaggtgacgaaattttcaggaattgtagccgtttacggatattgattcgttatatctagttatagccgtttacggatattgattcgaatcaatattctaagagttatccatgttttcgtgagctcttctgtttcagtcgcgttttggaccagttcgtgttcaaagtgagattgcgaacgaatcctttttctgatcgccacaaagtttagtgggtaggtttaggacacctaggagaagcttttcaacggtgggattggaaattgaacggtaagaacttgtttcgtaatccaatgttttaggctgacaattctgtgattttcgtagaattttacggttaggtttaattgatgttttgattgttgtggttggctactagcgtgatttgagatacagttgacgtgaggaagaattcaactgtggttgtgtggtgttgttattgttcaaaaatcatccctaagctgaggtgagtgcgtgaccatgagcttatctaagcgattgggattatgtgattgcttgttgtgatgtgtagattggattcttgatgggtccagaattaaaatctatgagatggttgtgttattggatgattgtcattggtttggtttgtttttgtgaattatgtgttgatttttgatctcagttgcttgtgtgtacagctcgtagatgtgaggatcgcctcactaagtatttattgaaatacttatgcatcttttttcttggtgcaggtaaagataaagtgtgatcgtggaatcatggcgaggagaggaggatgatctaagacttgatttttgtgatcattattagttgactttcacggtttatttttgattaaatgtggaattgatggttgcattgttattggtattttgctagttttattttgaataattttgaatttaattttagtttggaatctgttaaagtttatttgaaatactttggaatttggtgggttattaggataaccggaataatttgatcgatttagtgatttttgtgagttgttgaattaaatgtggatgtggataaataattaatatttatgggaatattagttatataatttaaaaaaaaaaacgggtctggttgtttcacaaacacacacaagaaaaaaattggttgatccgaaaccgaaaaagaagatgaaaatctaaaaaaatgattgttaccttttattctcctcttcgtcctactacaccataatcacactctcgggccatttaagtccagccttttgaaatctctaatatattttatgggtgactttaaagttcagagccgacttgctctgataccaattcaaatcaagatcttcttatcttgacttctctgatggccaattcaaatcaggatcaccttatcctgacttagtcactgaatgattcagaaagtgattcagcaacacgagaacaagagtttaaagaacaacctttctttattgatttagaaacttcataaaactaaatctctctcttatgtcctctctgaggtcttatggaacaactctccatagcctctcttatatagaacttatctacccctaagtctatatgagtctctttctctagactctcatgagatctgtctcaacacctccacgtgtctcaactctcatcttcggatgctggagctcctctggtagcagaactcccccccgagctgttctgagctcaccccgagctattcgagctcccctgggctattcgagctccccgagctacactaagctctttgagctttctctcaagctctctctcttcttcttcatgagctctcctcttgagctgccttcacgagctccctctgagctgctctcacgagctctcctctgagctacctctgagctaccctctgagctacttcggctatacgagctactcgagctccttaagctcctccgagctattcgagctcctccgcttgagctgcacgagctcccctgctgagctactcctcttgttcttcacaaggctcttatttatactagaaccaagcttcttctttgcctattgtgaataggaagacttacaaatcttgtccaacttgacattatttgtatttccttttctcttgatttcctttcttggatttcctttcttggatctcttctagcatcttctagaaggagataacttgctcctcaagttagttggaattatccaacattctcccccttaattccaacttgaattccgggaagcttgattctcgccaatgccttagtaagtgtgttcgccttctgctccacaccttgaacattctcaacttcaacctttgttgagatacgatctcttgctcctcagcttttgagatcttcaaatttgactgcatcttagtatccacaagcattccttgagcatctccctcttgttctgctccttgaattacttcttgtactagtgcttgtactacttcaacgattccttgaacacaaccttcttgttctgctccttgaatcacgtcttgtactacttcatgtaatacttcatgtactacttcagcgagaagtattccgtgagcacaaacctcttgttcaactccttgaataattttctgtagtactctctgtactacttcaacgactagtacagaatacccaaatatcataacccgacttggtttgatattctctagaatctgacttgattctagcatcattagaacccggcttggctccaatattgaccaatcatctaccttcttgagatgcggcctcgtgatcacacttcttaaccaatcatctaccatcttgagatgcggcctcatgatcttcttagcttttagtaagcttgaatgatgttcggcttctccccacatatcattcagaatcttcattaggtgcctagagactcctcctctatgcaacctcgaatcttcattagatgcttagagactcctcctctatgcaacatcgaatcttcattaaatgcctagagactcctcctctatgcaacatcatcgaatcttcattaaatgcctagagactcctcctctatgcaacatcatcgaatgcctagagactcctcctctatgcaacatcgattcttcattagacgcctagagactcctcctctatgcgtaatcgattgaattccataaactctcctcctctatcggtgcgaaaggttttgatagacaagccggcttgcttctctacacactcttcaaaccttttgtaccgatcgaaaacttcaatcgatatgtcaacaaggaaccacctgttcttgttgatcttggctcatctctcactttcatcataagttttctagaacaatccggaaattgtttctggacatacttacatagtcttcaaggtactacagctgattcaattgtcgacctgaccttctcagttgtgctagtccttgaactacttcaccaacctcaccctcgtggttgtcttgagtgatatcctctatgacattacctgcttcatgtccttctccagcatcttctccgcgaatcaactccaaaacttatatgacctaactgagcatgccatgttcttgtagattcattagcaattcattcagtcagtcctttagcgagtccttcaacgagtcctgcagcaagtccttcagcacgtccctcagcaagtccttcagcttgcagacatgttgccttgcttatctccaaacaacttgatgctgaccagccttgtcgcatcactttggataaattctgcttttggttgtgatcaccggttactcctccttgagattgcaagatggaccttccttgtcccatgcctctgccggaactgtcacctccaaagcttctcctaccataaccaccgtagttatagcttcctttgttataacgtcttcttgttataaccgcctctgtttcctgctcgaaacttcccgtagcctccatgcttagggtttgaggtccttggtcttcactttggatttcttacccaacacgttcttcatactccagtaacctcccaacaatgtcttcaaaccccatccgttttaggtcaagaacttgctccagggatgctacaatatgaatgatcttggttcgtggttgtggattctcgcctgccatacttgcttacgagtcacataccaccagtcttgtctagagtcttcaaactaagctctgacacaccacagatcttgtccagagtcttcaaactaagttctgaacttgtacagagtcttcaaactaagctctgccataccacaggtttcgtccagagtcttcaaaccagaagctctaataccaattaaagttcagagccgacttgctctgataccaattcaaatcaagatcatcttatcttgacttctctgatgcccaattcaaatcaggatcaccttaccctgacttagtcactgaatgattcagaaagtgattcagcaacacgagaacaagagtttaaagaacaacctttctttattgatttagaaacttcataaaactaaatctctctcttctgtcctctctgaggtcttatggaacaactctccatagcctctcttatatagaacttatctacccctaagtctatatgagtctctttctctagactctcatgagatctgtctcaacacctccacgtgtctcaactctcatcttcggatgctggagctcctctggtagcagaactccccccgagctgttctgagctcaccccgagctattcgagctcccctgggctattcgagctccccgagctacactaagctctttgagctttctctcaagctctctctcttcttcttcatgagctctcctcttgagctgccttcacgagctccctctgagctgctctcacgagctctcctctgagctacctctgagctaccctctgagctacttcggctatacgagctactcgagctccttaagctcctccgagctattcgagctcctccgcttgagctgcacgagctcccctgctgagctactcctcttgttcttcacaaggctcttatttatactagaaccaagcttcttctttgcctattgtgaataggaagacttacaaatcttgtccaacttgacattatttgtatttccttttctcttgatttcctttcttggatttcctttcttggatctcttctagcatcttctagaaggagataacttgctcctcaagttagttggaattatccaacagactttgtatatgaatttcttttcatataagaaattgactaagccttgcgcaattgaaattagatctccaacattggtcaaatcttccttggaaagggtcgaaaaagcctactcaatatgatgtgcactatatgatggtcaggaaaaatcggcctaccttttacgatgctaatagcctcatggatatgaaaaagagtctgtatctttaattgcatatgcatcaacaatagtaccaaagtgaaaaatgttcaggttaatccatattcttttcattgaataaagaatttcaagtgtttcttcaggttgaccaatatgactaagtgcggcaacaatgcccagaacgtaacaccggtggggctgacgacagtggttttaaccatctctttaaacaatacccctgtcttctctggaacgctcttggagtagataaaattcatcgatttgttgatcgtagttcatttccttcgttcattgtgaaagatggtttcgtcaacctccacacatccaatctcagcatacagtctcattaccctactcataaccctctctttgtcttgcatcaccatcttaagcggttaaatatggtgaggatttgctgagtcgtcgaaacccgccaatagataaattatcaagagagacgttggcttcccatctttattgtactcttccattacactagcaaaccttaccaacgaccggttaatatcaaagcgcattgtaatatcttttgcagagctaatgctctatccaaagtaagaaccataccaacactaattttttaaaaatatttacaagggtgtttaaagtatttacaagagtttttgaaagatttataaggatttttaaagaatagcaaaaaaaattttggccagtggctcaagctctaaattgcagaggaatgagtgtggaagatagctgtcaggtctgtggagaggaaggggattcaataaaccactctctgtttttgtgctctcaaactagacatgtatgggctttatcggattatccgtctcctcacctaggtttctcaaatggctctgttttctccaatgttttccaccttttaagcaacagaaataacaaggattggccaatagagttgagattaagttttccttgaattatttggaggatatggaagaacaaaaattgtctcatttatgaagggaggaacttcacagctttggaatcggtggaaaaaatcagagttgatattgctaaatggtttgaggcacaatgtgttgatcctgatggtagtttagtgcttaatcaaccctctcttagggctgtacagagaggtgctcaagtggtggtgaaaggttgggaaaagcctccgtgtaattggttcaagctagtgtaatgtggggtcttcatggttcaaaagaaatcagattgtaggggtctagtagggggtgcttgggttttaagagatgagctgggagtggttctttttcatagtcgcagggctttctctggtataagaagtgctaaggatgcaaagctaagagttttgctttgggcaatcgaaagcatggccagtcacaaagtggtgagagttgtttttgcttgtcaagataaattttttattgaggcagtcattaattttttattaggccaatggcctggccttcttttaaagctcaatcgggagctataaagagttttttgcgttccattccggagtgaaagatgtttttggaaacaaaggctacaaacaggggagcaaatcttacagctcaaagtgtgacaggggatctcaggttacaatcttatgttgcggtgggatttcctgtttgactctctagtgttttcaaatctgaaaggatttttccctctgtttgttaatgcagtttatgtctatggttactaattcttttgtgaatctgcattttttgtatagaaccccaaactgtgttgttggtggtttagtgtaggaggtattgggttaggagtgctcttttctcctctagtttttatcctcacttgttgtaacagttcgtaaccatttttatggccttttcaatatatatctaccagatgaccagaaaaaaagcaggaaaattttggccggaaaatttcaccttctcattatttgctctttctaaaataagggtaatttagtcattttgtacatagaatgggctatttttgaaaaaagacagtagaaaagggtatgtttaaaaaaggacataaaactaacaattgacattgactaaataaatacaacaatactaattcatgtatatttttatgcacttctaaaatatatatgaacttctcaatcaaaatccacaaatatatatatatatatatatatatatatatataactgatttgaatattgattgtacaaattatttacagctctttcgattcttcttttagggttacacatacaatattatttactattaaataagtcatgatcgatctttactcatcgatcacttacccaccattaatatcaactagatgaatttccacactacgcgtgggcttgttttgaaaattgttaagacaaaaatatgttaattgtttttgtcgctttatgtttattttttgtttgttattgtatacttaataaaatattaaaattagactcatcttatgtacttacaatttttattgttagattcatttttgactctaaatatcaatttatacatttttcatgtataatctgattatttttatatctaagattctaatatttgttcattttcatgaatacatacaacaagaatataagatattttgatctcaagagttttcgtatgaaaagaagaaaaataaagcaaaaattaaagagttatttaagtaacacttttagattttatgttattgcatataaccatataagagaaatgaatttgtcttgaattttgtggtacgtctaacgtctcaaaagtctattacttgaaaaattttacatgttaatgttacgaacttaccataagacacaaaaataaaaagagagaatgtcatatgataagatatggaccataacataataataggaaaatattcaagataaaattaataaactaataagatattaggtagcaaacaactaaactacaacataaataattatttagtcattaccgagtgatgaccattgaccatataaatttaaaaaattagaaaaatgataaaagtaaaatgaaaatagtaattgatttattaaaataattttataattttatttttattttgaagaaatcattttagaaatggattaatggaggatttaacacaataagagacttttaattttctctcaattaattttgctgatttttaatttaaataatgttgaatgacacatgtcattttcttgtgtgatgatgtggagagagttgaccaactttcatatatatggtttattgacttttattctaatatttttgatagataacgtatatcaatttatttatgccgattataggatatgtttcatgaaaactataagatttcactaattggattagaaacgtttcatgataactttcacttaatcatatactccctctgtcccatattgtttgtagttttaactaaaagcacgcttattaaggaaacttaattttggttaaaaatcattaattttatgataaataattaaacaatgctttgactacatatgcttttgtcgattgttatatttggacttttggacttctttgaccaaaatttattaattattttcggatttaaattaattactaagaaaatataaatttttggaataagtaaaattttgcatagatatgtgagaaaaacaaacaaaatggaacaaaaaaaaagcctaaaactacaaacaaaatggaacagagggagtatatgaaagaagaagaactatctccatatgggtgacacgtcagcacaaaagagagtgccacgtgtccactaaaaataattaacaaattaatttcattccaagcattaaagtacatttattattttctatatttaatagtattagtattttattattaaatttatttttcaataattttttatacgttttctacatgtttgaaggtttttcactaatttattgtagtcttaattcaaaatttgagcaaaaaatagtataatcggttagctaatggttttagtaggttattttctttactctctatctatattgggtgaggaattcaacgtatattatatagggtgaggaattcaacgtttttttgaggtttcatcaaattcttgaggtttttatagtctcaccattactaccttaaaattggtttagggcgaagattgtttcaagatcgtatgagtgatacattgttgagaatgttgctagaaaaagaatttcgacaataaaagtagttgttggtacgttaagttcaattataactacaagaaaacatgtaattagcgaccacacattaagtagtgtagtagtcgctaaacctattaagacgacagtttggcgactaaaacacgtagtcggtaaaccttgcgtcgctaaatttattagtcgccaaacagtctccatttagcgactgaataactactaaattatgtgccgttatttagtcgcctaacagtcgccaaattagcgactgtttggagacattattgccactatatagtgactctttggcgactatttagtgactgatatagcgactgttttgctaccacatggcgtctgtttagtttaagtattgatgactgaaatgcaactatttgacgactgattacaggtttaattatcaattttacattctaatttatggaatcctaaatttaaaaaactatatttaacaaacaaagaaccttgattcaaacacacaacataattcaaacatgttcacaacataatattcaagctacataatatcaagtttttaagtttagataagaaaagcaactaaaggaaggggagatgagatgttcactcctcagcttgatcttgtgcagcagtagcagtctggaactcctctgtttgatcttctgaagtagactcgaggaaggcgagaaacttggggtcagtttcggtcaagtacttcttcaccatcctcaagtgtttgatctctgcttgttgctcattagcaacacgcttgatctctgcttgctcagctttcacccgcaatgcctctgcctcccgatgtgcttggagagtcgcttgttcttctatcttgcggttggcttcctcaagctgtgactgcaaggaagtgaaagcagaactgcttcctaggtactttcgcttcccattgatgtaccgccctaagcttcccattccgaagtatacccctctctcgtttgtgacagttgactgcaaaaaaaagacaagaggattagttcttaaaagatgaagtaattaagtgataataaaaaaaaaaaaagaggattaaccacattacctgaaggaagatctcatcatcctcctcttgagatagttctgatcgacgggatgtaccatcagacccttcatcattcacaagggcagccaacttagcttccttgttcttcaaatatgcctcatgaatttcctgcgccttcccatcaacaaaaagaataattcgtaaaacccgcagcgtagcacggataatcatctagtaactgatagtttagcatcaaatgacaaaaaactacaatgacaaaatgacttggaatgctacatttaatgcaaaaggttatatgttcgaaatctcatatagtaacaatttgtacccattgaaaacttgagattttgttaaacttaaacgattgtattctactaagaattttaaatgatatgtgttgtcgtgtgaattattcattcatgattttgaaatgtcttttgaaatctagtgttattgagatagtaatttaaaaaaattacttcaatgttactagaaatattttagggagcgattggttggactgtatcttaatgacacaactccaagaaaacttaaatccccaatattaaaccaatcaaggtttagctctcctaaacaactcacagtctaaaacaacacttttttaaaaaaagtttttttatgtaactcataaaatttctacataacatgtttttgtactttaagagttgtaaacaatttttttctcacgcttgaaattttaatattcctttttcttagacataaaaattatataataaattttagggtaatattgttgaatagccaaataaaacattgaaattaagaaaatagcagagagaaagtttttttgttgcaaaatagccatggtttcacgttgtcagatgaagtgaaataccaaaactatcttttgtttgttgcaagatcaacgatatgcgagacagtttcgtgagattttccaaaatagcatataacatttaaatttcacatgttatatttaactaaaagacatgatatttcaaaaaacatagtgaatttttaagaaaaaacattgttacgaagtattttttaaagaaaaaacattgttatagaaaattaaatctaaacaaaatcttttttaaaagaaatcacatgtaatcttaatataaatcgtgtattactaaaaaataatcatctttttaaaaaagaaatcacatgtgatcttaataaaacacgtttattattacaaaataacatgataaagagacatattaaaataacgtgtaatacgagaaaatacatgataaaaagagatatattatgctatcacatgtaattaaaaaataccgtgcattctgacatgttactgacaggttactgtagctcatggttagtttgtatattatttttgaatccatggttacgttgtatatattccctaaattttaacaaatcatttaattattttacttccttattacgtattagtacatgttactttaaagataagagattctaatattaaaatacggtcaaacatgtttttgattttgatcctgttttttttagaattagctatggttcaataccctgcaagtcactcactattctaaggagtctaagaatcaaaagatggtggagggaagggaaatgccatgaacgtaagctgcttaaagctatagaggggtattgttcgtgaggctcctttcacaactttaataggttattagagagaaaatatggaattataatgatgatgtcgaaatataattattttaaagcttcttctgtttttgacaatctaaatcaagttcattttaatttactaaagtctagcatgttaaaacaaagacaatggttgaatacttgaatctcgagataaaaaaaaaaattatggtgtttcattttaggtgcattgacgagccataacatcaaaccagtgtgaagaatgagagcattgacgagccataacatcaaaccagactgttttagtactccttctcataaaacatgcacaacattaacattactccatatctttaatttagttaagttttttttttctacaaatttgtacaacattaactttattttattattatactagaaggttgtccacgcgatgcgtgggtttttagttcattttttttgctaaatattttataatttatggttttgtataatttagttggtttagtgtatgttttttttttttggtcaagagatgaatatacatttcaattacatattttatagaaaactatctatctaatcattgttaatcataagaaaaacaaaaaacttccgttgttttatttttcgataaatttaaaaagcctattttggattttgatttattaactattctagatgcagttctaccaaaaaaattaatattctcaatgcatttctaagtattttctaagtatctatttacaatatttttctaatgtaaataacatatataaaaattaaatgactgaaattatataaattataaatatatatatatatatatatatatacattactttaattgttataaaagtttattataatatatatttttaccaaaaattgtataatgtactatttattatatgtttcatttattatcatattgtaatatagtacaaataattaaaattattatgcttaaatttaaatccacaatattgaactaattttactaggcagtctgtactattaacataactacataaaaaaaataaaccaatcactcatttaagaataatatttttattgacttttaaggtagtatatatagaagattttcttgattaaaaatataaataccatgctgtaaagagatttgggaggatattataacaaatcatagcaacattcctaattttatccaaaaataattcaaaatatatagttaaatacattcctaggtattcattacaagatcaagaaaagataagaaacttacgaaaaaacgtagaaaatattttatcaaatattttaaatcatgaaatatgcttacgtcgttggtggttttatgtgttctcgtgttctttgttatgactcatgctaaaggaaatatatttttcttcttttgattttgatagttactcgcataatacaaaatatattttttttttgtcaaccacacattaattaataaataactccttgattggttgcccaactaggaggagaagtgtttacaaaagtaacttcagaaaataaaagtctagaagatcgggctaaacagtccgctttaacattaatagcaaaaattgttatcatcaattatttatctaacgtgttttatcaataattcaatatttttgtgatttgataccgttgagaacagaaaaaagaaagatagcattgtcacatttttggatggatagggtgatgatgttccactatgcaaagatagcctcgggaaaaaaggttttccttattgcgaatgtctagatgtagcgtttccgcgtggacattagtactattgttttaatcataagatttaaaaaagatatattcacacaattcagaataatttacattaaaataaaactaaaattctatcgttattatctccaccgtcgtctcttctcggtcgtagatcttttggtaccatttcacctgcttttcgttcacttcctcgttggagccattgttttcactcaaaaccatctccgtttcgcttaaccactcagatcagagctgtttctccagtcttagatcgtctcgagagaaccttctcttccatgggtaaagtttctcgatctgattgatcttagtgcttgaattttccgatctctgttgatttagtaacagttttttttgcgattattattgtttcagcgtcagagcatccgtttaaagggatcttcactactcttcctaagcctggtggtggtgaatttggaaagttctatagcttacctgctcttaatgatccacgaattggtatgtagttttgagtatctctatgaatgagtttatgaaggacctgaatctaagaggagtgatctatttgcagataaacttccttactctattaggattcttcttgaatctgcgattcgtaattgtgataactttcaagttactaaggaagatgttgagaagattattgactgggaaaaaacatctcctaaacaagtcgagattccgtttaaaccggctcgtgttcttcttcaggactttacgggagtcccagctgttgttgaccttgcttgtatgcgtgatgcgatgaataagctgggcagtgattccaacaaaatcaatcccttggtattttgttattttgcgcagattgatgctatttgtttagcttaggattcttctagaattcttatgtataccgtgtctctcaggttccggtggatcttgtgattgaccactcagttcaagttgatgttgctcgatctgagaatgcagtgcaagcaaacatggagcttgagttccagaggaacaaggagaggtttgctttccttaaatggggttctactgcgttccagaacatgcttgttgtgcctcctggctctggtattgtgcatcaggtaattctcttgtagtgtgtgagtccataatttgtttctaaacttgttctgacattgatatatatccttttcaacctcatgttttcagtgtattgaaatgattttgtctcaaactaaacctcatcttgaaaattcaggtcaatttggaatatcttggaagagttgtgttcaataccaaaggccttctctacccagacagcgtggttggaactgattcacatacaactatgattgatggtttgggagttgctggatggggagttggaggcattgaagctgaggcaacaatgcttgggcaggtaattattttgattatgagcattatccagatcctatgtttgtgaatctggtgactatattgtacgactattctgctccagtttagtgaggttttatattcaatctttcttatactgatgactcttttttgcttgacagcccatgagtatggtattgcctggtgttgttggattcaaactggccggaaaaatgcgtaatggtgtaacagctactgatttggttctaacagtgactcaaatgctgaggaagcatggtgttgttggaaagtttgttgagttttatggtaatctacatctttgtgagcgcttaagtgttatgctcctttttaatagacatttgtttattggagcattctaaaggctacatttttcttcttaggtgatggtatgagtgggctgtccctagctgacagggcaaccattgccaacatgtctcccgagtatggtgcaaccatgggcttcttccctgtggatcatgttactctacagtatctcaaattgactggaagaagcgatgagacagtgagtgtttggctttaaacttccttctatatatatatctggtctgatacagtactttcatggcaggtggccatgattgaagcatatcttcgcgctaacaatatgtttgttgactacaatgaggtaaatcagccttatcctttatatttgggttttaagtattttatctcgtttcaggtttttatttgacttttttgttaataaatttcagcctcagcaagaccgagtttactcatcatatctagaactgaacctggataatgttgaaccttgcatttctggaccaaagcggtatgggttctgtcagtttttgtaatcacaaattttattgtctgattattggatcatgaccatattattgatatctacttttcaggccacatgatcgtgttactttgaaggatatgaaagctgactggcattcatgtcttgacagtaaagttgggttcaaggtatgtaactagatgtttcgttttgtggaggtctgatttcctaagcatttgctcgttcaatagactgttggtgcactttttagataccactgttcatttctgaatattgttatacattctatgcagggttttgctatacctaaagacgcacaagaaaaagtggcaaatttttcgtttaatggagaaccagcagagcttaaacatggaagtgtggtgattgctgcaatcacaagctgtactaatacatcaaatcccagtgtcatgcttggtgctggtcttgttgcaaagaaggcgtgtgaccttggcctacaggttggtttcacgagatcaaactagaattctatctgatgcctcgactttttctgatcccttttcaaaaacttgcctctataggttaagccttggataaagacaagtcttgcgccaggctcaggagttgttacaaaatacttgttaaagaggtatgttgtagtgttttcaagttctttgttgttaaaggctgattcttgcttttgtgcgggaaattttaagtgtatatttttacttcatgcagtggactgcaagaatatctgaatcaacagggtttcaatattgtcggctacggttgcactacctgcattgggaattctggagaaattaatgaatcagtgggagctgctattaccgaaaatggtattattgagattcacaactaaacttactttggaccttcatcctatatattactattatatataggtggccaattgttatcaaaatttgtggtgcttgttgttagacattgtggcggctgctgttctttccgggaacaggaactttgaggggcgtgttcatcctctaacaagagccaactaccttgcttctcctcctttggtggttgcctatgctcttgctggcacggtaataaatcttgggaacttgtcaaagttcaaccaacattttgtgtgagataatgacacatgactcattatcatattggtaatttaacattcttctttcttattttccaggttaacatcgactttgaatcggagcctattggcactggaaagaatggcaaggacgtcttcctaagagatatctggccaaccacggaagaaattgctgaggtatgtacgacttaaccagagaacaataacttctttttaggacacaaatattaaataagtcttttgacatatggatcaggttgttcaatccagtgttttgcctgacatgttccgagcaacatacgagtcaatcaccaagggtaaccccatgtggaataagctgtctgttcctgagaataccctttactcatgggatcccaactctacttacattcacgagcctccatactttaaggacatgaccatggatcctccagggccacacaatgtgaaggatgcttactgtttgctcaattttggggacagtatcaccactgatcacatctcaccagctgggaacatccaaaaggacagtcctgctgcaaagtttctcatcgagcgtggcgttgaccgtaaggacttcaactcatatggaagtcgccgtgggaatgatgaaataatggccagaggcacttttgctaatatccgtattgttaacaagctcatgaatggtgaggttggccctaagacggttcacattccatctggagagaagctctcagtctttgacgcagccatggtttgtatatatctaactaaaatttgtactactgactgtacgttgatcatgttgaatgtctccttatcataatgtcaaatgtatcagaggtacaagtcatctggtgaagacacaattattcttgctggagctgagtatggaagtggtagctcacgtgattgggctgccaagggacccatgctacaggtttagaaccagttctctcgttttttttccgcataaacccatcttactgttttatctgaaacaaaatgtttgggattgtcagggcgttaaagcggtgattgcaaagagttttgagag

SEQ ID NO: 5365 - DNA, 1036 bp, Arabidopsis lyrata
  Intron number 1 from transcript 919355 (locus 919355) deri ved from phytozome v7.0 (chr-ID scaffold_1; pos 2317046 to 2318081 reverse strand)
aaagcccagatttgggatactgctggtcaagagaggtccgattctcttgttttcaaattcttaggataaggttttttaaaaatcatcctttttggattcgctgtagaaccatggtgtttgatttatgtatctgagaatctgtagcctactgatctggatattttaatattggttttgagtgatttggtgctataaagatcaagacttggtttgagcacacaagtcaaaagtttgttgttcatttttccttgttggttttactagtagcacaagtagggtggttttctgtgttttcgattttcagaacgaaacttgttgtgcctgaatttgtaagtctctttgacggagcaactagtagtcttaatatggttcagagtctcaaattgtgctgaatatggctcaaagtctgcagtttactgaggatctacttaggatctaatcacatttgggctactaatggttttcttttgtggcatagcttttgtgcttataagattcttgtgcatagatctctatccctcatatatgggtctgcttgattagctcatgcaatcctctcctgtctaggtccattcccatagtaaaactactacatgtctcaagtatcaacggttatctaacctctgttactgtactagttttttgcttttccacccggttcacacatagatgagctcgtgtgtgatggacttctaaacccaatatacttggtcaaaacaacaattctttcatctcctctgtcttggcttgcactagacatagatacattttgaattttgcagcagagttcttcatgaactatatgtgattgttactttataaagcaaccatttggtagataccatgaaatacctctgaaacatttgttatatgagcaatatgcttatcgtagatagtctaactttgtgataatgttactgaacttattactgtagttgttattgtacatatctctgttaacagcatctgagattattttggttttgtttatgctttgatagataccgagcaatcacaagcgcttactacagaggag

SEQ ID NO: 5366 - DNA, 5518 bp, Arabidopsis lyrata
  Intron number 7 from transcript 894303 (locus 894303) deri ved from phytozome v7.0 (chr-ID scaffold_6; pos 10402836 t o 10408353 reverse strand)
tcagcgacagttataatagaattgtaaaacattctagaattctcattaaagatttgtgtagctgtacctttggcttatatactaagctagatacttatctatacaagtgagtcattaacagtgttaatactctgtttatcatgtaacagaataagtatattctgttaactatctgcttccttgtttcttcttcttcacggtacttcacatatactcatatactctgatagtcccccttaagctggcatgaagatgtttgaaatgccaagcttacccactagagcacggaactgtccaggatacaaagccttggtcaaaagatctgcaatctgacactctgtcctgacatgagccaaaataatggttccatcagtaactctgtctcgtaccgtatgacaatcacgctctacgtgtttcgttctttcatgaaatactgggttattcgcaatatgtatcgctgcttcattatcacaataaagaactgttggagaagaaggaggcaaatgcaagtcttccatcaaactccgaacccaaaaaatatcacacactgccaatgccatagctctatactctgattctgcagatgatctagaaacaacatcctgcttccttgatttccatgaaatgagagaatccccaagaaatatgcaataagctgaaacagaacgtcttgagtctggacaagcgctaagatcagcatctgcaaaagctttcaagtccatattaggattagaagagtagaacaatccttgccctacagtccctttaatataagcaaggagcttgagtactgcacgatgatgagacactctaagagcaccagtatattgagccaatttaccaaccgcaaagcatatatctggtcgtgttatagtcaagtagatgagtttcccaataatgcttctgtaactctcaggattatcatagagctctccatcatcttgagatagtttctgatttggttccataggaattgaagaaggtttgcatcccaacacaccagctgaatcaagaagttcaataacatattttctttgacacaaagagataacttctgcagatctcgcgatttcaagtccaagaaagtattgagcaggtcctagatccctcagcttaaaatgagactttaactgagacttgagattagctgcagcttcttcactgttgctagaaacaattatgtcatccacataaaccaagacaatgattaaaacagaatcactgaactttgtaaacaaagtatgatcagaatgattcgtttgaaagccaagtttttgtagagtttcagcaaacttaagataccactgtctggacgcctgcttcaatccatatagtgacttgttcaagcgacagactgcattatcaggtaataagtccccctgtcgagatgaatagcctggtggaagttgcatgtaaatttcttccttcaaatcaccattcagaaacgcattcgaaatatccaattgcaagacgcattttcactgatgtcaacttagcaactggagaataagtatcaacatagagtccaatcctgacttttgtgtgtaatcctttgccaccaatctggccttgtgtctttctagagtaccatcagaatgatatttcaccttataaacccacttacacccaataatgtgctttcctcttgcaaatagtccaagtattagtatcttgcaaagcagttatctcttctcccattgcatttgtccaaacaagatgcttttggcgtcattgtaagtagtaggctcaaattccttggtaatgacaatgagaaagaaatggtaaggaccagatagcttgtcatatgacaaatacttgcataaggatagggattgtccttactagcaaggtaacagtgataatcctgcaaatgagcaggtctttttatttctcttgacttggtagtaacaatgttaagagtatccacagttctagaatgtgcaacaggaacttccacagtccttgaagttgcaccagaaactgtgttgttagagactctagctttgacagtaagtgaatcttccacatttactgcattctccggatttggcataggtattaatgtgatagacgcagaatcttctactacagaaatagcactaccaatatgcacagaatccttttgtggctgaactgggatagcagatcctttatccactgctaaatcaccagctatctcagacacaagaggaaacaaatcctgaatttgctggttcatgtctccaactgcaagagggaatatttcttcatgaaaaacaacgtgtcttgacaccaagatatcatgtgtttcaatatcaagaagtttgtagcctttgacaccagtaggataccccaagaagatgcatgctctagcccgaggagcaaacttatttctctgatgtggtgatgtagaagaataagccaaacaaccaaaacttttaagatcatcatactctagagctttcttcatcaatatttcaaaaggagatttgttgaacaagttctctgtaggaagtctattgatgagaaacactgtagtcataatacattcactccaatattcaactggaacctgggattgaaacattaaggccctagcaacattgaggagatgttggtgttttctttcaaccactgagttctgttgaggagtctctgggcatgaatgataggatatgatacctttttctctgtaaaacttggtgaagttaaactcaggagcattatctgatctcacagcctttactttgacaccaaattgagtttcaaccattgagaaaaatccaggcaaaacagtaatggcttctgatttatttcggagaagataaacccaagttgcacgagaattatcatctacaattgttaggaaatatttatatccatcataagaagcaactgcaaagggaccccaagtataaatatgaatcaaatcaaatgcattagaagtcttattattccgatgcacaaaaggcaaatgcttttgtttagcaaggtgacaaattctgcaatgattctgttcaggagtattctccttaggaaaagaaatagacaaagagtttgacatagatttaagcctttgtaaagatggatgacccaagcgttgatgccatgtgtgagcatcaatcttgactgtaagacagactgttggtgaagcttctttctttggttgaaactgcaggtccaagaaatagagcttattgtggagtttacctctgccaattgtcaatgcccttgtaagatcctgaatagcacaaccataagaatcaaaccataatccacacttaatctgagaagtcaaggagctcacacttagcaaatgaaacttaaactgaggtatgaacagaacatcatgtagaatgagtctgtcattaagtcttatagatcccaaaccttgtattctcacaccaacaccattagcaagctgcactgtggtatcctctataacagtcatttcttgaaatagacttttatcataagtaacatgatgagtagcaccagtatcaatcacccatgtattcatattcactaacttatctgataaagtgtaaaaatatgattgagtttcttctgtttgtgaatagaaaatagagggaaattgagtaccagtgatctgacatgtagtaggagtaaactctgaagtataagcagtagagttatatgatatctctgtaatcgttgcagatgaactagcaggagtagatgtagacggctgcaacttttcattcaaataagaaaccaaatactgaagctgctcaggagataagagcatgattaacgggatatctaagtagagatccaaagtttttgtgtccaaaaatttaattataaaatgccataaaacaatagacccgagtccaaagatagatatttagaaatgttttagactcgcatacgtgtcagtttcttattggtagaagcttttgtatacacaaacaatttgacatattttttcaaaaatttaaacttttagaccttctatatttggatcccatcattgaacaattttaacaataaatctctttcaagtgtctaaattgtagattttccattatataaattataaaacttgtttggatctctatttttggactcattgttaatcatgctctaaagtcttttctctgtcaatttcggttacaccatcagtaagggcaagatttgcagaaggtgtgatgaaatgttggttggagttttgtctttgattctttggcttccaacctggtggataaccaatgattttgtaacacttttcactcacatgaccagataatccacaatgtgtgcaagtagcacgagatttctgatatgtgttcagctgagtcttgatctgaaatgctgaaggattgggattagagagagtacgctgtctttgagactcatcagattcaagcatgttgtacatgtcagagagactaggacgtggtttcatattcagaatttgacctctgatattagcaaaatcatcattaagtcccatcagaaactgagttatccttgttgtctcatgatcatccaacaacttcagaacttgtgagcatcgacaaccaccattctcctttagattcttagtacaagccagtcgttcccatagagtaaccttcttagtgtaatattcagagagagacattgtaccttgacgaagagtactaatctcttgctccaaaatgtagatctgtggaagattgctcttgtgaaatctcttgtaaagatcatcccagattcatgcagcatcctgaatatacaagatactagcatagatttgttttgaaacaacattgagtatccaagctttcaccatactattacatctggtccagatcttaaacagatgatcagattcaagaggtcgaggaagagatccatctacaaaactgatcttgttctttgcttctagactagtacgcatagtgatgatccatgagttatagttatcgccagtaagagtttcagaaacgatcgacataccaggatgatcactggagtgaagatagaacgaattgtgatgactatcgattgaatctgagtccaccggtaaacgattcatggagatttgagctggaggaactctgttgagaacggatgcggaattttgaacaatcggtgaatcttcacctgaatcattcgatgttgatcgatttctgagctgcttggttcctttcctcgccattgtcacgatgatcggcagaaggaaagatgaacacgacaagctgaagtgaaatcttcaagaaattttctcgaaaaatcacaagtttcccagaaaatgtaacaaactcttttgaatgagaggatttaagtctctgataccataatagaattttaaaacattctagaattctcattaaagatttgtgtagctgtacctttggcttatatactaagatagatacttatctatacaagtgagtcattaacagtgttaatactctgtttatcatgtaacagaataagtatattctgttaactatctgcttccttgtttcttcttcttcacggtacttcacatatactcatatactctgataagttaatacattaggaa

SEQ ID NO: 5367 - DNA, 6528 bp, Arabidopsis lyrata
  Intron number 6 from transcript 889815 (locus 889815) deri ved from phytozome v7.0 (chr-ID scaffold_7; pos 8054233 to 8060760)
aaaatttggtccgatttcagcgttctgactcatccaaattctttacagaggttttctcccaaaccctaaatttcttctctcaaatttgaagcaatttgtggcttctcatgaaaatcattaggtattattacccttgcagggttttgctttgaatccttctggtgtcatcagatttagagatccttccctggccttggcattagagtccaatcaatctcaacaatggtctgatatgtctactacattaaataattaatatattacaattactcatacttcatcttaaactgaaattgacagatgatacaattttggtagaaacacatgttttgagatggattcagttggagacaggacgctcaaagagcacttcttctgtgcttacttggttatcaagttaaacttctgttttgtttttttcacacaatcaataaatatgtacgtgtatttaaggaatttttggtttttcttttcccttgaacgcctttgtttgttattcaataaaattggtcgcatttgataacacatttacttataagccaagaagaacagagatttgtgtacacacaacacatttaaatttattttacatatatatatatatataacacattttctactcctccgaaatttgtgtagctgggacagtggagccaaaaggaacatcctttcttaccagcatatgaaaaggcctagcagtaacaacaagtttccgtccacccaattcacttccattaagttccaacgccttgtcatttgcgtcatctccgatgataataacagaagcgggtctgttaaaaacaaagctagaatttaagtttggttccaggtggttacgtcgttgtcgcaaaaaaaaaaagctacaaacacaaacctgtccacagggatttcaactttagcgattgctccacatgaacggaaatgatccgtcaacgccttgatatcatccccaggaagcgaagtgtcgtatccaggcccggctctaggcatgtgcgggaggtgctcatgcacatggtccattttttttttcaactaaatttattaaaattagtgtccaaaaatttttttacaacaaaaacataggaaataaaggccaattatttttttcagctcatggtctgttttggcaaaagtaatcgattcgtgagagtctacggaaaacaagaaaatagtcgaatatagtctctttattgatcaaagtatcgattgcaaagtacaagaatcaaggcacaacgaataaatctattatttgtgatgattttttgaggcatcggacgggtccttatctagtataatataaaccatatcatttagccaaaatgaataagacaaagaaggattggttgacaaacagatgtaagatgaaaaaagacttgatcggttattatttgtaagatgaaaaaagacttgatcagttattatgccaaaagaccaaagactccataatagacatctagaagcattttacaacacattcttctattaaacaattttctgtatatcgaaaattttctttctgccaatatactgaaattgcatatcaaaggtttgttcaatatcttgtagattacaaacttactttgtctgggtagattttctatccacttaaattagaatctttatagaaaatcagattatattagagtttggtttatgataaaccataaatgatttggtaattgtaatctggtattgataaaccagagtaaacgggatcttagttctcattgtataaaacaacagaacaacattcattaatgagaataacagaatttcttgattttctctccaacaaactttcttctaacagattatacagatcaagtgataaattaagcatttaatagtttgtaaatagcaacgtagaaattcagcgagtggcattaattcatcctttaacttatttacatttcagcattcatagttaaacagtagcacattggtctctgaacttcattattatcgcataaatgcagggactacactgctatataggctccgaatggagacgcgtggttcaactgccgtactactctaataataacaaaatatatatatatatatatggatagtttcgttaccatttggaccgcaccacaccgtacggttcggtctccattcgaaacctataatatcatttgttaattgacattatttattatttattatttaacagatgtgttataagtactaaaagtagggtattatttgacttttacacatgcacaatatgtattataagtcaaatattacgcatgcaatttccctacattctctttttgtcgtaggcgtttgaaatttcaaggccagccttgcactaatggacccatgacttcctcctaaccgcgtctggacatttaggtaagaaaaaataattattataaaacacagagagactttggtgtgttgacctcaatatatttaacatccaagaaacatcttctccttcttcatattctatgcaatcaagttctccttcttcatattctatgcaatcaagctctgtctcgaactattgaaaattaatctttcaacaataacccaaatgttgagctcttcggtcacggaagcctcaagtgttcatcaatttcaggggtaaagctcaaagagacaacatagtgagctttctaaagtctaaattagaggagatcagtgatatgaacgttttcattgacgaggatgaaattagaggcaggccaatcagtatactcttccaacgaatcagagagtctagtatcgcactcgccatcttctcaaacaagtaccccgagtcatgctggtgcttagacgagctggttgagatcaagaagcagatggacacaggatctcttgttccgtttccaatattctacaaagtggaacctgacagcgtcaagacacagagaggttacttccttaatactctcctcaagactgaggattacgtgcgccagaaggttgatcggagtagctccaaatcgatacttgaaacagaggctaggatttggggatggaggcaagctttagtctctgtttgcgaaagaatggggtcacctcgtcatcataagagtgataaagatttcgttagtgaaattgcggtcgaggtcaagaaaatcttagacgattcatctccaagaaattatcttacaatcatagagaggcctccgatgcatcctcaggaagaagtaacgtcgttattacaagctttaaacctaaatatatctgatcttgaagatcttatcacaaagccatccgaacatttcaacgacgtcgttgtttccctgggcactgatgatttggtgtttcttgacttgatctctcttcagaatcatatcctcgcttcacgattaagcaggccaggtcaagctggaaagattctcttggtgttgttaggttctctagaatactgaaatgaggtttgtttctcaaccctcaatttttttttctttctttttgagttgttataattagtcaataattggtataatcactttctagggttttgatttgaagcttcgtttgctgcccaagaaacctcaacaatttcttggtaacgaagttattgtcccagctcaagaaatccaagatcaaaaagaccctttgtcagttcaagtcactagtaagtttcttgcatatcacgcaatcgtatcactctgtgacatgcatgtatccttaattccctcttggattaaatttgacagatgtggtagcagacaggattcaaactacagagagtaatgagaatcttagtaaccgtcttggcgaagattacaactccaatgctactttgatctgctttttactcttgtgtaacatacataagcgtcgtgcaatgatatcctgtcctcctcgaagagtggtcatcagttttggtgaaaaacagctcggaaaatacctagtgagccttctgaaaaatggattagaatcaaaccaaatctcaatgtatgtagaggatgagatgaagggcaggattagcgagtcaagggttactatagtggtcttctcaaaaatgtaccctacgtcaaagaaatgtcttgatgagctagttgagatcaagaagcttatggacgcaggagagatcgataccttcccaattttttataacttgacggctgaatcagttaaaaaattgaagggatggttccgcaataggcttctcaagatagaagatgcagtgcgtaaaaacgtcaagagaagagatgataattctataccttaatactgaagctagaatttggggatggagacaagctctctcgtcaattgcctcaagaccgggattgagctatcaacataggtttataaatatatacatatatgtgtgttggctttctatgtcaacattagttcttcactattgggatttctttttgcagcaatgatgaagtgttcgtcagtgatgtcgtgaccaatgtcaagaaactatttgcatttagggagacgtctctaatgcatcgacaggagacagaagcagcaacaacagtagtcgattcccttgatgatgacttattctactcccatacttccttcttacaagctctaaaccttgaaactacagaccttgaaggattcacaaagattccgaagggtctcgtttctctgaggctgaaagggcacactgatctagtgttcctcaactttagttctactgaaaatctggttcgatttcaaagttctggctcattcaaattccttgaaaaggtttcccccccaaaacttaattttcttttctccatctcaagcaacttctgtggcttctcatgacaatcgtttgctattaatactctgcaggagtttgctttcagtccttcaggtgtcatcagaattgaagagccttctctggtctaagcatcagactccaatcaagaaattgatagatgacacaattttggcagaacacacatgttttgagatggattaagttgaagacaggacctcataaaacacttcttctttgcttacttgggtatcaagttaagcttatattttgttatccctaatatggacggatatgtaaaatatatatattgatatatataaatatgtatctgacgattactttcttctctttttccattgaagctttatcggttattcaataaaatctatcccatttcataacaagtttacttataaaccaccaaattaaagtcatggacctcgtggtgttaaagttctcaactactctctgttcttccgtcaaatgagtttaaattttttttgtaaaaggttaaggttgcattgtatcacgatctgaaaacaccacttcgcgtcgcgagctttcttctactcctccgtcatctttttaagcaaaaggaacatcctttcttaccagcataggaaaaggcctagcagtaacaacaagtttccgtccacccatttcacttccattaagttccaacgccttctcatttgcgtcatctcccacgacaataacagaactgtttataataagttaataacagacaacgttgagaaacactagatcagtgtgtatttcagcctataacgttgtctgtcgcaaaagaaagaagctaacaaacgaacctttccacggggtgtccgggcatttcaacgttaaggattgctctacacagggccggcccaaactatttgagtgcctaaagcaaaaaaaaatttggcccattaacaaaagctgttataaaaaaaaaatacaagttttaacatgtatgagattcgaaaccgtgaccggtacaacaaaagacttcaatctaaccactagactacagtaacattttaaaaattgatgcccctaaaactacttataattatttgatgcctaaagcccttgcttcatgggctttacccatggaccggccctggctccacacgaacggaaatgatcggttaacgccttcttgatttcatccgcaggaagcgatggccgatgggtcgtatcccgcaacgacaataacccaactacatgaaacaaatattattaacgtatctttacatgaatacattataaatttcgaaagaaacgcataaaatttttatggagaggatgattaccgagaatacgggggtttttatgtccgtgtcacaaatatcggggaatttcacggcagagtacaggtcccagtgatccatggagagaggttgagaagagaggcaatttttcagatctagtgatttcagaatttagggttaaaagaggacgtatcctttatctatagacaaaggattatttcttttcttttgggggggggataatggtcttttccgttttcctgtccaaagatctagataattcatccataaataatatgatcaagaaaatgggatacaaaacgaaacctcgatgatccatgtttccggcttttgggtctgacacaaagcccaaggcccaaatctataataacaataaattcgttttttcttattttcaaagaagataaaataataataaaattaaaagtttggtatttggagttccaaatgtatatagacaaaatgattcatgtttttggtttgagtatttgtgttagattagttgcttaagacaggtcaaatcaagatttgactctt

SEQ ID NO: 5368 - DNA, 4980 bp, Arabidopsis lyrata
  Intron number 1 from transcript 485262 (locus 485262) deri ved from phytozome v7.0 (chr-ID scaffold_5; pos 14156431 t o 14161410)
cctaacgtcaccaacattgtaagagataccattgtgaactgtagttttactcttgacagagataaagaagagagaaatactcaaactttcatattattatctcattgaaaaaccctagtacaagctctcacttttatatagacaggaagaactatctagatctttgatgaggtgtcaggtgacagctatgactctagatccaatagagatgcgaatctatttgagagttgcattggatgagctgtctctgtcgtcttcttcccattgctttggcgtgagcttgctctgctttcagtcaacattaccgttggagctttgactgactgaaccttggactgctcttgggctttgttgttgtgagctggcccagttgatgatgaggctttaacattcccccgcaaactcgaggtgggtggaaagtcaactccgagtttgaatctgaggtcaaagaagctggcttgtggcagaggctttgtaaatatgtcagcgagttgcagtgtcccaggaatgtgcttgatgaccagtgttcctttagctaccatctctcttgcatagtgaaagtgagtggcaaagtgtttacttcttgtatgcagaaccgggtttgctgccaagtagactgcagaaagattgtcacaataaatttcaggaggtttctcttgtggcagtcctatttcttgaaccagagcagtgagccaagacacttctgcagcagtatctgagaggattctgtattcagcttcagttgaagatcttgctactgaatcctgccgttttgcagaccaggatatgatgttagacccgagaaacgtgcaaaaacctccagtagacctccttgtttctttgcaacccgcatgatcactgtcactatatgctcgaagagttgaatcagtttctgaagtgagcatcagtcccatctttactgttcctttcaagtatctgagaactcttttcaagagattgaaatctgacactgatggtttatgcatcttctgacaaacgaagtttactgcatattgaatatcaggtcttgttaaggtcaggtactgcaatttacctgccaatcttctgaaataggttggatcttcaaaaattttatcttgatgaggcagtctgtctagctgaacaggaagtggtgtaggcattggagcacagtccaacatacctgcagtttgaagaagatccagagcatatttttcttgattcatgaatagacctgttggtgtgaactgagcttgaattcccagaaaatacttgagaggacccatatctttcatcataaacttttcattcagcttacttagaagctttgaaactaggcttgaatcatttccagttagaaccatatcatccacatacatgagcaacaacaacacactctggtcttgttgaaagatgaacaaagatggatctctttggctgcatttgaacccaaactcaatcaaatatgaactgaatttgtcgaaccaggcccttggtgcctgtttaaggccataaatggctttatgaagcaaacacacatgatctggtttctctgaatcttcaaagccaggtggttgcctcatgtaaactgtttcctgcaattccccatgtaaaaatgcattcttcacatctaactgtttaatatcccatctttcagttactgctgtgtgtaacaccattcttattgtagctgtccttactacaggactgtaggtttccagaaagtcaatgccttcttcctgttcatacccttttgctactaatcttgctctgagtttatccaacgtcccatcagcatttagttttgttttgaatatccatctgcaacccaagagatttatgtctggggttctgggaaccagactccaagtgttggtagcatgacaagtttctatctcttcttcacaagctgctgtccatcccggatgacttagagcttcttgaattgattttggctcctctggtatcccttttatagtgaataagacatacctaggatttggtttatgaatcccgtgcttccctctggtgatcatgggatgtgtgggtgcagcttgagaagtatctgactgtaaatcctcagaattgacacagctttgttgttgagattgttgttgtggtgagtggtgctcagattctgtaacctcttgatgtggtggtgtcactgtttcttgttctgtaggagtatacaccaactcttcttccactgttctgtcttgcagacactcttcgattctctgagctgtacccaatgaccatgcatgtagcagaggagtagttgcagcagacagtagattcttgtaagtatcagtatacggaaatcttgtttcatcaaagagtacatgtctactaatgtaaactcgacctgttggaggatgaagacatcgataccctttatacttctctgtatagccaaggaaaacacacagcaatgacttgggatcaaacttattttcactatacggtcttaagtatggataacacgcacacccaaagactcttagtgcagtatagactgggcgagtaccattcaaaacttcaaaaggactctgcatcttttcatgtgaggaagttggcaagagattactcaagaaatttgcagtaaagacagcatctacccagagattttgtagaagatgactgtgaaacaacattgacatacctaactccattatatgtctatgctttctttctgcaagtccattttgttgaggagtatgagggcatgaaatgaagtgttgaataccacagactttgaagtgatcatgtagtggtctattgacaaattctcctccaccatcactttgaaaaatcttgattttgtgattaaactgattttccacaagtgtttgaaagctcttaaaaacttcaaaaacatcagatttcaactttagaggaaataaccaacaaaatcttgagtaattgtctatgaatacaatgtaaaatctgaaaccctgaactgaagtgactggtgcaggaccccaaacatcacaatgtatcctctcaagtggttggcttgcttgaaactctgatcttgaaaaaggtagcttgcatgtctttcccaactgacacgcttcacacattgacttagtagtcttattgaatgaaatagcattaactgaagataggtgttgcataacttgatgatgaggatgccccaatctcttgtgccaaattacatcactggtagtctgttgtctggatgaatagaacgccaagaattgaggattctccaacttatacaagcctttgattttgcttccctgacttagaacttgatttgtcactttgtccttaacacacacagattcagagtcaaactcaaacttacagggataatcatctgtcaacttagacactgacaataaagattttgctatttctggacatactaacacatccttaagaggtaaagtgccagtgatacctggaaggttgattgatccaacatgagtgataggcaaaaagtcaccattccccactatgacagcttctgttccatcatatggctgactaacattcagatttgcaggagtattcgtgatgtggtgagttgctgctgagtcaggataccagcctcctccaggatactgaggtgaatcattcagtttcatagccgccattgcttgaggaaaggtctctacttcagtctgaaaattttcatcgaaccttttatagcacttataagcagcatgaccgtattttccgcatatctggcaagttggacgttgatcattggctccataattgtttttgttgcttccttgaccaaattgttgcggaaagcctcggccttgagtggtataggagctgtgacctcgtgaaccacccctgttttgacctcttcctctaccagagtagcctcctttagcagtatagaaagctttgtgtgagttttcttccatagcagtatagaaggcttgatgaggattcacttctggtggagtttcatacttctgcagcttgtcatcaaagttggtgagcttgtaaagcacatcttcgaaactaggacttgttggaagatccatcgattcctcaataactgtgactatagactcatattccctaccaacaccagacaagacaccatagattttctcttgttcagaaataggagcaccaatcgagtctagttgatcacagagtgctttgatttctgacaagtactgagccagagatctggttcctttagtggtagtctgaatcttcctctgaatgtcaagttttctagtagctgaaacccggttatacttcttagcgagataaaaccatacctcctgcgaagatctgagaccgtagacacttttgagagtgtcttcagacagagatccaaagatccacgccataatgagttgatcggtctgcatccatttgagaaactctggattgttggcctctgtgacttgttctccatttctgacaaccaccgtaggaggaggacgagccaaagcacctgtgacatagcccagaagcaactgactgttgagaaactgctcaaactgaagtttccaagacaagtaatttgtatcatttagcttgagtgtgacacactgagaaatagaaagagtagctgtagtgacagcagaaggttgtgccgccatggctctgataccatgtagttttactcttgacagagataaagaagagagaaatactcaagctttcatattattatctcattgaaaaaccctagtacaagctctcacttttatatagacaggaagaactatctagatctttgatgaggtgtcaggtgacagctatgactctagatccaatagagatgcgaatctatttgagagttgcattggatgagctgtctctgtcgtcttcttcccattgctttggcgtgagcttgctctgctttcagtcaacattaccgttggagctttgactgactgaaccttggactgctcttgggctttgttgttgtgagctggcccagttgatgatgaggctttaacatgaacgagctaagatcggaccctcgtatcgccggga

SEQ ID NO: 5369 - DNA, 286 bp, Arabidopsis lyrata
  Intron number 3 from transcript 905901 (locus 905901) deri ved from phytozome v7.0 (chr-ID scaffold_3; pos 14299545 t o 14299830)
ctttggatcattttgacaggcgaagtgctaaggtaggtttaatactgtacacaacagcataaagcatatgcatcttaatggtgttctgtagcagatgttgtgcattatgatgtgaatccttcatagtcaagctttagtgtctcagttcttcctgttgttgctaatattgtaacaataggtattcttactgaaaaaaaaaaaggaatgaattgagaagaatattttataactactattcctagatctggggtgatgaagttgatttgctcttctttctgttaggcag

SEQ ID NO: 5370 - DNA, 1122 bp, Arabidopsis lyrata
  Intron number 3 from transcript 492760 (locus 492760) deri ved from phytozome v7.0 (chr-ID scaffold_7; pos 9423983 to 9425104)
caaggagacctcatttcctcagtccccacttagaggtaaaaatgattcttcaatatcatcaattcataatttaatatatacgtcatattcttgatttattattgtcttaaatacagtctattaaattactatatattaaacattaaattaacgttttaatttcacgtagatagacagatgccatttttttctactgcccatgagtgtacatttgtttctttgcttattttttggtaccatataattgtaatagtatctaaaatggccctagcagattcttgaaataaattcggtttgggcttatctgcgactgtgagttataattaaatcttaaacttaacaaaaataaggtgggtgtttacgatgaaaacaaatactatatttcagatttttgataatgcaattcgaatttcttgaggttagatattttttctctccgtgaattgttattggatatattatctctaatgcaagaaggtttggtttgcctaatctaagtaaattgttgaatattataattaacccttattatataaattccattgatcttttcgtcgtctttgaaaggtagacattagaagtgttaggtaggttttagtttatgtgaccaacccatgcgtttttagctgcaaaccttaactttaggttgatacattatatattttgaaaacttcaccaattctcctttttaaaataaaaatttcattcaccttactaactaacttttcacgtcatgcttgcaatctatctacgacacattgtgtgtagaatatctacaagtcaactaataggaaaaactctaatgtttatctctttcttgtctttattttgaattatataatttatattagaagttatttgtgttagctacattagctttatgcataccacaaacaaaccaatattccaactttttaattctcctgcaccagtgcagcgcatgcactcatactgttattaaatttggcatacaataactaatgactacgttatgattcaatttattttgtcctgtcaaataaagaaaaagaatcattattctttgttattcattaaagcttgtggtatggcaattgatgtgttgcaggatcaagcacgccggaaaagcctagcatcgttggg

SEQ ID NO: 5371 - DNA, 4780 bp, Arabidopsis lyrata
  Intron number 1 from transcript 484136 (locus 484136) deri ved from phytozome v7.0 (chr-ID scaffold_5; pos 747007 to 751786)
gtattcgtcgccactggttcgtttctcataacctaatatctaatttgcacacatatgacatatacccatgtcttatttattcgtcattttgttataataacatatagttccatttttttaaataaaattatatatttaggagtttctatcgtttaatcttgtgaatgctcatctaataagtttttttttttattcagtgcaaatttaattatagttcactatagccacttggaaagttaataaatatgcatcaagcatgagacacatgaaagtatgaaacaaagctatggtctaaaccaagtgttctttttgtgtttttgttttctctagggatgggtccagtcactgtggaggcacgtacgtgtgagtcacagagccataggttcaagggtacatgcgtgagagaatcaaactgcgccaacgtgtgccacaacgaaggctttatcggaggtaactgccgtggattccgtcgtcgttgtttctgcaccaggcattgctgatctatccattctcataactcaagctttgatccatcgtcgtgtgtcacttctttcttatctaatcttccgtacagtactatgaagtaccgtacatgagtgtgttcttggtgttttgtgtgtttcctattttaatgtaatgttaaatcaactaatggctttttgagcctttgactaataataatcaaaatctatgttccgataacaaagctctttccgttcgaaaattatttaacgcaatacttcatgtctcaccttaaagagaattatgatggaattaaaaaaaaatgaacatcaatctaaggaatgcattttttttttttacattgaagagtttgtttgcgatggcatggacttttctcgacgtgtggggcagtatcaatagtattacccaagattaaacaccttcaaagagactgaatagtgaatatcctctaaatatcgggtatagaataccaaattttacttcttggatgtaattggtggagtaataaagtagcaaggaaagaatataaaagtgtaaatctttttatataaatacactatataaagttaatattttttttattttttgctacagtgagtatataaaataccacatattatagtttatacaaccagtaatgttttcatgtagatacgataaaagaactctagtgtcctttactacaccacttgttattacttttgacgtggtcactattattgtggactccccaactcccaatatctgactaactcaaatcttttaaccttttctctatacgtattttttttctgtttattttctgaaatcaaaatttggttttattaattctagaatgagttgtcgaaacagtaggatttctctgcctgtcgtgtcaattgcattaaggaccaaaaataacgtttatgactagcgtcggccgtcggtaaagaaaataaatcgacaaactagtaaacaaagaaaatgtggaaaaagcattgaaaaagaagaaaattcgacaaatgtcacgactttggttaaagttaaaagtgaaactccaaaaatgaagatgatatttatccaaaaaatatctaaaaaatactttaaaatgcaattatctaatatactaatcaaatatctcgatacctctttagtctctttatatagtgccatcttcatcctaagtaacttacacacataaacacttcactttccaaatttcggtctccctcaacttttctctctttcttttaaaatgaagctctctatgcgtttgatctcagcctttcttctcttggtgatgatatttgttgccacaggttcgtttaattactggttacctaatatctaactttgcacacgacctatatacacgacccatcacccatgccttcttttatttgtcatttggttaatactaacatatatatttatagttatggtttctatcgattgttcttgtttttctatcgattgttcttgttaatatgctcatatattaagtggtttttatcgattgttctttccatttatacggttttaattatagttggccatatatatggatgtcttaactagcaataatactcaaattatttcataaactttgaaaattaactactcattccgtttcgttttagttgtcgtttaagtttttttcacacaaattaagaaaagtattaaattttttgttttacactttattaatatattctataaattttttcattggccaaaacattcaaacagtagggataatgataaacagtagggataataatagaatttttaccaaacatttgcattgaaaacctaaaatgacaattattacgaaacaaaatttaagtcttaaaacgacaactaaaacgaaacggagagagtaataagtatgcatcatgcaatctcatgagaacatgagacaaagctatctagtcttaaaacaagtttttttgtttcttctctagggatgggtccagtcactgttgaggcacgcacgtgtgcgtcacagagccaaagattcaagggtaaatgcgtgagcgacacaaactgtgcaaacgtgtgtcacaacgaaggcttccccggaggtgattgccgtggattccgtcgtcgttgcttctgcaccagaaattgctgatccatcaatcgattctcatgactcaatcttcgatccattgtcttttgttacttctttctgtcgtctaatattccttacgataccatatcgtaacgtgcatgtgtgtaatgtgttcttgaataagtctttttttttttttttttttttttttttttttgaataagactttggtttgtgtgtttccagttttaatgtaacgttaaatcaactagtaatgttttttttttgtaataaaggattcgaatatatgttcggtgcatgcaagattttgtttgttaaaattctttacatgcaagttaaatacattaaaagttaaatacattgttgctaatatgccagaattttcatgcaattaagttcaccatataattaagtctaaaatgtttttcttgaagagaaatcagctgcgattcacgccagaacctacggaatttatgcaaccataaaatcaaccacagaataaagtctttattaagtctaaaatatcgatgatcaaaaagtctaggagttgagctaggaacaggggaattaaaaaaatttgttttcgcgagatggctagcataactggagtgtgtataataccaaatttttaattttttttaatgctatatgtacgtcaaatcgagggttagatgaattgaatagagactaaaattacaatcgcgagttagataaattgagtacagctgtacagactaactaaaattacgtaatgatccggattaagcgactacaatacaaatgtagtgctacaaggagtccacaaaagatcaatttttcctttactaacactaggttttactttttatttttttaacatggccactatcagtgtggactcctcattatctgactaactcagttttctacttattttgtaagttttttttatataaataaaatattttctccgtttttttattaaaaaatgttttagaagagtacacataaattaagaaattatttaatttttatttatttctaaattaaaacatcatttattatctaatcaagtaataagaaaaacaatctacaaaatacaaatcgtcaaaactaataaaaaatagtaattaattttgcattaaaaatcgaaaacatcatttatttaaaaacaaaattagaagattaaaatatcacttataaaaaaacggatagactagtacaatactccctccgtttcgttttagttgtcgtttaaggtttttgcacacaaattaagaaaagcattaaattttctgttttactctttattaatatattttataaaaaatttcattggccaaaacattaaaactgtaaggataaaactggaattttcactaaacatttgcattgaaaacctaaaacgacaactattatgaaacaaattttaaatcctaaaacaacaactaaattgaaacggagggagtattaatttgattctctctgcgtgtcttgtcacttccaattaagaccaaaaatttcatttactacagtgtcggtaaagcaaataaatcgacaaaattgcaaaaaaacgaaaatgtgaaaacaaaaaaaaaacagaaaattaagaagaagagaaaaacgacaagtcgtcgtcacaccttagtggcaaaactaaagtgagaatacaatggaataaaaagatacgcgtattcttttttttaaagttcaattatctcgagcgttcttatacctttctagtccctttatatagtgccaccttcctcattaccaacctatacacacttaccacttatttctaaatctctctctctagaaatgaagctctctatgcgtttggtctcagctgttctcatcatgttcatgatattcgtcgccacaggttcattactcattagtcattacctatatatctaactttcaacatattcatgtacttatgtcttttcatattcattattaatgaattttgcaaatatttggttatcataacatatttttatatctatggtttcctttttgtttgatgaatttctagtaagtgttcttatgaatgctcacgtactagatgggttttaaaacaaatctgtgatttcagaaatagtggccgcaatcatctcttggttattctaaaagtaaactcacatattaaatgaatactaagcatgagaacatgaaactaagctatggtccaaactctaaccaaagttttttttctgtgtgtgttaatattctctaggg

SEQ ID NO: 5372 - DNA, 1881 bp, Arabidopsis lyrata
  Intron number 27 from transcript 477381 (locus 477381) der ived from phytozome v7.0 (chr-ID scaffold_3; pos 306171 to 308051 reverse strand)
gttaatagatttataagcccaaaggaaaaattattcttcatcaacttcaaattattttattggtgattaagcagtaacaacagcatttttgtttttggtgatttaagaacaacaaaataattagagagacagagtcagagacatatatgattgtttgcaatttgtgaattctgttaagattttcgtgccagaattaaaaagtaaatctgatttatttttattttatcatcaaaaacacatagaaattatagtacaaataataatccccttggttacatgatttttgtttcattgaacttaagaatacaaaagtttttgaagatataagtattgtaagctctgtggggatatacaaccaaaaggcagtcatcgagtgttttcactgctttgcaacagtctcttgatagccatctgaaatctagatctgccgctaatctcaacgcatcgaaacatccatccacttttactatcggcgctgtttgttcacttgtacatacgctcgtttttagttgtgcttcggatggtcggaaagtcaaagctgaaactacaattaataagaagaacatcattttgatttgctttgttttcattttctctgtttttgtttgacaatagaagacggaaattttatggtttgtgtagttatagagaaatgacgtgaagctttttttatgtgtggaatttattctaaggatttccttctataagaagattgactaaagaaagacacgtaataaattaaaaggattttgacaagttttacccaatcacatactcatttatgaaaaagtaacttatttatactttaaacataattagtttgaccaatggagtttttagttttgttggattcaacaaacatatcgaagatttatactggaaataaaattatctaacgatcaagatccctttttccttgattcatctttttgcatagtttacaactttacatatgaaacatgatacttataccaagtcaaaagatattgacacccgtaagatttaaatttcgtggatttttttttaatcaaatcatagatgattgtttacgattttcttaccagtatttagaagtaacttttgattcattttcaattctatcattagaaaatacaccaaagttataaaattgatccagggaactttctaatacaaatgcttttcaagatattagtatttaaagctttggtaggaaagacaagcaataagcaatcaggaagtcttttcactgcttcgcaacagtctcttgatagccatctgatatcctcatccgccgctaatctcaccgcatcaaaacatcctggttcattagctatcggtgttgtctgattattcgagcataataggtttggatctagacgcgcttctgatggtcggaaaatcaatgttgacactagggttaacaagaacaacgtcactttggtttgttttagtttcatttttgtcaagattccacaaataatgactttgtaggtttggatcgtgtagaactgagatcattgttttggtaaataaatagaaaagaatttgtattatttagatgttgtgtatggaattttcttatacatagaaagataggtgaagaaagtttgactaaaagatagagaagagaacaggaaagtttgtttatttgtttgacccatatatatgcatatatattaggatattcacaatcaatttgtatataaattatgctatcaaagaaataatatatatattagcttttttacagtacaaattttcttctctcctcaaatttttagagtaataatgcaaagtctgtgagtttttccaatatattgcaaattgagtctttcgacttgtctctagtactatggattagatattcaatttttcatagatagctaaatttcgttttat

SEQ ID NO: 5373 - DNA, 1399 bp, Arabidopsis lyrata
  Intron number 1 from transcript 488473 (locus 488473) deri ved from phytozome v7.0 (chr-ID scaffold_6; pos 6626016 to 6627414)
tgttaccacaaaccctgctaggtaacgatttattcgctttcttcttttttaacttatgatagatcttcgattttcatctagtttttttttttttttttttttttttttttttgtagtagtagtagtagtagagatatattatgaacataaattagagatatgctctttaattagcataaatcattctgcgttttcgttgtcttctatttatcatgtgattaagcgggatctaaattataattacgtcgttttcttaagacaattaaataaataaaaaactatctcgcatgcactttctttaaagttatgttttttactgacagtttaaagatttattttatgtcataattttgttttcaagattttgtttattcattatcggaggtcttaatgtttattaacatgagcattcctaatttctatgtccagtgggactataatactgttttaaagacattggattccatgtatcttcgttgatcccattatatcataatatcaacttttttggtccacctgaaaacttttctatattgcagaatcactacactttttatatatacactttatgtgtgtgtgtatgtatgcataagtttgtgattggtttcacacggatcatgacattaggtgaccttaagatcctatatagagagataagtttgattaattgattccctttcagataatatttgagtaaactttaatcattttatggttgaactttaagtttgtttctttttctttttttgggttcatacaatcatactgagacttaaatcgtttatcaagtaaattgttttttgtcagacaaagtaccattctacttttaaaaggctgggttgattgccaaaaaaaaaaaaaaaaaaaggctggtttgtttttcacaattttaccccaccatgcaaaattacttaacaaacgtacgttgttgcttttttgttttgttttggtaaaattgtacagacgttagttgacatattaaaatcaatatacacatcaacaacatccaaaattccaatctggatatggtgacacaacgtcttcaaataaaaacgatgggactaatagaccaatcaatatcatcaacatacattttttataataaaatgatttcttttacatttcctaattcttaaaaaaaaaaaagaaatacaatggactttctttctttttctttttctcggtgactataagggagttttttttttgtcaaattacatgttgcgaaagagcaacgtaaccaccacatatatatagagtttagtgtaattgtactattaaccctttttatagttttgtactcttaaaaagatatagcaaatcgtttataacacgtacacaggacccatttctgtttgatattaatattttaccttttttatagggaaaaaaacgaaac

SEQ ID NO: 5374 - DNA, 4410 bp, Arabidopsis lyrata
  Intron number 13 from transcript 497092 (locus 497092) der ived from phytozome v7.0 (chr-ID scaffold_9; pos 1205699 t o 1210108 reverse strand)
ctacatttttagtataaaacaagttcttttgtagctaaatgcagagaaagagagagcagagaggaacaaaaggagagcattggatttgaagatttgttttgtgcaaaagactgaaaggttaccttctcacccttctcttcttgatagttgatattcatcttcttctttgttttcctcttccatttatgttttcatgttttagttctttcttttcccctgtttttcttcttccatgatttctttaccctcaatatctatctctgttttgcttttcaacttgtgtttttctctgttttgcttttcaacttgtgtttttattctgttgtgctttcctatgttatcatcttgcatttttcgagtttaactctttaaccggtctctgtttttttatatcccctaaagctttgattttgactcaatgggtttggtttctaatgagtttgtgtacaatgggtatgtttagttttgtctcagttgattccacttgtgctatcctctgttttcgtcttctaattcttttcttttctttgtttcagcatgtggatcggattcacccattggattttccgtattcctaaggatgaatacgaggggatgtttaagaagatggatgagctctttttccgtgtcgtctcagttctgactctgcctccaaggaacttttccaagccatgggattcgctgatgaattcgtcccatctgcttacttggccgttgctcatatcatcttaacctttctgggcaatgacttcaggtatttcgatgaagtagccatagtctctggatttgccatgtgtatatggctggtattggagctttattcctaccagactgtagttcgcttagccgtgttcacatattggttttcaatagtactggcctctctgatgatctctgccgcaattgcctactacgtatacagtttccgggctcacatagctcgtttggttggcggctctttgttggattacatatctggatgggttgtatcttcgcggagatatattagccgcactcttccacgtctgttcactaatttcatgcagtttcttcgattcgtctgggctgaagtatcggcattctgggttcagttttgggagaagattattattgcatttgctgtgttgacagccgttgcattagtattaatttacgtttacatctaagtttctcatgctacgagtaaaaaaagaactgtccttaaaaaaaaaagaactatgtccttcttattatccattaatataataagttttattatgttcctagtgctacatggaaaactacttaaatcagtagagccacaaattttacaatgtaggtttttgtgcaaaaaaactctccaatttgtctatttttgcaattttaccattcatttccggaaaatgcagattaattctacgaaatctaaaataatacgcaatataactcttatatgtatcttgtaaacggctttcggtcaaatacattagtttttttttaaatattaaaaagtagagttcaattctttatagcgaggacttcgaattgacatattatttgttaaaattttacgaacttgaaaaaatttgacggtaaagaatatgagttacattacttattattttagacttcgtatgattaatatgcatttttcggagatgaagagtaaagttgcaaaatggacgagttggagacacaaaacccataaatgtaacacaaaacagaaaagtagaaaagatacaaatgtttgtaaaacccaaaattttaacattctttttctaaatttaacaattaagagagagagaaaattattaaaattacacggtcctaaatggttttgtgtctaaggaatcttgaaaatttgaacactcgttatctaaatgtaacaattaagagagaaagagaaaaatctatatatataatgggagagtttctctccatctaaggtgtccacatcagcatccatgtcatcataatttttttttttgtgggttccacatatttatttattaaaacaaaaacattaaaactaaactaattcacacattaaataaaaacaataattgacaaaaattaaatgaaatattatgaaaaacgaaaaaaataagtatacaacttaaaatatgaaatttttgaatagagattaaatatatataaattagatcattatattttaacatataatgagtaaatattttaaaatagttagagatacgaaaaagaaacttatcatatattttaatggtacaaaatttattttttaagagttgccattatttagtagagaaaaggaaataagagttaaaaataccaaatttaaagatttttacttaaaatagaaatcaattcatttctgaaaaatagacatttaaaatttgagtaccgattaaaaaataagaagaatttagaacatattattatttataattataatataatataagtagtcaaattaataaattttctatattataaatgttttctaaataaaaaagtgaatacctaaagaagaaaaactaaatattaatcagtgtttttaggaaattcacatcgattgaacaatctaagggtgatttgaaataaaacaaaaactatcctaaacatcacaaataaaaataaaataatcttatcgaataataaaactgtgtaataataatatttgagaatgttatttggaaatctatatatagtaatggtagattgaagagtttttcactagaaataaaaatgattttgttttgtttttcaaaataaatatattttaaaattagaataatttttatgagttcgtaagtgtcacattttataaaaataaacattaaaaatactatctaaaatcataatatatgttaaattatatatgtagaaagagatttttgtatttttcaaatggtcaagataaagtgcaaaatttcacgttgaatttctatgtttgttaataggaatgagtccatatatgagatttgttttctataaaacaattttagatgcacaaaacatggtaaaaaacacattataacaaacatctcctcggatttcttttctgatgttcactttaataaaaagatcatgaaacttattaaaaatttgagtattgaatgatatgaaggagaaaatagaaacgatctaaggagaaaagaaaatagatgtcggaagacgacgagtgaatcataaaagaaaacgagaaaaattgtagtaaaaaatgtgagaaactttttactactttggaaagataatgcacatgaattaaagtaaaatcttttaaaattcaattgattatatttatactcaaagaataaagtttaaattaaaatcccgcgcaacgtgcgggtacaccatctagttattaaaattacacggtcacaaatggttttgtgtctaaggaatcttgaaaattagagactcaccatcaataaatcattagacaactcagagaatgtgcctttagtcaagtggttaagtccatttgactccgccttccccactggagttcgactccactaaaagtgtgattggcaaaatggtgaagaaatgagtagctgaaagcagctgaagcgggagcgaagagcggagagcgggagctgagagcggagaatgatagcatagagtggtaaatagaagcggggagcagtgacctaaaataatcttataatattagaaaaagaaaatagaaatttaaacatagtttaaaagctaagaaaccacaataccaaaatagtttgaaacaaaatatcttattttatagaaatttgtaaaaaaattaatatcttattttaatatttaaaaagatctgaatttagattcacattttaactgagactacaaaattttacgcgaaaactatttgaattgataagcctttctcataaaaaaatatttaatttgattttctccaactaattacaagattttgtggatttaagttgcgttttaactcttgaatttagagcatataacgcttagtgttaaaaaacagtttccaaattttaaggaacctcttttaattatcttgattggtggtgattcagcgaggaaagtctgtaactttcctataaacgtgtttccaatcacgcactaagtcgcgttaccccgcgtagtaggaattggctatacatcgggccttgtcgatccaaaggatgtaaaaaaaaaaaaaccatcatagacaactcatttattataggaatgacaatttgaaatttccctagcttttttgttcctaattaagtttaccttttttctcatacatgcatcgaaaatatttttacccaaatgaatttgctaccaaattgctaccagaatacatagacaatgcatggataagatttttttctttacctattttaaaatatttttctacgggatgatcttttatttttaggtttttccttcttttttctttgcttgctttcttaaaagttttttctacccaat

SEQ ID NO: 5375 - DNA, 5165 bp, Arabidopsis lyrata
  Intron number 1 from transcript 894823 (locus 894823) deri ved from phytozome v7.0 (chr-ID scaffold_6; pos 14239635 t o 14244799)
agggaagagcactgcacgtaccttcttttgttattgtaagtattagccactagcactgaaagattattaaataacttgatcttcttgcaggcccatatatttgagggtaaagaacctccaaaatttgttgcactttttcaacatatggtggtccttaaggtatttcttttaattttttttggaaggtataaactcattttttttatgtttctttctgatacaaatatgaagctattgacatatcatgaacttccgtgaaggaaaaaggctatggatctcatgttcgatgaggtcccctgtcatggatttatcgaacttatccaaacctttgaattgccatcaaataatatattaatggttaaggttggaaactggttgtgcttactgcttttcagcttcggaacagaacgtaaatataattagaaactggattttgctattgcttttttactatgatatgtttagcaaatcacagctactagtgtcccttgttcttgatctgttgccttagaagctctttgctttaactgcaggagctgaagctttatcaacactttagttgtgtcttggatgaaaagagaggaagctggcccaataaatatcttctattcctatctacgtattctatttgttgaagtttacagctggagtgacataaatgttggtttgattcctttaatattttttttggtttcgtgattgttttttttctgtttatatgtgaagtacttcttgttgccaccatggagtcgagagtgcaagctctgccatgttctgttcgtttcccaatgaaaaatggtttcttcttgatccttctttttttaaagcgagtgtaaagactcgttgaagctattttcttcttctgattacattgcgccttgtcacctttttcttacatagtagatggctgacttcattatttcaaccaaatctaacattgaaatctttttttttcaggtatgatttctctcatttaaattttactacttgttttggttttttttatagtctaacgcgtgcaggttgaatttttctctgaaggaatgcatgtttgctgcttgctgtttgctttaacttatattaccaacacggccttaaatttagttttccaaatggttttagtctttctcattaactaaaatgtctgtgagagtgaaagctcttctctgctctactatatatatgaattagttttcgaagaggtttagaaggtcatcttatttcatgcctttttcagtatttggtctgtatcaatattgtgatttgatagcatgtggggtgtgctagtaattgttttggtatcagttctatttgctaacaatcttgcagtaattctttcactggtttttaagcgattatctttggatgagtttctttgtttgatatctaagctgcttgaattggttaatttatgtgttatatcttttggttataggttgtcgatgattctagatacgtatagattttgatgttccaagatttcgattttcactttccttctgttcttcagagagttaatgttatgttggaagttctttgtgattagttggccaaagtgattgtatagatttgttgtttcggctcttgattatgtgggttcacttctttgtgttaggttctctttattatagagtgttcatgttttcacgcttgctttaggtcgcttaggaggatggttttgtattagttgtttcttgaactctgtttagttgtttatgttctttgactaaacgttttcttaagtctaaatcatatgagaagggggtctacttttaagtatggtgctagttaatgtgattatgttagagagggttttggaacgtactcatttaatagcaattaaattatgtagtttcgtcacatgccaactctgttttcagcacatttatatagaatgacgttagagattatatctcatttcttaaaatgaccagtagactaattaaaaccgaggaagctatgcatttatagaggaggatagatttgtagctactagtatcccatgttcttgatatgttgacttagacgctctttgctttaactgagccgagacagttcaaatggaagccaaggggctgaagctttatatctgcattcaattctacaccatcaaagtcacctccaggaagacccgaagtattagttaggcatcacaaagagggtaatttctttaccagtattgatctattgctgatgagtgaaaaggtatactcctgtaagtacaaaccatacaagacgcatgatatttggaaaaacaaaggtaaaaaagtagaattgcaattttacattttttacactgatgcgtgtgagacttttttgtgtgtcaaacatctcaaactttgctatgtaacttttctgtttatttcgagcgatcaccttgtttgagttttggtattatatggggcaactcttgcactgtcttcagaaactttcttgattcatgggtgttttctttctactgttttattccttttgcattggttacctttattgacttgttgaaattacttcctatgcagatacaggggatatcacgttttggtctcttttttgtgatggtcctcaggttttgcctcttttatttttcataccaatattacttacttggtttaggttgtagagtttctgaaagtgagaaacgcttgtatactaggctttggctttgatttttggatttcattggataatctggttttaaactgtacttttcttaaaacattatgataggatttggcaacccgtggcatcaatctcatcttgagtgaagtatattttaggtgtgtacaataatttactcttctggatcagtccagcagtgggatgtgtttcattctctcttgatttaaagattttgcatactttattctcgctgaggaggataagtcatctgagcctagtcttaaatattggtacacgtctcttcccttcttgtggcatatgtggctttcttgatgaaacaaaatgtctacctgagattttgaattcactatccattagttcttgatgatctggttttaaactgtacttttcttaaaacattatgacaggatttagcaacccgtggcatcaatctcatcttgagtgaagtatattttaggtgtgtacaataatttactcttctggatcagtccagcagtgggatgtgtttcattctctcttgatttaaagattttgcatactttatattctcgctgaggaggataagtcatctgagcctagtcttaaatattggtacacgtctcttcccttcttgtggcatatgtggctttcttgatgaaacaaaatgtctgcctgagattttgaattcactatccattagttcatgaacatagaatactcatattgaaactaagacatacgtctgggtagtgatatgttgctcgtttccattcattatataatatgatgcctcactggtatgctcatctatctcctatggatgttaacatatgatcttggcagctttgtgttttttttccccttgatattgatgaaaaccacatttgcaggttcaagtgcttatatatacctggctggagaatggagatggggtggtgataactcccaatgaacatgtactctttgaagatatcctatgtctaatattctacatgattaaaccagaggcaagagttctttcgaataataatatggtcttttcatattccgggctgttttttttttttgctttcttatttgaaacatcaattgttgaatgactctttcagaaggagaactgcatcacactccaggatctgaaagcatctaaactttctggaaatgttttcaaagtatatgcttgaacctgaacaaattcatggcatttgaaactcgtgacccttttctcattcgccaagtaagtctagattttctatagagtttccctccatttggttattccatacttggtttaatagcttttgaaacttattacatactactgaatatttatttttttgcaacatgagctgaaatttatttgacaacaagaaggagtactttgacatgagtcagttggttcacccattcaaataagttccttgaatcgtttttactgaattggtttgtgttcctttcacctttatcacttctctaatgttcattattgtttcttttaacaggttttcggtatctgattgatcaatacttgccgtgtcttggagttggccgaatatttgctatcctatatcaaataatcgacatgattaaaccagagtcaagagttctttcaaatcataacatggtcttttcatatccctggctgttatggtttttttttgtccttattcgaaacataaatttgttgaatgactctttcagaaggagaactgcatctcactacaggatctgaaagcatctaaactttctggaaatgttttaaatagactcttcaacctgaaaaaattcatggcgtctgaaacttattcattcgccaggtaagtgtagcatttctgtagagttttcctccctttggatattcaatacttggtttttaatagctgttgaaacttattactactgtatatatatttggttgcaacatgagctgaaattcatttgacaacaagaaggagtattttgtcatgagtcagttggttcacacattcaaataagttccttgaatcctttttactgaattagtttgtgttcctttcacctttatcacatctctaaagttgttctaaagttgttcattaggttttctttatacctgattgatcaataattttttatatccgaatcaatattcctttgtaatgttttctttcctgagtatacgtgattgatcaataattctttattggcttttatttctctttttcacaaacaattttactcgcgtatgtaagtgtttgtctacttctttcttaaggattatgtcattgattttgttagcaggctctgaattttattgtatggctttatgtaaatatatttaaacatgttgaatttagccacctgactttctttttttctcccaactttaggaggatcaataaacagcagttcgtctagcgagcacaatgaaaaattcgttgaagggaagaccagtgcaggtaccttattttgttattgtaagtaatagccactagcactgaaagattgttaaataacttgatcttcttgcaggcccgtatatttgggggtaaagaacctccacaatt

SEQ ID NO: 5376 - DNA, 515 bp, Arabidopsis lyrata
  Intron number 3 from transcript 897446 (locus 897446) deri ved from phytozome v7.0 (chr-ID scaffold_5; pos 12557288 t o 12557802 reverse strand)
cggatcgaaaccacaagcaaacaacgcagtaggaggtttgtattcacaatctgaccccatttctttatatttatttttggtaggagtaaccttatttaataacagtaattgattatttttgcgatttttctctttaatataaacacaaaaccatatattttttaaaaaaatttgaaatggagaaaaagaagtcttagtcaagttattaatctataagtatacaatattttaacggcaaattcgtatacactgttttatttttatatctttggacataaatcttataaaactatattttattaaatggtatgtccaactatttggagatgtgaaaaactatcaaggctgcatggatatcaaaaaaattattacagtatatgataaaaatataatttggatacaaaatataataaataataaagaatatttcttactgccttaattttttgttatattattaaacaaaactatttgacacccttcttctataatggctttaggtggggcaaaaaaca

SEQ ID NO: 5377 - DNA, 11104 bp, Arabidopsis lyrata
  Intron number 6 from transcript 484840 (locus 484840) deri ved from phytozome v7.0 (chr-ID scaffold_5; pos 10716103 t o 10727206 reverse strand)
agattcttgttgacgctttggtcttcgttgtaatatactgaattgttagtattataaatcttataattttgttgtgtatcttaatttggccacactagtaaaaaattatctggtacaattcagattgattactttgtatctatacccaaagtatggtaaaataccttcagatactcaaaatatccatttggttccattctcgggtaatcatttgaccaaatcaatcaaaactgcatcaaaccaaaaataagtcaaaagtaccaaatatttttgttctttttttccagaaatatgtaatgttatatacaattgtcattgtaatgtacttatatctatatatttctatatgaatatgaatctatatatttctatacgaatatgaatctatatttttctagaaagtactatgtaatatgtattttagttatgttttcaataggtgtgtggtatttattattggtggggataagctggccgacactaagcaaagaactgctctggaaccgggtctctgcaaggaagagacgctacactcccaaactacaagaaaatgaaaatgagggttaaataaacatttcgattatcaaatattacaattgatggaaataaaatatttctattttgcttacccgtacggaagcgtatctggtgcgggtgaaccggcaaacctgatggcgcctcccaacaagcatggcgtgcagaaacatgactgtgtgtcgcacgtcatctgccgagtactcccaaggaaaaacctgttagtaaattaattaaaacataatgaaaaactatgttaaagtaacattcaaaaaaaaaaaagatgttaaagttacgagagacgtcataccctagtaggaagtacatctggatgcagcacgaactccgccaaaaacacacatgatgtcgctaggagagacggatcaaacacagagcactctcggtcgagtagtgacaactctgtgatgtaagagcaaaggaacctgaactgtaagaaagaaaaaaaaaatagggttagtctttgtcttaggtgaaacaaaacagagctaaaaacaagagtaaaacaatcactaaagcatcgttatcatttccactaaaaagtaaaagataaaacacgccctcaatgatcaacaaaacccatatcaagacagcaaaatcataaagaccaagccaacaagagagacaaacaaaacacaaattgccatgaaatgtaacgatgatgagagagtagagtcagtgaatgaccttgacacacaaggcaaaagaggtaagagatatgtagactgaaaacagtgagaaacggagagtacttaaaccgataatcactttcccatgattcaaagcaatagaggtaagagatgtgtagaaaactcacagtagcatcatgcggttcggtcaagctcagataaagatctacaaatgttttcgttgtcggagcagttagcctgtagttaaaactgctaagaatttgcatctccatgtctagatcccgaataggaaatgtcatcctcgttgatttgtcaataccgtactcgtacttcctttaaaatgcaaaataaagaaagaaaaaaaaacagagaagagaaaaaagtttagaacgttagaaaagttataagaaatcatcaaatagtctcaaatcaacacactaacactgctatgaaaagtgccatagtaatggcggtttgaggatctacagcagcctgtccttggtccagtggaagtgttgcgaaatattggtcaaaaactagaaccgccaaatggatcgcattaggatacatgctagccttttcggaagctaacatggtgtctactgtgatggctctcgtgttttcatcgacggccatgataggattagtggtaagttgcttagtaagaagcatggcagtgtagtccccgggctataaaagtaatggtacataaatcgttagtttcattgcccgaaatgtgaaaaatatcaaaagatgaatattctgaaaccatacaagacactaacctcgtagcagccaaaaaccatatcagcaacaccaagggcttgttcctctattggaatctgttgcagttgctgctccgggacttgttcatccggagaaagctgctcacaaaattcaggtgaggctttaaaaggagatctagcaacaatcttgaataagatacaaagaatccattatcatcagtgaaatataagcgaatcaattccatgaaaattaactcatcaaacactccagatatatatatatgtaaactaatgcttgaaaccgcagagacttgcctcctcgtagcaggcaaagtccatattatcaacaccaagggcttgttcctcctgaaagacatggccaaaatccatcttagcaacaccaagggcttgttcctcctgatagacatggtcctggatacagaatattagcattgaaagcattaacgtgtacttgcctcctcttgtggaatctgttccagttgctgctcggggacttgttcctcctgaaagacatggtcctcctgaagtggaaatgtaaatggcgtgagaaagtggatacagaacattagcattgaaggcattaacgtgtacttgcctcctcctgtggaatcagttccagttgctgatcggggacttgttcctcttgtagaatctgttccagtggctgctcggggacttgttcctccggagtctcagtgacctgatgcaaaataccatcggagaatccaagtctacgttaccatcggagcaagataagcgaatcatttccacgaaacctcatcacaaattaccagatatatatgtaattacgcatgaaattaacggagatctcggaaaatctaagtaatatttagaaatctaagcaactagatcatcaaaacatcaaattaacggagatctcgggaaatgtatatagcaaatcgcgaccgaagaatgtgtatcagctccattagtgattccgaaaaattcttcaaaacctaaatccctaatctcatccgagttgatcacgaacagagattacacggctaatcaatcggagcgaaattaatcacaaactaacctccgatgatgaactcatggtactctgcttttttcttgccggcgaacacatttttctcagaaattcagagagagagagagtgaataaaaatggcagatgaagtgagaatgatcggaacaaggaacaaggaagaaggaagaaggagatcttatagtgggcgggaagagtatctctgcgttcagttttgcccaataccgaaaaaacccccgtaactctccaaatattacagctttgccactaccattttcccgcatcttttttgaaatgatattcgcattttttagtaaaaaaataataattcactctccctctcacttcctctcttctttttattagatacactaaccaaaaacattggaccaataagaatgatggaaaatcgaggattttattcaacaaaattgatccttgtgtttcaatcttacaatccagttcgttattgatatatatataccagtaataaacatgaatttagtttgataattggttaatttattttttggctcctatttagaaacttgaaagcaaatagaaacaaaaatccgcaagaaatgtagatgaaatgaaaggttgaaaactggttcatcaccgaggagcgactaaagactagtgcacagccgcatagctcttctcttgctgtgtaggagttcaattccacttccctttcattgagtaacataaatgggcaggaaaagatacaccggttaacctttttacgagtggtaagcaaaagatataaaaaaatgcactttgccttataacaataggtgaacgtgcgaaagcaagacgcataagccgaaattgccaaaactcctagcactagaaacatttcactcgagcccgagactgagccgtcaacagcaaagtcaaagtcctcgatcaaatatatacttctctctagtcatataaaagcaactcgttgaacgattccattagttatcacaaaaaaaaaagagacgaactatatataaatctagcaaaccaattatgcaaacagtactagttcactctaccaaactactcaaaaactaaaccaaacaccattagtctcactcttactaactcctctagtgcacaatgctaaaagcaaacatagcaaaaacgctttgcaacactaatacctcatctacaattttgataaagatgagagaagagcatttaatcaaatattagttgctcggaaatcggattagatatataaaccttaaccgggtttatgttagttccgactcgcaaaccaaaaaaaaccgttttcttattggatctttcttttagtacaatgaccattataccccacaacggaccaattcatccatcttcctcttcccgttttatccgacgggtttgaatttctgaaattcacaaatctccccaaattgggaaaatcaaaaaccctagaaatcgcggcgaatttcaaggccaatgaccagaaccagctgatcatcaagccccaacacgaatccagaccgaatcgaatcaccaacaagctcgagatcagtgacgcagacgacaaacggatcgcaccaattcgtgatccaaggatacagtttagctaaaggaatcggagtagggaaacacatagcaagtgatcaatggactatcttcgtctacccagatggtaaaaatccagaagataactcttcttacgtctctgtgttcatcgttttggctagtgaaggtactgaagttagagcgctttttgagcttgctcttgttgatcaaagtggtacacttgatggtggtctttacacgcttaaatatagagaaagtatgtggtatgggttgattttctgctcttaattctcgttaatcgtatgtaaatcaccatggaaattggtttatgttgatgggttatccataaattttcagtagaaacttaaacttagtctcatttcgttatgttgtgcttgttcgatgacttgtcttcatttaattttccctgtgttttaagcatggattgtttgatagctgtttttccatttttgctgtactctgtcatttcagctgtgtacgatactattttaatctacaatttcttgttaatcaagaagacatttaacacttgggttactcgggttactcgggttacaggttacagggttaaatgtaggttacttgggttactcgggttacaggttacttgggttactcgggttacaaggctgaatgagggtgctgttggtctttgtgcacaacccatctcagacctagattatgttctctatataaacgtgtgtgcctcctcattgtgtaatacacatctttaatcaatacatttctatcttttctctccatccttaatcatgatccattcaacatttcctacttgaaatcttaaatatttacatttctaaggtgtgtataagctgtctgaactgtcttggtgttgttaaggtgcttaattggaaatttccttttttgctgctacctcagagccctctaattcttgtttcttttctttggattttgaataggggatacaagcatttcttcggacgctccttgtctgagacattggatactttggaaggctcggatgtcaaatttgacattgctggtgagaagtttcaagctcattaattggttttggctgcacgatctttgtttttcagatcaaagttttacaatatgccagaagcaaacaacaatgatcagctatttggaacctaaggtcttcaaggtacaaatttcgagtttgtagcttctctaaataattttctcgtctgattatttttgtcggtattttatccctggcaatgtttcaccttatacaggggccttgttacacttcttgtataaagaagactctctctcgggaaccattaacggctcattcatttgattgtcactggtcttcccgctgccaactgaagaaacatatcatcttcgtcattaagatctcttttccacaaaccattacattcaaatgatatctctatcgaagatggatttcgaatcatcattccggttatccaggttcacaaaatttcctttagagaaaatggtcctaattagaaggaaggaaaatactctcaggcgattaatatttcatcattgttagacatagaaccaaaagcgcggtgttctctccttttctttcatcaaatgtaaagttcctctggatatcacgagtcatttggatcacatttgtcacctctttatattcttaatccgcccctatcatctatatattcttcatcaagattcgttggttcatctccatccaactcaggggtagcatctgatttattcagcgaagaagcactaatactttaacataccaaagtactaatactttagaaaccatttgtttgtttgtttgttaatcaaccttcccatgcattctcaaatttcgaatgtctgtagttaatcaataagtaaaagttacaaaattgttattgataaggagagactagagtctcaaaataagacattaagaattgaaaagaaaaagatgtgcgatataaaatacagtttttggaaccgtagaggacccagatggtacgtttaaaatttgaaaggatgacataattgttgatcgttgccattgggatgattctccactctttgaattctggaggaaaacaagacaaatctatggaatacatcatctcccatgttctcttgcgtacgtctagaccccagatcttgaaaaaacgatcgttatcatcaacaagtctcttaaagatgcatatacgattgtcaagaacacacatgcttaattcacggcagaatctacacccgatatccggagtaattgaaatgctttcaaatgtctctgtgtgaagatcaaaagctaataacttgagatccttttcaaagtaactttgctgttccatgttgtgggtgaaacaatacattactccatccaagtgtatttgaggatggtcatagtgaactcgacatttaggcggatctacgttcctccaagtgttggtgtcaagagcaaaaaccatgcacctagtagatttattcatacgtctgttatcaaactcgaaaaaccacaatagcttataccttggactcacactattctctcttccgatccctagcaaagtaaataccctatgcccacctgtaacaataaacaaaccaatgctagtttataaacaaaagcttaaaattataagtaaaacataattagtcatcagtacgtaccgtcacagacaatagaggtgggtttagggagtctgcggcggctagtggtggcaggattcacaaggttaaatatacgagtatgtgtgtatagacaaatcaaaccatcgcaaggcttagagattttgtaaccatcaaaccggttaaatgccctaataggtagatatggagaaacaggtacgatcccactggaagaaatcaacatattttctagagcaagaccattgtatcttttttcttctgataataagattattctcacttgccttaattgtagagatttctgatactgattgtgtttctctatgaaaaactttgactctatcgttcctctccattctctcgatacagctttgaatctcaccagcgatttcaccggaagcttcgtcaaaatttcgtctacaatctcttgtggaatgtttccacgtcttcttttctctcccttcatccctccaccctaatcaaggacctctctgatttttcatttacaaactgaattagggttactttttattgggattaaatcactcaagcaggctaggcttatgggtagggctacgagtgctcaagcactgggtcccacaagcttttttttttttttataatgttttaaagaccttaaattttagaaattttctaaataaaatcctaaatttttataatatttttaaatgggcacaaggtccaaaaaagttttgtgccggccctgcacgaaaaacaacttaaaccttagagcaacattatcaatggtctcttacgacaactcttaagttaagagatatgtcttataactaaaaaaagtctcttaagagcatgattataggtagtctcttagaaatacttcttagcaatatttaagtaatttatttgtaatagttattgttaagagatagtatttttgagttaagatttttgtgtgattaatggtaggctcttaacatgtggttcttagaagaaaaaatattaatataaaaataaaatttataattattgaaaatttaataattattgcaaattaaaaaaattaaaacatacatgagatacaatttataacataaataacataaagcacatatgttttaaacttaatttctggaatattttgtccatatatactcgaccaaatcattcttcaattgttgatgcattcttcatacggctagtttgctaaggatattttcagatatttcggttatttttaagtatttttggatatttttcggttatgttcgagtatttttactatttttatatattttcaagtagttttgattatttagtctataaataactaattattttgaaatgtatttcgggtattttcggttattcgaaatatatcggttcggtaccgatttcggttcggtttatttatccatgcctaatttaactcatcaaccactcatacccggacatgtggccgtctcttagcttcagttttgtctcttagctaagagacgtctcttaactataagtttgatttttgaattaaattaaatcaattaatgcctaagatctacctaagaatttgctaagagcttacctataaagatgctctaaagtctcttagttaagaggcttttgttagttataagacatatctcttaacttaagagttgtgctaaaagaccatcaataaaagcaccctcattcatagtctattaagtataactcttaggaatacttttaatattaattttgaatttttttgacttaagaggttgttaattggttttaaattttagttgtctccattggtaggttcttaattagtggttcttagaaaaaaaaatattagtttaaaaaataaaaataaacagttataattttagaaaacttaatgattattgcaaatgaaaaaatttgaaacatacatgacatacaattaatattatacataagataaaacttgatagttttaaacttgattttcgccaaattttgtccatatatgctcaaccaaatccactttcaattgttgatgcataactcgatcacgaagtcgagttttagtggcaatcatatttacaagatttgaaggcatatccgtagaataggtgaaatccacttatgaacttccggctgattccgcttgttcgaataaaacattcggatattttcgggttcgggttcgggttcggttttatgagtttaggaattaggacccaatagaataaatctaaatttttgggttcgggtttggatcaaatttgtcgggttatcatggattccagagacattttcaaaaagaagaagatagaaaaatgctaataattaatgctagaaactggttctttggcttttatattagagctggttcttagcatataacccaattaaacattaaattttaatcataattcccctaagaaccatattaagagacctacaatggaactgctctaaactatcaagagtgtgagattatgatgagagaagagaggaaggacaggcctggcggccttgcacccattttttatgatacatgtgtatggcgccacacaaaaaaagaggcccatttttttaaaaaaaattattttataagaacaacaaataattagttagatgcacgcctattagaggttccgatttctaaaaaaaaaccccaattttcagaaaacttctatttttgacattatttgtggtactattttatatatagagacctcagatttttttatttcgtattgggccacgaatattaaaggaccgggcctcacgaagggtgaataagaagagagaaaggggaagaacaatctagatcgagagagtgagacttttttttcttttaagaccaagagagtaagttaagagtttattcctttttcttttttacagaaaaaacaaaaaaaattctatcctttatcagtttatcttataataaaacaaaatctatacatatataataacagtaagacatagaaaaaaattaggtttagggttttcaattctattaaaaaaattcttaaacaaatgattagtttttaagtgaatgtctagtttgttttattgaaaaggagttatttgacaatctaacaaatgaaagagtattaaaaaaaaagaaatgtttcaagttatgaagtaaacataaaataaaattgtagttatttgtaaactactttttttaatatgtctttttttttacccctggctacgccactgcttttagcaatcgaagaagcaattatatttgctgagccaccacatgaaacacatattcacggaaggaacctgcaacattgagaatttgctccaagaggttacggtatcttggccaatctttaagattgttcaccgcatcaatagcacctttgcaatcagagactagctctgtgtgcgtgacgtgagtatctttaataccattaatagaccaaagaatgcatcgtaattcagcaactaagcgacatcagatgcagtggacacgtctctactatggaagagatcctgaccaagatgatctctgagaatccaagcacctccacttagcgagactccattcacccaagaagagggacataacatttaaccattccatcgagaggttttatttatcatgtcttttctatgtcaaaatatctgttattctaccagatttaagcattttctggtgaatgattagcttctaaccacaattatcgtttatgcatcatcttgagcgtttcttactaaaacgtggtaaacacgtactcatttatttgctgataaaatgtggtttggcactaaaacaaacattgatgaaagtgatgataaaaaaacatagatataaatggagttgtcaaagtcaagattatgactgaaagcaaacatggctagatcctaacctggtggagccttgagtgattgtgttaatcagttttcagttttcagtttcgtcatgatgagattcttgtgcaggtgcatttggtgttttatttcatctc

SEQ ID NO: 5378 - DNA, 1341 bp, Arabidopsis lyrata
  Intron number 1 from transcript 912316 (locus 912316) deri ved from phytozome v7.0 (chr-ID scaffold_1; pos 10902879 t o 10904219 reverse strand)
acgtggaggctggagagccattacgttcatcctaggtatgcatgttctttcttttcttttcgttaatttcttccatttttttttctgaacagaattattaatcttccattttcctcaaatatacatatggtccattcaaaacaatataaacatggtaaactattaaatgaatagcctatttcactatccattgtataaaatatggtggaccgaccacgctacattgatccctttcaatcgatttattagtgttatagtagataatttttgtcttgtaattcacatccttctttgttttagatagacttacacacaatatgacactttcttgaaatgtcactacgaaaagaaaaaggaaaaaaaaaaaacagttttctaattagtagtatatcattttttcttgatatctaaagataataaacattcaacacaactaaaagtattatttcatagctatgattctctgaatttatatatatatatatatatatatatatatagttataaatttatgatattgttgtattaatttttgatgttttattggtataaattttagaatctatttttttttaactataaattttaattttaagttatatttgttttgttaatattgtttgttatgtttagtatttaagattatataactgtattttgattgttaattctaggatttcaaccgtggtataccttcccgtattaatatcaaccataacccgtgcttcggccggatcttatgttttgttaatatatgcgaaattttgttatatatgaaagtggataaaatagtaaattgaaaatatgtagatgaaaccatcaaaatcctatgttacaataattagaaaaaaaacttaagccagaaatctcagtttcacaataatctatatacttgctgaagagtgtaacggggcttcctcttcttcttcatagtttatgttagcttcttcatagattattgtcatcactttttcttcctaatcggtagttgtggccaacaccatgctaatatcatgagcacactaaactcatttgcgagtcatgcaattcaataatctaagaaatagtatcaagagatatatacaagtatatattttcgaccgtttcaagttattgtttaggcataaacctttgcacataacacgcataaaatacagctaaaagtttcagacggatcatgagtttatacaataactgtatttaacggctagtccaacttaagttaccgaaaccatccattcatattaagcacaaagaataaaagatggtttaatattttggacatcatatatgtttgtattttctgagatgaaatcttattaaatgatgagaataaaggaa

SEQ ID NO: 5379 - DNA, 8680 bp, Arabidopsis lyrata
  Intron number 4 from transcript 911616 (locus 911616) deri ved from phytozome v7.0 (chr-ID scaffold_1; pos 7559739 to 7568418)
gggaagcacccgtctcctctacagacaagccattgatgtccaagaacatgtatgtgaagatgcagcttctgaaggagtacctgaactaagtcaagaagtaactcaagagaacagagcaacatgaacaagattaaggaaatatgcagaatcttgttatggcggtttgaagtaaagactagaagcttagagaagattctagaagactgaagagtttccttttgcaagaagaaaaggaaaacatgaagacagaggacaatttcctattccataaagaaaaaggaaattgtccattccaattagttttagaattggaaatcgacctgttgtatggtctcaacctatttagtataaatagggtgctaaggcttgtagaaagctgagcacaatcactagagagaattcctagctattaagtcttagtttgagagaaatagagaactagaggcttaaagagagctaagggttttaaagagagttattgttcttaatcggtctgtgattaatgaacaagacttagtgagaatagaaaatagtgttaaaggagaaaccttgtaaacatattttctattaatcgaaagagtttttgagaaattctgagttacatcgtgaactaattcaaaacttagtagctcttgcatttacaattggtatcagagcggtcgcttgtgaagattacatacaggtgaggtcttgtggaaaagatggagagttatcaagaactgcttaaaaacgcaaaggttgttctagacgattgtaactatggtttttggaagtcaagaatcaaatctgtgataagagggatagatgtgttagcttggaaagctgtcttggaagaatggaaagaaccacaaattaagaatgaagatggaagcttcacagccaaacccgagtcagactggactgaagatgagaagaaaaagtctaaattcaatgctagagctctcacagctattcactgcagtgttggaaggaaacaatttgacttaattcagggctgtgaaactgctaaggaagcttgggatattctgcaaatacactatgagggaacgattaaggttcagacttcaagaaaagatttgatagcttcaagattcgagaatctgaagatggatgagcaagattcaatctctgattttagctctaaactaagttcattggcgcaagaagctttaacgcttgggaagaagtataaagacaagaagttggtcaagaaatttctaagatgtctaccttcaagatttatggcgtacaaaacagctctaacagtgtcaaataatactgatactctcagttttgctgaagttgtagggatgcttcaggctcatgagcttgaattaggaggaactaagaaaccaaaagggttggcgttgacatcttgtgaaagcaaatctcaagcagaagaagaagattcattgagtctgttagttcgaaggtttgatcggttgttgaaaagagcagaacaaggacaaggacagaagaagtttggatctttcaaaaagaatactgacgataccaaaccatcaaagaaagctgacatgcaatgtcatgaatgtaaagggtatggacactttattcgtgaatgtccaacagtcaagaaaagagaaactaaatgcacaacatgcaaaggaatgggacatgctcaagatgactgtatcagtagtcgaaaagaaaaatcaatgattggtattgaagaagaatctgaggaagagagtgaggaagaagatatcttaaattatgtagcattgataggcgttactgagtttgttgaaggtgaagaagaaactgactctgaatcagatgaggaacaacaagtgaattttgttgaaagttacaaagaggtgagagaaactttgattaaacttggtacagaaaatcaagatttgctaaaagaaaagatacgtctcgaatcacttgttgaactattacagaatcaactagaagatgaaaagaagattagcaaagaaagtttgagtttgatgaaagaaaaactaagcttgtctgctaaagctgataatttggagaaagaactgatcgctgaaaggaagatatctgcaggactacaaacagaacttaatcaacaacatcggaagattcacatgtttgctggaacaaaacaactagatcagattctaagctatggaaggacggaaaaaacaaacaaaggactagggtacactggtcatggagaaacaagcacaggtcaaaccaagtttgtgtctggaggaatatctcatcatgcacaagatgaatcaagaaaaagtgttttcaaaggcatcggatgctatttctgtggaaagattgggcacataaagattcattgttacaagtactgggagaaagtgggaaaactcaggtatcaaaggaagtttacatggaatggatataaacatcaaatctgggtaaagaaaattgatctatatccaactctagtcagaagaactgcagaaagagatacaggaagtagagcaggacttggttttagatgcaacatggcgttagtcacagaggaatgcgagaaaaagagtccttggtactttgatagtgggtgttcacgccatatgacaggcacaaaagattacttacaagacatcaagaaaatcaaaggaggtaaagtgacttttggtgatggaggtcatggagacatacaaggtaaaggaaaaactagtgatgtagagctacctcagctgatgaatgtctatcttgttcgtggattaaaggctaatcttattagtgtaagtcagttgtgtgacgaaggtctagaagttactttcactaaagaagattgtaaagcatttgatgaaaccggtgacattgttctaggaggtaagagaacaggaaacaattgttatatgtgggaaaaccgtacaaccaactgtttctctgcacgagacaaccttaatctatggcatcaacgtctaggtcacatgaatacaagaaatctgactactttggttgacaaagaaattatccgaggagttcctaagcttaaagatgaagataagatgatgtgtggtccatgtaatcaagggaaacaagtcaaagtgcagcacaagaaagttccagatgttcagactaagtcagcacttgatttggttcatatggatttaatggggccaatgccaattgaaagcatagctgggaagaagtatgtgtttgtattggtagacgatttttctagatatacatgggtgagattcattcgagagaagtcagacgcagcagatagtttcagaatatgggctcttcagcttatcaatgagagaggaggtattaaaagaataagaagtgatcatggtggagaatttcaaaatgaatccatgaaagatttttgtgaaaagcatggaattgcacatcagttttcagctccaagaacacctcaacaaaatggggttgtagaaaggaagaatagaactcttcaagagatggctagagcaatgatgcatggaaatcaggttccacagaggttttgggcagaagcaataaacacatcatgctatatcgtcaatagggtctatgtgagaagagattcgatgaagactccatatgagttatggaaaggaaagactccgaatctgagctactttcacgtgtttggatgcagatgctatatactgaatgacaaagactaccttggaaaatttgattccagaagtgatgaaggcatgtttctgggttactcagagactagtacagcattcagaatctacaacaaaagaacgtgtgctattatggaatcagttaatgttgtatttgatgatcattatgtgtcaaaggttagtgaagaacttgaagaaagtgacacagaactggatgagataaccaataaagaggttaaagaaaaaatggatggttcatcgatagaacaagaagatagtcacaaagaagctcagaaaattcaggtacacaaaaatcattcatcatcagacatcattggagatctccaagatccgatgaaaaccagaggtgtaaagcttgatttcaagaagatgacaagtaattttgcagaatgggaaactttgcagtttcaatgctttgtttcatccgttgaaccaaaaaatcatgttgaagcacttgaagataatttctggatcattgctatgcaggaagagctagaacagttcgaaagaaatgaagtttgggaattgattaaacgacctgcggatacaaatattataggaaccaaatggatttttaagaacaagagtgatgaaaaaggagtagttatcagaaataaagcaagattggtagcacaagggtataatcaaatcgaaggtgttgactttgaagaaacgtttgcacctgtagcaagacttgaatcaatcagacttttcttgggaatggcttgtattcttaacttcacggttcatcaaatggatgttaaaagtgcttttctaaatggtatactacaagaagaagtatatgttgagcaacctaaaggatttgaagatatgatgaaacctgagtatgttttcaagctaaagaaggctctatatggactcaaacaagcacctagagcatggtatgaaaggctgactaactttctgcttgagaaaggctacaacagaggaagtgttgataaaactttgtttattcttgaagaaaacaaagagatcatgatggtgcagatttatgttgatgatattattttcgggagtacttctcagaagttggtggatcagtttatagagaacatgacaaaagagtttgaaatgagtttggtaggtgaattgaagtatttcttgggattgcagatagttcaatcggatgaaggaatctacatcacacagagtacttatgctaagaagatcttgaagaagtttcaaatggataaatgcaaagaagctaaaactcctatgagtacctcattgaaattatcaagagatgaaaatggaacagatgtagacgtcaaaacttacagaggaatgattggaagtctcttatatctaactgctagtaggcctgatttatgtctgagtgttggagtttgtgctagatatcaagcaaagcctaaacagtctcatcttgaagctgtgaagagaattctgaagtatgtcaaaggaactgtagatcttggtatttggtattcaagaaactcaaatcaaaatctggttggttactgtgatgctgattatgctggaaatgtgaatgacagaaagagtacaagtggaggatgtttctttcttggaaacaatctaattgcgtggttgagtaagaagcaaaactctgtgtcaatatccaccgcagaatctgagtatattgccatgggaagttgttgcactcagttactttggatgaagcaaatgttagcagattatggaatcgacgctggagttcttcaagtctactgtgataatcagagtgctatagatatctctaaaaatccggttcaacattcaagaactaaacatattgatgtgagacatcactttattcgagaattggttgaagaaaagaaggttcagattgatcatgttgggacagagattcagctggcagatatttttacaaaggcattggacttcaacaggtttgtcacattaagaaattcacttggagtatgtgaactatgatctgactcagtcagagaacaagagagctgatatggttatgaagatacggttcaattcaatatttctagttcggtttatcacattagaagctccaagaatggtttattccgttttgtttttggcaaaaatcgagttttttttttgaattttaaaaaagggatatgcaatcataacaagatttactcaaatcttggtgaaaagattctcggggagaaagacaaagaggctaattgaaaaaaaaaaagtttttaaaaccctaagaaacaagagaagcgagaaattcactgcagaaaagttctcaaatcgtaagaatggtgaaagctacacgaagaggaccaatcggaggaagaagacaggctagagaaagtcggtctgatggtggtgcagaaaacccacaatttgttgatgaacccatcgaagaaccagtcagatctacagttgcttctttatctctggttccatatgacaacgatgaagattcattcgccactgcaagcgaaggaactaagagtggtggatctggtgaagataagcaagatgtagtggaatcaaagaaacctgacagagattctaaggttccttctgaacaatttgaagaagcaggtttgatttcatctcagaatgatgaaattcgtgatcaatcagagcagaatcagaagcaagattctactttctcagaacaagctgaacagaatgttatcgggtcacatgcagaacagatagaagaagaaatagatgacagacatgttgaagtaccagaggaaagggttggagatgaaccaatccacgtctcagatgttgaacttgagcccactgagctgactgttgaagatcaattccagaagaatcagaaggagaaagaagctcgtaagaagagagtcttcaaacagctaggtctagctcctccaaagaagaaacagaagaatgctgaaccaagttcaaagaagaacaaatctctcaacgcttctggttcaggtaaaagcaaacccaagaaaagctttcgatctaagctattctcatctcctcaagctcgagaaaggtatgctttatttaaggataggagtttagttgaggaacgcttgattgatttagaaaaagaagatacttggggatttttagctttgatcaaatctgcaaagttggaacccactgtaacgaatctaggcagttatgtgaaggaggtaattgctgagttttatgctaatctcccttctgagaagtctgaagaaaattctgagaaagtcagtgtattcatcagagaacatgtttatgagttttcctctcagaaaatcaacaagtctcttgggttcaaagagttgaacaaagatgagttaaaggcagatagtgaggctgattctattggaaaagaaaagcttgcagaaatcttaagtgaagaagagaaaacaggctgggatgacttgatttttaagaatctttcaccacgagttggagcacttcttcgtatcacagctcagaattggatcccttcgtctaatccagactatgtctcagttgaaagagctcagcttatctacaaaatctttcatgggatcagatttgatgttgggaagatgattttcaatcaagtgatgtcacttgttcagaataaggatgaaagatggttggtgtttccccgaatcatatatgggatgctcataagtcaaaaagaagtgacaatctttcctggagaaaagtttgtgactcctaagttctacaaaaaggatgtcagaactggtcaagcttacactgaaaggatgaagggcaaagcaaaagctagcactcagccaaatacttcaagagctgctcctcaaaatgtatatccttcttctcagtttaatccagagtatcaaggatatactgttgtggacattggaagcatccgtctgccacaccctgatgaggatgatagagagggaatgtttatggccttgttagacacagctcaggctatttccaagatgaatggagtgattcaacaacttgttctcagtcatcctttgtccaaaagactataggaagtttggtttttaaccttgagctctcaagcagggggagaaaggagtatggctgtgagtctgggggagttcatgtgttgtgggggagtagttatttgatttttttttgaactccagactttgttgttgcttgtttttcagactttgtcagatttagggggagttagtctttgttggacgaaattgctaaaatttttaataacttcgattgtttaaagtctgtgattgcttgtgatgaaaaatgtctacaaaagatagaagatttcaaatgcaggtgcttgagagacacaagattaaaaagggggagattgaagatgcagcttctgaaggagtacctgaactaagtcaagaagtaactcaagagaacagagcaacatgaacaagattaaggaaatatgcagaatcttgttatggcggtttgaagtaaagactagaagcttagagaagattctagaagactgaagagtttccttttgcaagaagaaaaggaaaacatgaagacagaggacaatttcctattccataaagaaaaaggaaattgtccattccaattagttttagaattggaaatcgacctgttgtatggtctcaacctatttagtataaatagggtgctaaggcttgtagaaagctgagcacaatcactagagagaattcctagctattaagtcttagtttgagagaaatagagaactagaggcttaaagagagctaagggttttaaagagagttattgttcttaatcggtctgtgattaatgaacaagacttagtgagaatagaaaatagtgttaaaggagaaaccttgtaaacatattttctattaatcgaaagagtttttgagaaattctgagttacatcgtgaactaattcaaaacttagtagctcttgcatttacagtatggaggtcagtttaagcctccaaggcggttaaggaccgacgagattcccgccattatcaacgactttagaattgttgcaagaaatgcgatagaagctggtaaacaaaatttctttttccttttgggtgttagatgtaatgtaatgaaaatgaaagctgatcaagacacttgacatataaaagtacaggcttcga

SEQ ID NO: 5380 - DNA, 6093 bp, Arabidopsis lyrata
  Intron number 2 from transcript 486946 (locus 486946) deri ved from phytozome v7.0 (chr-ID scaffold_6; pos 316930 to 323022 reverse strand)
actaattaacctagtattttttttttgataggaatgtgaatatcatataatatgaagaggtgaggttctacaatgaaagcataacctaagtgaatgtaaccttgccaaaaaagaaataaaaaacaagggttacataataaaaaaacaaagcgatgggtgtcaaacaacgcattatcgaatccaaaggatcattaagttgcgaaagacccgtctgttctttctagcagtgatcgtgtttctgatctccttctccaaggtcatgaagacagtagaggccgggattgagacttgattatgaagaagattgttcctctgcttccatatatggtaaatcgcagcctgagccaccaacttccttagaaccgtgggagcagtggtagagctgagccgtgtccacacaagaagagaagaccaagtatagaaagtgcaaggagacaggtttagtcgtaggagaataagcttccaaatctgctcgctgaacacacacctaagaaaaaggtgatctctagattcagcaaattgagaacaaatgcagcaggcgggagagatcggcatgccccaagcaataagacggtctctagttggtagcctgtcaagttgagctagccacatgttaaaggcatgcttaggtgtggctcctttgtaccaaacagaggatgaccaagccttggcaggagcttttagtcttaaactatcccaagtctctgcagttgggaactttatgaggtttgaatcacgtcccaaccaactgtagaaatcatggtcctcctcatcgtcagtcaagtggacagtggagagcagatcatgaacagccacaatttgtggagagcagagtctcggtattctcgcagagtaatttgcgaaagcgtcagccactgaagagagtagtggaattctgagttttccgggaccctgctggccagcaaacttgatgagagtgccaagcgggtgccagttatcaagccagaaactaccattctttccattccttatgttgcaggtcaaaaatttctctgcaagaggacgcagcaaaagcaaggatctccagttccaagaatcagaggcagaaggctttagagaccagaaacttttacctttgatatgatgatgatggtgccaagccacccaaagagagccgctgccagcgaacagcagccagaccagttttaaacacaaggtagagttccaagtgctcattcgtctcaaaccaagacctccttcatcctttggatagcaaactgctgcccaagcaaccttagctcccctggaactgtcaatggaaccagaccaaaggaatcgtgcacaaagagactccatcttcttgatgcaagcttttggtagcataaaagtagaggaccagaacgtgacaagcccatagatgactgatttaatcagtagaagtctcccagcataggacaaagaagaggcagcccaggatttgaatcttttaaccatcttctcaataagagatgaatattcggagattctgagttttctactcattagagggagtcccaagtagcgaattggcatagaaccaatggagaatccagagttagcaatggctgaggattcagcaggttccaaaccggcagtgaaaacttgggttttagcacaattcataaccagtccagaccagctagcaaaaagatccatggtatcagagattccctgaagagacatggaggagccatcaaagaacaccataacgtcatccgcgaacatgagatgagtgatatccagctctttagtctttggatggtgcacgatgaaaccagcagcaaatgaagagctcatgaggctgctgaacacttccatggccaagacaaataagtatggagagattgggtctccctgccttagcccctttgaactcttgaaataaccagaagtgtgaccattcacagcaacagaaaactgaggggtcgaaatacattggttgatccatccaataaaattctccggaaagttcagagcacgcataatagcaatgatgaagcaccaattcactgaatcaaaggcctttcttaaatcgaccttaagcattccccttggtcccacatttttcctgccatatccattaaccagctcagtagccaataggacattctctgcaaggagccttcctggaataaatgcggattgagcatttgagataacagagggaagcagaacctgaagtcttcctgccaacagcttagaaatcactttataaatagagttgcacagagagatgggtctgaaatctgaagtggaggaagcgttgggaatcttcgggataagaacaatggttgttgcattccattgatttagcattttcccagacttgaaaaattcactcacagcttcaacaacttctggaccaataacattccagcagcttttgaaaaactccgcagaataaccatcagggccagaagtcttattcctggggagagaaaacattgcagccttgatgtcctcaggagaaaactgtttacccagcgcaagatgctgagaatgagagcacctaaacttaagaagagaagagatgtctgcaggatcaaactgcggaggctgctccggacccccaagaaggttctcaaaatactcaacacagtgattctggatatgaacttgggaatcaattcttgaaccatggctgtccacaagaaaatgaatgtggttaatagcttgtctggcagcagtcatacgatgaaaataggctgtgttaagatccccttctctgagccaagtgacagaagaccgttggcaaaagaaagattcctcagcatgtagaagagtttgccatttggagttagcagtcctctccgaagcagcaatggaaggatttggattagtgagcaattgccgttggagaagaacaacctcttcttgagcttcttttacccttttctctaaattagagtagttgtccttgctaaacgctcttatagaacctttcagagccttgagcttttttgataagatgaacatcgccgagcctacaaagttgaagctgaaccaattatgagcaataagaggcagaaaggaaggattttgcagcaggagattctgaaatctgaaggtctttttctgtctctgaatagccggattaagcgtaatgcagcaagaggcgtgatcagagaaagcaggatccccaaaataaccaaaagagcttgggaacatcaaatgccaattttcattaacaagaattctatccaactttttggcaagggggttagcagattgcttattccaccaagtataagtgcagcctctgtaggttagatcagaaacatcagcatcaagcaaacaatcttggaacagtctcgtggacagatcagtgtttggatttagggaggaggaaaagtcaagaggacagagcgcctgattaaaatcaccaagaagagcccatggtttccccaccacactggaaagagtagaagtggaaatgatctctaaccaaagctccctcttaacagattcctcattagctgcgtagacaaaagaaacaactatctcagactgtgcatccggcagcagaacagcacatgtcaccatttggagagatttattaatgatggacatcttgacactcggatgccacattaaccaaatcttccccaactcagaaaacgtatagttgttgtcaaaaagccaaccaggcataatagcagataggaatttgtgttgcttagcctgtttgacgtgagtctcgatgagactaccaaaaagaggttggttaactctaaaccaatctctgaaacctcttctatgacttgatttattaaatcctctcacattccagcaaaaagtgtctatacacattgatcagtttggtttggggcccttgccccgcgcaaatctctgttgtctctgtgagaacatcttcaaaaactgagcatcatcaaaatctggatcaactccatcctcagaggactgaacatccgaggaatctgaggcaagactcttagcttcagaagagacctgatcagagtggagcttaactggaccaatattaatgggcaattgtcccttagaagcagaggaggtggaagcaccgtcaaccgcgggaatctttagagcggatcttggcttaacttgaatccattcagaagtacttggaggagtctcctggacatggatttgaggttgagtcatcttcttttgccaaactggggggggcaaagagactgcagcctcaacagcttttccctttcccttagcagagtgaggaggtaagctgtgaggaagaactacagaagaaggagtcccaatggaagcaacttttagctggggcttgcgtgccttcttaggagctttggcctttcctctagggcagtcagcagaatcgtggcaagtagaattgcagatagaacaagtcacaggcgcaaccttgcatttttttaagctgtgacccacttctttgcaaaaggaacagaccgggggcatccatggacttgaaacaagcacacgactgatttctccggattgaaactgcacattgacggcttctggtaatggctttctcggatcgataagcgttagcactttggcgacatccaggtttgtcagatttgcggtgcttggatggaggcccttaggctcaccaacaagtccagctatatactcaaacccctcctcgttgaaaaactggaaaggaacgtttctcaattcaagccaaactggggctaaagagagctcaggcttttgaggaatggggccaggttgccaattagccacaaacatggtttgtccttcaatttgccaaagcccctgacggagaacacggttccttgtagcagcgtttggaattcgaaacaagaaagagttgccctccattttactcacgctgatatcgcgatgaaatcgactccagattccgttgacaatagcgtgaatagtaccctgcgccggtggatcggaatagaactgcccgaggacgaaacattcccaggccttggagttattttcaataaccgaattcgggatcaaaacacaggcctcacccgatgggagggtgaaggctgttcctttctttgagagacggtgtggagaagctttgaagaggcctaaccatggcgtttcgttggaagaagaagaagctgggtcagccgcggtcgcagctttcgcagaatttggaccagaagaccgcagatctgaagcagaggtgcttagatctggagctgggagaggagccttgcaagggccttgggcgggaggagacgctggggtaaccggagttgaggcagcaaccgtcggtgagacagtggccggagcagcggcatcggaaacccggagcggaggcgagagagatttttgagcaaccgcagagggcggcgatttctttttagaagagtttttcttcctcatgaggagaggagggcctgaagaaaaagagagagcagagctccgacgccgaggccgacgccggagaagatgggaaaaagcagacactgtgcccgccgagagacgccgagttttggggttgagctttttttttttttttttttttttttctcaaaacatgattgaaagtacgactttcaatcatttaaaaataagtattgtctggatttaaaaataacctagtattgtctggatgcatttaaaaataagaacgactttctgtaatgtttttttttctttctttctcatttcttagaactctcgtcaaatcaattaatcttaatatcaattggcatcatgtcatttgtatcgacatatcacatatgaatcatttggaaacacgaaaaatgagggtatataactatatatatacaaattgtgggaaattagtgaatccaggcgtactatattatggacttaagtagatatagaattatcgtttttgagtttttttaggcaagtaaatattatgaatccaggctgcatttttttttttttttttggtaggctgcaatttttttttgggtgaatacaaaaaaatacaaaaaatctaaaacatgtcaacattttcttacactaccttttttcattaccttaacacaaaaaaatacaaacaagcgtttttgttttcaattgggaaacaacacgtcgtttcaattgtgcgaagacgccacgtattccaaacacacgcgtgtcacacga

SEQ ID NO: 5381 - DNA, 524 bp, Arabidopsis lyrata
  Intron number 2 from transcript 897523 (locus 897523) deri ved from phytozome v7.0 (chr-ID scaffold_5; pos 12884686 t o 12885209)
aagagctctcctcctctggcctcctctcctctcaggtaaaaattctcaattaattagcgattaatttttgtagctgtgtggttctgttgatttgttctttgtttattgttgaaaccactctctatagagatgctcagtgaagaagacatagagatcaattgattctatgattttgagattttgagattttgatttgtgtgttcagtgatcttgaattgagtctgctgagaaaattggtctcattttgatgtaaatgttgaattttggttgttaagtctcatatgaggtcacaaatgtcatcaacatgacaacatgatgtgctaagatcagatttttcctttgaaatgagaattcttttggtataaagaggatccaatgatggataacgaatttggggttgtatatatcttttgtgtagaactagaacaagggttgaaacattgagttttactatatgttaaagactgttcgttgttaagtgattagcatatctgtattggtgtagctgaaggagcttgttaacc

SEQ ID NO: 5382 - DNA, 1083 bp, Arabidopsis lyrata
  Intron number 1 from transcript 937235 (locus 937235) deri ved from phytozome v7.0 (chr-ID scaffold_5; pos 12077251 t o 12078333 reverse strand)
ttcttccttagaagacttagccctgttgaggtaactttctataattgttttttctctttgttgttaccttttttcttctggttgatttagaatcaaatctagtgatgttctttgtttaatcttagattctaggatattcagattcataaatttttagaaaagtttcttgatattagttttttttttttttttttttttttgggacatgctttaaattttattttcttgaaataacaatttaggtcctccatgtgtttatgacccatatgatgatgagaatctcaattattgaaaagataattattatcttttttttccaagtgaagaaactttgtgttcaactttttttataattaacttagttgactatgagtattgagtatagatctgattcagctttgccttaagcttactccagcaaaaaaataaaataataaaatgtatgaaattttattttattagtttattcgacttgattgattgttgtgaagaagccataaatgaaacaattttgaccatgtaaataaggtatgattccttgaacaatgattgtctaggctttgaatcttatttgccagaaatatttctgtagtttttctggcctctgcagttttgttctcatatgttaaaatctattattagcttttggagcgacccaaaaagttgtatactttttggaaaaataattagtgctttgttttatatttttgaatttttctattaaagtagacatattcatgctcaaattcctagctttacacgtgagtaaccaaaaatatgatgaagatgcatgtaacgttcgaaagtgtagttgttcaagtccttgttttgtaacaaaatcttgaaaatctagaatgctctgttttgtttgtttttctcgtgaaagattctttggctatttatattttggatttgaatattagatgtatgagcctaatattgcggtttatgatatataataattgttaaagtgtttagtgtctctttgcttcacatgcttatgaaatgtgatgagttaaagaaaaagagtgattaatattgcggtttatgatatgtaattgttgtttttactttgcagtccgg

SEQ ID NO: 5383 - DNA, 20498 bp, Arabidopsis lyrata
  Intron number 1 from transcript 490053 (locus 490053) deri ved from phytozome v7.0 (chr-ID scaffold_6; pos 22090072 t o 22110569 reverse strand)
gccagtcccaagtcctaaacccaagccggtcccaagtccttcagtcccaagtccttcggtcccaaatcctaaccctaggcccgtcacgcctcccagcactggttcatctggaaactgtcctatcgatgctctcaagcttggtgtatgtgcaaacgttctaagcagtctactcaacatacaattgggtcagccatcagctcaaccatgttgctcgctcatccaaggtttggttgacgtcgacgctgcggtttgtctctgcactgctctgagggctaacgttctcggcatcaaccttaacgttccaatatctctcagcgttcttctcaacgtttgtaacagaaagcttccgtctggtttccaatgtgcttgaacgatatcaacagctatgcatacgatgtgatgcacagtttccccctcaaaacaattacaatttgaataaatgcatgtaagctagagtttttgtttaaatttgaatttgttaaagtgaaataataaatgtgtgagactttcatagtttttttttttcctctcaaatgtatgctttgtagcaatctatttctattttcaacgttccccgtttaataaaagagattttgtacccaatgtcttatttcgaaattcttgcattaagattataattaaaatctttatatttaaattttcatgctgtagaatgctaattttatttactaaatagttcatttctactaaaaactattgatcattgtgatattcacctaactattacatatttcgagcttagtttgaatttttcatttaaaacatgattttcaataatcctaaaactgtatttaaaacactaagttatgagtagacattctcaactaaagatatatatatatatatatatatatatatatatatgtgtgtgtgttatcgtcagcttttgagtaagagaatgaacagctcagttattgacatcaaagttttcttcttgtttgaccgggagaaatgtggtttgattgatcatatctatacaatgatgtttatgtgctttcaataaatcatgatcctatattcctatgaatgagagatcttggaagagaatatggacgcccatgtctaagaggccttgatcgaatgtttttgtagcgaaaagttcgaaccgaaatcaattcttgaccgaatgttttgatgcgttgttcgactttttaagaatctattttatccatgaatgagcggtactgttgaagaagtgattcgtttagaactcaggtttattcggtttagctcattaaaacataaccatgaaaatagagactggttaattcggtatcaaggtttaagagagagtctcttattcggatgaagggtttgatattataagagcttgtaactctgttttgaaactccatcatcacgagttcacgactttagagtagagctacgcatgttgtatattcttgatagtgaattactagattttctagccgcgagcccgagacgcgtaaatatctcgactcgaatatcctgaactcgtaaatcaacttttttttttcttttcagtttctcattcataacgagccaaaattatagcttctcaggttgaactcgatcagggcattaggtaattagtaaattctcaaaaactttgtatgaacgttatatattacctagaattgcgtagtatgaatttaaagaaaatgttatttgttttattttgttatcatcagttttaacattcataccaatagaagttcgtgttcgggtttttatgacccgtgataatgtgaatgtgagttacattaagctcaatgacagacgcaaatggatgtatgtgggacactggaaaatttggaatcttgcaaagatattttacaaagaaggagtcaaagatgcatggttaacagtactaaaataatctagcagaatatgaaaattgagttacataaagttaagtttatgagttatttaatattacttagatatgttaagtgaaaaacgtaacaaaatatgagcataattaactagatagtttaccgatatgattgttaaattgtacttctatttacaaaatgattggtattattatcgggaaaaatgtcatttaaatcatcagtttaccattttcgttggtctaaagcatgaattttagatctggtatttaaatcctaattttatgttgattttcattttaatcatgaattctcgttgacaaagccaattgacatatcgttaaccggctaaacatatcaataagaagatgtcatcgcataactatcacttcgaagccatccattaatttttcttctacaccaacagggtttccgtcttcctcttcaaaaaatatgcgatgacatttagccagttaacaatgtgcctcaattggcttagtcaacgagaattcgtgattaaattgaaaatcaacataaaattgaggatttaaaacaccagatccacataaaattgaagatttaaatcaccaggtccagagttcatattttaaaccaacgaaaatggtaaactgattatctaaatgatattttcccgtattgttattatctaatatctaaattattttaaaaaacatctaataaattttttataccattccaatcatcgatttttcgtatttaaatttgttttacccgtacaatgattgaaaacgataaaatattttctaacttaaataacaaagaatcatataaatttttgtgaatagtttattagttcataatatgctttatttaatttaaacttctttttttttatttgtgtaaaatatgtatatactataacactaatggcaaaatttgtaaatatataaagtttaagcaattatttaaatggctaagaatctctcttcgaacgacacgtgagcatgaaacttttgttactaataggtgatgacaatgttttttctttagagtgaatttgcgcagaggtaaaaatgtgacttctaattagataatcggtaataggtcactttgttcgagacaaacaaaaattaaacgttattaatggccctcaacttcaaaaaaattacaataaaaccagttggttacggagtcatgcgcgtgtgatagcgccattgacatttggggaagaaaaaaaaatgaaatgacagttattaaatgctctgttgtagaagtgacatttactcgacgatagaaaggagggaacttgtattaaatgcaaactgacggactgtcttcgaatctcttaattttgaatctataacgcaaacttttaggcgggtatttaaaattttaaaccactaacctaatggaatagatacccaataaatagtcatgcaaaaaaatatacatatataaaacgttaaatataattatagcattaacttattggatctatcatctatgtatacatgtaaatagatatatagagaacgatattaatatttgtatagatgtaaacatgtacattaaacattattaatatgtaaacacatgtatagagagttattaatatttgtatatatgtaaacaaatatatagagcattattaacatttgtatacttataaaaaaaaaaaaattgtactaacccgtgaactctctcagacacgactatcgaggaggtcaagttgctcaagcttttcgacgccggtggagctcttgctcgccggcgtcgggatttcacctccctgaaatttctttactttagatctcatctctttgtctccttttgtttaatttgttcccccttttattttctctttttgcaaatctctcgaaacctctcgatctcaacccaaaacggcggctacgcatcactgatattcaaaggaaggagggtgaatccggtgaactccctccctcagattatgtccgcaacatccaaacagaagcaccaaaaatcttgtgatctacaaaatttggatctagaatccactaaggttaaatcctctcgagccaaaatgtttatcacccatgaagatctctcccccttgttggtgtcggatcccgcaccagaggtccaggaccaaccaaagattgccacgtagtcaggataacggcccataaaggataaagcaattatacccacaagtcaaaagaacagtcgaagtggttatcaccgtaaagagaatccgaagtgactacacctcgacacgaggccggagacgaagtcatggttaagtcagtccaaggacatttgggccaaaaggcgaggcccatgaagatcagaatcaactcaaattcaaacgttaagcattaaaagcaaagatcaaaacagacacatttaagagagaataattatacttaattagccacttaaatgtcgtttttctatgtataaataagaaggccaatggccatgtatggggatcgttctttcgagcaagaaatactatagcaatttttgtaacaattcataagccttttacatatttatttttgtccctcaagagtaatctttcctacttaataaaaatacttgagtgtgcaaatccgacatccacattttggcgccgtctgtggggatagagtattcttgagtggtcagattttttctttactacatttccgagataagcagcacggaggagacgccgttgagacatcattggccgaaaccctcagagctatgcagcaaaccatgtcggacatatcacaaaagttctcggatgtggaaaaggccgtcgatacgttgcaaacatcccaggtatctcttagccaaaacgtcaatactatacaaactcgtgttcgctctttaagtgcaggaaatcctgtgggaatccgaaggaggatattcaactcgccaagttccgttgcgcgaaacaaaaccagcggacaaacaactcctggagctactaataatatagttcagccattggatggagaggcacaactcgaagatgaagctcaacttgcagatcaatacgagcaggaaaacctcgaccagttcgagactatgaggaaggttagccaggaactaaaagaaatgaagtcaaagttccatcaagctacaagttcggagctagacatcaatcgagtcattgaagaagctaggcgaacacctttcatctcgcgaattgcgagtttgagaatcaaagattcccggaagctcaagttggacccttacagcggattggaggatccaaagagctatctcgcagcttttctgatcgcagctggaagagtcgaattggatgaagctgacgaggatgcaggttactgtaagctcttttcagaaaatctatgcggccaagctctaatgtggttcacccaattagagccgggttcgatcagcaattttgacgagctatcagctgtgttcttaaagcaatattccatccttatggataaaagcgtttcggatgccgatctttggaacctatcacaaggatcaaatgagtcacttcgagttttcatcaccaaattcaaaggagtgctgtcaaaactcccaagaatctcacaacaatcggctttatccgccctacgaaagggattgcgacatgattcaaggtttaaagaagatttaatacttcataaaccagacacaattcaggatgcgctcttccgcgcaaacaactggatggaggtagaggacaaaaaataaaattttgccaaaagaaataagcaagaaaagccggcaatcaccgtccctaccaagaagttcgaacctagggagaataaaggaccaaagaaatttgggttgcaacccttcaacagtaccgtcggaaagcaattccaagggaaaggaagatcaaacacttgggtccatgatgaaagtctatattgcgacattcataaagtaaccggacatttaaccaaggattgtagcgttcttaaaaggcacctcgcagagctttgggccagtggagatctttccaaattcgatataaaagattttgtgaaggaataccacgaagcaaaggaaaattccaaagatcaaaattccaaaagaccaaggttaaccaacgaggaagaaccgaggaattctaagggtaagatcaatgttattctaggaggttccaaattttgtcgagattcgataagttccatcaagaaacatagacgaaatgtcctactcaaagcaagcttgagcgaagaagtcgattttcaaggtgcatcaatatcgtttaatgaagaagaaacgcggcacctcgaaagacctcatgatgatgctctagtcattacccttgacgttgccaacttcgaagtatcaaggatccttatagatataggcagttcggtcgatttgatctttttaagtactttagaaagaatgggaattagtcaggcggacatagtagggcctccgtctcctttccaaaaaggtatcaaagatcgtggacttcgttgtcttcgataagcccgcagcttacaacatcatcctcgggactccctggatttatcaaatgaaagcagtcccctctacatatcatcaatgtatcaaatttccaaatcaagaggagtggaaacaattcggggagatcaagaagcttcatagacgtgttatctagctagccaccgtatgaagattcaatagcaattaacgaagtccgcaaaagagggactaagaacaaaatttcttagcgggcagaaaaaagatgatgtagtaatcgaagtggtgttggaagaagacaaaccggaccggaaaattcgaattggggcaactttgactggccaactaaaagaagctttgatcgaactcttgaggaaaaacaaaacatcgtttgcgtggtcagcggcggacatgcctggcataaatccaagtataatttgtcatgaactaaacgtggatccgagcttcaaaccggtgaaacaaaaaagaagaaagcttggagtagagcgagcaaaaatagtaaatgacgaagtggataaacttttgaagatagggtccataagagaagtgcaatacccggagtgggtagcaaacactgtcgttgtcaagaagaagaatgggaaagatagggtttgcatcgatttcacagacctcaacaaagcatgtcccaaagacagtttcccgctcccgcatatagatcgacttgtagaatccaccgcttggaatgagctgttaacattcatggacgcattctcgggttataatcaaataatgatgaaccccgaagaccaggaaaaaacgtcatttatcactgatagatgtatctattgttataaggtaatgcctttcggtttgaaaaatgcaggggcaacttatcaacggttggttaacaaaatgttccaccatcatctcgggaaaacaatggaagtctacatagatgatatgttggttaaatcgttaaagaaagaagatcacgttaagcatttagaagaatgttttgatattctcaataaatatcaaatgaagctgaacccggcgaagtgcattcggagtcccatccggaggatttcttggctatattgtgacagaaagagggattgaagccaatccaaaccaaattaacgtctttctaaacatgccatctccaagaaacttcaaggaagtacaacggttgactgggcggattgcggctttgaatcgttttatctcgagatcaacagataagtcgttacctttctaccaaattctaaaaggaaacaaaggattcctatgggatgagaagtatgaagaagcttttgggcagcttaaggcttacttaaccactcctcatatactgtccaagccagaagtggatgaaaaactttatttgtacgtgtcggtttcaaacgatgcggttagtggagtcttggttcgggaagaccgcggggaacagaagccaatttactacgtaagtaagtcaatgacggatccgaaaaccagatacacaatgatggaaaaactcgcactcgcggtggtgatctcggctcggaagctgcgcccatattttcaattccatccggttgaagtattaaccaaccaaccactccgaacaatacttcatagtccaagtcagtccggacgtttggcgaaatgggcggtggaattaagcgagtacgatatagaattcaaaagccggatcagtatgaaggctcaggttttagcagacttcttgaccgagctacaatactggaacgatagagcaaccggagaaccaaacttggaaattacatgtagatgggtcttcaacaaaacaaggatccggagtgggaatcaagttggagtctccaacatcagaaattctagaacagtcattctgattgttattcaatgcctccaacaacgaggcagaatacgaagccctgattgccggacttcgattggcacaaggagttggagctaaggaaatagtggcttattgtgattcgcaattagtagttaaccagtttaatggagactatgaagccaaggactcaagaatggaagcatacctcaaagtggtgaaggatctatctaaaaatttctcgaaattcaaattaatctgcatacctcggggggagaatacaactgcggacgcaattgccgcattagcgtcaacatcagatcctgagttgaaaagagttattccagtggaatgcatttcagaatgaagcattcaagacaacaaagaaaccctcgtcgttacaaggtctcgagcagcggcacgtgaccatggcaaaccagagatcgaaccaccacccaacaaacggaggaagtcaaagggatcaaacacatctaacaaggaacccgttgtcttagcagaagatgtgattccagaaacgatattagaaatagagccgttaatcgaggaggatgttcttgaaccaaacgaacatcccgaaccagaaccacgagtattttacaaggttgaccaaatttcggctaaagactggggggctgactggagggagccaataaagcactacatcatgacaggcgagctcccaaagaataagtggcaggccaggaaaatgaaagtcgttagcgcgaaattttgtctatcaaaggatgcattatataaacgaggtgtcagcgacccttacctattatgcatttttgggcccgaagtcgaaatcgtcatgagcgaagtgcatgaaggattatgtgggagtcattcatcaggaagagctatggcttttaaagttaaaagaatgggatactattggcccactatgatcacggattgtgttaaatttgcccaaagatgtaagcgctgccaactccatgcaccattgatccatcaaccttcggagttattctcttccatctccgccccgtacccgtttatgagatggtcaatggacatcattggactattgcacagatcaactcgaggtgtacaataccttttggtcttgacggactacttttcgaaatggattgaagctgaggcatatgttggcatcaaggattcggcggtgaagactttcatttggaagaatattatatgtcgacatggagttccgtataaaatagtcaccgataacaggccacaattcatttcacaagagtttgatgccttttgtgcagactggggaatcaaagttagttactctactccacgatatccgcaaagaaatggtcaatctgaagccgcgaacaagacgatactgagcaatctcaagaaacgtttgaatcatctaaagggaggatggtatgaagaactccaacccgtcctatgggcctatcgtacaacccctaggcgacctaccggagaaactccattctctttggtttatggcatggaggcagtagtaccagctgaactcaaccagctgaactcaacgtgcccggacttcgccgaacagaagcaccattaaatgaggaagaaaattcagcaatgcttaatgattcactagataccataaatgaaaggcgtgatcaagctttgattcggattcagaactaccagcaggcagcagcccgatattacaactctaaagctaagctgcatggaatcggaagcggaagcgtttggaagcggggaaacgagttttttaaaaaagttaggaagcgggtacgtgttagaagcgtaaatatatacatatatatatatatatagatttattaaatatttaatttactctacactaaccattggatatgcatgataattgagaaaattttaaaccaaacgaaatacataacatgtagaataataaatatagtcatcaaaagtaagaaatgcattgttaacaataaaatattttggatgtcttaataaaagaataaaaacgcaaataaaaacgggccatttaaacaaaattagacttaaaagaataaaaaaattaaagcccaaatatggcttgtggtagtcagattcctttcaataaatttgtcggagactgacttgagagaagagtcgccgattagatctaaaactgaaaccaccgaagacaacttgaaaagagtgtaggttttggtgtcatgaagactctcaagcaatcagaggtttcaagacaacctctctccattgacacgtgagaagcacaagttgtgggtatcagtaattagtcacaactagaagggtaaaagggtctttcatgttggctctgtatcttcttcttcattcacttcccttttacgagtctataacagaaagttttgagctttgcgtcttctctctactctcttgtgatctccacgtcagatctgttcaccggaggtacgtacttcttcttgattcactactctctggattagtttgtgaggataaacgacgggtgggtttctgtgggaaggctgcgcttccgttgataaaaaaaccacgcttccaagtccgaatcgaacgcttcccagaagcttccaatcttcaattttctggaaccgcgcttccatcacgattccggtcgcttccgcacccgcttctggttccaaagcgagaatcagaggttggacggcgcttccatgcttcctagctctaaagtcaaaagtaggccgttcttcgtgggagattatgtgttaaggcgcgtctttgacaataaaaaagaagaaggtgccggtaaacttggtattaattgggaaggaccttacattattactgaagtggttcggaacggtgtttatagattgaaagacttagaagacaggccagtcaagcgaccttggaatgtgatcaacctaaagaagttttatgtttaaagctacatgcatttttatgtacatgaactacgatgtggcttgatcccgaaatgggtacgtaggcagctcggaaacgagttcagctattaataaaattttttgttttatttctttattaaaggaaaaggttcgactgagcgaacaagtgaagcaaataaaggttcggctatgcgaacatacaagagattggaaatagagcgtttattcaaaaacaaaaatggaatgtccctcatcgtacactttgggttatggagatcttgttgacgagcagaacacttcaactccttgaccagcaaggtcgaggattggcttcatgcagtccggaattcgagcaaagtcagagattccaagctcgatccattcttcagggtgagattcaaggacgtgaagatctcttgataccgtagtaagcctgcgttgcatccggttaatcctcttccggagtctcctttttttcaacgtaagcttccgatgttgaagcgcaagtgcatctatgaatgccatcgctgttccttggtctctgatcgagagatccctgatcaaagcgcatggagctcgaatctgggatctgaagatgccgcgaggtggaagaggccgcctatttggctcatttggagcatcttcgtttatcattctaatcctggagaagttggacatagattctgaacatcgaaggttaaactccatacctgctaaaatgaaaaagagtggtgaggagaaaagagaagttgagactataatttataggaatgtcatattcttggtaagctgcggattctatcctaagaatggaatgattcgcggaaagatttatgcccttaaaccgatcctgcattaaaagacgcatctccgagaatatttgaagagtaaggaaaattgcaaatatttccataaataaaaaggggccgaagcccattacgagttcaaagtaagtgaagaagttagagaacatttatggaagaggctcaggaacaggctccttcatcgccggtttagttttcgaagtggacgccttgttcttggcatccacttcgggacgatcccgaacgcgtttccgactggtactagcctcctcttcgtcttcttcctcgctatcggatggaacggtatggactggagcattcacgggacccggaactcttttagcatggagatacatccggagcatcttcgggatcttagcgacataatcaaagttccgcgattcccattgaaaggggtcactttccaaagcccgtatcttcctctccacccgagcgatgcgagcctcgagtgtttgccttttgaggcctagccgctgtctctcttcgcacaagcgacggtgtttgtcggcgacctagcataaagatgaatgaataagatgagacaaacagtttttagtcaaagacgacagatattaaccttgtcaataaattcgcaagcctctttcttctcctttgaaggaaagtgaaagacggcgtgagggaaaagaacgccggccggttcaaagctgtcaccggacaagaagagtgggctgccgggatcaatgggggctatgttttcgttttccattaatatggtgttatgaagtttcttgaggaaagatcaaagctggacaaactcctatttataatagggttaaggtttgccttgggaatgaaaattcaataatggtggcgtgccttagtggattaaaccatttttggaaaatcgagaaaaggcaattattacattaaagacgagccgcttttcctactttcaagaaataagaagggaaagagcaaccgtcgcattaactacaaaagtttctaaggcccaagcccaataaatttatcgagttgactaaacccgaaatggggaactcgctttaagccgagctcagttctcgcattcttaagagaaaggtctgatcagcttaaaaatctcgaaagcataaccacaaggccacaaagggttaaaagcggactttgcaaacccgcacataattttaaccaaacccccttggggtcaaaacctagaaaggtttaaaagcctcctcaggcaaatctctcgttcaaaagaaataataaagcctccttaggcaaaaacaagttcgaaattaagttttaaaataaatgggacaattcccaatttaaagtggacgcagccactacggagtaacagccacctcggactccggctcggcagtcaaagtttcattctcctctttggttggtgcttggtcagatggggctcctggtccgccctccacagtacaaccatcctccggggtgaccgccggtgccgcaggaacttcgggtgggaagacatcttccgtctcacttgagcctgggaaggacagttccagtcaattgttttttaaaaaaaaacaaaacataaggtgagaaaaaggtagtaagtgtcaggagccaagcgttacctgcccagtctagacctgattcacttataggagacgattcagtgaagaattcctcgaagtcctgcggattgaaggtcaaagtaggaagagctgccaaacgactccgcttttctgaaagattagccgacagttcggtcctttctagctcctcggagaaatctgtatcatggatttgatccaacagaatcaggttgctctcgtgctccttgatgtctgattccaaatctgacctagctttctcggtctgcatgaagcggatggccccttggatcaactccatcccgcgtcccttaacctcctttctggccttcgatgctgaccttgctaactcggaatcacgcaacttggcgatcgcatggtacttcgcgtgaagctcggtaagttggttgttcagggtatcggcgaatgattcagactcatgaagtctaccctgaacaccaaaaagttcatcctggagcttgtaattccggtcatactggtcttgcagctccccctttatcttcgcaagctcggatgatagaccatcaaccttgtcctccaaatcatgcttggagtcggtagaagaacggagttcagcctcgagattagaaaacttgctcttccacgtgtttatctccttctcccgaccaatgaccaacccttcgtaatgttcaattatgtcattgagctcgtcgttcgcctgatattacacataaacccggaatgacggatcagttcgaagaatgacagtgaagtcagaaaaatgaagcgaaactaacccgagatgaatgatgagcatgaagtaggtatcgttcacgaattgcagagcgccacttgttgaattctggcaggatcgcacctgatcgggttttgaagcaccgaaaaacgttaccctctttctccatggctacgaaagcaaaagaggaaaggtcttagaaattcaaaataagtacaagacgaaaagaaaagaatacatgtatatcgtcatacctgagagcgatttgatctgaggaacaagagcaggctttgtcttcggagagtcatctcgagactcagaactttccttctgagaagctgcacccaggttcgtcttctcaccactacgttgagaagaagatgacatatcaacaggacgaggaggacccattggttcagtaggaggggacgatcgaggagaacggtcagttcgggcccttgacttctctcttcacggagaagaaccactgcgggatgacctatccctctttttgcgaattaaatccttaagcggttcgttgctaaagtcatctcaggaagaacgaggatagtcgcggttaggagattggagcctccggggaggacggtcatcgtgacgttcacgtcgaggtgtcaatctgaaaacggcgacggatctggctccttcggtgctaccgtcgtcaaccaataaggttttgctataatcttttttgtcaatggcggtcgcaaggaacgccttgttctcgtcacaagcctcagccatcggcttggaaatcatttttcgctggccagtgagagcccgagctgacattccctgggtcgagggaagaggcggaagacgatgaagttgattgggagggctcatcctgagttttcgattggcttctatgaaccgttcgagagtgaaagaattccaaagggtttcctcttcgaggattattttgaagaagccaatgaattcttcagttggtaaagtcggagcgacaaaagctgcaaagtgaaaataacaagtttaatcaataggaataataaaattggaggaatgtatgcgacctaatttctaccaggtttcgcggaccacttcgatgggagtagatctgatagacttccaatcgaagcaggggttttcttaatcaggaaccaagggtgatgccaattttcatccttgtttggaagatgtgaaatgacgttcctgttagcattagggtatgccgagaaataccctgtcttcttcgatgaacttctcacgcttagaagctcattcagctcggggacccctataatgtatccggcttccgccgctactgttataattccgagtatggttcggagaagattgggggttaattgaggaagagcgatctcgagaaccgccaagtaccgaaccagggcttcgggaagtgggaaggttaatccgcaacccttgaaataaatctcgtacacacagaagtaaccatcgcgatggttctctggggattctgtgggggcagctatttgtgcttccgccataatttctggcggaattcggcaaagctctctcaaccgctcgagggattgaagagtacaagtggatctatagtgcggaccggcaatatcattagggcgagtgcattcgtcattactagagcgcctatcgtcgaatgacggagattcgggcctttcagaatcagaagtcattggggaaaatgaaaggttcgagatccgacgaagagaaatttggcgaaggaaaagaagagagaagtttcgaataaagtgcaaatgtaaaagtagaaaatgatgatgaaaaaaaagttacgttacacaagctaaatgatggaaccgcctcggaagttgtgtgggaagtgagaaggtttttcccgttttaatagtaattaattaatatacggtcataatgatgacagatgtcactcgggtaaaaatggctagtaccgaaattaaaggagtgatgagattttcggcgggaaatcagaaagattctcgagcgcaatttttggtcatttaagcatttaaagtcctccgaattggaatggcacttcgaagaacttggggggctaattgttggtgtcggatcccgcaccagaggtccaggaccaaccaaagattgccacgtagtcaggataacggcccataaaggataaagcaattatacccacaagtcaaaagaacagtcgaagtggttatcaccgtaaggagaatccgaagtgactacacctcgacacgaggccggagacgaagtaatggttaagtcagtccaaggacattttggccaaaaggcgaggcccatgaagatcagaattcaaacgttaagcattaaaagcaaattcaaacggacacatttaagagagaataattgtacttaattagccacttaaatgtcgtttttctatgtataaataagaaggccaatggccatgtatggggatcgttctttcgagcaagaaatactatagcaatttttgtaacaattcataagccttttacatatttatttttgtccctcaagaataatctttcctacttaataaaaatacttgagtgtgcgaatccaacatccacacccctgggcttcgttgctggtaggaacaatccctcttggaccagcaggtgtgccatgctcaggggagacatcgatggctcaagacgactctcttcttcaggtaatctctcttcattctggttctagtaagacttcttgtttgctcgtcacaacatcggaccacgctattcttgtaccgccgccagtaaagatttcgatgaagctgaatccggtgcaaaaccagcaacctttctcggccagccgccatgagctaaatccgtcaactcccaatgcgagattagggtttccccaagtgggccctaaacctgaaattggcccattaaggcttcagcctcccaagcccataaggtgtgtgtccattcattattatcataaccccaagcctgacccaatttattttctgccaaaaccttgtcgatggctgtgtgattacaaactcaatggtcgaggactccatctgagaagtaattcactgtcgtttctatggctttgctttaactatatgagaaccgtggctttagtttcccttatgtctatgttatgcgaacctcaatccttaaagttttatggcttttgtgtcccgactccaagttgtcagatttttgattgcgatcttggtttacctacggtcaaccatcacttcatggcaatcctagcaatcaactttaagcatcatagcaccaacatcctttcctgaaaccttgttcgaatccttgccaaagccatacttcgtgtagttcttctcgtgccggcgagatctatgtctttggcttcttcttcaacgtcattacatcttttgatactgaccattatctcatccactgatttgttcgtggaacaattgtcaacaatctttgatctcacatgcagggccggcgcagagggcaagccactgaaaccaccgatttgggcttcaaaatgtaagggcctttttacttaaaaatttgttaagttttcttatatacaataatttttgtagggccttttaaaaatattgtgggtgtttagagacaactacaacattctttttaatggtaaaaatctaatttaaaagaaatttttttttatgggctttaattttgcttaggcacccaaatttatcgggccggcactgctcacatgtaccaaatcgcctccaagagtttggctcaaagctcttatggaaccattgttgatgtactttatctatctgtttgtttacctttgtgtggcattgggaaatgcccttctttgttgtattttaaactttgggatttcagtatccttttatctttgtacttggtttctttcttagttgaatgaaaacaagtctttgtccaaaaaaaataaaaaataaaattaaaaaaaaacaatgtagttatagttgatcttcaatacacactacatcgaactaaaccttaaaaactacactctaaaccctaaatattaaatttgaagctaaactttgaaatacacaaagtttatttacgtacatctatcgatagtgacagacttgaatgtaacaagtttatgtatatcttttttttttttaaatactaggaggttctggagcaaagcctgttatccttccatgaccgaaaccaaaacatgtaatattactagctatattagtttcgtcccgagcgtcatgcactattatgtaacttttaaaggtataatcgtaatttgttttcagtttgacaaaacatgcaaacatatctcttcttttcgacaaacgtcgtaacaaaatgtttttttctttatggtgaagaggattcaacgaattcttacaaaaaaaacgaaaatgatcgattgggattaatcagtcgtcgtcggtttgactttatttggaaccactaatgtttctgcttatatttggacctcacgtacagcgtcaattcctacgaaaatttagcccgaaacatattataaagcctttattaagaaattatgatcgtcaacatctaacatatataagacaattcttaataatggataatggcgaatagaaatataaaatatctagtcttagccgacaactatcagcatcctatatctctattgtacacttcgtgtatgtatattggtctcagtaagtaacattaatacaataatttagattcatatttttatttttggctcagctcagagacgtgtttgatcaccagcagcctcctaccaaaaatcgtcgcggcctcttttccctgtagaatcttctatatatatgatcatgaagtttttattctatctttagtattaaatagaagtatttatatcattatcaaaattttgaaagaagttacaaagggcaactagtagcggaaaagactaaaatactaatgataattaaattatttaaggtatgcaagacatatgtatatcagtatatgattatgaagttgttttggccttttggattcataaatcgaaaactgttaacagtgtgtatcttggtgaaatcacttggtggagattctaacatgaatcaaagatgaaatgttactttgggagatatattttttattgattttgagaaaccagccttctctggaaaattaaaaaattttagatttctctattcttttatatatgaatatattttctcaaacaaccagttaattaattttggattgattttaaataatatcagtttattatatcatgaaactaacgtaactagtgagtaaaccatgcatgttcaaaatattaacaaaaaaattcgaaagtgttgagttttgtttttcatgagattgtcctagtcaattgctcgatcgctctgttcttctaacgaatgtcatattttacttcaatttaagtatcttttggctttaattttattgagatgaattacaacattattcagatgacatttttagtaattttggctctaaaactttaatttttagcaattcatctctattgtttcattaaacaaattgcatacaaaatagtacaaattgttttaaccttgtccattgtgcatagagaaaaaaatttggaggttccggattcacacccctaaccgactaccatattcagacaaaccccgaatcatgcagggttttaatgtcttcctattttatgcattagggtatcttaaattcaaaaatattcaaatataacaattttttcgagtgtgtgtcgagatatttgggtgtgtctcccatggccgggatcagcttgatataaatacatagactataactacactggaaatttattacccaacctgacgtatagaagccgtcaagtaaaatggctacgagccaatgcaaaagaaatctaaataacttttgcactgcagcactggggtcatccacgacctcatgatggtggtgataataacagcattgacattaatacttatatgaatgcaatgaatcaaatattttcttaaatataaaatgctttacaaaaaagattttccaaaaaaagtttcatggttctacgtaggtacatgcatatagggaaaaaatggtcaaattttttatatatatatagataagcgcaaataattacaaatatctataaattaataattaagtatacgaaatcaagttggtcctcttgacatcctcctaaacccctataaatacctacaccttctcttcatttatattcattcaataaccatcaaaacaccgaatatatctttgagaaaacaagaatggcttcaaagaactcagcctctcttgctcttttctttgctctcaacatcctctttttcaccttaaccgttgcaactaattgcaactgcaagccaagtcctaaacccaagccagtcccaagtcctaaacccaagccggtcccatgtcctcctccagttcgtccttcggtcccaactccatcagtcccaagtcct

SEQ ID NO: 5384 - DNA, 4462 bp, Arabidopsis lyrata
  Intron number 5 from transcript 891056 (locus 891056) deri ved from phytozome v7.0 (chr-ID scaffold_7; pos 15222625 t o 15227086)
ttccactaaaaactagtcaacaagatgtagataataaatcaaaagctgatggtccatcaagaagaagccagcgaagtcaagtgccttccatttattctcagccaccttacacggcagagaagaagaagcacccaacacttcacccctttgcaaaagttgacacaaaaaggtttgaaagtttatgtgaatggaagaagtcgacaaaaaacaagtgagttttaagtttgtaaaactcataataatattcataacgtattttaaaggttttacatcatctctgacttttacaatgtattttaaaatgattttacaacgtattttaaagattttacattgcctcattggatgttacattgactcattggatgttcttataattatatatatatatttgttgtagggtgctaacagttgggggaatcaaagtagattccaaatggttcacaacactagaaacgcaggggaaaccaatatcaggatcggtatgtatgattttctttcaagtattctaatcttgtaaaactttaaaaaaccattgtaaattataaagttcatatagactagcaaacatgagtaatttgttttcctttttgtgtgtgtttttcttagcatgttgatgcagctttacacttgatcaaaactagaagggaaaatcatccagaaatgtaccttaacaaaactgttgtttttgttggatcatctttcttaaatgcgattgacgatgagtatgctgagtttgtagtcgcaaaagatgattttcagtttagttctgaagagataagtaagctggagattggaagcaagacaaattacatatatgctcctatgtgcttgaaaggaaaatgttgggttccagtagtgattaatatcgagagaaggtctttgatcattctcgattacgcgacatcatttgtttcagaaaatgttaaaaggatgcatgtggttgcatattctgttgcgatgccgtacatattgcgcaagctcctcaacaaaacagatatggatgtttcagcattcaaaatatctgtagtggacaatatatcacaggtaatttttgtgataactgagattgtagattgtattcattaaaaccttttttatatgtctttttttgtttttgatgctaggctgaaaagattgaagatactgggatgtacatgatgaagatgatggaatgctatgctatgcatattaatgcaaatgagaaactttcagaaggaaaaattggagacatgagaaagaaacttgcggttgacatctttacagaaataacagatttctaggtaagacttctctcaggttttaacatgtaaattaaaaacctacaactaagcttatatttcttgatttattactttgatcaggggctaattgtaagagctgggaagaaaagattgctggggaaaaatgatctattctttttgaagaaaacgttgctgttttacaaatttttaatttttgctgagaatatctgtagtgattttcgcatgaattttactttgtataactctctagttgtgaatttaagtttttttttctatgtacctgcatctataacatccaatcttcatttataccattttatcttttgatgttaatttttaaaagctatctaaacattttacaatgttaagtcttcatctataccattttaatgtttttacaatgtatatgattatatatagaaagaacttttaaaatttttacaatatttataagcttatgaaaataaaaccatcttatttatatttttatcaaatttttcatgattctttaaatttacaattgttttacaaagtattttcaagtttttaaaagatttttcaaaattttgcaaggtaattttagttttataatatatttttcaaagatttacaatgtgttttaaaagtttataacgtgttttaaaatagttttacaacctgtttttaatcgaactaagaataagatagttgtaaatagttgggccgaaataaaaaagaaaaaacctttaaaacactttaaaacccatttgatagagaaaaaaaaatagaagggggaaaaaaaaccgattctctcagtctccttctccgttgagtacaagaagaataaattaagggttttcgcttagcttcacggctttagattctacagttttggttccatctcggcttctccgttttcataaggttcaatctcgtcttctccgttttcataaggttcaatctcgacttttcggcttcttcgatttcatctgcctagggttttgggttccgtcacatcagtcgattttacggttaaattactttaaaacttcgttacttttttgattcatatgccaaattaggttatttccccttcaaaatcgagtttttgtgatattggatgatttttgagattttgtgattttttttttgtagatccgtttttattcttacaaggacttaaaaggactatagaaattcaattaattttacctttgttttaaaatcttttacaatcgattttacaagcaatttaaatggttttcaaaagggatctaaatggtttgattctttgagaatgtgtttgagtattgatgagacttttcacttttcacaaagcttccaagtaggtaatgatgtttgcaatgtactactctatttgcatttctagagttgttcgtttacatgatttaattttacatgcgttttaaagcttcttaaagctgttttacaagcagtttaaaagcttacaaaggggttgtaaatggtttgatttttttgagaatgctttttgatggagatgttttaattgtttttctatctttcctgcaacagagtgaaaaatgagtcaacctacaaagaggctgtttctcccaaaaagactgattgacccagggaatgaggtggataatttgaaaagaatatcaaagtattcttcagagaaacttgtattgaatgttgtcaaggattcacttagtcccactgagttcaatcggattcagaattctttcttgggaccaatcatagattttgcggaacgtgaagggatctgtttctcatcacagctggtccatcactttcttcagagaagaataatggttaacaatgaggagttgtggtttgtcttctcagaacaacccctcagattttctctgagggagtttgttattactacagggctgcctttgggtgatgatgcatcacaaagccagtcaatacgaaaaaagagaaagaaagaagatacatggatgaaggatggtttaagtttgaaagatctccttaataccttgtctacaaaacgcaatgagatggatgctgatgagagggttaggttaggtgctctgattctagtggagggcatcttaattgcttcaaaccctgtaaacaatatagagaaagaacatctggtaagagctagtagtttcacagagttctgcaagtatccgtgggctcgcattgtttacgggtctttggtggattgcttgaagaagataactccgactcaattgtttagaaaccaatgtgggcttcctgggtttgtttttgcaatccagatttgggctttaaccgcagttgcagagttgggacagaattttggcagtcgggtcctagaacccaacgacaatcgtccactgatttcgcaatggatgacaacaaaatgcccaactaagaaagatatagcaaaagttacaaaggttgcaacggtatgacagtttttctctactacttttttccaactaataaggtttacaattgttttactttgttatacaagaattttaagaagtttacaagggttttaaaaaaatggcaagatttttacaagacatttttaaaggttttacaagacattttaaaagtttttacaagctttaatacagattgtaaaacctttaaaatagatagtaaatgctttatgaaataattgtggttcacatttctaacttaaattcatattcttttttatgcagtttgatattaaacatatcattggcgatcctgaacaatattctcattttgttctccccccaaatccagaagacaaggactggtttgaagtctttgaccttgtagtccaaggttataggatgaccaggcaacaatggattcatggttggattgaggttgcagaatggaaaacgcaaaagcctgtgaatcagcctagacaaaggcaaccaaagtctgagactgtaaatcagacaaaaccaaggaaatcaatgtctgatagtgaaacactagaattgatctacaaggcatgtttagaattgaacaagagaatgttggtggtggagaaacatttagggatcaaagaacctgatgccagggatgatgaagaaaaggaattcccagcttcgtcaagtggagttgtaagtggaaacaaaacgatatctttttaaatatatctttgatctataggatggtcaaatttgattatgtttaaatatatttttggtgttacaacagaacaaaaagactgaagaagagtttataattgtctc

SEQ ID NO: 5385 - DNA, 7544 bp, Arabidopsis lyrata
  Intron number 3 from transcript 329351 (locus 329351) deri ved from phytozome v7.0 (chr-ID scaffold_7; pos 8472048 to 8479591 reverse strand)
gaacatattggtctgtgtgcaatgagatagagaccaaagtacacttttgagcgtgggacataatatttttagtttgtatttgctccaaatctcatcaaataaggccttactttatgaaagtataatttatagatgatcaagtacattttttttttttcggtaagagagggggagacaattgtctcccacatttgattaagaataaactataaaagaattacaaacgaacatgatgtggcattctgtcccaaccgcatccactagcataatcgaatggactaccctaagacaagaataaaaagaatgaaaacttaactgcaaaaaaaacacatagttcgctaatccgtctgctagacgattagtctccctatacacatgagtaacccggactatccagtcccttgagaaaaaagccatgacacaatcataccaggaatgccagcagatgagcatcacttatccctgactttagaaaaccccaccaccaactccgaatccaccgccagttctatccgcctaaagccccgctcctaggccaataagcaggccataatagactccccacaattttggcaatagaaccgagcaaatgccaatatggagcgcaaatccgcccgaccaacaccctgctccttctcggatgactcctccagccgacgccgggcccgttttcccccaactagctccattcgtagaaactttgacctagtcttcctccggcttcttccatgaaactattgtctacactctccatgcggcatgtgtatcaaccaacaccaacataggagctttcaagacctccataactaagtccttaagaaagagcactcgatctttacacttaccgatctccctaaacacatacctacacctctagttccaccctaccacaccgcaatactaaacagtgtcgaccaatcccccgtacttcagcccgacctgcccccccaaattctcgaacaaccattctagtagcgacttttcgaagaaagcttgtctttcttaaggcggtactaagcacatccaaatacccgcccttatcgggctgtatctcaagatatgtattatggactcaaaatttcctttacacacttgacaaacctcattatctctgatatgtcgtatcactctctccacatttgtcattatcacctggtgactcacaagccaaaagaaaacctggattctctcaagtgccaccacttttcatatccacttaaagaagcgctccatacatggttaaggttcatcctcctgcctcaacaacgtgtatgcggagctgactgtaaactcaccactcgggttcccttgccacgaaatcgtatctctcaagcccatcaatcccttaattaccattgcatttaaacggtgagtaacattctccggtaaaacctgacccaggtgtgccaaaaccagcttgtaccctcagaccaatactcctcgacccttgtctccatatcaatcaaatctagttgtcatgaagcccgtgacaacaacggttctcccaacgaatttttttttccttttttggcaaatgggtttcaactttcaagttttgtgagagcacctccattagtgataaatggagtgtcttcttttattttttaatattagattaaagacactcatcaagaatgagaaacaaaaacgtctttaacaagacacttaagcccttattgaagacactcttaaattttgtgtcatattttgattggttctaatttttttagattaatatttaataaataaaattaattaaagacatttttaatggcgttgtgtgatgaggatggtctaagggatattacgttaaggatttttttttggtaagtggacgggagactatgtctcccgtccaggatattacgttaaggatatcccttattttctaagggatattacgttaaagatattacgttaaggattgaatgtagttaattgtacctgatctgaatatcaggaactaatttttgtttattatccgtattcgctcgtctttgatatcttgttttccggatcgatcagatcgtagcaaatcctaaatcatgtatattagctccatggctagttacaacactacaattatagttacaacacattatttcaaagatttgttgtggaatctctccagaaagatcgaagattttgaaactatggaagtagcctaggaagtaaagcttgtgatccttgtaaaccataccgaaacaatctagagtttgggggatttgattgcacgaggtatctcctttcttggaataaaatacacaccaatccataagtccccaaacaacaacataatctttggttttctcgttaatccaaaacacagggtatcgtatattcctaccaacgtatggtttatacctacaaccagggccggctcaaaaaaattaagaaccctgagctgaaaaaaacagttggtcctaatttcttatgtatatatataaaaaaaaaaatttggaccctaattttaataaatttagttgaaaaaaaagacaaaaaaaatttgggaccctgtgcatgagcactccccgcacatggggagagccggcactgcctacaaccgtacaatagttggcatattcatttcatcatttggtaggtagattttctatcgttccatgtgttgcgaattttagaatatgttaacaaactttagtgttagtagaggttttttttttttttttttaatgactaagaggttctcggcctaagaccagagcattttatatggtcccctctcaagtgccactcgaaccgacgatctttaggttttgtctaaaagtttttaccacttcagctattgacacttggtagatttaatatcttcatttcaatcgtttgcttcctctatattatatggccatgatcatgatcatctcaacacgatcaagtaatttggatatatttatgtttatcaaagcatataaattaagttttgatgttgaaagaatgttaatgggttcggaaaattagtggaaacacgtatgttaaaatcttttattcaaaatcagcactgaaagaacacataatattgaagagaaaaacgtagttgagatcaacatcatgtaagcgtgaaactaggtacgaaccattgagctctagagaattgaaatgaaaaactatcaaatgtgtgcagcggctccgtcttacgtgtctcaagattgaagataaacatgtcggttgcgtgcttttgataagcattattgaaatagatggaatttctaatgaatccattagtgtcattggcggacacagtgatgccttgatccaaaagaattgactcatctcccagagaattaatccgtcttcctgaagaaatatcgaaaacctggaagcagcagtccctcttcactctttcaaccttgagggattttcctgtgagtgtgactacaagtgttgtggcccaaacgccccgtccacgtaaggaactacggtctacgaaaacactccattcaaagatttgttgtggaatctctccagaaagatcgaagattttgaaactatggaagtagcctatgaagtaaagcttgtgatccttgtaaaccatatcgaaacaatctggagtttgggggatttgattccaagaggtatctcctttcttggaataaaatacacaccaatctctaagtccccaaagaacaacataatctttggttttctcgtcaatccaaaacacaggagatcgtacatacccacctctggacttcattcgtcctttgcgacttgaaacgcctaactcataaccttcccacaataactccacgggaagtagattgatcctctcgcgggtaaagagattcacaatgtagagagtaaacagaggatcttgcataaggagccaacttccataggttgccctacaaatactctttgcaaattcctcaccaacatcttgcgttttgtaaagtttgtctttttcatcgggattgaacaacgtgcatgaattgttatcattgttttcttcggggaagagaatgagccaatggatctgatttgtgggcacggattgtctcgaagcagagtaccaagacgaacacacggacttggctcggttgaaattagcaaaacttaggcattcaaacaccgaactcaagagatctagaggaagctccgaccaggatttgggtgtaactcgcctgagacgctcatgagaattagggttttgcttctcctctatctccatggaaaactcaaaattgagagatttttgttacaaataatcgagatgattgaattgttttctctaagcctcagaagttccgtattaatacaaaacaaaaccagaccgtcatgtattatatgggctttgattggcccagtccatataacccgccggtcacccactgtgccattagaggcacttcactaagttgacaaaaaaaaaaaagattgcatataaaatagtaaagatgagaaaaacgtttccaggtttctcggaatatgtgtttataattagaatttaacccgcggggctatatttttttttaaaaatgtaatgatattttttaaaatattaacggaagatatatcatattagtttgtatttttaaatgtagatatctatctatgtattatttagtgtatgattactattgtttaggtttcaatttttgaagtatagatacgaaaacatacatttttttaagtaacgatgtatggtcaattttaaaattttgaatattttactccgcggtatactgtgggtcgattttttttataactaaaattttaaattttaagttgtatttgttttgttaatattgtatgttttgttttgtgtttaaagttgtataattgtatttttattgttaattttaggatttcatccgtgatataccgttctttattaatatcgactcaaacctgtcatcccatataaacccatctatattatcccgttagctaaattattagttttataaaatccaagaaaataaattattattgttataaaatccaataatttcaagatctcacatgtggtataccgttccttgaatgattttaaatttatactactaatatatattttaaatttatcatataaattatatgatttttctatgtgaatattttgattattataaattagtagttttattgttatgcaaaatgttaatataaatatttgctataaatcggttttatgcatattttgtagagtaaaattcacagaattttttttgaagatatatggaaagattgtgtatagatttttagaaacaaattaggcaagatatcgtttggttaatatcttttatttaaattttgtaaaactaaataataaatgttaattacatggactcgtaaattaggtggaatttcaggatttatttcatatttgtacttcaaaaatgtatatatagatactccgagaaataagtaaaatgagaataacgttatcaagttttcttggagtacgcttactcatctctctcccgaattattagacaacatataatataacggaaaataatgataaaatacacaatcctcgaaactataaaatttacaaacataaaaaattataatataacaaaaatttgattttcttaaataacttcttatgctttttttatttatttagaaacgtttatgagtagacattatcaaaggatccatatgaagcccaatatagtgtctcatgtgtagtccaaaagcccatgtaatggtccatgtaactagggttcttagcaagatagtgactcatatatatgggaaaacggcattttttaacctcaactatttgctggcggatttttccaacctaaactatgacccccagtcgatttcaacccgaacccagaaataatacaaaatcaaaacctaaactaatgtaaatgagccgatttcaacacgacgtgaaacaatgttagttgggaagttaacagtttcaaagttatttgattttattttcaaggtttgatgaatgttgtagagagagaattacccaaggttgagtaatcgttaacttccgaactaacaccgttccgcgtcgtgttgaaatcggctcatttgcattagttcaggtttcgattttgaattaattttgggtttgggttgaaatcgactaggggtaatagtttgggttggaaaaacccgcctgcaaatagttgaggttgaaaaaggccgttttcccctcatatatatagtcatgtaatgagaactttgttaactttgagagttgtctcaaaacaactctccttctccatttttataaaagtatcaatcattgaatcattgtgttcttggtgacaatctaaagttttttcattacatgactatatatatgagtcactatcttgctaagaaccctagttacatggaccattacatgagcttttggactacacatgagacactatattggtttcatatggatcctttaatagacataatagtttttaagatttaaaatagttcaactatctatatttaattcgaccaaactatttggcatgtcactttgtggtgaactcatggctcatgatcttttgctcttcaccattttaattgccccaagtcccggttcaactattcatgtgttcttgaaacagttaggtgatatattgttaaattagagagataaagagattggtttgttaaacgttttcaccactccaaccactataaccatcaccattcaccactatcaaaacaaccaccacgccgttaccactaccaccgctatcaccaatttttgaaatagtaaattctaatttatatatacaatttttacacatatatattaggtttgggtataatttttttttggtttagcatttagtatattaaaactaaaattgatttacgaatgatttatgaaaatagtacagtacaacattttattccttatacatcatagatagtacaacatatttttacttataaataatattcaccgtttataaattcacatacgattttaaaaattcgacttatgccgtatgtagaaaaaaccacacatttcacaaatcaataaacccctaggtattattgatttgtaaatccatataaaatttgaaaagttttattaattatgaaatatagatatatggattttgaaataaatgtgaagactcatggatttgaatcctttggatttttaataggattttcattagtagttagtataaattatagaaccaataacgtattattttaatcatgattttatagaccctttcaaaaaccaaagaaaattaaattttgatttacacaaattaatatgattcttcgtcttgtgcagagaagtggccgtcgctatcgccgccgacgcctcacagtcggcgacccgtagttctcacagtgtttcactcaaactcctccgactcctctctcaatttttttccaagcaagcttcttcaatcttcctcgtgtggttttttcaaaggtctctctccatctccgattagaacggagtgaggtagaagattcctctcattctcttttagaaaccttatctatattacttggtagagtgatttcttggaatttgggtttttgggtgaaatcagttgaatatagagttggtttctgaa

SEQ ID NO: 5386 - DNA, 1141 bp, Arabidopsis lyrata
  Intron number 2 from transcript 907990 (locus 907990) deri ved from phytozome v7.0 (chr-ID scaffold_2; pos 9804101 to 9805241 reverse strand)
aattaggagaaggaggttttggtcctgtctacaaggtaagccgcctatacaaactaattaagagttataggtttacataactttgatcaagtcctttcaaaatatgactttttcaggtttgagtagaagtttcaagtattaaactagtaatttattgattttggaagtacgagaactagaatattaagtttgataatctctaaatcaaccaaattctcttagactggtaaaaatcattatagatctacgacaacaaagaatataaaactttttctaactctatattaaatcacaaagctatttaagtaaccctaaaaaactcttaaggaaactccacaaaaatcataattggaatatgataattttaaaaataaataaaataattaataataaatctatattacatcactagctggcaaaatctcatataagtttttgaccggatctaaataccatttaagtttgtttcattataaaatcatataaaaactcttgtactcattgccaatcaagtgaatggctattgaattttgataagtttgtttatgtctgttttttttataaaaaattataaatcactcaaacttcttttcaaaatgggggttttataagaatatatatttactttactactctttctatgcaaaaatgaaattctttattatatttgagttttggaactttaatccgaaaacaaaacccaaaacctcaaatttaaaagccaaacatccaaattaaacatatctgaaaactacaaccattgacagtggggcagtacctaatttcatctaggtttgattccagtttagaacttagaacgcttcttattcagagttgatgcgggtttcccactagctagtatggtagtgttggacttagtccttctgccctagatgttttatatggtatgcttgtgttcaatgaacttgcatatacccgtaaaacttgtcgggtttgctcggattacccatgacaaaaagcaataaaactattcaagctcattgcttttaaagatgagtctaactccaagagttaagtttcttcatatttattgaaggaccatggataatatgttccccttgacctctaaattcaaagtttttcctgccataaatctgatttttctagggaaagcttccta

SEQ ID NO: 5387 - DNA, 3460 bp, Arabidopsis lyrata
  Intron number 5 from transcript 311954 (locus 311954) deri ved from phytozome v7.0 (chr-ID scaffold_1; pos 3466609 to 3470068 reverse strand)
tagctgtcatggtttggatggaattgctttgactctcgataagactctactcctccgtgtgtgtactcgcttaaggaactcctcctttcggtcaccaccatggattgatcttcctttgtcaaaccgccaattctcccgtgacatgccatagcttccaatcttcaaccggttcttcttcttctcatctagcttccaaaatggctcacttctcttttacaccttcaataaagagatgtaaagaaatcttaagtatatgccataagaatataagcttagtatgagtaagatagagtaaacaagattaaaatgaactagcttttgataagactaagtccttttaattcacaaataaaattcggaatttaaacatgtaaatttaagattaatcatgctataaatccggtttaaattcaataccaatgcaaatgaccaaattaaatttcagattttaatcatgacaatttaattcaaataattacagaattctaatcaaatgatgactcctaaatccgttttaaattatgcttaaccatttaaatgacaatttaatttgtaagctaatcatgcggattcaattcaataaggaagtctatctatatgatcaaattatgcatttataaatgagcattgatatgaaaaataacaatgaaagagtaagggtttagagatagccttttgtcttcattgttgtatgggttggatgagactcttggcaccaccatttgagcttcagccttcataggtctctctctttatggttggtgtcttcttggtcttcatccacctcttcttctccatgggttgtctaactcgggttgtatgtcgagtagccttcaagtgttccaccttagtcttcttctttggtctgcctcttgggttcatcttcatggatcttcctcttgggtcagccttgagatagactaggttgaattcttcttcgtattagcaccttcttgtgccgcttcaagacctcttcaattttcttcgacccaaactcataattccctgtaccatcttcgagattcaccgtacttatgggtatttcatgatgtttggtcgagacaattttgaaaatggtcgagccaatttgtcggagtccgacgagagccttcccgaaacgccctagcttcatttccatcggtcaaatgacatatttcctcgacccatattgaaatttcgtcgctcaaccatccattttatgaagaatggtcgaggaacatttgccccgggacgagctagattcggagatgggcgagaagtactcatctttgagtactaagacatggcgatcggttgtgccaatcggttgcaaaccgatcggaggaccttagtacgaaatccttgtcttgccgctcggttatcccgatcggttgcacaaccgattggggtctatttccgcctcttcttgtgcttctttaaatccttttagcttcctttgaagcttgagaattgttgaacacttttgggcgccttttgacaacaccaagtcagccacttagctcttaaagctaatccttcctcattatcccttcatagaacaacttcaagactaggcttttaaggcttctttcatgaccgcttcttatgcttcaagggctgctccaaatcgccatttcttcttggaaaactcatcaagaagagatggaaggcataagcctgagaattaatgacaaaaaataaagtgtatgttaccaagaataagagattaagtaaccaagtatgagagtataaagagtatggactcaagagtgccaatggacaaagttcttagctttgttttcttgaggtgagattgggagaatgtggggtgtgtgagcagccttgtgaactccaaaacgagcagtctttgttatctacttcgtgggcttcaagatctgctccaaactgccttgataactccaaaacgagcagtcttcatgatctactccaagagcttcaagaacagcttcaaatcgccattcttcttgatggcttctttttcatcatcccttgagagatcttctttggcgtgaattgaagaggacttttggattcatcatgattttaaatgctttgaacatttcgttcaaagacatcccatggttctcttcccccttctttcctccgtgagtctcttcttcaagggccttgctttgtagctttgaaaccatggttctcctaaccatggctctgataccatgttagaatatatgcggaatatggccaggttatgagcctgggacaaatcaagagtgagcagctcatgcttcactcaaagagaatcacaagaacaccaaaatcgggtttgtgtgttcatgtgtaaatccatcaagaaactaactcaatgtgagctgttcttgaggtaaaataggagctatacacgccaatatgagctgtgtatactcaagaataagtatgagaggaagaaactctctcataccaaagaaatcccaaatacccttatagaatcgttttagaagaatggaatagaaagaatttgaggaaggttagagaacaagttttgctaagacttgatctcatccccgagaatattcagaccctaatctacccatttgaatgtgtaaggaaacgatttagtataaggggaagacatcccacaaagagtgtttttgtttctcaattgtgagagcttagctttattaatgagcatgtgttacatatttatacacaaagtagaagagacaaattgtctcatttctagacctaaatccaacggtcatatctaccaaaacgtccacaagatgtagatcgtgtggcttagagtgatttggaccattctagaaggtgatggctccaaaatatcttcccacttgttgcttttcctcaaaatgcaacatgtggctcttaggagagagaggagcgtccttgatgatgtcacatgtggtcctccttgcaagttgcttgctttcttatccacatgaggctccttttggcgcttaaacgcatttgaatctcgggctactaagtgtgattggtttgacaccaattttgcacatctttatcttcgacccggactttgcacattctcctcttgactttacacgaactttgcacactcggttcttgatcgacccgaacattgcacgtccgctacttgatcatctttacacggattttgcacatccggtcttgataatcttttgacaccaattatgcacattaggtcatgataactttgacactaattttgcacattggtgtttcgtcttcggccttgtcttgagagcatcggccttgactcttcttacgagtttacaccaattttgcacttcggtgtcttggtgactttacaccaattttgcaccttcttctcttgatgttcttctaagtgacccgaactttgcacggctatgatcaaaccaccggatctcttctagcttctttcatcgcttcttctcatccggttcactaccttcatggcttgtgctcattcggttcaatagggcaatcgcggggctta

SEQ ID NO: 5388 - DNA, 31751 bp, Arabidopsis lyrata
  Intron number 6 from transcript 475761 (locus 475761) deri ved from phytozome v7.0 (chr-ID scaffold_2; pos 11542500 t o 11574250)
tctctccagtctgctaagcgcagttcaaggtactggaatgcgcgcgctaacatttctactgcacattccttcgtagacgcctaccaaggtacgtagtattcccttaaatttctaggccgatatattccgcgtcacgtagaaacttatatcataattcgggccggtccgctgggtaagccacccaaacaaaggattaggaccacacattagaataaggattttggggcacttaattaatttcttagattagccttataatattttccttccatttactttaaagttttgagttcggtatatctttctataactcttttcatgtttctcattttgctttttttcgtttttgtatatattcccttatcaatatattaaagataatacaaattcgaagcaaaagaagaattatatctaattataaaactctaccaaataaaaaatcctaaaaaatcatagatttctcttgtcattttctcaaaaaaaaatactacttcctatcgtcagtaccaaagaagaaatttaaaccaatttttttttattatagaaagtagtttttcctaagttttttcaaataatttgttgttttaaaaagtaatagctagatgctttttttcgaaattttttgcttcaggccaacaatattgttggaccggccctgatttccacagtaaatcgctttaacatatctacgatcaaagaaagagccttggacacagtcgtagtacattgtaagcacgcatgtgttaagtgatctaaacaaagaggtgaagagattgagagcacgtacggttcaattacattagactagtgactaaacgcttaattaatgccgatgaaaatagcaccaggagaaagaattagatatcatcatatcgatggattagttgggaagagaagagtggttcatggaaaggctgtggagtacatattcgactctttcttagtagcaaacgagacaagcctaagaattcttgttaatatactaaaactagtatctgacaatccaactgtccagcaagagccacatgatattttgggagatttttttttttttgtgttgtgttgttcacttcgtcaaattcattctctgattcaaagcgaattatatagttttggtgctgctaatttgctaaatgtagtgatgtcaattttataaaaattaatatgatcatatcatatattttccagaataccaaatttaagtttttgtaaatgcatttactaataatttgtttttctaccacaaattgtcaatatattaaaactttaaacaatttgaaataagagatatgaaaaaccagttttgcacaatttaatcaaaatattctgattcaagtaaaattaatgtgaagataaataaaaaaatttctgataaattaatatttatttcttataaaataatttttttttaaatcagttatcccctttaacaaaaaaaaaaatcacttattcttgaagattttactgtcagatttttgaatgaaatgagttaggaaaatctgactaaagtgaaatcaatgtttaggatgttatcaatctggcagtcttggttaatttggacaactattttcttttcttttttttgataaacgaactaaatttgcgtaaaatacaatatacagtaatttgttttatcgcgctgcatgattcattttataatacaacattaaataattgagatgaatccatgtgaaagccagattcattaatttgacgttcgtgaacttagtgtttttatgcacgagttctaaccagttaccaactgatacatgtataacacaaattatttttagtgtattaaacaatcttttaaattaagatagatcagcacattatgttttaattttttattttattttactctagttcttatggtaatgaatgttattataaaaactttgttatatataaattgttgtgtttattcaaggttttgtgcaaaaaaacctcaaagtcgctaatttttgcaattttaccttccatctccaaaaaatgcagaataatcctatgaaatccaaaataatagataaagatgtcagaattacacaagacgatactagaaatattgtgttattccgttattgtgttaaatggctacacatacatatatataggattcaactgctttgattctcatactatcctgaagcgcattctgcagctccttgatcttcacaaatctttgagcgcctttcgcagctctgtgatcttcacaatattctgagcggctttctgcagctccgataacctgaacaacagtctgagcgccttccgcaactctgatgactgtaacaatggtctgagtccgtagctttgatgacctaaacaacggtctgagctttccacagctctgactttaacaacactctgagcgcattctgcagttttgagactttaacaatggtctgagcacatttcgtagctctgctgacctaaacaacggtctgaactcatttcgcagctctaatgatcgtaccatattacccccctcaagttggagtgtgtatatcaagaacacccaacttgctgaggaaaacaaacaaatctctgatgacaacccatatgatatcttctatgatgacaacccatatgatgtcttctttgaagcccattccgcagcttctttgatgattaaccacgcaatagtctaagtggttaccacacgactgatggccttccacgactattagcaaccttaggagatcttcgagaatatccataaaaggaataaacttgctcctcaagtttatcctttccatatgttgattcagagaatatttagtgaatctgcaaaccaacaaccacaccaagaacacggcacgtcagctactcgcttcgtgagtacgccgcagactcctgatacagactcatgtgtcttcaacatcaacggagtagcaatctgtttgcgaagccccaaccttcctttgacaaccacgaacacgaacatctgaggccaccaactagttgagcccgacagcgactgaatgtcttccccccctgaagttggaagtgtgtaaatgaagaacacctaacttgctgaaacaccaaccatcaaaaccttgcagcggaaacaacggtctgagctaaacagctcttacaaccaaacatatcaggagaaaatcatcaaccagaaaaatctgagacttgacacaaagaaaaaaacgaacaagcccatgctaaaccaaaaccctaaaacaccatgatctacccccgtaaacccaaatctaaaaaaaaacactctcccaaaacaaaatcctaatcttaaccaaaccctttctcccaccaccgaagatctcaccaactgaattattgaaacatcaaaaacgaaacccgacaaagaccaaaacgactaacaacaaaaaaaaaacaccaacgttcctcttttgtttttatttttcatcttagcagaagcaaaacaaaaaccctagaaattgtaacttagagctctgataccatgtcagaattacacaagacgatactagaaatattatgttattctgttattgtgttaaacggctacatatacatatactagataaggcccgcctaaataggcgggtgtaagatataaatgtaaatttttaacgatagtatttgaattttgaaatacagtttaactatctatttcatcatattgaacttgattataattctacacactttatcttaagtgataacaattttatatcaaaatactatttatctcagataaaatctatatcttagttaatattaaaaataattagcaattaacaaaatataattaataaaaaacataaatccacaaaaatatttgaaaaacaaacattgtttaaaatatatttttatatatgacgtaatctcgtaagttaattttacctcatgcaaactaattttaaatgagttaaaattaagtaataaaaatatactaacttctcattaagtaattgaaaagtcaatcgtataagatttttttcacaaaaattgtgttttcacttgtgactacatacgttgaaattcttagaataaaacataagtataagcttgaggtaacacatcaaaggatgcaagcccctccatcatacgatagcgttaaaattcttagaataaaacataagtattcaaaaatttattctcataagctcattaatttgttttagtttttttaataattaaatttaacgaatgaaaacactatattacaatgatacatacaattttatctaattaaattaatgttaaataaatcatatgattattttaaacttcaatggcctttttaattagttattatccacactaaatgttttttttaaaaaattaatatatactaaatttaattgaccaataacacatgtaaaaacgaatttgttaattttccttttggttaagaaaaatatttttttttagatatagacatataaattagtatatataaatttgtttctttttttagtttttctatttctttaaaggaaaaaaaaaagttaactcttttctaacaaatatcaacatctgatcaatagacttgacacgtggcacaatcctatgagttactaactttgaaaactatattttatataataagatataggatttagaatatattaaccttaatcacatattaaatctaataaaacccgcatcaaaagcccgatccgattctagtccaaggcctaaaatcaaaagtctgatccaatcctattaaaagaaaacctttggtcatcgtatctctaagtctaagcggctccacctatctgattattctgatgaattatggtaaacaataaaagcatcgaatttagttagttgaaaacattaaaaaaacaaaaaaaaaaaaactaaccaggaataaacgattgcatagacatacacgtccacgacgcgagtcgaaaaaagacaatgcaaaaaatcaataaataagcattaattaaaatatatgaaacaaaaaatcattaactagacataagatattggctatatggctatattctataacgacttaacgagtgagacacggcacatatacagtacacacacacactcatattgccttgatgaaaaaaataaaaaaataattgcctataacgagtgacggataagtcaaatttgtcacacttttcatttggctaattttattgattgtaatgttttttcctttcatttagcaaattatttcgtcagtaccaaagaaaaggaacatcaaatgacgtaatgtcgacaaggaactaaacatgtctgtcttttaaccaaaaaaagaagaagaagtaatgctgcattttctaatatatcttacaccaatattcaacagattatagtttttaattgaatttatcatttaggaattaagtaattagtagatgatacttttcttgaatctgcatttacataccaatttttaagaacggaataacaaaacggtatatgttcgtgagcaaaaaataacagttttttcttcattaactccacctatttgctggattatgataaacaatgaaatcatcgaacataaaacaaataatgaaacactttagttggttgaaaattaaacataaaagaaaaactaaaataggacaaaactttacacacaacgattgcatattatatagacatcactgcacgacacgagacgaaaaaaacaatgcaaaaatcaatcaatacatatcattaataaaatataaatatattagtatattctctaacgagtgagacacggcacatatatacaacacgaccagtcacattacgcttttcatttggctatttttatattttattctatccacttttaacgagtgtcgataagtcaatatttggtcacgcttttcatttggctatttttattgattctaatatgtttttttttcctttcttttagcaaattatttcgttagcacttaaggaaaggaagatcaaatgacttaatgtcgacaaggacttaaacaacatgtcaatgtggaagatcaaatgacttaatgtcgacaaggacttaaacaacatgtcgatgtcttttataatatttttctatattatacacacattttggattaaactattaaattattttagaagctacaaaatgatatatacagacattaataatgttgttataataattctaatgaaaatttagaaactaaataaaaaaaaaagcattttagaaaaaaaaaacatatagtaattttaatatatttattataaaatacctttttataatttttgttaagtactttcttccattagtgagtgtcgagatacaaaaccttctttgttttattattctggaagttttcctatgtttcatcctgtttttttttttttaatttttttgatgaatattatttgtaaaacggattaatcatagtaaaattatggagaactgcattttcgtctaaagaaaaaatcgtgtataaagtacaaaatagtgttttagtccccaaaatcttctgtacaaaaacaacaatacgtacacgttcatttcacatttttaaaataaaaatcgtaagagaattcaatgatacctcatatatttattaaactatttctttaagatcttctaagatgtatatatgactagataaaccttggatgaaatactcatatgaatctatgcatattgagtattgacatcaagtatagtgtgtagattaaaaattgatgtacacatcactaaaagctcgtttaaaaatatgtatatttttcgacaagtatgtgattattatatggtgttcaagaataagtccgtcgtgtgttctttgtggacttgtgaaatatcaataattatatcggcgaggattgatggggccaagtcggccagtttcaattctctctccaccgaaaaattgtggtttccacataataaaagtaataaacgtaagaccgaaaatctaatgtgaacaagaatttttgtcttataaaagacataactagactgaagcacaaattatagttcaaaccaaacacctcaaacacaagaaatggtttccaacattgatcacaaggctatggaagcactcctccgtggacaaggatgcgctaacagcctcaagattctcctcgaaaacggcgaaataagctcagtttcaacagaaccactcatcaacaccattctcgattctttctcgcttgttctgtcttttgtggattctcctaatcctccactataccatgagtcttcttctcgaaacatggcaagacctacgccccggagatcatctaaggagtacgttaccaacaaaaatctaaactcaagttgcatatgttctatgaaaagtttcaagattttttaattcaaattcaagtgaagtagcacataattctatatcttactttatcatatcttctataacttaattttgagtttagatgcaagtgtcttctatattttcgataatttctatagtgcaacatcgcagaaaactttgtggagcacaaggtttagtgaattacagagatgattccccgattccgtgtcccaatgatggctttgcctggaggaaatatggacaaaaaaccatcaaaacctcaccgcaccaaaggttagtcaattaggttaactagaaaaacagagcaaatgctctgttcttacaaaaacgaaagtgaattctcttctttgttctatgaaggacatgtaaatagagtagcggttatttctttattttaaacggcgatagataaaagtgctatatttacaggtgttactatcggtgtacctatgcaaaagaccaaaaatgcaatgctacaaagcgggtgcagaagatcaaagacaaccctccagtgtacagaaccacgtatatgggaaaacatgtgtgtactgcttctgtaggtcatgatgatacacacagttccaaaatgatccagttcgaccaagttgtttctgaattggttatgcctcagctcacaacgattgaccaccaagtaattaccatggaggacaaagtcacacactatatcatgaaccaagaatgtgatatcgatattaatgattatttggtgggttatgaccaattttgggcgaatgaatttcccccatttccatcagacgacacaatgttttttgacaacattcctgcttttgattagaaccctatctaggtttgaacaacatatctatcaagctttttatgttttcatggtggagattgtttgttccttcacttcttttcaggttcatgttttgtaatttagattcatatgctttaaatttacagtgtctttttgtgtaaagaagtttcatctatcatgtacttttgcgtttattcagaaaataaagaaaggaaaaagtaatatctatataacttttgagagtgcccttaattgttgattcataaaacgagtggattaatatataacaaatgattcgtttatcactaatacttcaatgttttgggttaaaaagaattaaattttcatgaggaaagtaaagcatttttaatttgatttctgcctatcatgcgattactagtgcagtatattcggtaaaattattttgtaacatcatcacttctgtggacaattccgattgcttgaacaatagctggaagaactttatctatgccattatgaccagtttattcaaccaagtgattaatcttgctaaattatcaaaaaatggaaacttgtcttacatcaatacatgtcgtcgaagggactatacatcgcacatggagtaagcgtatcacactattggagctagaagtggattgagagttagtagttggatttttcgacaaatggattagtgattctcaccctatcgtttcgggtacgtctgtaccatgcttttttatctaggtaatagatagtccgaatttttcatgtttttagagagactaaccgttttaccgacgggttagcaaactatgtttttactttgcttttaggctttcatttgctggagtcagcgccaactgttgtggtgatcacaattttaatgactgaggaacgacgtttccaagacatacctgattgtaattttatttttcatttatgaataaattacgggtgtcttcctgtcctcacaaaaacaaaaaatacatgtcgtcgaagagatgaagaaagagacgaaaatagtaccaaaatctatcatttttcggccgagaatctcttaattataagaaaaaacaatcgatcatttttttatgtcattatcttatttatactctctctccattttagtaagtttcaaatattttagtttttttgtttgtttcactaatatttactagtatgttttaaatatttagtgtaaagtaatgttgtatttcctaatttatctacaccactaatattcaacaaaatagaaatttagtttaaatttattattttggaatgaagtgaggtggcgatacttttctcgaattggcctttacacaccaacgaccaacctcaagaacagaataacaaaacggatgttcgtgagcaaaacttaacttttttcttcctttttagcacttatattaactgtttaatctttgaacagagtgtgtttacaaaaatgatatattttaaattcagttaatatatacaagttaatttgtagattttaccaacaagaaaaaataaaaaataataatttgtagctataattcttttcttataaatgtttgacattgttttcatctctctcaactctgttcttattcattcaaaccgataagaaaaatatcgtcgtgtttattattcacaccgccattgtttattcatcggaaaagataactttcacgatacaaataaggatctaaaacatttttttgatctttacaaatagatttacaaagtatagatgcagatctaaggatatttgtggagataagtcaagatttagaaaagtaaaatataatgccaaaacaaaaaaatttagagtgaaaaggaagaagacgatggagcatagcctatgcatgaattcaatcgaaacatgctttttcctgagaaaaaaaattgaatttcatcaaaaattctcaattagttaatgaattaatatgtttctataaatttagatagatgttcatatactttcatagagtcatatatcgaactataaatgctacattttttaatagatatctacgcgattagtttagtggtttaaattcaaattaaaatttaataactgtcactttgttctatatgttgccgcgtgaaagtcaattcaactgttaaacatttataaaatgtcagatatttctatcctctcccacgagtatgacgaaaactatggctgataatcttgtaattattcgcaacttgaaggcctattccaacatttattgttatgttgtctatgatacttgatactcatgttattttcttaattatatgccccaatatgtctctgagcaaattcactcttttcttttttcttatctatttcccttgctcttggcccaactgtcctgtcgtcacaacatgaacaaaaaaaacaacataaagacatttatggtagggaaaaaaaatgaatttttagaagagccaaaacttttttttttgtgcaacagaatgagccgaaactaaataccgaaagtgagtgattatatcaaatgtagggcctaagcgctcttggggacaccaccaagcttgtgtgttctgtggagaattggatgaaacaagagatcatttgttttttgcttgtcctttctctttctcgatttggtctagtattgcgaggaagcttcttcgtcatcacctagatccgggctgggaagagacactgactgcgattgtgggtcttcaaggggacagtaacagagacatccttatccggctttgctttcaagtgacagtctacacaatttggcgagaacgcaatgcccgtattcatggaaccagattcttgacagttgagcaaatagttcgaagcttggagaaacttattcgcaatcggatctcctcgctggactactctacaaatccgaagatctgcctcctaatgcaacgctggttcatggtccgtctgtagccggcctcctcgtggctctgtttttttttttttctatttttgccctgttttaaagttccaattgttttcatgttctgatttttgtacatacattcctatagttgcagattaataaattacacatttcaacaacaaaaaaaatgtagggcctaagtgggaaacgatgtgaggaaaaagagaattgtaggacaacatatatgtgaagcttttgcagttcatgatgatatacatatggttctgaaatgatgcaattcaaacgagttgtgtccgaattggttacgcctcaacttgcaacaattgaccaacaagcaattaccattgaggacaaaaccacaaaccatatcatgaaccaaaaatgtgatattaatgaatttttggtggatgatgaccaattttggccattttcatccaaagacccgatgttttttaacaacattgctacttttgattagaaccttttccaggttcaaacaataaatctatcaagccttttaagttctcatggtggagagtgattgattctgcatttctttcggttttgtaaaatgtactccctctgtttttgaaaagttgtcgttttaactgtatttggacaaattaagaaaaggtatacaatgactatattaacctcataaaaatgacaagtaattatttacaaataatttgtgttcaataaaatgagggtaatttgggtagttattggcataaattacattattaccttaaaacgacaactaatttaaaacaaaaaaaagctctaaaacgacaactattcgaaaacggaggagtatcaccttttttttgtgtaagaggaagttttcaccagttatgtatttcaaaagaaaaaaaaaagtatccatacaagaaatggaaaagacgataacacaacagagaaaatggtagagaaagacaataatacaacgaactgataaaaataacgtttgtgataatattctaattaattagtataatgcacatggaaatgaccttttggaacaacctaacaaggttaaaatattgtaataaaaaaacatatgtgctgatatgatattcatcatgacaaataattgataaaatgctattgtgttttatcttaagaagtttattggcatcataaaaaaacttcccatcataaatgacttctcaatatttcatgaataagttattaaaggggtttgaaaatcctatactattatttgggaagtacattttataagatacccttaactaaccttctcttttgtaagaatttacttaagaatgtcattagaaataaaattttatagagtaaattaattcaactcattaaggataaacaagtcaaatactattttatgcaatttaattataaaaacgaaaatctattattaatttttttaaaaagaatgaccaatcaaaatgaacatataagatttgatatctaacttatcacattaatttgttattaatcattatacttcacctctcatctttatattattctatttctataaaataaataaattattatatcatctacataattaaaaaaaaaagtaaaaaattttcgcatatacaaagatttgaatttttaaaaacgaatataaattgttcaatgtatgaaagaacaaatttaacgggtcaaaaattcatatttgagtaatatatttctttttttaatatcatcaatacttaatagatcaaaaagttaagaaatataaatactctaatttgattttttgaaaaaaaatatttataatagacggcggttaaatataatgtattatatgatgaaatgagttatgatccttataactatttgaatatttatatttaatttcatatatatatatatatttaaattcataattttacatactatgataaaagtttttaaatattttaatttggaacatttaaaaaaagtttaattttatatattaaagaatatcataaatatttaatagattaaaaagataaaaaaaaatatgaatactaatttgattttctaaaaagatatgtttaatatatttatagtaggcggcgggttaaaagtaatgtattatatgatagaaagttatgatccttataatagacgacattttaagattttatgatgagatgagttaaataaggtttgacacttctaaatatttgaaaatttaattctgcaagcaattttggaaataatgaataatagattgtgccacaatattttcataaggattgtaaaatgaaaatatagactccacacacggatcgaatttggtattattatataccaaatatatgttcataacatattcgattatgtgaataattggtaaattccgtaattagctcaaaaaaatctctatttcaacaaccaatgaattagaatttgaaaaaataatttcctaaattaattcaaaataatagctaacttttttaactaattcaaaataatctacgttttagatgcgattcatttatgatattttgatttttgatctaactaacttatatgcactctcattttgtggttgttaacataaattaactcattcttcaaacaatattatttttttgaaaataatataaatttccgttttcatatctttaaaaaatatatccataattgaggattacagaaaaataaaaatatattcattctaatataatatatatggactgacataaaaaattaatatttttttacttattattataatatatcacgattttattctataactatataatatataaattttgtaataaatgaaattcaatccgtattgtagtacgggtgatgatctagtatatattatggaacaagcgcatgaccaagattgaagaaagactatgcataaaccaaataaatataaaaattaaaattaaacttaaaaatcaatcattttgttgccaatattagtagcatttttccattttcttcaaaaatttcgatttcgttcctacatctatcttcctcactactaaaaaaatcatttggtcaatagttttcagttttcacaaagaaagctatgtaagaccacatatatatcataagcaagaactatttccgtttttggattttgatagaagaaaacgttaatttttaaaaatcaaaagccaagatttgaatataccaaaatttctcataatgtttcttgaggattcttgtaagcgtcactgaatttgagtgtgttttattttttcaaatttaattaactactacatagttttggtttaaatttaattaatccataaattttgtgaaaaatcattttatgtaataatgttactattttatcaaaacttgaagtaaagagtatatatacagtataaagttttagcactaacaagtgttttaagattttaaatgagatcgtattcattttattaattaagaacttttatttaatttgtaaataatccaaactacatatatatatatgatgatgatgctatcacgacaaattagtcaaaaatggagtgcgtatcttttccatattcttatgattagttaattatgagaatgaccgtcacggacagtgactttacaatctctctttttcgttagcaagaaagaacaaaaatcaaatgacgtaatgacatctgacaacataattcggtgaaacaaaaattgcggataccaaaagtcggtaacgagaaatagattggttttattctgttttacacatttctaccattttgatattttcggaaaattagtttttccatacctcataattacattatgttatatttatatctaaattatatcgttatgttaaaatacattttgaataataaaatatttaaattttataaatattttatattttgtgcaaaactatgcaaatactctaagatataggatacaaaatactctaagatatacaaatattttgggtatttgagtacccatccagataatattttctaatcggttatccctccaagtgtcgggtataactgggtacaaatatgttggatattcggatatccgttaggaaaaatctcggtaatcgaatacctgtttggatatcggataatattcggatccaaactaatacttacaagtagacatgtacaagacccaatagaataatttgggtaatctgacgatccaataagataatttggctatatccataaccgatttgaactgattattgtgggtcagttccggttcagtttttcagattcggtttttcgcccatacatatttttcactcgagagaacgaagaatatagaaccataaaacgacgtcagatgcattctagtaatacattatgacattgttttagcttatgattccaagtgttcgttttaatccgaaacatgaagtatatgtacggaatttttaatttttaattatatacactatgttttatcagtttaataattatagtttgagatatcatacgtacgtaatatatatgaaaaattagatctgcataaaaactttagcatatcataaaatctaaaattttaacagagaattttgttgaaagtaatggatcgtacaatccataacacttgcttcgtctgtaggtattagtcaagttttcaagattctttctagttttagtttcgaaacccgttttctcgatagttactctactctcgaaccgagtttgttcaccccagataattgatatcgctataaaacatcttaatgcctttttttttgtcatccgtaatttatttctttctttttgtaattattactagaaaaggtatataattaaaaaaatttagttaaaaacatctatcatttgtgatcttaacaaaaaaaaaatcattcgtggtggacttgttaaactatgattcaagtcatttttcacctttttcggtggtttcgtcatcctttctctcgagtgaatcaaagaccatatgatgggaaaacaagaatgtgataggaaaacaagaatatgataggaaaacaagagtgtctttctctctatttctcttgcgtaatgttacgtaagaagaatattaaacatttttcatggattattgatttgattgtaaatgacaaattttggccacttttgattggctctgacaataaagtcaataataggttgcgcatctttcaccggacctacacaaaaggaccactagccatctaattaatctgtgattagtttaattatgaaaaatcatggctcttttagagacatatcccgaaaataataacattggttatggagtgattatgtgacattgtcaacatgatctaaaatttatgatttaatttgtttaattaactgtttaatttgttttaattctactgaattgctgaatttgatggataacaatattaactaaataattttctttttgtcaaaagtcgtagttaaataaacatgtatgaaagaattagttagacttgaaataattaattagacttgtatcaaacagaattatcattaaatgcaggattatcctctcttttttttttttttctgactaacgtaggattatcgattcgtgttatcttcatatgttagggataatttggtttctacatattaagataattctagtttttatactttgacactagaccctctcatctctctacgtgtctttgtctttttctttctcttatctctttcccttgatctaggcagcttggcccatgtcaaatcaagacattaaaaaaataacataaaacatttatggaagaaatttaaaaaaatggatttatattagaatgaacagctttcaattaaaaaattatgaataccgaaagtgaaagattatattatatgtatgacctaagtgggaaaggatccggagaaaaaaagagaattgttgaataagtttaagattgaatttggtgatttaaaaacctttaagagctagagaactttcaataatttaattttccacattataatcttaaaaaaaattggtgtccactagagaaaaaatttcaatatatagtgagaagtaaacaagatttttcaacctaaaaccagaaaatgttttccaacatcgatcataaagctgtggctgcactccttcatggccaaggatgcgctaacatcctcaagacggttctccacaaccgcgaaataagctcggtgtcaacagaaccgctcatcaacaccattcttgattctttctcactagctctatcttttgtgaactctcctaatcctcaaccagaccatcagtctttttctcaaaacatggcaagtcttatgccccggagatcatctaagaggtaagttaccatttaccaacaaaacgataaacactcattgcatatgttatatacaaagttcatgagtttctattacaacatcacaggaagatttgcggaataaaaggtttagagaattacagagatgatttccaaactccgcgccttgacgatggcttctcctggaggaaatatggacaaaaaaccatcaaaacctctcggcaccaaaggttagttaatttggttagttagaaagacagagcaaatggcatgcccattaaaaaacagattctctgttttatgaaagacatgtaaataaaagtagctctgtgtgtgtgtgtttcttttctacatagcgacaaattaaagtgtgatatttacaggtcttactatcggtgtgcctatgcaaaagaccaaaactgcaatgctacaaagcggctgcagatgatccaagacagtcctccagtatacagaacgacttatctgggacaacatacatgtaaagcttttacagttcaggctgatatatacagtcctgaaatgatacaatttgacaaagttgtgtccgaatcggttacgcctcaactggcaacaattgaccaacaagcaattgtcattgaggacaaagccacagatcataccaagaaccaagaatgtcatatcagcgactttttagttgattatgacgaactttggctgaatgagattcccccattttcatcgggagacctttcatttgacaacaacattgttgcttttaattagaaccctttccagttttaaacaataaagctatcaagctttttatgtaattatggtggagattgattgtttcttcacttcttttcaagctcatgttttgtaatttagattcatatgcgtctaccttcttttgctttaaatgtctcttttttttggtgtaaaaggaatttttgttaattatgtattttttgcggttttttaaaaataaaagaaaagatttaattggtgacactagtttgaagaattgttgaggaaatgttgtggaattttagtcacatcacttggttacataatattttaaaacttgtaatgtttttatcattattaagttttttataaaattataaatactttaatattataaatcaaaatttcagaaaacattttttatcagtttgcatgataattatatatcaagaatcacttaaattttcttacgaaataaaagacataaatattgatgaaattggttaggttcgtgaaaacaactatcaagtgaacaatcctatttttatgatatttcctagtagaaggtattagtataaatttattaactaaagaatataaataatttgggttattaaaaaaagtaaaatattaatattaattttaaaattttaaggtgttatatcataattttgtttgataaaactattttaatatattaacttaagattctaccaaaatttaatttttatgagttaaatttttttttttctgaattacgttcttatcttaataagattatttttatttgtttaattcattaatattgttgacaaaaaatgttttcagtgaagtattttcataattttatatatttaattaatttcaaaaagtcagccagattcagtggttacaatttaaattctaaattattcagttagattcgagagaaaatacaaataaaatcagcaaatcagccagattcaacagttaccatttatacgtaatatctacaaagaaaaattagttaaaagtatttatacaattttgactgcccttgattggccatattaattttattgcaatagatcctgcctttttcatttttcttatttttcccatgcacgagaaattggaattttatcttttctcttttaaaatttatcagttagatctgcataaaaaattcattttcctacctttttcggtggtttggtcatcttttgtcctcgagtgaaagaccatgctgggaaaagaagaatataacatacaatgtgacgtacgaagaatatgacgtaaaagaagcaaattaaacatgtatttttattttctttagtcaacatgaaacatgtgtgtaaatctcatactttatttgaaagaacacaaaaaaacatgaagaagatttatttattgttgttgacgttttctacctatcactaaaatttgggcattttggttgattatgaccaactttggctgtgtgagtttcacccagtttcatcgggagatccaagtttttgacaacattgcggcttttgataagaaccctttccaaattcaaacaataaaagctatcaagctttttatactctcatggtggagattgtttgtttcctcacatcttttcaggttaatcttttataatttatgtgtcttttttgttttgttttataataaagacaagaagaagtgacatgtctattgaagattcatgatgctatagaacagcaaatatttgacaatctaaaaacattatgcagagatggaaaagacaacaacacagctgagaaagtgcttataaactttggagaaatcaaattgaacagagcaaaataccaacagagtattatcttcttggatcattttcgacatcaacgagtttttcatagactagcgaaaacgatatcaccaaatgtgaattgcatcagagaaagttagaagaatcaaacctagttcttcaaaagcactataaccttaattccagaacaacctcacaatgtggaacataactatggcaaatagaacaacaacaaaaagagaaactgagaacttctgcaggtgagtgataatgcatacaaacaaaacgaccaacatcagaaatgatatgataattcctcctcttagtcttcatcttcttcttcatcttcttcatcagcttcatattcttcttcagcatcatcttcttcctcttcttcttcttcttcttctaggctgcggatacaaagacgcatacacttcacgacaccacccgcccaagtcaagaaatagtcaggaacaaacatgaagtccttctctggagtttggaagctcactttctgaatcctattcatctccgacgatctaaacgtcaaagtgtcacctgccgtcgagtaggatagcttataggataactttccaactcctggagcagaaggtgctatacaattcacagtaaaaaacaatccgtatggttccttgaaacactgaagcacaaccaatggaccatctgtatatttctgaaagaccgaaaacttcgactcgacgttcatgcatgcatgaatggaatcgccatacctgaaacattctcccgtgaccttgtgcttagtagcgtagtgactgtagagatccttgtacacgccgctgtatttgcagtttggtgaaggacaatagcacagagaaaaaccgcattccttctcatggactaactctttgccataaaagaatgtctcggtgcagccatgtttagcgtttgggcatgggacaatgactgctttgacaactttctccattattctacatcggtagttaccaatgggaaaagtgcataaagggcatttgtacctcatttcaatacagcaagaagagcaagctatatgtccattgtcacactgataagcaaagcacacagagttagttactcgaattacaagtcaatgaaactagaaccaaataaaaatctgaaactggtaattcatatgttatctaggaaggaacaatgatccataatgtttctttaagcaatatattcacagcactcgtttggtattcgatcaaaccgaaaaagcggtgataggtacactagtaaatcacatttcagtgactgtaatgaaatcaacatgcatttctagctaatcaaagttatccaaaaagatcaacaaaagctaggtgtcctcttacacatacttcattttgaaattttgaatcacccaattactataatgaaattagcatctatacaacatgaatttctagttaatcacaacctaagtctcacgcatgtgctactaaatgaaatcttcctaaaagtctcacaatcattttcaaaattttaaatcatcatgcgattataaggagaagaatggtgaagtaagaagataagacctgaaagatagaactcgtgagtgcgttagagcaaacaggacaatcgagaagatgtagatcgaacagcgttcccgatcttgcctccgatttcaccacatctccagtcctcgttcctccaccattctcgccttcttcttcttcttcatcatcatcggtgcagccatgtttagtgtttggacatgggacaatgactgcttccacaactttctccattatcaggcatcgaaactcaccaatgggcaaagtgcaagcagggcatttgttcctcagattagtacaacaagaagaacaagctatatgtccattgtcacactgagattaaaaactacaaagttagttaatgattcttcctataaatcattaacctgaagaggacgcgatttctaagtaaaaacaagaacctgaaagataggactcgtgagtgcgtgacagcaaacaggacaatcgaggagatctagctcgaacaacgttccagattgtgccaccacatctcctacaccattctcgccttcttcttcaacaatggagggaacttgttgcctctttcggcggctacacgacgcttctccagcgagggcttgctcggcgttggtgcctttcaccatggctatcggaaaattttcgaaggtgttaagtctggaatccgaagagtctcgcttggcaatgtaaataaaggaaaaggtgtgtaaaccctagttaccttttcttattttcccgctgaaacgtttccagagtttggacattaaattatattttaacgattgatttttcttatatgataatagtgatactccttctaatcaaaaaagattgattttttaacgatttttacaaaaattaaaaaaataataaattaagttttatactttctctccaattaattattgttgtgttatgagtcaagtgttaggagtacgagtatctatttccagtagttgtaattacaccacatattaaatgtttactttgacgtcttttcaaatttcctctacatggagtacaaacttacgtttacctcctcattgtaaatgcctataattaattatgaactcattgtaaaggtaaaagcatttattgattaattggttttgaaaaatatatattaaatataatacaaaaatcaatttttttgatacaaaattaaaactttaaaaaatcaaacattttgatacaaagagagtaattttcttcattttagtaaagaaagttctatcgaccaaaaaaagagaagttcctatgttttatttgcaaatttttatgtattattcgatctaaatggtattacagagaacaaaaattccactcaaatttcaataaatttagcaattttgtcaaatactatttgttacttgtaaatatcaaattccccgaaatatgttagatttaacaactcttccaacatcaattcatatagaactccaaaattatctaaaactatagcatgggtaaattgtatatttaaatttgattttcttaagattaatacattttgatgtataatcactcagacaatctcattttgttgagtttgatttattttggaaacttactaaatcttaatattcgaatttacatataatgaactattatgattagaaaattattttgttgatgaaatgtattaaatcataaaatagcttataaacaaaacaaccagaaatgagtcgaataccttgtaaaatcttataaatacctgttaaaaccttttaaaataccttataaaactttataaaatatataagaaaaccgtctaaatacttggattgaatctccaaatagtagttaccatcgagaagtaccttctaaactttataaactttttttgttcactggaaattttctcttttgatatttgatagtcatgtaattgattactgttaattgttaaagtcattggaatgtgatagtttatgtttccaacaaaattattcacagtaaagtttctttagttgataaaaaaaaacttaagaattgggcttagccattagctagacgctcattcatcatcttgtctctgttagctatggattcattgactaacaatcaggtttttaattgctttgaaactaatttgctgactttgtgtaaatagtgcaacaatgttttgtatatccgtggtgtgccagaagatgaagagcttgaagacgatgcagagagacatcgaggaagaaagtgtgttacagagcttgtgtaagttgttgagccaagtgtcagtgtgtgccgccgggaacctccggcaacacagcagcatgtccttgctacgccaatacccgtacacatggcaataaactcaaatgtccttaaaagacttcaacactctctctatatataaatgctctcatcttgtgattattattcttcttttgttattatgatgtgtgatgtgtgatgtgtgatgtgtgatgtgtgatgtgtgagcttatttccagttttccattatgttgacattattcaactagatttctatcgattccaaaaaataagctgagtgttttattggttaccaagttttagacgtctggttttatttcaatgcatataatatatatatatatatatatagagagaaaataacatttttaacccttaaagtgtaactgggtagcactttaaacctgggaaaacggccaattcccccccgaactaagttgctttatcgtatttatacacagaactttgttgtgtgcgtataactacatgaacttacaataattttgaatttcctacacgaacaaaataaatcaggcttaatccatcaaactccctaacgctgttagatttccgttaacagaaagctgactaggatcctgcgtggaagaacaacgtaaaacgccgtcgtttcaatttttgaaaaaaataatttcgaatattggcgtaagtgggatttgaacccgagaggcccaaaccaatttaatgaaacgtcaccacttgtgccataatgactttcgttaaaaatccaaacagagatatataaaacacaaagtggagagagtcaagcttttgggttttgtgaggttgagaaagaattgcagaatatatagatatatataaatatgattgtttacaacgtaataattgtggtagtgtaattggtaattggttcgtacattgtcattaaagatctatggtttgaaccaccaaatgtcctatttttttagtttttaattttaaatgactctacgtggcattctagactccaacatggcatcttagtcagcattttttttttttttttgtcatcattagtcagcatttggcagcatttgttaacatttgttaacggtatattaacgccgtttaacgatttgaagggtttaaccagattttgatttttcatgtaggaaattcaaattttatctaagtttatgtagttataggcacaacttaaagttctgtgtataaatacgataaatcaacttagttcgggggaaattggccgttttccctagagaaagcagtacaaattccaacagactctcgtcttcttggatccttttcgatataaatgaattttctcggactaccaaatgtgaatgttaccataaacaagttagggcatgactggtttaaacgcagcggttgcggttgcggttgcgggaatttgcggaagcgggcggttgcggtttcaagtgttaccaaacgttttgaacgactggtttagcgtttgaaaatagatgcgtttgcgggagttttatgactggtaaaccatcgttgcgatagcagttaaataaaaaaatgacccaaataataaaaaatattacaaaaaataaaataaaaataccaatatattattatgataatattagaaaaattgaacatgcttaataattaaaaccataaataaagtactaaatagttattcaaaaataaaaattttttgtaataagatagtattttatactgggttaacaccaaaaattgcatcaagtaatgggataaactgtaaataacgttgaattcaatcaaaaaacaagtgattttctattcgagaaaataaatcgaaatattcaatcaaaaagcaaagcaatacataatgaaaagaaaaaaaagatgccaagaaaaatattcaaagagttacacatgaggtgatgaatggataaaatgatatatgatacttacgtttggaacttgattttcatcagtttgggtagaagacattgaaaaaataagattttagaatattgattagggtttatgatgagaacgtgatacaaagatgaaagatacatataggattaatatattttataataattataagtaaaggtttgttttttgtttttttaaaaaatccaaccgttaccgcccgcaaccgcaaccgcttgcgggaaggagcttttgaaattcagcgatttcgaacggtttaaagcggtatggagcagtttctatgattggtactaaccgctaacaaccgcaaccgaccgctagcaaccactaggagggtgctagcgggagaaccaatcaagcccttagaagaatcaaaccttgtccttgagtagcactacaaaaccagaacaaccccaccaccgagaacataactcaaacaaaaacaatgacgacaacattcagatacggtagagtaagaatatgattgagtaacccatccaaacatgaacatgggtagtcatagatcccattctaaaacatagacaatgctcaaagaacaaacataaacatgagtataacagatggttggagaaaaatcagcattaagtaaaacaatgagcaatgaaactttttcgtttagagtgcatagatgacaaaataaagtagctgcagaaaaaaaacatcagaaatgtattaaaagggtagatgaagttatgaacaaaacgacctacgatggatatgatatgatgattattactcttcttcatcatcatcatcttcttcatcatcatcatcatcttcttcttcttcatcatcttcatcttcatcagcttcgtcttgttgttcttctttttttagcttgcatatgcaaatttccatctttaacgtagaccaatcacccaagaaataatgaggaactaacatgaagcccttctccggaatttgaaaactcactttctgaatcctattcatctcccccgatttatacgtcatagtgtccctacctcccatcggcgtcctgtatgagagctcataggagaactccccaactcctgctgcagaaggtgctatacaattcgcaatcacatacactccttctcgctccttgaaacactgaactgcaactaatggaccatccctatattcctgaaggactaaaatcttatcactgatacgcagccatgcaccagtggaatttccacacccaaattcattccatgtgtccctgtggttagcgtagtagtgcctatagagatccttgcacacacccgagtagttgcagtttggtgcaggacaatagcacagagcaaatctgcattccttctcatggaccaactctttgccataagagaacttctctgtgcagccgtgtttggcgtttgggcatgggacaatgactgcttccacaactctctccattattctagatctatagttaccaatgggcaaagtgcaggaagggcatttgttcctcagtttagtacagcaagaagaacaagctatatgtccattgtcacactgagacacaaaactcacaaaacttagttacacggattacaaatcattgaaactataaccaaatacaaacttatacaaatctaaaacaatccattatgtttcttcaagcaatatattcacagaactcgttcgctgttcgctattattcgatcaaaacaaaaaaaaagtcttctttacgaatcatgataaccacatttcagtgactataatgaaattaaacatctttaaggcatgaatcttaagctaatcactgtaatcctaaaagtctcacacatacgcaaaatttttaccaaaatcatccaaaaaccctaaatcacaacagtttttcaaaactctgaatcaaatccgaagaaggaacaaagcgtgaagtaggaagaggtaagaaacaaacctgaaagataggaatcgtgagagcgtgacaacaaactggacaatcgagaagatctagctcgaacaacgtcccagatcgcgccaccgcatctcctccaccattttcgccaatagagggaactcgttgcctctttcggcggctagtcgaggcttctccggccatagctatcggattcgcttcgctggtatgtcaccagatgagtataaccctaaatcccttttctattttcccgccggaaggtttttctttcagaggtttgggtaaaagatttcagaatctgtggaggacattttttcttactcttatctttttttttcgtcaattttttttttaacgcatcaaaattatctttatataaagattctctttttaatatattggattttaattaaaaacaatttaacaaaagttaattgttaaacaattaaaacatagttaatatattttttggaaaaatttataagatttttttatataattgttttacttgatttctattatttctgtgctatattccatcagttaattattaaccatatcttataatcctcttgttgaagaaaaaaaaatccttctaatcttcttaatatttgacttttaatttaaataaattatccacttaatcatgacaaaattttcgaaaaataactttcataaatttaattaagttatgttttcatatgaatttttttgactttcttaacctaaaaaaaaaaatcaacattttctaaaaaaataaaaacacccaaaattttaatttgtacatgatgaaaattcaatcatttttttttgacagccaaaattctatcattttttcaaattcatatccaactttttgacacattattttctttatgttaataataacataaaaaaaaaaacacatatccatcaacttctttttctgctttttagttattatataggaatctatgtgtttgttgaatattaaaccacactatcaattcataaatataccactaatataccactaatctgtgcatagtttgcaaaaatacaattactgtttcctcttattaaaaaataactacttttttttgttggtcaacaatttaatttattccaagttaagaacattgttaacaaagaaatgaagggctaatttagccaaagaatccgactatacatggtagatctatcatcaacaaactagaaattaaaattaaatattgaaaaaactaagagagcaattctaatatcgtgttggacaaaaatcaaagaggattattattaaaaagaaacaaacattcttatttttttttttaaaggagaaagtttagctttcatagatgaaagaagctacaacaacaaccacaacaacaaaaaaaaaaacatcataaatacattactaggccacagatatatgaacctaataacctactacacgagatatgatgatatgataattactcctcttcttcatcacatcatcatcatcatcaacatcatcttcttatacttgatctcctaatcagcaaatgcaaattttcatcttcaacatagggccttcgtctagtaaacagaaaggaatcaacatgtatttatcccacggagtgtaggagctcacttcttgaatcttattcatctcctcggattcaaacgaaacaatgtcacatcccttccggtaggtgagatgataggagaattccccaactcctggagtagaaggtgctatacagttcacagtcacacacactccatgtgactccttgaaacattgaataacaaccaatggaccatcttcagattcttgaaggactacaaagtcaaaaatgttcattgtacggatgcgtacccatgcgtcattgtactgaccacacttgaacaatgagtaatcagtcttgtggttagcatggtaatgaccgtagagatccttatacaccccggtgtagttgcagtttgtttcagggcagtagcaaagagtgaagctgcattccctctcatgggctgaatttgattctttctcatatgggatcttctcggtgcagccatgtttggcgtttgggcattggataaaggctgcttctaaaattttttccaatattctagatcgatagataccaatgctcaaactgcagtaagggcatttgtgcttcactttaatacagcaagaagaacatgctatatgtccattgtcacactgagattaaaaaccacaaagttagtggttaatattatcaaagttttaaagagaaaataatcaatatcaagcaaatcactaacggcatcaaaagagagaagaaaaaaacgtagcaaatgtattttcaactagtataacttatcaaataagtctttgacaaaaaaaaaaataacttatctaataaaaaaaaaacaaataataagaaaaacaccttatcaactctatgtggcaatcaagattaaatttgagaaatcgaaaaaatcatcaaatgttttcttgaccaaaaggaaagtgtcctatacgaatcactgcacgatttggcacaaaatgtcgacttcgggtttgtacgtaattcaaaattatcaaaagttaaaagtatgttttagcacaggggaaacctaaatgtatgaattcaacacagtcaaaatattggggtatgtaaaagctgactttcccactaaatgaaacaaacttaatatttgcactacatgaatttcaagctaatggatgttatctaaagtctcatatcaacaaaatcatctttctataggactcgtcagtaccactaattgtttttccacaaaaaaaagttataaacaaggaagaagagagacctgatagataggagtcgtaagtttgttgcagcaaatgggacagtccaaaagatcaagctcgaacagtgtcactgatcgtgccacttcatttccactcgccgttcctccatcattctccatggagagaactctttgcctctttgggcggctgctcgatgcttctccagagaggaatagctcggtgttcgtgccgtttaccatctctatcgaaggataagagatgaggtgtgttaagacttcgctacttatagagatacagaagaaaagatgcttaaaaccctactttccttatacttcccgttgaacgttttttaaagtttggattagattttgagaattttctgtggatgacaaatttctaaggctattatcattaacttatttactggtagattttttatatgaaaatctagtctctttatttttttaatatgtttcctattttataaaaagaaaagtttaatatttacttttgtttctcttttttaatgtaaaaataattatgtatttcctgattttgtctataccaattaaatctagcaaaatctcattctaaattagatttatttctatttgaattgagtgagctggagacaattcataaataatattccgaatctgcccttactcaccaaactcgagaaccgaatagcaaagcgaactaacgaaatcggcttagcatatgtaaaagcaaatttttcctaaatctgaaaagcagtggagaccataggttggagaggagtggaaatatatagaacgataacatccgaaacagtgaaatctgctggtggaatcacacttgatccatcaagatggccggtaagaccatatccgccaagaagagcattgacttgtaaactccacaacaaaaagttggtgcttgtgagttttgaaatgttggacatgttaatattaaggttgatggcatctgtgttgattgcgttgtgtggtgtggttgatatggtagagaaaataatgaagactaatgagaaaattttaggttttaggagcgtgtctgataccatataagttgaatgtgataattcttattactaacagagagttgaatatacaattgagcaaatcatgtctatgattgatacaagttttgtattcatgagagaatgttttgttttagtattttgagcttttagttgttggataactccgattttttgtagagataattgacttgaaaacaatggatctgagtctacttagtttttcaatatttcgtttctaagtccataacaaagaaaattttagccccatttttttgccaaaaataaacttacgcactttttcattcgacacgatccggtttaatacatgagacatcaatatgttgtgcataaatgtccaaaaatcttaatagatttatgtatatatcttacatgttatcttcctcgtgtgccgccatcgtttagccatgatcgaacagagcaccacactgtagtagcaacaccttaaattcaacacaattagtgttgctattatgatgaagcttcctaagttccagtgataatttaccaaaaattgatgaaaatgcaatgacagttcgacgaaatccggtataaactcgacaaaaaccggtgaaaatacatatatatatttacaaatatatatatatatatatatgtgtgtgtttacatgcatacaaatgttaataatgattcatgtacatgtttacatgtatacaaatgttaataacgttctatacatgtatacatagatccaataacttaacactataattatttataatgctctatac

SEQ ID NO: 5389 - DNA, 5415 bp, Arabidopsis lyrata
  Intron number 1 from transcript 892601 (locus 892601) deri ved from phytozome v7.0 (chr-ID scaffold_6; pos 2555394 to 2560808)
agctgtgaaacgagtttccgagaaatcgcatcaagggatatcacaaaccaagaatcgagcttgaagaagaagaagaagattctgttttattcatcgtaaaatatcaatgtacaagtatagctgtatttatacaagtatctcactgtaactaactaattaactcaggtaaattaaacttaaccatctgttaactatcatgtagtcaacgtcagctctgtttagtcaactctataactctgatacgcccccctcaagtcttaacctggattttgaggaaagtaaagacttgatatagacattctggagagtaaagagtggaactgtgatggaccaagagccttagtgagtatatctgccagttgattatgtgttgaaacatgtagagcaatgagaaagcctcgcttgatctgatcccgtgtagtatggcaatctatctctatgtgtttcgttcgttcgtggaagaccggattgtaagcaatgtataaggcggatttgttatcacaataaagctttgcaggagaagaacgagttacctgcaaatccttaagtaattgatcaatccaaatcaactcacaggtagcatgagccatagctctatattctgactcagtgctgcttctactagccacttcttgtttctttgatctccaggatataagagagtgacctaagaagacacaaataccagaaacacttcgtcttgaatctggacaagctgcccaatccgcgtctgcaaaggcactgagactcagatcagaatcagatgggaaaaataagccctgtcctggattagatttcaagtatctgacaactctctgagctgctgttagatgaacaccagtaggacaagagataaactggctcagtttgtgaacagcaaacgtaatatcaggcctagtaatcgtgagatatagaagcttccctacaagctctctatagacagtaggattggccaaaagttcaccatcttctttactgagttgcacaacaagatccattggaacagcacatggtttgcagcctaagaaaccagctccttcaatcaagtcaagtgcatacttccgctgacatacagagatccctttcttattccttgcaacttccaagccaagaaaaaacttcatagggccaagatctttgatcatgaattctctgtgtaagagatctttaaattccttctcagcttctagattgttactagcaataacaatatcatcaacgtataccaaaactgctagaaacactgatcctgtctttctggtgaataaagtatgatcaccagcgcattgtttgaatccagcattcattataacagtagataagcgatgataccattgacgtgaagcttgtttgagtccatacaaggacttatggagtttgcagactgcattaggaggtagaggctgaccatcaggtggagtatatccctgtggtaagctcatatatatctcttcatctaattctccatgtagaaaggcattggatacatccatttgggtgagagtccagttcttaatagcagcaacacctaaaagaagcttcactgttgtcagctttgctacaggggaaaaagtatcaaaataatccacaccttcttcttgtgtataccccttagcaactaagcgagctttgtacctttccacagtaccatctgcattatatttgatcgtaaagacccatttacatccaacaacattatgaccaggaggaagggaaacaacagaccaggtcttatgtccctcaagagcagtcagctccgaattacatgcatttttccaatattcagatgccatggcttgtttgaaagtatgtggttcagtttccagagtaatagcaagaatgaattgttggaattcaggagcaagaagatcataggataagactgaggacaatggataacgggttgatggtataggagttgggatagtgttttgggttagataacaatggtactgggatagatatgagggtgctttagcattgcgtttaggtctaacagggtccaaagatggtaaatcagcaagatcaacagtaggtgatgatattccggtgttagagtgtgaattatgagatgatgatgatgaatgagtcgatgatgaagatgatgtatgtacaggtgaatttaatgatgatgctggagaagtatgagatgatgatggggcattctgaataggtgatgatgatgttgatggaggatatgactgtggtatagtatgaaaatatgatgatgcaggacaatcagcaacaggcaatggtagaatagtatgaggaaaaatatcatgttgtaaatcttgtaaatcaacaaaaggaaaaatattttcatgaaacacaacatttttggaaatgtaaacttgattagtatctaagtctaaaaccttaaaaccttttacaccagatggataacctaagaaaacagagggttttgctctaggagaaaactttgtgcgatgtttaggtaatgtagaaacataacataaagaaccaaaaactcgaagcatagaatattcaggaactttattcattagcttttcataaggagatttgttatcaagtaaaggagatggggttctattaataagaaaaactgcagtctgaatacattcaccccaataagcaacaggaacatgcgattgaaacattaaagatcttgcaacattcagtaaatgctgatgtttgcgttctacaacagagttctgttgcggtgtatctacacaagaaaagtaatgaaccatgcctctagatttgattaaagaagtaaatgacaattccggagcattatctgatctaatggctttaacatgcttaccaaattgtgtttctatcaattttaaaaattctggaaaaacagtaagaacagaacttttcattttcaaaagatatatccatgttactcttgtgcaatcatcaacaatagtcaagaaatatctatatccttcattagtttcatgagaaaagggaccccaaacatcaaggtgaatcaaatcaaaaggttctaatgcaagattattattaaactcaaatggtaatcgtttttgttttgccaaaggacaaacattacaatgaaatgatgaatgtaaagaactcttagaaatagaaagcttttctgaaagattttgaagttttgctgcagaaggatgtcctaggcgttgatgccagagatttccatcagcagtgatagatgcaacgaaatgatcagagacaatagatgcatgtaaatcagcttgagtcaggacataaagattctgaagtatactacactttccaagcatcaagccctgagtaaggtcctgaatgacacaagaatcagagtaaaaatgagcagaacatgaacttgttttcactaatgagctaacactaatcaagttaaaattgaatgatggtatatgcaaaacattatagagaatcaatgcagatgtaagatgaatggtgccagtgtgtgcaataggtactctaacaccatttggtaatgatactgtctgatcaattgcgggtttaaaatctttgaacaatgttagatcagaacacacgtgactggttgcaccactatctataatccaagcaccaacaggaataaaagagtatagagaagaaagacaatggttttgaaaggttaaaattttgttttggaattgtaaattggttgatggaaatggaatcgtacctgaatcagattcacaagccataacaccattttctgttatagtagccaaattcgaagttgactgttctggaacatgaagagactgaagttgtgccactatctgttgcacctgatccgatgtcaaagaactcaaatcaatattgttgtaagtaacctgagctgttgtgggaggagcttcaatcatgacattagcaatagcattatccttttgaggaaaagatggcctccattgttgagcattgacttggaatggcctctgcatttgctgaaagtttcctttaggctgaaactgttgagtattgacctgtttagctggataagtattgtactgttgagctgagtattgttgtggtctctggccatatagctgagtagcctgagacttaaaaccagggatataaccaggaggatagccgtgtatcttataacacttgttaaccatatgtcctgtcatcccacagtgagtgcaaacaaccttcggtttacctttataattggcataagcaatcatttgatccaactctgatgatcctgaagtctggaaaacaacattaccagcttgacttacaggattgatagatttctgtctttcatcttgaactactatgttgaaagctgcttctagagatggcattggcttctgcatcaagatatgacgcctggtaggttcataagcttcattcaatcccattagaaatttagtcacacgactcctttgttgcaatttttcccataattgtgcagcattacactcacaatgtccacatgtacacactggtagctcaacataattcttatagttctcccacaaagtaatcaactcagtatagtatgcattaacatcacgagatccttgctgtattgtgcataacttttgttcaatttcatagatccttgtagcatcatcctgattaaatctagccatcaaactcttccaaattccttcagcagtcgatataaacaaaagactctgactaatattcttggctacagagttgattaaccaagtcgctacaagatcattacatctagaccacgcaccagcattaggatcattatcagaaggtttcggaatcgtaccgtccacaaaaccaagcttatttcgcacattgagtgccatacgcacagatcggcgccaagaatgaaaatctacaccaccggtgagacgatcggagactaattgcagtccggcatgatcactcttatgaagatagtaaggattatcaccttgttcattagaaaaacgaatcggagcagaaacatccggaggatttgaagaaaaactatgcgatcccatatccaatgtggaaatcgggaagattcaaagaaattgtgatgaaaacgaaacaagaatcaatcacaatcgaggtcaatcaaagagaaacgaaaagaatcagaagaagaaatgaaacagaaacaagataatcgcaaatcgcaagaagaatgttgacgatgaatagatccagagaagaaacgcttattttcacggaagataaagaatgctctgataccatatcacaaaccaagaatcgagcttgaagaagaagaagaagattctgttttattcatcgtaaaatatcaatgtacaagtatagctgtatttatacaagtatctcactgtaactaactaattaactcaggtaaattaaacttaaccatctgttaactatcatgtagtcaacgtcagctctgtttagtcaactctataactctgataagggaagcaagagtttatagccgagatcacaacgatc

SEQ ID NO: 5390 - DNA, 18816 bp, Arabidopsis lyrata
  Intron number 12 from transcript 493918 (locus 493918) der ived from phytozome v7.0 (chr-ID scaffold_7; pos 22077727 to 22096542 reverse strand)
caaacagagggttaagagacattgatattgtgtaagtgtaagtaaatgttgtgtgaccagaattagattgaaatgtcgtctgtttttaactctgtaatgataaatttatacagattccagtgaatatgaaactgtttcgatgatctagtttttgactcggctatttcttgatgatgtgttgttcctcagaaacagcagaaccgtttcttgtgtaatagaaattagcgaccttttagtttttctttcagtttagacctcatattttctaaaacataacgaacaaaggctgatgtttttgtttcttacaaattagtcctcaaattttgataattgcaattagaaatgttaccgtaggttcatcttgagatttattgttattgtcacggcgttgtgaggtggcacgaccacttgcgtttgtctttttgtcgtctcgagttttagcgaccgtaaatccttcggtgaaactggatcgttcacatcccattttccaaattttggtaatggtcgatcttgttgttgacgttgttgattattatgaaaaaatcagattattcgaaacaaaaaaattgttgatttcaattaagttttaatgaaaacacccatgaaaatgctagtttgtaccaaatttgtgaaacaaatgagaaatgagaaagatcctattgatcaaacaaacgtttaggagcaatgggaacacttctggcatttcacctgaaaaataaaatattagagaaagttgacgccatttaatcatatcatagagattttctaccgtagctaaaatatatatacttcaacaagagattctaaaaacaaagcaactttacctgactacggaggagaccaccaaaatttatatcatgctatttttaaaagaaccaaacatcatatatttgttccacacatgattcacaatctttttctgcaaaatccgactcttcacaataacgttatataactcttttgcaaaaaataaagcccccttatatatcatcttcaagtctgatcaggtttaacacataagattcacaatcagatataacgcggtggtgatagaggagattaagaaaatggatagagaatgggttgctgtttgcaaaatgagcaacggagatctggtggcggataatggatacgcttacgtctctatagcagttcaatacatgcttgttggtgtatgtgatacgagaagtgatgggaggttcagataagtctctttaccaatttcgtcattgcagagatggtggaggcaaatgacataaatgatgcaaaaagtgaggatgaagaagaaaaagacacaaaagatgatgaaaaggtaaactgcattcgccgtgtagattcagtacctgagttaattgaaaagggtttagtatagttaatggattttagttgatttagaaatataaagtaaaaatcatgtgttgttagatctttgaatttaaaatctttttcgaaatcacgtgttatccattcaatgattttctaagtactagttaaaattatgtgttattcgtttattttatagccgaaattagattccgatcgaagtatcataatgactagactaagttgttaccaattattgtcttccataacgagtttgaaaactacagaaagtaaatcttttaacaaaaaccccgcatgcaaccattaagctaccatattctctatcaacatctttgcagcctctttaatgtcacttgcttattgtagttcagaagcagtttcaaagaatcatggtccctttcaactataaacacatctcgaactcggttagttggcctgctcaacaaatccgtcaaagacgctttcacggagctatggtttactcatagcactcttctctcgacacactttgcaaacccctttacgttcagaactgtctcagtgatctacttcatgcaatggtctttctcaaccttcctcgaaaaaatctgagtagcttcttttatatctccttgagattcttcatcgtcatttctattttgcttcccaatgacatatcagaatcagcgaactcagatatctgaaatgatttgaattagcaataaaatttactgtctaatattttgttaaaatcgttatttgaaataaaattcatttgttcatgtaaaaaaaaaaatagtttccatatgtagagagaagatgtgttgacatttggggttcttcacactctttgaggtcaccaccttgttctctctttactctcttgttcttgttttgtttctcttcataaaacacaaatgtttggtatgtaagagagaagagagaactcttttaaagtgtctacattttgttttttggatcaaaggatgatattacacaacaccacacacacactcttatactagctttacttctacttactacacacacttgcaccatggttctacttggactctaagaccatacttctaggcattatcaccctaggactataaccaaacttacaagcaaggaactactaaaccttacacaacaactccactctactttagctaaagctataagcaaactccaacaactaccttagttggacaagctaacaacaacactaacacatgtttgggcctaactaaacaattagcccaatcccttttattattataaaaaacaacaagcccaacttcttcttccatgttgacttgttcatacttgttgtcgttgacctcttttgttgcaggtttaatcaaggactcaattcccaacaagatgattaaaaatgaaatcaccctttttacaaaataaaaacgactttttagataatgttttttttttttttttttgcattagattagatgaggaaagaaggcccaaatgtttacatttaactatttaagctcactaaactaattaaaccacaagcgatgatggatacccaaagcccaagtatacagaagcccaaagtgagagtgatggatattttcgagagcagccgaaatcggaaagacgagtgggtttccagagaagcaccaccgttgaagaatcctagtagcggattaactaacggctctgaaggaagaaatcctgttacggattgttaggtcaagtcggctaagtgatcatctccgatgagatccacggttgttgttgcgttccatccaaatctcatataagtgccgtgagagaatcctatcacgggccatcgattaagtataaacccaccaaccaataaacaagcccagcccaaatcagattataaataaatagattagggttgtttcatttataacttgttgcttgctctcaaaggacgactcttcccggaaaaattacataaacccttttcaatcttctacatggccagttctagcaatttattgggtttgttttccgttggctatgagctcttttctaatgttttacttgcctgaagaggtttttgatgctcttcttttaggtaagcgaaacccggaagatgatttggagaccaagcaacccattctcaagaaacataaggagaagaaggtaaccttaagatggtcggattcctcttcgtttttgacaacaattttctttacactatcttcttctaatggctactcatgtatgtaacagaaggagacaaccaaaggatttgctgatagtctccagcacaagtctgatcaggtttaatatttgtaaattttaatatattgtacaagtttatatatgttcaattaagcatcttgttttccaaaatctgttccaatggctactcacttagcaggaggagacagtggaaggacttaatgacactcccgattttgttgaggtacctacctcttcttattatctccaaaatacatgttgtaagaccacgatttctacgacatggaaaatctgaataattgcaatagataatgataaaactagaaataaaatacaacaaccgataccaatatttgttaaacaaagaacggtttgtgcggaggcgagacactctttccttaattctttaattgcccgtagtgtgacggcttgatgcaatcagaatcccagaatacaatcgcaccatcttctgatttgcaacactcaaaatcagaagcctaacgaactctagtaatgtgtgtactctcagactcgataactagagaaaataagaagagggagattgtggtatttttgatccatatgtccatgagataaaaatggagagatgaagccttggttttatagtccaagctcttaacactataatggagcaataaaggtgagaatgttattgttatgagaatgaattctcaatgccattgactccatcacctttaattgttgtgaattaatttttgttgttacacaatttataattcacattaaaggagataattgttgacttaatcaacttacacatttgggtaattaacaattatcatttgggttataagcccatttcccaaatctcaaaatcccaaacccggtccggctcgacacgatacaacacggctcggcacacatgcctggtttggatttctcctttaacttccgaagtgcgacatttgatcctttaatcaaatttcaagctatccaagctagccacttcggacctccatttctcattcaaacgaacttcaattttgaaagttacccgaaaaagtagtccggcgcaactaatcaaaaaaattccaacacatgtcaggctcagaacaaaacgcaaatgttgccataacacaaactacttggttgttaaattcaggaagctgccgtaataacgaatacgctctttatggcccatatccctcacaaagctaaaatatcagatatcgtcgatttctttaaagatgttggagaagttgttcatgttcgacttgctataaaacgagatggtgggcgtactggctctggctttgttgaatttgcttctgccaatgaaacaaaaaaggtgagactagttttttttttttttggctaatgatgacactagttatcatttgaaaagttgtgtatatatagttatatgtgtatacgtatccaagagtactattgctgattaaatcttctttactctaggcactggaaaagaagaatggtgaatatttgctccatcgcaagataattctcaatgttgctaagatagcttcttcattgcctcttcctaagtaaaatgattttccatgtttggtaacttattgctagagtttttgatacaatatcacagaagactaacgcttttatttttgattaattaggcattgcatagatcacaaggtttggtaagggattttaactatttcccctctccatttttgttatccagaccacctcggggtgaagtttcactagggttttccattttacaggtacgaagactgccttcgacgaggagaagatgagacacctcccgatttcgctgaggtacctactgccctcattatcttcaaaatatgaagaaacgctcatcttttaatgatcaaaagattacttatactctggggctgaatcttttgccactttttcttctttatgcaatttcagtcattttctctccttaacagtcatgctaacacacttggctgttaaatgcaggaagttctctttgttgccaatctctctccccaaactaagatattagatatgtaagtagcatcttttttaactcccacttttcttctctgagcaagttttccatatcactgatattttatcctccacttttacagcttcgatttctgcaaagatgttggagaagttgtcagtgttcgacttattgcaaaccatgagggcaagcatgtgggctgtgcctttgttgagtttctttctgctaacgaagcaaataaggtgagactggttttgtagtcatgatgaaaaaaaaaaaatgtattttacttgaaaagtagcgtatacaaacttatgatgaagaacgtacaactagttatttgaaagtaggatagctgattaaatctttttaatactgtaggtgctggaaaagaagaatggtgaatatttgcacaatcataagatctttttgatgaaaggacatggtgaaactcccgattttgctgaggtacctcttcttattatcctcacaatatgtcaggctcagaagaaacgcttaatagcagaattcttatgttgggggtgaatctttagatgaggctactttttgtttttttttttatgcaactttaagtccttctcttctttgcgtcttgctaactcacttggcttttaaactcaggctgttgccacaagaaaaacaaagacgctctttgttgcccatcttgctccccaaactataatatcagatatgtaagtagcaccttaagatttcctctttcgttcttggagcaagtttctcatgactaatattttatcctccatttttttatagcatcaatttcttcaaagatgttggacaagttgttcatgttcgacttattgtcaaccacaatggcaagcatgtgggctggggatttgttgagtttgcttctaatgacgaagcagagaaggtgagagtagtttttatagtaatgacgtagagtattttaagccgtcatttgaaaagtaatgtatgaaaaatatacaagtcgcagttatttgattaaatcttttatactgtaggcgctggagaagaagaacggtgaatatttgcaggatggcaagatttttcttgaagcggctaagatagctccattccctccacccaagtaaattaatttttcatgttatggagatttgtttctgtcaacttattgccagagttttcataccatcacaggacactaacactattatatttgtttaactaggtggtgcatagatcacaaggtttggtaaggaattttaactatttgcatcttgagttttgttatcaagagcacattgggtgaagtttttggtatacatgtagagatcacaagggttgtttaatgttccaggtacgaagactaccttcgacaagaaagccttcagatagatgaagatggggcagtggaaggacttgctgaaactccctatttcgttgaggtacgtgttcatattatcttcaaaatatgtcaggctcagaggaaatgctcaagtgtttgataacaaaactgtttccacaaagccaaaagataacttaattctggggacgaatctactttttgttgttatgcaatttaagtcctttcctccttaaagccatgctaacacacttggctgctaaattcaggaagcaagaaaaaagacactctttgttgccaatctccctcctcaaactaatataccaaagatgtaagaagcacctttagtttcctctttcgttcttggagcaagtttttcattgactgatattttatcctctccatgtttacagcatgtatttcttcaaagatgttggagaagttgttcgtgttcgacttattgttgaccataggggtaagcatgtgggctgtggctattttgagtttgcttctgctaatgaagcagagaaggtgggtagtttttatggcaatgatgaaaaatagtgtattattcttatatgatgaaactttttgatgaaatctttttatactgtaggctctggaacagaagaatggtaaaagtttgcgctatcatcatatctttcttgacgtggctgagatagctccataccctctccaacccaagtaaaatgattttccatgttatggggatttgtttctctctatcttattgctgtagttttgatgtcataacagaagagtaacttcatcattttttgttaattaggtacaaccttgtagagaagctttggtaagggatttttaactactgttttgcctttagagttttgttatcaaaagcaaattgggtgaagtttttcgtataaatggagagatcacaagggtttttgatatattccaggtacgaagacaaccttctacgagaaccgaatctgaagcaacagaaggaaaaatccgacggattctgcggtaagaagactaccttctcttccagggacgactgctagaagatgaagctctttggtgtttttaacttgtgattcaatgtaacttgtttatattactggggtttttcttatgttttagtctgaacgtacgttaaaatatgcttaattttgaatggtttggtgtcgaatcacttctctctgccactattacctaagtaagagagccgtataccatttgaactgatttggtttacaaaattgaatgttcctttacgttcaatcatggagtgtttattaccatcaaattccttctttgtggagttctcaccgtcttttggttctaagcattgtgaagactctctgcctcagatcagggtcttgtctccgatttcaagatttctccgatctaggttttctttgggaagcaaagcaaagcaaagttatccaacctatcttagatcaaggcacagcatgcaaggatcaattgttaataagaagactaggctggtggtgtcacatggcagtttcagactcttatcttccaacctttcaatgtgatgtgtagacatttcccaacggctttggcagccacagcttgggcagttagagtagctctcctccacgcgatggagaaaacgaaatgggcatttagagtatctctcctccacgcgatggagaaaacgaaactagacctccttcctcgagatgattcttgaacagcggtctttctacggaattccaatggcttggctcgatcaatgtgctccattgtgttctcagtgttatacagcttagatagattccatttcgtcattcgcgggtttcattattatcatggtttgttgtaacttggagttaagttttcatctcctttgattcaagctaatgaaactatcggtttgaacaaacaaaacaaaaaggcaatgacatctgcaataacactgaggttgtgtgtcagaggtcttaaaaggtaagcaagaacacgagcgagagctataacacgatgactatgtgtagaatcgcaagaggtatcattcggttggggttatgttgaacccgatgatacccggaatgtagcaaaaataactgaatccgacagcaaacttaaacatcaaattcactaaacttgacatccaaagtacttgaaactgtcacaataaacaagttcaaaggagagagaagacaaatgcaagttccataaaagtgtcatcaaacagcaagggtcaaagttcaaacatagatagaaggaaagcataggaaacagtttggttttgatacttggagtctcggatgatggcttaggtattatacttggatctctcataactttgaataccttgcaagttgaattcaggttcaaagtctacaagaaaaatgaaagagtataatgttaagaaaaagaaagaaaaaaatgataaagcataatgtaaaagagagttcagaggaaagaaataacctctcactaagcaggtaaaccgaggtatcttctgttatatgcctgacgaagacggtccaacctagtctgaaggtggagatctctgtattggagtcccatagcgttatcttggccagcaccaaaaacatcaatcctaatggcaagagcacatttagcagctaatgttcgcgagaactttctcttgtaaggctcaggtgctagatcaaccagaggtgagcggtagataagaccatccctgggtgtggcttcgttggctccgagtgtctcaagtgtgctcgcaggcatcttggagagtttcgataaaccacctccaagataaatcaggcgaggagcaattggcactccaactagagcagtcagattgggagcaaaagcttgcatatggtcattgaggctatccaaaagagcagttgtggtggtatgaagaggtagaaccacatctcgacagaagttctggatcagcagcatctcgagttgactgaaaggtggtgcatgtgaatgcacagctgctgccttcaggctcagctcatcatcaagcgataggaactacagagaaaggagtagtatataagatcaaaaatcagggcgttttttgttaacggaagtctctacacagttgaaaatatgaaagttacctcggagaagtctagatttgcagcgttaagcttgtctcccatcaacagaacagatttgacatatgggatttggggttgtacgatactagagagctcgggaaaatgaggtccataccattctctaagcctcatcgtataggtattcagttctttgacaagagcatcgtaaagaccaacagttgtgcgaataaaggcatccacctgacaaaaactagatagttaggagatgcaagagaagcaactacaaaaaaaacacaaacacaggatgagttaaatgctaaagataccatgtcaggttcaagaccaatccccattgcttgtctagccagcctgtgagacaaggccctgtccctagccatacgaggagggtcacccacgagtgctgaggactgacttctaacacctctaagcagctcatgtacagctatgttgtgaagacaaggaataggctggaggtgacaaatttcatatgagagacaaacactacccaatacaacagacacgacagggattaaatgttggaagtgaataagaaacaaaccagatcagagctgatcctgtctccaaggtcagggtcacccacgcctagggtttcaccaacaacttgacagtgagcaagtaagaacccacgaagtgcagggctcataagactcattttgatggattcgagctctacgaaagcatgaatttggctgggaaactcataaaaagccactagaaccactgcttcgtttgctgcttccgcggactgaaaatgggtagccaaagcatgtacattatcaaccaaaatcgcgtcgtcaaccaccctcagaagggcataaccccagaacgtttcgtacagcaaaagcatcgcaaacccagagagagagagagcgaagagaaaaaaagagatgaatcgaggaagaagacgagagaaaggggttttgccagagaaaggggtttaacatttgatgaaaccggttataaccgggttttagagaaattggagattgcaaataaagaagatcggttctgtgatattctggtccggttcggatttttcaggtttagaaaactaggatccgttcggatattttaaaactttgagttcggatcgggtatttcgggtttactcaaaatatccatatattagaaattttgtatccgattctatgcaaagtattgaaaaatactcaaaaaatctattaaacccaagtattttatacccgaatctagccaaaaatagctaaaacacccgaaaatatcttaacatccgaatcatttaggcacttaggttattacaagtataatatattataactactagattttaacccgcgagatgatttatttttttaagttagtatatattaaagtttaaaaattgtatctacttataaaatatttatatttttatagtttataattgttattaagaaacggtataccatgagtctacgggacaattgttaagaaactgatgatttaacccgtattaaagcggcattttaacgatattaaatccgttccgaaatataacatgtccgtaatttcttaacccgtcccgtgatttgttttctaaaagtagtgattttaaaatttaatgattatttattatatataaatgtttacaaattgtatcattctctaagatatttatattttattaaactaaggatttaatctgtattaaagcagcatgttaatgatattttaaaattttataaatatttattcaaacttgtccgccatataaccccgttccgaaatataacccgtcatgtaatttcttaacccgtctcatgatttgttttctaaaagtagtaattttcaaaatttaataattatttattatatataaaagtttgaaaattgcatcattctctaagatatttatattttatagtttacaattgctattaagtaacattataccacgagacaatttttggttttatacaatcttttctaaatgagagtgatttgatatgtctaatattggtggtattaaaaaagggaaattgttaaaaataccccttttggtgtgccccttttcaaaaatgccccttttagatgttcattttcaaaaatgcccctttttaaatctgaaattttataaaattttattaggtttataaggtacttatggattgtaactactacttgaaaactcgatccaagtatttataaggttttataaggtgtttttaaaggttttacaagttattttaaaggatttttaaggttttacaagatattttaaaggtttttaaaggtatttaaaatgcatttataaggtatttataaaatatttataagattttagatacatagaaatgtagtttgtgtatgttttaataatattacatacatatttgggtaaatcttatatttttaagaacattttttataaggttttaaaaaaggggtattttgaaaagtggcattgaaaaagtggcattgaaaaaaattaaggatttaatccgtattgaagcgtcggattaatgccccatttggctgtccatttttaaaaatacccttttttatgtacaaaatgactaaattactttttttaataaaaagtatcacaaatatataaggaaaacatgagaatgtgcacacatcaaaattacaaatttgattttgtaaaaacttgtaaaacctttaaaataccttgtaaaattttcccgccaaaatgtttcccgccaaaaaaaattttttgcgggaaaagtgattctgcaatttttttggcgttaaatttttggcggggaaatttacaagtattttaaaggttttttacagggtatttataaggttttacaatgtattttaaaaggttttacaacgtatttataagatattataagattttacaagctattttataaggttttacaagttataaagttttacaagttttttataaggttttacaagttataaataccttataaaaccttataagtaccttgtaaaaccttttaaaatacattgtaaaactttataaaacacttgtaaatactctgtaaaaacctttaaaataccttgtaaatttttcccgccaaaaattttcccgccaaaaaatttgcggaatcacttttcccgcaaaaattttttggtgggaaaaatttttacggaaaaaatttacaaggtattttaaaggtttttacaagtgttttggcgggaaaattgcgggatcacttttcccgccaaaaaatattttgtattttgtggacctaattttgtttcaaataagggtaaaatggtcattaaaaattaaaagagggcaaacttaaaaatggaccctcaaagggggcatttttgaaaagggtattgaaaaggggcatttttaacaatttctttatataaatatttgtttcaaaaaatcaaataagagtatttatacttcataactttttgatctattaagtattgatgatattttttaaacaaaaaggaatatattactcaaatatgaatttttgacccgttaaatttgttctttcatacattgaataatttatattcgtttttaaaaattcaaatcttggtatatgcggaaaaaaaattactttttttttattatatagatgatataatgattttttttctagaaatagaatcatataaagatgagaggtgaagtataatgattaataacaaattaatatggtaagttagatatcaaatcttatatgttcattttgattggtcattctttttaaaaaaaaattaattatagattttttgtttttataattaaattaaattaattaaattgcataaaatagtatttgacttgtttatctttaataagttgaattaatttactctataaaattttatttctaatggcattccaatgtaattacttacaaaaagtaaggttagttctaaaatgtactccccaaataatagtataggatgatgaacaaagtaaacttccttacgaccatgaaaatataatttcgccatttgctagatgatacactatcatgtatgtaatatctaattatttcctagattgaaacactaatcgaaaatcaaagttggcaaatgaatcttttgtatgcatactactaaaaagaatataaaatagctctttaatatgaactctatctcatatagaaaactaaagttggtagtacacaaattaaaactaaagttggtagtagcgtgggatagcccctagtactactaaaaagaatataaaataattgaaacgaagtgcacttacttaaataatatcatttgtcaaatatatataaccggaggtagcccggattctcctatagtattttttaaaacagaggttctaggagactaaaaaagtgattttttttttaaattgtacttttaacggctcttctttaattataaaatagtctagaatgttgacaaaaaaataataaaattacccaaaaaaaagatttaaatgtaacacaaacaaaaaaaaaaaatccaacaatttggtttttgcccaagagctctaatatatgttgggtcgggacagtcaccactcccatgctaaaatctgatttgaattagcaataaaatatgttattatcttgttagaatcgatatttcaagtacagttgatttgtttatgtaaaaaaaaaaaaaacacacacacacacacacacaatttaggcatatgtaaagagaagatgaatgaaaaatgaaatcaaaatcgactaattatttaagtgaacatggaaaaaaatcacaaaagtatgtatcttattatataaaggagttaggcgagagaagcaaaaaacatatagtcaatggtgcacataataaacccactaaccaataaaagcccagcctagcccaaacaagattattgttttatgaataccttctttctacctctagggttattatttgtataactttagtcattgctgctctcaactcttgccggaaaacaaaatcggcgctgttttcaccatctccatctccatggccagttctagcaaggaagttaatttatttggtttgttttctgtggctctgagctcctatctaatgttttttatacttggctgttgattttaatatatttttttcttttgctgctcttcttttaggtaagagaaatccggacgatgatgatttggagaccaaaccggttctcaagaaacataaggaggagaaggtaaccttaagatggtcggatcactcttcttctttgagaagaatcttctttacacttgtctttttaatacctactactcgtgtatgtatgtaacaggagaagacaacggaaggacttgctgatagtctccagcacaagtctgatcaagctaatttaatctcactgaaggtttaatattgtacaagttttttattatgttcaattaagcatcttgttctccaaaatgtgttccaatggctactcgcttaacaggaggaggaaacagtggaaggacttgatgacactcccgattttgttgaggtacctacaacctcttcttatgcaattttttaagcccttttcttcatgctaacacaaactactacttggctgttaaattcaggaagctgccgtaataaaaaatacgctctttatggcccatatccctcacaaagctaaaatatcagatatcgtctctttcttcaaagatgttggagaagttgttaatgttcgacttgctataaaacgagatggtgggcgtactggctctggctttgttgagtttgcttctgctaatgaaacaaaaaaggtgagactagttttctttttttttttgctaatgatgacacaagtgtttaagtaatcatttgaaaagtagtgtatagttatatgtttaaacatatataaggttgttatctgaaagtagtattggtgattaaattttttttactctaggcactggaaaagaagaatggtgaatatttgctccatcgcaagataattcttaatgtggctaagatagcttcttcattgcctctacctaagtaagatgattttccatgtttggtaacttattgctagagttttgataccattacacaagactaacacttttatttttgattaattaggcattgcatagatcataaggtttggtaagggattttaactatttgcctcttgagttttgttatctagaacacattgggtgaagtttttggtatacatgtagagatcactagggtttttcatattccaggtatgaagactgccttcgacgagaaagccgcctgatagaagaagatgagacacctcccgattttgctgaggtatgaagaaacacttagcatttaataacagaactgttgccacaaagtcgaaagatcgatgtgacttattttggggatgaatcttactacctttttcatgttaatgcaacctaagtcattttctccttagagtcatgctaacacacttggctgttaaatgcaggaagtactctttgttgccaatctctctccccaaactaaaatattagatatgtaagtagcaccacttttcttctcggagcaagttttccatcactgatattattttatcctccacttttacagcttcgatttctgcaaagatgttggagaagttgttagtgttgacttattgcaaaccatgagggcaagcatttgggctatgcctttgttgagtttctttctgctaacgaagcaaagaaagtgagagtagttttatagtaatgatgaaaaaagtatttaagtagtcatttgaaaagtagtgtatacaaacttatgatgaaagatatacaagtagttatttgaaagtatgatagctgactaaatcttttatacggtaggtgctgaaaaagaagaatggtgaatatttgcacgatcataagatttttttgatgaaaggacatggcgaaactcccgatgttgctgaggtacatgttcttattgtggggatgaatccttagatgaggctactttttgtttttatgcaacttaagttcttttattcttagcgtcgtgctaacacacttggctgttaaattcaggcagtttccataagaaaaacaaagacactctttgttgcccatcttactccccaaactctaatatcagatatgtaagtacaacaccttaaacttcctctttcgttcttggagaaggttttttttttgcaggatggcaagatttttcttgaagcggctagatagctccattccctccacccaagtaaattaattttccatgttatggagatttgtttctcttaacttattgctagagttttcatacaatcacagaagactaacacttatttttgttaattaggtggtgcatagatcacaagatttggtaaggaatttaactatttgcatcttgagtttgttatcaagagcacattggatgaagtttttggtatacatggagagatcacaagggtttttgatgttccaggtacgaagactaccttcgacaagaagatgaggcagtggaaggacttgttgaaactccctattttgttgaggtacatgttcttattatcttcaaaatatgtcaggctcagaagaaacacttagtgtttaataacaaaactgctgccacaaagccgaaagataactttgttgttatgcaatttaagtcctttccttcttaaagccatgctaacacacttgtcggctaaattcaggaagcaagaaaaaagacgctctttgttgccaatctcccttctaaaactaatataccaaagatgtaagtagcacctttaatttcctctttcgttcttggagcaagtttttcatgattcatattatatcctccatgtttacagcatgtatttcttcaaagatgttggagaagttgtccgtgttcgacttattgtagaccacaagggtaagcatgtgggctgtggcttttttgagtttgcttctgctaatgaagcagagaaggttagtagtttttatagtaatgatgaaatgtatttaagtagtcattatattcgatttttttgactaaatcttttatactgtaggcactggaagagaagaatggtaaaagtttgcggtatcataagatttatcttgacttggctgagatagctccataccctctccgaccaaagtaaattgattttccatatggagatttgtttctctaacttattgctatagtttttgatgtcataacagaatgaagattaacgttgttatttctgttaattaggtacaaccttgcaaagaagctttggtaagggatttttaactactacttttgtctattgagttttgttatcaagagcacattgggtgaagtttttcgtatacatgggaagatcacaaggggttttgatatattccaggtacgaagacaaccttttacgagaaccgaatctgaagcaacagcaggaaaaatccgacggattctgcggtaagaagattaccttctcttccaacgacgactgatagaagatgaagctctttggtgtttttaaacttgtcatacaatttcacttcgtttatattatattacttcggtttttcttatgttctagctagtagttaagtttttgtctgaacgtacgttaaaattatacttgattttgagtggtttggtgttgaatcactatctgcattcattattacctaagtaagaactgtatacgatttgaactgatttggttgacaaaaccataatttcccgagggacacataaccgctttgaaggcggctcaagaaatccaacattcagaagacattttgtggaaccagtcaataaactgtcaaatgatctagacaataaacataacggctttgaaggcggttcaagatcagttccacgtcccgggaaaacggtgtctcggatcttcagtcagaaatcgttcaagaaaaaaacaagcagcaatgggtcagatcaagactcaccaaacagagggttaacatacattgatattgtgtaagtaa

SEQ ID NO: 5391 - DNA, 371 bp, Arabidopsis lyrata
  Intron number 2 from transcript 941581 (locus 941581) deri ved from phytozome v7.0 (chr-ID scaffold_6; pos 8587252 to 8587622 reverse strand)
gaggaagaagcgaaagtgagtctttacattttctcatttttcagatctctttcgattcattttctgctccgttattcgtaggttaaagtttgtgaatctccgttttataaacgcttaagagatagtccgatcttgtgatctgttaaatctgagtatgtgcctttagtagattcggaatctgtagattactggaattatttcgccaaatcatagtatgtgattcttcataagttatccgataattgttaaaacatagtaattgatgcgtttctcacatttctggtgtcactgattcatgatatgttgttattcgatttattttggtgttgtatttctgatttgtgaagttttatgttttggtttgtgaaggt

SEQ ID NO: 5392 - DNA, 1046 bp, Arabidopsis lyrata
  Intron number 2 from transcript 485279 (locus 485279) deri ved from phytozome v7.0 (chr-ID scaffold_5; pos 14348654 t o 14349699 reverse strand)
taaattggtgagtccaaattaactcgtacatacgtataaaacatagataaatattatatagttatatgaatgataaaatatatcaactcgtatagtcgtatgtatataacatagattaatgttttcaactctttgatggatttatggtttcattgacttttctgggtgttgttgcgtgatcgtcgagaaccggattgtgtttctttgaccaataatctttagggcggttctttttctaattttgtctacaatattatcacaatagttgagcaaaagccactgtgtgtatatttgtttttattttcactttgaaaagctttttttcgccggcttttcattttcagaagttaacatgtcgtttttagcttcgttttctacaattattaaattatattgtgtagaatcatgtttaatcaaatataaacaatatattttaactaccaaactcaaacataaaatatgaaacatatacttacttttgtatcctcaggcttaaaatggtaaccgtttgcaaaattttttttaaaaaaaaacattttagaattagaaatagtaagaagaaagaaatccaaagatcagtcagatatttttggtcaaggaaatgtataataattttggatttcattacaaaaatggaggataattttctttgtttgttatataaaatctaatagaatattagtacaaattattccacccaaatccaaatgatacaattttaagtatatttcctaaaattattactttttcaaaaaatatttttatcacttaaaattatattgcaatatattagcttttacgataatcaaaggattgtagatacaaatgtttttgcctacgcagtttgaatagtttttggtttttctttaatgctaataattaattatttttctctgtatttttttctacttgattatttttctcttttaaccagcatatgtatattacttttgagcttttactattaattttaacatttatttgaattaaaaattacttgaaggtgagcaatgggaacaagaaaagacaaactcaaagttgggttc

SEQ ID NO: 5393 - DNA, 6142 bp, Arabidopsis lyrata
  Intron number 3 from transcript 494743 (locus 494743) deri ved from phytozome v7.0 (chr-ID scaffold_8; pos 5833413 to 5839554)
actccggttatttttttttaattatatgaaacataattaatcctattcatggcagagcacttcttgtacatatgtaaaatttgcatccttttggcaaaagccaatggtaagatgttttttttttaatttcttttcttgtggttagaaagatagaaaataataataattagtgtataattaatttaacattaacatagaatcaagagttggtgaagaaagaaaaagacaattggtagataaactcaaccaaacgtcatggatgtcagtatataaaattgtctggtgtacatctccatacaactgtgtcatctcaatgtgaggaaatctacatatacggagatgtaggatcggggaaaaggttatattttcgttaattttgtagccaaatgacaagtccgagttcgtcaattggtagccaactgttggttggcagccaaatgttcgtcaattttaccttcgtgtaaatcttcaagactagtctggaagaagtctactatagatgatgtatcgagttttaattaattaatcgcaatcgtgcagtaaaggaaggtggtcgtaataacgaaggtcgatgataaaatactaagaatgtcgcacaccaaagatatgatgaatgaactaagcaaataatcgtttagaattgtttttttaaaaattttctcaagactaaatatgaatgatactagagtaatgtgttgtgaacaaaaacaagatgattgaataaacacaggcaagttaaaatagtaagtgaattacgaaattaaacaacccacaaactagactagattttgtaccatcacgttatgcgggattttaatttaaaatatctttattaatataatttttgagtataaaatataatcattaaaatttaaaagataaatatttgagcagaaatataataatttaaattttaaaagataaatttatataaatactaaaattattttacggaacgatataaaatatatatacacattgtcgacaataatgtttcaaagatcacttaaaaaattcgagggaataataaatagtatcaacgaccatctcatgatcctttatcactaaactttaaaataatttggctttaattatcgatttttgacataattgtaaatattatttacgtttaaatgttgatacgaacataacaacattccatataaaatgtgaatatatcaggtttcataatctttatctagtatagcttggaggactgcgaacctcgagaaatctgaaaatgaatctatatatataattagggagtcttctctccttctagggtgtccacatcagcatccatgtcaacatatttctatttttgtgggctagacatattttatttattaaaaaaaacaataaaaccaaaattaattcacacaatttatcttacaaaaacattataactaaaattaattaacgcacttcatattaatatattttgctaaaaaaacagtaatttaccaaaaaaattaaatattaaaaaacggaaaagaatataaaacacaaaatatgaatatttttaatagagggataaatataatattagataattatatcttaacatataatgagaaaatacttttaaattgttagatataggaaaaaatattataatatatttgaatggtacaacaatcatttttaagagttacagttatttagtagaataaagttaataaaagttagaataaaacataattaaaggtttttacttaaaataaaaagtaattaatttctaaaaattcacatttaaaatttgagaatatatttgttaatgttaaaatatcaattcatgatactgattaaataataagaaagattgagtacatataattatttataactctaatataataaaataggacaattaaaaaatgtgtctatttttttaatgttttcgaaattaaaaagtggtcggtttttaaagacaaatgaatacctacaatagaaaaactaatctatatatataatgggagagttttctctcctcttagggtgtccacataatcaccaaattaatattatggatcctactaataattatttcaaaatatttaatttcatagttaattacatctcatatcaaagaagtaatcatcaattaatgcacagttttaaataaaggttacatgaataataataacacaagtgtaacatatttacatataaaacacttaaattaattttttgttaatatataacttaaaatgaacataatccctaaatatttaattaataaataaaaaaataattatgaaaatttcataaaaataccaatgttatttaagatggacaaaaagcttcttaatgaaatttattatacaattaaaaacaaataataacttattaaaaataaaaaaacgtttaaaaactatcatttttaagaataataaagaaacctcaaatataatttaggatgaaaaaagaattgaattgaaatggaaagctataagagtttttttttttaataataagaagatattcatatttcatggaaacattaaattaaagagatcataatgaagtggaagaaatttatttaaaataatattttttttagattaaaaaaaatggttaaatgttatagtaaatgtatgattgtaaaagtttttttaagatataagaaataattcatatttaaaattgaatattatatttcaagagagtaatagtataaattcacattgacgaaaaaatataaaaattaattgtatcttaatattaaattatagtaaaatataacaataaaaataataaagttatatctatattattgtttgctttctaaataaaaaggtgaatatgtttaaatataggtaaaaatctaaataagtagtgttgaggaaattttaacaaatatatatctttcgtaaaattatattacgttgaagcatgaaaaccatataattaataaaataaaataaactaaaaagatgaaaatgaggaaatagttttcagttaagaatcaatttaaagttttattaaagtgagcatagaagataaaaaaagagtagatgttgggaagcgaacaaatgcatcatagaagatgacgaaaaatatttgaagagaaattgagtaatgcttgaagcatcggatatatgtatgcacatgactaaacgatattcatcagatatatgtatgcattatcggatagtttggtttagtaaaccagactatcatattcaatatcaggttaaatcgtcgagccatgtaagcgtagtaggatagataagattaagacattcatgatttggtcaaaactttccttaaggtatgatggtcttgcttcaataggtaaattgtgctctccaaacctattgaagcggcatgaatattacgtttatatattttcataaattgatgttcaaactcagcaaatttacttttaatatgaggtacgaataggtcaaaacatcaaagacagttatatttacaagatttgtttatggaaataactctctttttgataaaaaaaaaattcattgatgactaccgagaccgattaatcttatataacttttgttattacgcggtacgtaccaaatatattttataattttctatgttgtagattgttttgtaaaacaagtatgaatatatatatagtttttaaaattcaagtgattatgattattcttaacattttgtattatacccagttgatatttgatattccgcgcaatgcgcggacgagtaaatctagtattaatcagttttaaggaaattaacatagatcgaaaaaaattaacgtgatttgaaatacaacaaaaaaaatcctaaaatcacaaatagaaataaataatttaattgaataataaaactgtgtaataataatatttgagaatgctatttggaaattagaatagtttttaattggaaattgggaatggaagagtttttagttagaaataagaaggatttttaaaaaaaacaatagacgtatttttaaattaaaataatttttatgagttcttatgttacacatttgacaaaattcaacattaagaatactatctagagtcaaaatatacaccaaattatatttgtgaaaagaaaattttatatttttcagttggtcaacataaagtgtaatattttacgtttaaatatgatgtttgtaaataggaatgagtgtatatatgagcctcaagcaggaaattctcaatcctgatgtcaatgagaaattggtttacgaaagtgtgttttagaaacatggatttactaattcgcttttgaaattactcatggtaaataggattaacaaaattccattggagattgaatatcagttgaaagccaattaatcgatttttgttttaggagatttgtgaaagataagtttctattttatttgtaattttatactattctattttatgaacatactatttagatttatattgaactgtttattttgttctgtttttggtctatatcatttacatttatttaatatggttgttacttgtttgatgcagcaaccccgtggaatagggaacgtcagtttgccacaacgtatgttcagtcttggtgcttgagggggatagaaataaaaataaggggcacttggttatggagacttggaaattttgtcagagtcccattataagtgtgtgtattgttctattttctcatgtctcagtaatcatctcgttgtatcagtgttaattttcgtttgtaagagtgttttgttttatgtatctttgtactatatgactacagtaatatattcacatttggtgcttgtcctgcatcgtttattgtatgtttctattctttcctttactatgtttcatatgtactattcctaaaatcataacaataatttctgtcatgcgtttaattcggcatttgggtttcctatattgtatctagggtatagcgtttatttttcgatgttgtttaacacaaatttcggaaaaattaataagtttttatgagtaataatattttatgcattacatttcattttagtctatacaatttcatttaatgtaattctatttagacataaataatttatttttaactaattttcataaatttgtgcctgtttttaaaaattcaaatcatgatacattcaaaaaaatttgagtttgactcgaaaatttgagtttcatatgttgtattaattaggggtataactttttttctttgatgtgcatttaacttggtcatttgggttctctatgttgtatcccttagggtatagtgttctttattcgtcgtgcgtttaattcagcatttcgtgtgctatatgttgtatttattagggtataacgctcatttttatacatatgtttttggtttgagtgtaggttcttaggtttaatatttaaagttaaggatttgtttatgtatatttgtgaaaaatggtatagtacaacattctattccatatagattctatatagaatgccttgtatttaaccacaaacactattcactattataaaatttttacatccaatttttaaaatttaaactatgtttcattcagaaaaaaatgtatatttttttaagatatatttgaaatttggaatcttaaaaaaaaaatatatatgctcaatttaaatatgatggggtaacaaaaatttaaaagaaaaaaaaaacactaaaatggtaatttccccagcccttcatattagtctcttcattttttcaaataaggtgctatattcttaatttgatttatgtatatggtcactcacctaaatggccctttaattatactatttcaaaaaaaaattatttaagtttctatgttcatatttgaattatataagatttatatataattgtgcttataattttttgaatttatcaattttaattgattgatcataatgtcattgcaatcgagtatataggaatcgaacccgcaatgttagcttggaaaactaaaagatttaatctatttatcatttttatatttttaacgtgtctaattaaaaagtattttggtttcattcgccaactttatgatgaatgtttttaattttagttcttcatataagtataccatgagttattgttatgtaatatagtatatattttattcgaaataattttgaattaataattttagtggttaaagaaacaatacaacagtgaaaaaataaatatattttttttactt

SEQ ID NO: 5394 - DNA, 769 bp, Arabidopsis lyrata
  Intron number 5 from transcript 488353 (locus 488353) deri ved from phytozome v7.0 (chr-ID scaffold_6; pos 6140161 to 6140929)
attgggtggttgatactccaagtaagcttactttcgtcccaagaaaagtttgtgagctgtgaaacttgtttgttattgttagcttgcagttaatttctgactggcttattagggttcgttagatgttcgactgtgcattgtgatagaagtgacaaaaggaaatcacttttaactttttatttatctcgaagatctaattaatatcccaatttagcgaaacattataggctcttgattggtataaataatttcccaaaattggtgatcatgttggtgatgaacttttttacgttttcatgatttagaacattcacctatatactatagtaatatttttccaaaatatacattaaaaaaaatgatcaataatctactaaaattagtttttagcgttgtatgattatttcgctgatactctgttcagctgtgtttctgtcattagatcatttgtttatactactatataccattcaagctttgtcatttgcataatgacttcttatatcggttattcggcagttctgcagccaaattgaaagattcttttcgcttaatattgttttgatcattctattgatccaaaaatttgattcgttttccacattccgcagtgttaccaaacaaagcagtaatagtctctgttttagacttgatgagaccctatgtttttaatgaaattgatttatatgttcaaaaaagaagaatgaaattgatttgtcttatctcaaatgcagtgagagatccaaaaacctggctagcgaaactgaag

SEQ ID NO: 5395 - DNA, 6665 bp, Arabidopsis lyrata
  Intron number 1 from transcript 907510 (locus 907510) deri ved from phytozome v7.0 (chr-ID scaffold_2; pos 3736968 to 3743632)
gcttataggtgcgtatctgcaaccacatctcttttgagttaaactctttttggtaatgatcatatctccctttccataaatcaacatcgggctcattagcattccgtgtgagtctttgttttcttattgcctcttcgacatggttcaataaaactgcctcgtgcattcttctgcgattcatgtccatcacctctcctactgtagtaattaccaagattcccaaatcaatacaacctctcgctccaagtttctcatagagacagtctatattactccacttgtcaaaccaaaaaatgaagcttctccatttctaacctcaactcgatggaacttctttgctatttctcgatatacaaaagctttttttagattcaagaacaacaagtcttagtatctttcactgcccaaaagaaaccacttcgtattagatattttcacccatttcacccacagtgattcctatgctaatagtatacgccaaatcaacttcaaaacactcactttgtttgcgtcttgagattgattgcagtcctagacggccaccttccctttttggggtacaaacatcggatcatgcaactttcactttccgagagttcttcgaacgtctcgaccatatataaaagcgcataacatattttatctatctaatgaatgcacgttttaggcaaccagaaaactgctatctaaaaatttgtgaggctgaaaatcaccgaccttagcagctgaagtctctcggcgaagaagagagccctgaccgtccaagaattaatttgtgatatgatcttttccaaaagtggtagataatccgaaaatatcatccttcttgttaacagcggaagtcccaaatatctcaccggtaatgtaacatattcaaaagaaaattgttggaggatctcttccttttgaatctcggaaactccagccatgtataaagtagacttctcaagactaatctttaaccacgagtgtatggcaaactcattgcgttacattacgttactacatgagtttaaacatagtagtctatgcgtgagaattattgacacaaaattagtttttaattacatgtttttttattcaatatactgttatatatatatatatatatagtgtatatatactgaagaatacaattaatttattttaaaagttgttctctctgtttctacgacgtgaaggtttatgaatttattttgttgcataaatatcgtttgtatttacggtgttcaaaaaaaaaaatcgtttgtattttgggtacacaaatttatttaacagaatctcgtacacaaagttttctggtacatgatggttttgtacatcatcatacggagaaccgccaaccatgggagctgcaaatctccgtcgaagtttatctccattacataccgagttcgaggcccttctctgggcgatgaagtgtatgataggcgcagataatcaagaggtagagttccttacagactgttctgatctggttaagatggtgtcttctccaaccgaatggccggcgttttcagtgtacttggaggaatttcagagcgacaaggaaaaattctcatcattctctttatctttaatttctcgcaatgctaatgtaaaagcggatcatctggcacgaaaaattcgtacaaaatcgcttcatatcacatttgtaaacaacattccacatgaatggctcttttgagctctaattaatttcggatgacaaaaaaaaaaaaaaaaaaaaatctcgtttaatgccttaatccgtattaaaaaagtttattacataaatggtaactgcttttttttaatgtgtgaaataaatttaaaaggacacttttaataagaatgatgaagtaatatagtgtcaaggggaatcatgtattcatgtcatacctattctataagaaatgcgtttctttgacattaaatgcatcaaattataccattcctcttttggttttgaaattgacaaattctaaaaaagaattccatgacttttttttatcacccagatttagaaaagtagtgttttcaaggtgtgacatgcatgtagggggggggggggggggcaaactcgatttagtaagtggaggacaacctaaagttttattgggacgtgaaataacattactattgatctataggattacgttatttcgtacgtagcacacactttctggtccgaagagaagaccaaatattgttgttcctacacgatataatcagaaacatttaatgtggtctgtagtaattgttaattttacttggatttaaattatgaccttttttaaatcttatcaacaaacactaaccaagtggtattgtcgttgttccggttgttgaggataagtggatttgtgatttgttttgttagccactatatataaacagtcaaagtcaaacttccaaacgttttacaacatctatattagtcttaaattcaggtctaagttttttataataaatatatacactaatcaaaagaaatgtgataagtgttgaaaagtcaattatataaactcaattctctatatttacccagtgttttgctaaaatgtgataatacaatagtgattaatcacgtgagaatgtgcaataaaaaaaacataaagttatgaaaagaagaagttctaaatgggcaatggcactaagaccgtttcgaagagttggcgttgatagctttaactttgccaattaagtgttcattattatttttttcttttccatttagtgttgttaataatatacaacataattatagttgaggtatgaatggttattggttatattaatgccaataatatgaatatactattgaaattaaagacaaagtagtagtgtaactctttgacttccatatagtccgaaatgattgtcacaacaattctatcactttcatttagtcttgttaatgtccatcaatagacctaatccgtcaattgttcctcctttttttttttattttgaacggccaacaattgttccttagtttaccattcctgtcacttttgttttctttctctcgcaagaggaaaaattaattttatgtcatcttcagtgaatcaaaataattgaggaatatatatataatatatatatatatatatatatatatatatatatagtatcatagtcattaccattcattataatatttttctttttatttttagataatcattttttgaaagaatatatagattctagttacaaaagtcaaagcctttgacttttgactttgtgtataaagttatgaatgatcaggaagagataatgacgtggataatttatacttaatatttaattatttaccatcgaattatgagacccacttagcgtcaaaaatttttttaatgaaaaggaaaaacaaagataggatgtgtccatttgccgccaaaatggaaaaaggggaaatgtaatattctatgatctcaacctataaattctaactacaaaatagaagttttgatgtctttagtcctggtaaaatgaactttcatatttttttaatatgaaaattttattttataattttagtcaacttttattctcaaataacatattaaaataccaataatgtaaagactactgattgcaaattagaaagtaataaaatcatttgttggatatattactcctttattttcaaaatatttattttagtatatgcttttttttctttttcaaacattgcttgcaatttaaaacaaatgaaacattgctatgacattctgtttagtttttttttttttataacaaaaagtaaaaaatatttttaacatctcatatgcttaatttattcacaaacaaattatttttgtaatatatgtaacatctcggtttcaggaatatggtggtgcatgcggggaggtttaaaagaattgatttggccacctagagagaacgtgggacccactggtagagacggtcgggacgttacaagtggtatcaaagctgaacccagacgaatgtagagtcaagagggctcacaccgtagggggtgacggtcttggtgcgcaacgaggacgttgcgatttgttaatgggggtgaattataacaccccggtttcaggaatatggtggtacatgcggagaggtttaaaaaaaaattgatttggccacctatgtcaccaaagtgcacttatcttttcggtcaactatactgagaaaactccacagttaagcgtgcttggactggagtagtttcaggatgggtgactttccggaaagtgattgtcggaactgtgtgagtgaggacaaaacacaaggaaagatcatgtggtgatttgtagggtcggtaaacaagtctttaaagcctcccggacgtaacggactggccgtcggacaggggtgggaccatggacccgaaagaggacttggggtccactggtaggaacggtcggggcgttacaatatacttcgtttaatgtctctatatggaattttagatgtatatatacatagagtttattaatttaaacaaggggtcagtaagataagatttttttcaatccaatctcatccaaattcaaaaatatgacccagattctaggtttgaaccgaaaccaacattaacttttaaaaattttagttaacctttaaatattgataactcggacaaaacgatgaaaaagagaacgacaaagtgatattctgtttagaaaaaactacatctgtcatttgcttcttatagtccaaaaatcgacgtaattttgaaattaaggcacacattaggaatttcaacatcaggtcgttctttttcatgttattcttaatccatagagaacctcatatcccgatttttttgaaactataacacactgtcgtagtagagaaacataaacttacgaatgaaccgaaaaagaagatgttgaaatccctaaatcatcagtgtttaaaaattacgtcgttttcattatttggactctgaaaagaaaaacaaaacgatgtggtttgtataaaagaaatgtcctttgtcaacgtatcttccgaatcatcaatttttaacggtagactttttttttttttttttttcagcaacggtagactaaaattgttgaaaccaatgttgtttctcaaaatactggatactgagggcttgattggttctcccgctagcatcctcttagcggttgttagcggtcggttgcggttggtaccaatcatagaaaccgctccgtaccgcttcaaaccgctcgaaatcgctgaattttaaaaggtccttcccgcaagcgtttgcggttgcgggcggtagcggttggatttaaaaaaaaaaaaaaaaaaaaatcaaacgtttacttataattattataaaatatattaatcttatatatatctttcatctttgtatcacgttctcatcagaaaccctaatcaatattctaaaaccttattttctcaatgtcttccacccaaactgatgaaaatcaatttgaatatatttttttttcattatatattgcttttctttttgattgaatatatgtttcgatttgttttctcgaatagaaaattacttgctttttgattgaattcaatgttatttacagtttgtcccattacttgatacaatttttggtgttaacgacccagcataaagtactatcttattataatttttttttatttttgaataattatttagtactttatttatggttttaattattaagcctgttcattttttctaatattatcataataatatattggtgtttttatttctttttttttgtaatattttttatttttatagtcattttttatttaactgctaccgcacccgctggtttaccagtcataaaacttccgcaaacgcatccattttcaaacgctaaaccagtcgttcaaaacgcttgataacgcttgaaaccgcaaccgcccgcttccgcaaactcccgcaaccgcaaccgcaaccgctgcgtttaaaccaatcagaccctaagtttgaatatttgatgagttggggttaagaaacgaactaacactttgtagatgtcaaaaaaataccatgcgaaaagtggaagttaattttttttattattattaagacggttgagagatttaatgatttcttaaagagctttgtgtattcaaaattttctatttttaaaaactttaattatgaatccagttgatatctaacatatcttgaaatttgtatatttaaaaattatttatacgaagtttatactaataatactagattttaaaagaactacaaaactcaaaagtaattattattttgaataataactaatagtgtacaataatccttcttattcctcaattcaaaaagcaaaaagtaaattaactttcgtcaaggtggattttatgatcgacacaagtggaatcttttaagagcaagaacaagagaggtgacataatatagtggacgctagatttttgggatttcgagttgaaaaataatgaaccatgcatattcacaaagtaaaaacagataattaaatttagtataataatgtaatacatatcgtggagcatactattcagataattgcacaacaaattgtggaaagcctatacaaactaggtattgtgcatgtaataactcctcaataactattgaatcccatggtactaatataatatcatagttcatgtaccatgtaccacgtccagtaatctacttgtgctctttgaagagactggtggaa

SEQ ID NO: 5396 - DNA, 5186 bp, Arabidopsis lyrata
  Intron number 1 from transcript 323301 (locus 323301) deri ved from phytozome v7.0 (chr-ID scaffold_5; pos 12786899 t o 12792084 reverse strand)
cctagtttaataaagctgattgtgagtgcccgaataagactaacaacgaagctgatgattcctaatcgattgaaagcgcttgttcgtgcaggctactacggtatgagatgatgacttatgatccatttgaatcattatataccaacaaaaaacaatatgaagaaaaattgggacgatgccagctgaaagaaagaagttaaaaatgtttatgtgaaaaaagaaaaaagaaaagtttttgggaagtgtttttttttttttttttttttttgtttggtatttgtatttttcccttcttggttatacattgcattgtttttgtgaagtgttttattattatttttttttgtttggtatttgtatttttcccttcttggttatacattgcattgtttttgtgaagtgtttttttttttcttttttttttttttggtatttgtatttttcctttcttggttatacattgcattgtttttttgttgaacatacattgcattgttatcagcaaaagatgatgaagaaacgagattgcttgcaggagaagaaaggaaaatagttgaggttgtcacaagactagaaaatcatatatgttttatcactaggataattttgctgatacttaaaaaaaaaaatgtgaatccttttcagaacccaaaatgagaagatggagtcacactcactggttcaatcagaagcagagaccaatcaaatgataaagacccgacaataatgctataaacttagggcatttagatgtcaataacttatatggctatactatgtaacaaaggaagagagacctagcttttgttggaatgtcactttcatcattcggtaaaatgttcgttagcgttgtggctttccaacacaaaggaaggttatatgttaaagaatacaaaaataataatactttaattgtatataccaaccagaaataatctaatcatatacaccagcaaaaaataatactaatctcatcttcaaatcctgcaacaaagccgggtcaacgagaccttaatggtatactaatctcatcttcacagcaacaaagctgggtcaacagatccgagacaaaaggctttagtttaataatgatattgcatgtgacaagatcttctttaccaagaaagtgatgtgtcaacctttatctccacagctaagtaattgactagttgacatttaataattttacttgagatacaaaaggagatagaaagatagagaacagagagataggggttaagaaatggagaaaagagcagagaagataaggatagtattggttccacttccaatacaaggacatatcactccaatgatgcaacttggtcaagcccttaacttgaagggcttctcaattactgtcgctctcggagcttttaatcgagtaagttcttcgcaacacttccctggttttcaatttgtcaccataccagaaactgtaccaatttctcaacatgacacactcggagtagttgagtttgtggttaagctcaacaaaaccagcgaggagagtttcaaagactgtatagctcagttgttgctgcaacatggaaatgatatagcatgtatcatttacgacgagctcatgtacttctctgaagctgcagctaaggagttcaagattccaagtgtcatattcaccactggtagtgctacaaatcatgtttgttgctgtgttttaagcaaactcaacgtcgagaagttcttgatcgacatcgaaggtacacaagagtaactgattacctattccgaaaaccgttctttcactcatacagaggcttttttactttacagatccggaagtgcaaaacaaggtggtggaaaatttacatccattaaaatacaaagacctaccaacttcaggaatggggccactagagcgatttttggagatttgttcggaagtagttaacaaaagaacggcttccgctgttataattaacacgtcgagttgtctagagagcttgtctctctcatggctgaaaaaagaactcaaaattccagtgtaccccttaggccctcttcacattacagcttcagcaacgtctagtttactggaagaggacaggagctgcattgaatggctgaacaagcagaaaccgaggtcagtcatatacattagcgtaggaagcataggtcacatggaaacaaaggaagtgttggagatggcttggggattgtatgatagcaaccaacctttcttgtgggtaatccgaccaggctctatccctggttcagagtcattaccagaagaagtcagtaagatggtctcagaaagaggatgcattgtgaaatgggcaccgcagaatgaagtacttgtgcatcctgcagttggaggcttttggagccattgtggatggaactcaacactcgagagtattggggaaggagttccgatgatttgcagaccttttaatggtgagcaaaagttaaacgcaatttatatagaaagtgtttggagaatagggattctgcttcaaggtgaagtggaaagaggaggggtcgagagagctgtgaagaggttgattgtggatgaagaaggttcaggaatgagggagagagcccttgttctaaaagagaagctcaatgcctctgtaagaagtggaggctcctcatacaatgcattggatgagctcgtcaactatatagaaacagagtatagcaattcttgaaaacagagtaaacctgaagaatttctgtatccatgcctcaagcttgatcttgtaaagaaagtccattgcatgtttaatcctcaaaagcctttctttctatataccaaaaacattgaggcatggatcaaatctgtcacaacaagagatatttctagtacttattttgagcatctttttctaatacagaaatttcttatattttcttgatttctcgattcatatttttttcatcacaaagtgtttacatattaaccaattaatatttcccaagtattctttatagtttgaccaacataataggcgagaagaatgtccaggatgcgtacaacatagttgatgatatcagaaccctcaaacgaagaatgttggatgttactcgcaagcgggagatgtatggcataggaaactttagtgagcatcgagcagtagcgagtaattcaagggtgatggagcttcggtgtcctcgatctgatgatcaggaagagcgtgtagttgatttggaagatgatgctaaggttcttttgacaaagcttcttgacgatgatggggataacaagacatatatgatctccatatttggcatgggaggtctccaaaacactgctcttgctaggaagctttataactctagctatgtgaaggaaagttttgaatatcgcgtatggacttatctttctcgagaatgtaaaacaggagatattcttaagagaatcataagatcattggaagaaacatctgaggtagagcttgaaaagatggcggaggaggagttagaagtttaccataatgatattttacaaggaaaaaaatatcgggtggtggtagatgatatatgggagaaagaagcgtgtgagagcttgagagagcattaccttgcaattatgaaggaagcagagtcatcatcactacacgtattagagccgtggctgaaggcgcagaccaaagattctacacccataacataaggttcttaacgtttgaagaaagctggaacttgtttgagaagaaagcatttagagatatcgtaaaggtcgatcaagaactgcagaaaatcggtaaagaaatggttcgaaaatgcggtggattaccgcttactacagtcgttcttgctgggctaatgtctaggaagaggccagacgagtggaaagatgtgtgggagaatttgcgcgtaaaggattataacattcatgtctccactgtgtttgatctaagctttaaggagatgctaaatgagttaaaactctgctttctataccttagcgtcttcccagaggactatgagatcgacgtagagaaattgatacaattacttgtagcagaaggatttatacaaaatgacaaagagatgatgatggaagatgtggcacggtattatatcgaagaactgattgacataagcttagtggaagtcgtgaaaagaaagagagggaaactaatgtcttttagaatccatgatcttataagagaattggctatcaagaaagccaaagagctcaactttgtaactgtttacaacgagcaacattcttctactactagcagaagagaagtggttcaccatcttatggacaacaactacttgtgtgacagacaacaaacaaatacgatcgttcttgttcttcggtgaacggatgagcgacattacttacgttgaaacaattactttgaaactgaagttacttcgagtgcttaatcttggaggacttcattttatctgtcaaggatatagcccttggagtttaccagatgtgatcggaggtttagtacacttgaggtaccttgggatagccgatacggttgtgaacaatttaccagatttcatctccaacttacggtttctacagacactagatgcatcaggcaactctttcgagcgaatgactgatctaagtaagctcacatcactaaggcatctcattggaagattcatcggagaattgctaataggcgacgcggtgaaccttcagaccttgaggtctatctcctcctacagctggagcaaactaaaacatgagttactcataaatcttcgagacttggagatctatgagttccacatattgaacgaccaaataagagttcctttagacttagtttccttatcgaaactgaaaaatcttcgtgtcttgaagattgaagtagtgaccttcaacttactttccgaagaaacagttcggttagaactccttgttgagttgacactgcattgcaacataacaagacttccaagagacatggatttgatctttcctagtcttgagtcccttacgcttatagtaaatctccaagaagacccaatgcctgctctacaaaaactacaacgtctagaagatctggtcttgtactcttgtggctacgcgggagcgaaaatgtgcatcaacgcacaaggtttttgtcggctgaggaaacttaaattgatcataacaagattagatgagttggagattgaagaagaagccatgccaagtttgatggagctaaatctcgacaaaaaaagatggagctacaaagctg

SEQ ID NO: 5397 - DNA, 180 bp, Arabidopsis lyrata
  Intron number 2 from transcript 341749 (locus 341749) deri ved from phytozome v7.0 (chr-ID scaffold_3; pos 6820458 to 6820637)
ttttctatcgaaaacggtaagttcaataatttgttgtctcattggcatttgttactctagtttttggcaagtgtaagtgattttgagattgtttttcgtagaatttggatttgatgttttgtggctacattacttcacgttgcaggaatcttttagtatcttgagctttaggggaagtga

SEQ ID NO: 5398 - DNA, 476 bp, Arabidopsis lyrata
  Intron number 2 from transcript 497416 (locus 497416) deri ved from phytozome v7.0 (chr-ID scaffold_386; pos 6555 to 7030)
aggagaaacccattgtggaagagaagaaagtgaaggtaactttttttttagtggtctcaaagctttcaccctctttattgtaaaaaaaacatattttaaatttgttgtgtttaatgaatttgacattacaaccaaaaaagaaaagaaaaaggagggggtttttcgttgctttttaggatattggtatgaaatattcattcttttttggtaggggtatgaatattcattttattctttattattctatttagggtacgagtaaccaattaaattatttattatttaataaaaaagagaatattctctttgcagtgatttcacatggggtgtattggtaggatttggttaaaaattttgatggtttatgaacgtagaacttcttatatttttatgtatgtggaattttgtgttaagttatcattttattaattttgcgaacagcctccggtggtcgtgacggtggttcttaaggttca

SEQ ID NO: 5399 - DNA, 32213 bp, Arabidopsis lyrata
  Intron number 11 from transcript 480175 (locus 480175) der ived from phytozome v7.0 (chr-ID scaffold_3; pos 14106787 to 14138999)
agaattagtttatttaaatcatcacatatttctaattggtaaagaaattgagataaataatatcaaattttaaattaatatataataacatatgtttaattgaaatataaaaaaacgtacaatttcattattattatcttttgacattttaaattttttttttttatcgaaatatgaattatttacaattattcttataattatcttttacattttttaaaattatttaaatttgtaattactttcaattatcttttttttttaaaggaaaattttgttttacatgtgtcaaaatctaagatcgagagatttgtcacgtgtcacgatcgtatgagttattaactttgaaaaccattctttatatattaagataggtactttttttttttgttaattatgtaggtagttccaccctctttcgtcctccctgtaaatcgacttctctcttatttttctgatcgaggcattaatgaaattccttggtgtcactgtaaaaaaagtgaagttccactactctaagggctttccgtatttgaaagaatacagatattccagctgtcacttatgcacccacaaaatgttaatatcgtgtaaaagaatcagcaaaatacccacctccgaataatggaaagacatagggtttatctccaccaatgtgaaagggaaagtgagacttgcaaatatggtttttttttttttttgccagcaattgcaaatatggtttagtgaactgcaaatatggtttagtgaactgcaaatcaattattataatagattccttatggaactttctgttatgagccaaagcttttgctcttgctcttgttattggcccctctgttatcaccctaatgattgaatagcacaaagaattgcttaagctttaagcttcccttaaccctagccttttttgagaataaggttaatgtttggaagatgattattattaagattgagagatcattatatagatctcttacaaccaaacgtaagttaaatttaaaaaggataatattaaaatctaaaaggaaaatattagaacataaattcgacaattaagaagcttctaccaatcttaattgatcccatatctcgtaccgtatcacttccatgtttaatgaacttcgtaagtgttggtgtatgcaaaacctcgatagtctctaggtttttggtaatcttttcttctaagaaaaaattcctagccagtttaccatcttttttttcactaatcctaagaatatgaataaggaaataaaactgttacaaaaaacaaaaaactgaaagagcttaacatgacctagctagaaactatttttttttttttttttttgaataaccgcaggtctcccaaaggtttcctaggcccaaggactaatcccacgaggctggcaattcccctatgtaaacctgccagtggccgtgcctcgaaccctggtggcggaagtcacagctgttataatacaaactaagagacattatatcaatggaactttattccaaacatttccgaaggcactgtcactacaaaaaaagtctacattaatagcacattaggatagctcggttttcataattgctatagaagatgttttggtggaatgaacttaaatataatagcattttaaaaacgctaaaccggaaatgaataagcggaaggctaaaattggctttgcgagcataaaatttgattaagcggtaatagttagctaaaacattttcgttttccgcctaagtgctggcccaaaatatagaagatgcttaccttttttttttccttaaaaaaacaaaaattagatttgagcatcgttcgtccctccctctctacaccttcaaaccctaaaatctcttctctccctttatccatctccaaattcgcctctcacaatccaaattattcattgttcttctccttctgctcttcctttccctcttctttcactctccctctcaccctctcaatctaatgtcaataccattgttggataatgaaaatctccagatcgagaagagaagctggtgtcggtcggagaaggtgtgttggttttgtctctctttcccctttgaatctgcgtttgggattagggtttcgtttcgtggtctggtttgtaatgaccttaatcttcgaattcgtttgatttccctcgaggaagccttcatcattgtcgaagctttgaatcgattttttttttgttagtatcttttattgtttcttccatcaattccatcagcgactagtcattcaagtcagattagaaaatggggtttctcggacttagttcattgggactttatatcaatcaagacttgtttttgttgttgtttggattttagggaatgggaagcttgtaagatttgcgaagtgtctgtgattgtaaaagcttaaattcagcttctcattttgacataaggtgattcttaatttttggatgatgagaccactaagaattttacctttcaggttgttgatcattacggttagagaacaacaaaccaaacattgaaagagcaagaagctagtcccatcatgaaaaaatctatgtagcttctggaaagcatgggggtaaaggtcttaaagagaaataaagataattagagattttgtcttttctttgtcatgaattgattctgttcgttgttgactttttctttgattgattggtttctctgtttactaaatctatatatagctttttttgtctaggttcttcaagatccagaagcccaaaagagaagtgtttcgtatgggtgacacctaccatagctgctgatgtcatagcatttgtgaattcgctatgttatacgtatgatagcatatttttcgcgctaacgatgaacatatttcttgtagtatgtgttacaaactcaccatggtttatttataggcatacacataatacataagtgtatatatagatgcaatcatgcatggtggtgattggtgaatatatgatatagttttaaacacccggctgagtctgaacaggttcgtcgttaagcccgtggcctccccctccgttgtgtcctccacctccgtagcctcctccaccacctcctccgtagtgtcctccacctccgtggcctcctccacctccgtaaccaccatttcctccaccgtatccgtcaagtccgtggccccctcctccgttgtgtcctccatgtccttggcctcctcctcctctgtaaccaccttcaggttgcacagtttcctcactctctgcttcaccatgcctgcccaaaaaaaaacaggttatttcaaagacatttttaagcacgtgtaaatgtgaattcctcttcccttgcggcagacacttcggagacaacgagaagaactgcgaatagacccaacagaatcaaagccttggaagccattttttttcaagttctaataactctctgaaatcttatttgcaagggatttagccattgccgtacaagctgaaatcttctggttcctctgatcttcaaacatgaagcacaagttccatctctaaacatgaagcacaagttccatctctaaattcgtttttaaggctgtataatattattatatccccaagacttttgaaagaatggaaatatatttatttgggaatgactgtataaatttatttatttttgctgaaaatggttccttgtgggctgattggcataaataccataacttgagaaacagatctatttgggaaattgttgaatctataagtgacagctggtcttggaagatgattctgcgtttgcggcccctggctgagaggttcattcatggaagagtgggcaatgggaaaaaaatctctttctggtccgacaattggactccgcatggtcctctcatcaagtttcttggtgaatctgggcctagaagcatgcacattcccctggctgcaagggtggctgatgcatctgctaatgctaggtggatcctgccttcccctagatctgatgcagctctagctcaccatgcctatctcaccacggttacgccgccttcccaggctttgcctgaggactcgtattgttgataattttgagtgtcatggtttctcttcctcaagaacttgggaatcaatgagacccaaagaaatggcgaaagattggtcaaagtctgtctggtttaagggttcggttcctaagcatgcgttcaacatgtgggtcgcccatcttaacagactgccaacgaggcagagactcgctacttggggtatttgcgcttcaacttcttgctgcctttgctcgcagcaaacagaaacaagggatcatctcctcattacgtgtgacttttccgcggtgatttggaacttggttttcaataggctgtgtccaacgcagctgcttttcagcacttgggctgaactcctctagtggacccgacgaagatccgccattgctccttctctccttaggaaaattgtttctctagccacggtctttcatttatggaaacagagaaacaatgtccttcacaacgggcgcttgattccctcacaaatcattttcaatggtattgatcgtgaggtccgcaataccaccacggctagaagacataaaaggcaatggcgaccgctaatgccgctatggatccgatagttttcccaaaactaacccacatcttacacagtgaaatgaagtacatgtacattgtttactcaattgtgtgtccatgtaaacaacgcaagttggtgcatctgttccccaaaccgaatttaaaattttttgagcaatatcactgattattttaaatgttcatcggaatttggtcgaaattttgtcgataaaaggtttgatcattttttttggtcttaaatttggtcaaaattctacttgttttcttatagtgataaaatctattaaacaaaaatcttcgcaaaaaatctatatgtatagtatagttaattaagtctataataatatcttcacatctatatgtatagtataaatccttattttttcaaaagatccgttgtagcacattggctaaatgctttaatgatctatttgatccattcttgcttatatttcgggttcaaagcccggcagcagaaataattttaaggttatactttcaccctctacctatttccccctatacatactataatattatttacaattccacccaattttatacaattctacctgattcaccaaaatcaattatgatgtctaaatgcgttttaaaatcataaaatcacgttttaaaattgataatttgcgattaaaccggtaatctgacccatatctcataaccagaactgaaccttctatttgatagagagggttcgattttttcccttaaaccctaacaaaatcgatttggggattttcttctccacccgacactcccttcttcttctccgactgagacttcgtctccaacagcgactgaatctcctccaagatctttcgaagattcttaaatcgattcttcttcttattctccgtcttgtgtttctcgacgtctctgtcctctagaagagcatcatcaacccaactgaataggtgtttctcctttttatcctaacaacataccagaatagaaagctcaatctattgaacaaacaccacaaaattttgataaattttaaaaaccaatacattaccttcacgcccctaacacatctgtagaatctccgatacggattctcatctgtctttgaagtgaaggtagtgatctcgtcaccacactagcacctatttgggtttagtagtctgttgtgtttattcgggttaagagacatttggtcgggttaacggtttaatcgagataaatcgattttaaaacgcgatttagtgaatttaaaacgttattaaggaggataattgattttggtgaattaggtagaattgtataaaattgggtggaattgtgaagaatatagtacgtataggaggaaataggtagagggtgaaagtataggggaaccaaattgaaacgatatattacagggggacaggggcaagcatccctaaagatattcgatgagcttttgaaacttgccactacaatggtcaatgtcttttgcaatcagaacacataaattgtatcaacggctacaagttattgcttgaggaagaagtagcagactgttttgattaaaataagcaccacaaatcttgccaagcacggcaccaaaccatttagtgatcatttgtgtttcttcactccaatggatccaaaagtctacgagtactccttatataacacctaacgcctcttttcccaatctcaaggccgcttcttaacggctgggacttattttggccgtaatctatttccattgctttttctgcaattttaaaataattcgagccaaacagtaacatcaggtctcctagaaaccttgatttcgactcttctttaaaaagctcatcacgtttgttgtaacacgcccaacatattgcgtaaactctccatacgcctagctactctctttaaagacaactcactagactccaaggcggttacacaatcagtttctgccaaggacaagtgattattccactggttttttctctcttttgtctcaggtaaagaaacgcgatacatacacttgaacccatcagctttcaaagcatttagtttaatccacctcatacttgatgttccttcaggtactgatttaacaatgtgcctttactctcttgtccttctagtttggtttgtatttgacagttgaagtaactactcttgtctgcgattaagagctttgccacgagacaaaagactgatgcttcgaaagcttcagccaataagtagatgtgcccacttcttcaactagctttgctcttcttatgctaacctctaaagctttatccgtaaagtctgactcccgaatcttgtatccaacaacaatcagccttcttttttaactaataacttgtaaataaagttttggtgcatgacatgaatgtctcatgccatattcgttgcttgactgaagagtggaggctgacccgagcaaacaatttcttggtgtttgtgcttcttccaactcacccttctgctgatcaagcttttattaatacgcaaattcaaaaacttgggacagcttgcatgttccttggtttaaatcagtctagttcaagcaaagaatccccaaacatacctttatactttggctgaatattcgttatagattaacaacaagagaccgactcaatgaatgtgccatccaagtcttctctgttccgcggtcttggaaactaaatcatacctcttctttgagtgtcctcttgtcgttgaggtttggagttccttcttcgcttacaccactctttctcctccatcttcttttcaccttgttgtgaatttgggtaataagatcagcttcatcaaactcaaatcccaatataatgtgtaaattgatattctagaccatacttcatcttctaaattaggtgaagcatgcatgttatttttgagaaacaaaaacggaaaaggaagcagaaaaggaaaggaatgagagagaaggaagcaattaaatactctcttcaataacacttttacataaaactatatatatcgtataacttcaccaactaacagaagatccgctgtagcacattggcttaagcaaacattctagtttaatactggttctgaattccgggttcgaagcccggcagcggaaaattattttttgttattttttattaatgactcggttgggttgtgtgtcggatcggataaaacaattattttgattcgccaagtatataaagctttgctaggtttgagactgatgtgcgactcggtatttggtcagaaatgatggtcgcaatttagtcttaaaagagcgacaatttaacaaccacctgttatagttacgcttaagttgcaaattagttgaaaaaagttagtacaaaacacgttgaaattgcataggaggtaggtgtactgaacttttgtgactacttgaaaacagtcgcaaaatagtcacaaatttaagcctatatataccacccctcattcatttcatttttccatcccactcttccaccctcccattagtaagtcaaaaaaaaaaaaccaaagagaaagaagagaaaaaaaaaagacaaagagaagaaaaaaagatgaaaaaaacgaaaaagaaaaaaaaagagagaagaaaaaaaacgatgtggaataatccgtcacgagaatggatgtaaaaccgaatcgatccatacacaaatcacattgcggtggactatttggcgggtgtggaagcattcatcagttatgcaagccatgttgaagacagaaaaggtcggtttttatgtccttgtgtagtatgtcaaaattcgaaacccgtgaaagctgttacggtatcaagtcatttgcttagtagaggatttatgccgaattactatgtatggtatgaacatggggaagattataatgttgttggggagggtactagtaactatgttgataataccgaatatactagtactgttaatgaaccaacaggctttgatggggaaaatgtatttgctgggatggttaatgatgcttttcatggttctgtaccatataacgagtatcatgaacatgaaagtggaaacgatcatgttcatgaagaatccacccaagaagcaaaacgattttaggacatgctagctgccgcaaacactccactttacgatggatgtcgggaaggtcaatcgcaattatctttagcagcttggttcatgaacaataaggtggactacaatttgtcagaaacttgcatggaaggatgggcagaattgtttacagaatatttaccagaaggtaatcaagcgaacggttcctactacaagacatagactttgatgcgaaagctaagattgccgtactaagaaagctacgagataattgtatgttgttttggatagatgataagaagttggagaattgcaagttctgcggaaaacaaagatataaggggagtgaaggaagaacaagaataccatttagtaagatgtggtatttaccgattggggacagattgaagagaatgtaccaatctcagaagactgcagcttcgatgagatggcatgctgagcacgaatcggaagaaggattaatgtgtcatccatcagatgcggctgagtggaagaatttccagcaattgcatccttaatttaccgaagaaccgcgaaacgtttatcttggattatgtactgacggttttaatccgtttgggatgtccaaaaatcattcgttgtggccagtgatcttgacgccatacaacttgcctccggatatgtgcatgaaaagtgagtatttgtttttgacgattttgaattcgggaccaaatcatccacgagcatgtcttgatgttttccttcaaccactaatcgacgagttacaagagttgtggcataatggagttgaggcatacgatgtgtccttagatcaaaacttcaaccttagagcggttcttttgtggactattagcgatttccgagcatatggcatgttgtcggaatggactactcatggtcgattatcgtgttcaatttgtatggaggatacaaatgcattttggttaccattacaaatctgtagtttttggatgaatgtggctcagttgtgactcacaaaagaattccctgaaaattcttttatgttctgaccaacatcggcggtaaaacacacaacttcaaagctaatgaaaaataaattgaaccaaagagaaacaagaacctacttctctagtcacagttggaatcggtgatatttgatttgccagacccattcaaattggatgcgtatcgaaacaagacaccaccgtccccgtcgtgtgtgctatgaaacccaactcctcaacaccaccaatttagctcgaagccagagattcataaaatcgaagccagaaatcgtagaagaaaggtcaacacttaatttttgcgggtcagtccgctgtccgcttaacccgcaatccgcatgggccaagcccgcgaggcccgctattttatgggcttcaatataagtgtccaagcccgccccgcagtggtactaattgggccagccctgcgggtttgtggcccgtttgacacctctacttgtaactaatagatcacagtcacaacacagtcgcaattttgccacaattttgtaactattgttcatttagcgactaatttgcgacactgattgtaactatttgccaaccaatattacgactattttggtactaattgtgatatttataagggtaatgtttaaggattgagtataaaatctatattacttgagttttgcaaagttttccaaccttaaactaatatatgtcctctacaacactaatccgagtgtttgtgagtgatatatatcaccattttggatcacaatatgtagatttctaaattttgtcttgtgattaatagatcacagtcacaaagaagtcgcaaaattgccaccattttgtaaccattgttcatttagcgactagtttgcgataaatattgcaactattttggtactaattgtgaaatttataaaattttggctaattgtttgggcggtttcgattccccccaaatattgttttttgtcaccattttgcgactaaagagcgaccggtactcttaattaattaggttaaacttaaacgattcctcattatctcacaaacacaaaaaatcaatctagggtttttttcccattctctctcaatcgatttttctcaaatctctctcaaatcttcaattatctctcaaatcttcgaatctctcactccaaaatctctctcaatcgatttctctgaaacgattcaagtttatttccattcaaactctcaactcgggtttaattttttccgattcactctcaaatctcagtcccaatctcttattatgccgcctaaaggtaaatcgtcacgaggccgcgggggtggccagaccgccagacaagtagccgccagagggggtcagaccagcagaccagtagccgctagagggggccagaccagcagactcgtagcctctcgagtctgaaccttcgttggtcacagaccaccagtcactacgagtggtgtcagaacatcttctcactcatcgaacccatcgacgacacagtctgcgacccaatctcaagtgagtcgtccttcacttagttctagtagccagactcctcctctcagtaggcagactcctcctctcagtagacagactcctcctcctcagccgcaacatcagccacaacaaccgcttcctcctctccagcctctaccggaagatgatgcgaatctccaaggcttacctgaacaacaaaaccaaatccatggagaggaagaggacaacgaagtaggaaaccaagaaatgcaacagaaccctaatccaactgaagactaccaagaaatgctggatcgtttgctagcacttcctggccgacaaaatctagacaagtcattttcatgcataaacggattacttagataaatttcaaatgaggttcaagtacaacggtaagtttgctaataagctatttcggcgatgattcaaattctagacaagtcattttcatgcataaacggataacttagattaatttcaaatgaggttcaagtttaatgtcattctctcttgctgtagtatatatagtatattactaacttacttttttgtgttatgtagcgggagtttaattgggatgttgggattgctacccttgttaaagaaggattcttggttatagcgaagaaacagatgaaaggcattgtcattcaagtgaagaagactggtgtacaaccaacttggattggtgacacactttgggctgagatgcagcttttttggaaaaccattgaggctatagagaggagtgagaatgcttcacaatgcagaaattctgatcgtggaggacttggagtgcacaaacacttagccggtcagaaatcatttattcaagttcatcaagagatggtaagttgtttcaatccctccaaatacttaacttttacagaatttctatgatttctacacatgatattctttttgtctttcattttaggaagaagagttggggcgtccagtttcacttggtgaagtgtttatgagaacgcatactagagctgatggatcttttgttgatcaaaagtctgaacaagtggctgaggcgtataagaagatagttgaagagagattggctgaactggaagaggatggtcaggatacttcagagatttcctccgaacagtcaatgcatcctagagaactcagcattgatgaaatgaatgatatcttccttaaggtaagtcatttctgtctttagtttgcttggaatatatgattgtatttgtttgttggaatatgatgatagtcttctctgctgagcattttggttactttaataacgatattcatcatacattttggtttctttgtctttgtctgatttgcttactcttgctggccatacttgactgttggctatttaagtggatcaagtgtttctggattacgttttttttttctttttctctatgatccttcttgtatgtttcactgaatgtttgtctcttgttgcagtgtactcatacagatgaccaaggtaacccttatggccttggatcactggtggagaccctacacaagggaaaaaggaaggagagttacgcaagctcttcttctacagttacagttgttgagcttcaagatcagctgcggcgcaagatctctgatcaggatgctgaaaatgcaagacgtgatgcggagcaccggaagtctcaagctcggatcgcaagcttggagaagctcatccttttcatgaaagataaagatccagacttggcagcttttatgtcttcctctccactccttgaaccagaagtcatcataccacctatcacaacaacagccacccttccagacaccacagcagcagcagtccaaccagcaggactcacccctgaaaccacaccaacctcccctttatctaacaccgcctcaaatcattgaacttgatttttatttccttttgtctttgtgatcatgaaaacttattaggatatgttatgctctgattaggatagttttgaatggtttggaatggtacttgaatgatatttgaatggttgaatgtagcatttgcttttgaaatggacaggtttcggattgataagatgtgaccaaactgtttcagaaaatgtgactagtttgtgaccagaacaagtaacaaatgtgaccaaattgtgactaaacataattagaaatgactccaaatctcgtatcaaattggttactaatagaggactattttgtcaccaaattataagagtcttaaattagtcgcacaatattaccactcctttgcgactatactgttactaaaacatacacagcctgtgactaatttctgactaaatatttgatcgaagaactctaaacagtcgcaaatgagtcgcactttgggaccaaatatttgatccaagaactctaagcggtcgcaaacgagtctcaatttgggaccaattacgtatggttactatagtcgcaaacgagtcgctaacgtatgttcgttgctctatagtcggacatttgcaacgacattcagcagtcacagattagtcgttaatctgcgacgatatatttatagtcgttcaagagtcgcaaatttgcgactatagtgcgactgggaaattttgcgaccgtttttttgcgactaaccgaaatagttgttaaacagtcggaaacccctcttttgcgaccatttagcaaccattttcacagtcgcaaatgacgtgttttcttgtagttgcatgtgtatggtaagagttttgatagtttatctttttgtagataacaagagggtaaccaaaaaagtagacgtttatgcatttggagtgatattactagagatgatcacaggaaaaaaaacatcagttgataaaataatgggagaagagtgatcaaaatttggcgatgtggttacgaccaaaactatgaaatgagaggttctaagagaaattagacaaaccgtagttacagataatgaaaaaaaaaacgttgaagagcattgaaaaggtagcaaagttggcggaagactgcacatctgtagagctcttatgcagctcattatcgaccaaatgacatatggatgaggggtttttgaactcctctgcgttttcacaaactatgaattgtgaaacttcatatatcttgccttcgattaaatggtatatgtgtaactatgtaacgaaagagtgcatgctactctagatcattccactatgtttagattttaacatatcagttttcgttagtgtgatataatgttgttaaattatttgtagtcatcgtagagttctacttgttcggctaagagtagtaggacggcgcctagtttcttctctctgtctgtgtgattttttgtttcccaataaacaacgaggcgaacgatgagtgtaacatttgaagggcctaaccatacgttcgtcattcttgttagcaattttataaggtggctaatatatatgataaattcaaaaaaaaaacattgtaaagtgaaagataaattatcaattctcaaattttcaaattaagacaggttccttttgcttttttttttttttttaggttccttatgttgaaggataaacatctatattaattgaaccgaaatatttgattaaatgcttggatatctccgattacaagctgaaatctgattttgatgcctttcttgtttagaatcacataagaacaaagttataatctcatggcgtaaaaactcgtaaaaacgtgaaattttgtgttcaatgtagaagaagaaaaaaacctatttgtattagaaattaacttacaatacataattaatgcataagagactacaaatgatctcatttacacgatagttttgtatacacgatgcaagaaattgagaaagaaatgaaaagaaaaaatgaattaaaaggtatgttgcactgaatatcaaaatgcagacacaacttaaaaagtaagtttagggcttccaacgctatcaaatctttttttaaaaatagatatttcaattaaacgaaaatattaaccaaaaaacggtcaaaatatttttttaaaggcttttcgggctaacccgtccgggctaagcccaaaaaaccatttagtccgaaagatccgattttttcaggacatatattttaaagttggaacccgcttttttcaggacagagccgaggtagcccgcagactttggctttaattgacatgtctagccaaggctaagaacaaatgggttcttaattattagaaatggtcttagattctcaaattttgtgcagataagcagataatcaagagggcgttctttacagactattttgatctggtgaagatggtgtcttctccaaccgaatggccggcgttggtgtcttctccaaccgaatgaccggcgttttcagtgtatttggaggaatttcaaagagccaatgaagagttctcaacattctctttatctttaatttctcgtagtgctaatgttaaagcggataatctagcacgaaaagttcgtacataaccgtttcatatcacatatgtaaacaacattctcaggaatgactctttcgagctctaagtaatttcggatgataaaaaaaaaaaaaagaattgggtttagaaagaaaagtacctatgagagtttttgttttgaatttgtcgaactttgtgtcgaatttcgtgacaagtgaagttttctgttttgagtgaggagatttgtgctgttaatttagtgacaagtgtttgtttggagtgttttatttttgttttgttttatgtgattatgttgtgtttgttttccgtgattttgttatgtttattgtttgtgttgtgtttgtttttttgtgattgtgttgtgtttttaacggaaaaacggtctatttccccacgagaagtatcgcatcataacagatagaacccattctttgacctcggtccatatctccatgaaatcaaatttgtattcctatttctccccgaatcgaaagttctatagctaaatgtccccgagtcaaaagttcgagatctaaaaccccacagagctgggtttaatcggtttattatatacaaaactgataaacaaacaaagtaaacctaattataaccggaataaacccgattttacccgcttcggttcatagagctggtaaaaaaaaaatttagcttcatagtgccgaaaccccaatggtaaaccaccaacagagccacatcatagacacaaatttgtccgtaattaacaaatcaaatcaacacaaaggtggatcttgatgattcaaatcaaaatgtaaagcaaattcactactttttaaaacaatcaagaccacattcaatcaaattaaaaaaatgagagcatatcccatcaacaccatctcgacctgtaatcaaattcgattcttttagaatcattgctaaactcatttttctttcccatggcataagtttctccaacgatctaatcttgtttgagaccgccgtcgtttgtgtgggaagaagacgccgtcggagatccggaggttgtttgttggaattgtatccttgattgaacctacaaaagagaaaagaagaatccatgagaaaaagaagatgaagaacagaggaagaagcatcgaaggaagaagaagaagttgttaaacaaaacaacaaaatggaaaaagtaaagtcaacaaaggaaagtgttatgttgtattagtctaaggtgtcgtgtaagagtgaattaaggagttggaattccaacataatagagtggttgtcataagtcttaaagtatggtctagtggagaaaaaccactccactatatgtatgtgtgtgtgttttgtaagaagagtatccaagtttagtaaaatgtagaccattaaagagaatctctcttttttcttaaagatcaaatcgtttatgtatgtgaagagaaacaaaacaagaacaagaaatataaagagagaaaagagagagatctaaccttgatggttagagatgagtggatgtgagaatgtcaacattgttgaagaagaaaacgagtgaagaagctggagattgtgctgtcacggcggagatgctaattgaggttttctcagttttaccgaatctagaggagctggttcttgacatagtgaaggatgtgatgtgaagcatagtggtgtagctttagaggcatagaattctaaatgcaagaagctaagaacattgacactaggacagaatggaggttcgacggcgtagctttatgtggaggattgcagtcgttgtcgattacgaattccggcgatttaactgatatgatttggtggctatagggagaggatgttgtaagtttattaccatcgaatttgattattggttaattacaatgaatttctccaatgagcttttgtaattttgatatcaaatttttcaagatttttttgttgtttgaagaatccggtgaagaagaagatgatatcggagcatttacggctgggtcatgtttaaattcagttaatacctgactctttagttgttctatactaaagacctgtgcatatcttttgcaacgcaagacctgtgcatatgcatgagacaagaaatatagttactttacttgactctttctgagttatgacaaagaaacatgatgcaccacttaccttaaactgaagtagtattgaaaaaacttttggctctcatcccaagtggacaaaaactctcggaatatacgattccatacctcaaatttaatcccttgcatgttatagctctgaaatacacattaatcaatttaaataatgagatacaaaccttttttaccaataataatcacttagccattaaatttggagacgatagacccagcagcaagctcacgttaagttatatccacctgcaaattacagaaccattagacaatgaatttcgtgttaacttaccttttttagcctgaaactacaatatatctgctaagacatgagagcagagagagagagagttacgtcacatgattgccatttgctcttggctattaaacgcctctggaactttaatttcttatgaatatacctgtctcaatctaaaagcatgttcaaccatcgcaaataaaagatgtatataattaaacgattaacgtatcaaaaaattattatgtgacaaaagattttaaaacaggataagaaaagacattaacaaacaaagtttaccttgacttacatgagatccttcaatttgtcagagtctatattcacactagcccactcttgaacctatcactttatagagaggctaagattatagtgtggagaagagcgtaaggttgtgcaaaatagttcaccgtgttagcgcgagtgaagccagtgtcctattgtatgtgatgcaatgctggaacctatcactttatagagaggctaagattatagtgcggagaagagcgtatggttgtgcaaaatagctcaccgtgttagagcgagtgaagccatcgtcctatattgtatttgatgcaatgctggaacgagaccagccaacaatatacatatagaaacaaaatataaaatgagaaaacagacgcccactcaacactaacaacaacaaaggacaaaaaatactcatacactctaaatgatatttgaggctcaaatttgataatttgattatggaacctgttcaaagttatgcgtaatcaccatcttaaagaataactagatgacttcaatagaaaccttgagttcctcttgttcatctgaggtcagattcttactagctacaaattccttatgggcagaacaataaccacatgattaatagcaatagctccattgatgttctcaagaaccgaaaaaaaatgactaatggatcaagttgaattatacatacctagcaacctccataagacaataggtatatatcagaactccaaggcgaacaagatgaaccgtcttttcgagacatcctcatcatagtgggaacaataaggattattcataaactgaacagttaagcttgaacatcaatatcatgaaatcacttacacaacattagtcaaccactagttaaacagaaagtaatgaagaaagaagatagaatagaaaaagaaaataacatcacatgattcagtcatttttctctggaacttatgaaagaacatacctggctcaaatgtagtttaaaccatatatagtagatatataagacaaaaatgatacagaataattacatctttctgtgtacacgaaaccattttggcattagtcgcttgatcaataagataattgattgtcgagaaacaatcttacgaaaacaaagacctgaaaagtaaaatctcacagcaaatagaatgtttggtcgttgggtttatgcatcgcttattcattcttttgtttagattactctttggaggcataagaatccattcccttgaaacctaattagcaagaaacctttagcacaaatattttaactaacacaaaacaaaattacagctaatgaagaaatttaccagtcatcatacaaagtctgcatgtttgctagcctcaaaagtatgaaaaggatcgcccaaaacctccaaaaatcaataagttataagtaaatatagggtaagccaaaaaagaacattccactgaaacataatcacctggaaacagagaaaacgtttggctttctcaaattcacaagattctcctaaaacaaaattcaatacttcctagagaacaattaaaaagatggattaccaaaacttaaaataactagataataatggttattacaagtagacacatatcatcactataattcaaaatctcaagtcgctaaaaaccagagaaagtgaatcatcgaacatgatcgatcatcaccttaatttgctaactctttcaaactaaaccctaaaaacgataatcataagaggttgagaattgaatacctgatcggaaaaagctgatgtgttactccgatgatcttttttgcgtgtgtttcgtcagagtaaaaactcaaccatgcgacggcgacgatcaccatctgaagcaatggtccggattcaatcaaacgattttctctcatctttcagataaatcaccgtacagaaccgtactgatcgatcatcatcgtaggagcaaaaaggtctctgatgattaatgcgatcaattaaagagactccgattacgttgaatgagaagaagcgaatacgaatttgaaatttgaaacagagagaggttgaagaatttagagagtttcgtggttatgtgagaaagaccgagaggcattagtaattttgaaatcgaatcgaaaggctccttactttctacccgttagttaattacttaaataccccttcgacgaaacacgtcttctaatttacaaccctttgaacatgagcggtgagccttcgtttgacttcacttacaacctcttagaaaaaaaaaacacataagatttgttaaaagctaaaaccttgaaaccaaaagctctatcatctctaacaacgtaactatggggaaccgtctaaagaacaaaccccctttaatatctcccaagcctctcatcgttcctccaactttaggaaaatctctcatttcaagtgcactttctacttttgtttacatatataagagagttcaaatttgcaattttgcggaattgaacaaggaaacaatgaatttcagacaatacatgataatggctcgagaattggactagtttagttaggattgcctttaataatttaggtcattcttaggatttccataaattttacaatgccatatgatgtaaattatattaaaggtttttatccaaaaaaatatccttttattatatagtagatttttttataagtgccaaattatttataagttattgaaagaatctcttactaataaaagagactaattgaagcctctcaagctatccacataagcattttccaaacctcactaaaatctgccacgtcagctatctaattgctaccttaaacagccacgtaatcatgttcagaagttattaatttttatctggaatcatcaacgcacaaatctatgggtgctcaattaaggttacctcatctctttacttaaaagtcgaagcgttctaccttcccctacgtctaatcacttcctcttaactacatcctcgattatcaagagagtgcagaagcaacgttcatcttccataaaacttctactctctttcctcagcaaaatcatgctccatcatcgagagtgtgttgaagaaacgttcatgcactcacgtctacttacgcaatcgatcttcattgcttttcatcaaaccgtgatagtcatctctcaagcccatgtctacgccgtccaatatgaaacctgggaaagaaaactcaatccccaggaattcatataaaatatgcttccctaaaatacaacaagttgtaagcgctcattctgttttagtaaccatccccattctattttttatagggggtgatattcgacattctgctggatattaacgatggataaaggagaaattctggtttccaaaagaatttatccataaaccattcctagagtcttttatgcatacacggcgacacgaatcgtcggcaaaccatgtttgaggtgaaaaaactactttctttggtgattttttatggagtatgaatttaagtagacaccatgatctatttatgtcaggataaagttttcaaagagagttatgtgaggtttcaagttctgaaaacctgaacatgtacccaacgctgaaaagccaaatctccgatttgatgctttatttttcagtgagaaattccacactaccacacgaatcacagttctagacctgaactgagatttcccaattttgatttgtatatgaatctaatcttattgatatttagggattggaagctataaactgtgattctccctatctctgattttaggttcatttctttaccgatggatcatgaagcaatatactttaccattggtagtttagcatgaccaaaaacgttctttagagagataatataaagtcatggtgaagtgacattgaaggttcagtcctcattgaaaaggtaaaaaggggttccttactctctcgctctctgtgactcttgaatgtttgtatggacagcttattgacagttgaaattattttggttaaacattagtgattttttattagtaagagatgtatcgccttatcaaattgtcttataatatttccacaggggcgagaacatttgctgtcttgacaaaaattgatgttatggacaaaggagccggtgcattacgtaagttgccttatcacattgcattataattgtaaaagaagctgcaactatttgcaattaaaagagctagaaatgcataacaatagttttcgtctaattaggttatgaaatgatattagagctacgacatgctaacttttgtagtaatatatatgttccctcattttttatttttttgctaattatgttccctcattattattgtgtccatccctacctaacaaatgatgttttctgcatagattctacaagcgaaatctcttacacttaagtatatatgggttagtgtagtcctcccactctcttagcttttctgtaaaaatttagttacacaaatcaatgccatccacggtgtaaccttctcacttctatcatgtttgtttcatttatgctagatttaaaaatggtggggcgatggcgaagaagaaccaaagataggctctccttaaaattgtttgtaatccgagaaaaagtcgttggtcgaggtggtgatgggttggtaaaccatggttatgattacaaacgtaaggacgtcgaacccgtcgacagtattgccgtgacgtgccagatatcatactttaatctgaatacaaggtttactcttcctaaatttgtctaattctttaatttggttatgttctttttcctttcaacccttgctgtttctttaatttggttatatatgtttttggctttgaacacttttaaatttcaaaatataaattatagccaaaaaattatcaattatttatttcacatgtgtactaaaaatctaaaaataaataaaaaccaaattatgtaaaataaaatgtatactcgggcgtagcccgaattttcctctagtatatttaatttttttttattcaggcctaaaacctatacaaaatcttaagtttgtaatgaaacctatatatatatatatatatatgtatatatatatatagtatagattcattgatgaacaaactgtccgttgtagcacattgcttaaactttgaaatcaagttaccctctaattggaattctgggttcgaatcccggtagcggaaattcttttttttttttaactataagaaaaacctttacacaatctatatgtatattataaattcatagaataagaaataatccgctttagcaaacaggctaaatgctataatgatctgtttgatcatatgctcatcccgggtttaaagtccggcagcggaagttaatttttttaatctgttgaaagagtgacagtattacatgcttgtaactaattcagctaagaccttattaaacacttgtttgctatatatatgattttaagaatattgcacacaacttttcagatgagaatggcagcagttatgtgttttgagtaaccgtcaaaatacatctacacaacaacaacaagagaagagtgagtgtatacagacaaaagtacatagaaagatttgttctttttgaaaccaaagcaaggaagccaagccgctctccattcttcttagcaagcctaataagcccttgtctctgttttgcatcagctccaaaactttgtgatcacctgaaagaacaaaaacccatttccaaaaaacacatggacttcgcttctatgactagttctaaagcgaatgattaagaaaacctgagagtgcaaggcaatggcttttcctctgagctgattaaaactcttcttgcctactttgttgcgtgtgacaacaactatagatgcaaataagcctttgccttcattgacattctttatcattggcactgctttgattgctttccgagagactctttcttgttgcggtggcgcaaccgtcttggagagcatgttttggtaatcttcgcttgacatggaacttccccaacctccaaaaaggaattccgggttcgaagcccggtattgaaaatatatttttgttcattttattagtcttagtcttctactcttataaaaggcagtttcgttaatgttgaatcttgtaaaccaagcgaagttatcgttgtatcttattataacgttcttatttgattaatgacttcaatgtgtttacggcttttgtattgatttctagtttgcatgggattgttatgggttgctgatctgcctaaatactcttgtttctctttttgtttatgacttttcaaagggttgaattctgagtcaatccaaccttttttgaagcttccttcgtttgatttcacttacaattcaacctcttcgaaaaaaaacaaataagatttgttaaaaccttgaaaccaaaagctgcagatctatcatctttgacgactataggaaactgtctaaagaacaacgtccctcaatttctcccaagcctctcatcattcctccaacttcaggtatatctctcatttcaaatgcactttctacttttgtttacatataagagagttcaactttgcagctttgcggaattgaacaaggaaacaatgagtttcaaacaatatatgataatggactcgaacattctacgaaagctctctcgagaattggactggtttagtgtgtatttaagctattttacgtcatacatgaaattttcttgtgtttatttaattgcctttaataatttgggttgtgcttaggatcggatttccataaattttacaatggcaattaatgtaaatctattactaataaaaggaactaattgaggcatttcaaggtgtccacattagctttctaaactactactattttataagtttccacgtcagcattctcatgccatgtctaaaagatttgattttaggttttcacgtttctttgtggatagatcgattaactttcccttacctcttcgacatcttcgtaactacaacaatatggagagtcgtcatcttcaaagcttctatatatttccagttcatctaatattcctgcaaactatagaatttgttcgtaggcctctccgcacgaatcagatgtttgaatctaaaaagtggacttcagtcgctgtgtgggtttgaccagagaaaaggactagtagaggggatagagttcaaaagatctatggtaagtatttccctttctaatcttttttaatctatcataagtaacgtaaatatataaataaaccctaaaccctatatatatatatatatattcttctaaagtctaagaataattatttgttaatctaacatgtgaaagttcaagataaatagtttttgttgactatagaacaaatacagagtaaacgtccatgcaattagatcgtttattgtagtggctgactcttttgatgtgtaatttctttggcacttggcagacccattcaaatttatagacatttatagatgttgttttgttttagtattcatgccatcatttgcatcaatgttgttgtgcagtatctatatatgatcaaggcatggggaaaggcatagccagagaacaagtatgtgaattcttttaccagatgggtctgaaatacacacaacttttaggactggatcttggcctgaagaatggagaggaacatcaaaaggtggtgtggtgagtgacacattatcggaataaaagaaaattaaaggaagggtaagtaaattaaataatatatgagtgtaattaagcatcaataagggcagcatctagcttccctctcactttaccagttccttgcattgtcctttatggcctgaataacaaaattaggtaataaaataggaaatcaataaaaatagattttgagtacaatatatcaaattatcaatgctaaagtcttcatgactgcagatgggagttgtggtcaagaagggatttcgatatggtgtagctatattgctatataagcatttgattagaaatcaatagattaatccatggatgtccaataagtttttaataaatacatagtctcattttgcatttgtcaaatgttagagatataccgggcgtaccccggatttttccctagttatattgaaagtttttatccaaaaaatatccttttattatatagtagatttttctataagtttcaaattatttagaagtttttgaaataatatattaattttttttttcaggcctaaaacctataacaaaatcttaagtttgtcatgaaacctatatatataataaaaattcattgagtaacaaacagtccgctgtagcacattgcttaaactttcaaatccactttctctcaaactggaactcaaactggaattccgggttcgaatcccggcaacggaaaatctttttttattaacctttacgcaaatctatttgtatattataaattcattaaataactaacaatccgttggagcacacatgctaaatgctattatgatctctctgatctttcttatcccgggttcaaagcctggcagcgaaaaagtaataggttcatagttataggcgatgagtacaccaatggatctgtcaccatgtcatatgccaatgattcaacattgtgatacttccacatggattatagaggatccgtgatccggagagattggagtgtgactacgagaaactcgacattaattgatgcgtataattagttcgtacgtctccgtcctttgccctagttttagatagcttgcttgttcaggtcacgaatctacagaaacaaaaacatcaatttaatttttttgtcaatatcagttgcaacaaagtatctatcaaaacacaatttgtatcactggctcttaaagtgtgtgccaacaagaatttctctctcacaaataagctcggacaaagtaagtgtatgactcttaaagtgtttcgcaacaagaatttctgtttaatccatatctgttgggatataagaattaagggcaagagattttttgtgaagagactgtcgtgagcattgggacaaggttttgagcgaggaactttttagttcaaagttggacatgatttttccagggaatgaagatgacgcataggcacttgacgggacaacgtcggaatattttctaactttatgttacacctgaatatgcagtgggaggaatcttgtcagagaaatcttatgttttcatcttaggagtgatactctacaaattatcttacattaaactcaaattatcttatgtaagtctaccttaactctacaaattttacaaactttttagagattgttcgcaagctcttaaagcttctttgtttgagtttcattaagtaagacaaaactagtttctcgaatccagaacgtacgtacctaattaaggtttctctcgctttccaaatttctatgaatcttttgaaaattgaaatttttggtataattaatatcaatattatttttgtgtgaattttccatcaccaaacaacaccggatccaaataaaagacaatcaaccggatggactcctcctcctcgttttcttgtcaaatgcaattctgatgcttaataatcttcccaagtgacggggggggctggctggtacgggatcatcacggatcaatccaagcttggtgcgagtaaccaaccttgttgaataatttcgcaaaaaatattcacatacatctaaatttatacattatattctaaattcaaataaaaacaaaagatctgctgtagcactttggtttatactaaatatctaggtctctttacatctagatttgaattccgggttcaaagcctggtagcagaaaacctttttgtttgatttcaaagtcttagctttaattatatatattgactttgttctcctactagataaaagcccgcgctacgcagcgggatatgtttttataaaataattttgttttaatataagtatgattaaaaaaaattttaaaaaggctataacattttatatcttgtattttctcatattttagtaaattttactttatttatgtatgtatatattaataaacatgtaatatattagttttaaaagataaatgtaccgtataacatatgttatatattaattttacaaaataaattgatataaactcacacataatttgttttttgttgatataaactcacacataatagttctaattcatattatttgtaagtgacaaactaaatttgttttcttatgaacttcaatctaaagagttttttacaaaaatccaaggataacttctattttttaaagttttttaaatttcactcatcaatttaaattctagtgctaaatttcatactcatggtttcatctttagttataggatttaataaataaaaaaatatttcttttttgttttaatatatttcacttcattaaagtatgagcgtgctaggtttcattttaatgattttattctaactaaatttaattttcatgaaacatatgatttcattttttttaatcttaaataccaatattttttaatgaagctttttgttttcgagaaacacttaaacctcaaattttaaataaaagaaacattataacgatctttatataattatctaatggatcagaaaaaagctaaatataatgatacatatattaaaaatgaattacaaaattttatttaagataataaagaggtaataaattttttttgatatatgtactataataaatttatttattaaatattgcatagttaaaaaacaaatacatggatatgttagaaaataattaaacatctaaagtagaaattggagatggatcttcttaacattatttttcttgttgtacgatgattagaattgatattcttaattctccatcaccaataaacctgaaagttttgttataatcatcaaactttttattaataaatttgtttttgatatatgtactacaataatttatttattaaatattgcataattaaaaaacaaatacatggatacgttagaaaataattaaacatctaaagtagaaattggagacggatcttattaacattatttttcttgttgtacgatgattagaattgatattcttaattctccaacaccaataaacctgaaagttttgttataatcatcaaactttttattttgcttctgaaatttaaagaagaaatattatatgacattctttctataataaatttagaatcaaatttttacaatgatggcttctttgatattaacccatatagcaatataaaaaatagatacatggatatattagaagaagatgagaaaatgactacttataagataataatctaaaatagacaatagatattaatctttaagaaatcatatatatgaaaggaggttatctctctccatatggtcgccatgtcagcattttaggctcttctggagatgccacatcagctttctttccatccaattaaaacatttcattaatatgagtcatcttttattttttacacatcagcttttaattataaatgtcaaatggggaaaacacaatagcccatgagggatggtccatatgaatttgaaaatctaattcacaagttaataatatatttattatttaattctatatattatttaatttttttacatattgatttttactaatactaacttattttgttattttatgttatttttccatgaaattattttattggtcatatatactccaaagtttttttccgctaatttttgtaatcttaactcaaaatatgagtggataatagtatagtggattagctaatggtttgagtaagtttttctcttatttttttgatctatatatgacactgagggtgaagagtacgtaagttcatcaaattttggaggttctataatcccaacattaccatctataaaattggtttaggaaagattgtttacggattgtgtgagtgatgcattgttgaatatgttggttaaaaatgtattttaatactaagagtagttgttcattgtatgagtaaatgattagataattaaaaattacatttatcaaaatataacatcaaataaatcaaaataaaaaaaaaccggaaaaaccgaggcgtaaaacgggtgattaactagcaacaagaacaatcaaaataatttgttattaacaacttttaaaacaaactcacgcttagcgtgagtattcatctagtatatatataaaagttagccaactctctccatatgagtgtcacatcaccacacaagaaaatgacatgtgtcatttaactttatttaaattaaaaatcagcaaaattaattgaggggaaataaaaagtctcatattgtgttaaatcctccatgaatctcattcttaaatgatttcttcaaaataaaaataaaaatattaaaattattttaataaatcaatcactacttttattttacttttcatatttttctaattttttaaagtaatggccaatggtcatcactcgataatgactaaaaaattaattatgagtgttgtagacttgtagtttagttatttgctacctaatagtaattttaccctgaatatttttttgttattaggttatggttcatatcttatcatatgacattctttcttttcatttttgtgtcttatggtaagttcgtaacattgacatgcaaatttttcaagtaatgagcttttgagacgttagacatatcacgaaattcaagacaaatttatttcttttatatggctatatgcaataagccaataacataaaatctaaaagtgttacttaaataactctttaattttggctttctttttcttttttcatacgaaaactcttgagatcaaaatatccaatattcttgttgtgtgtattcatgataatgaacaaatattagaatcttagatataaaaataatcagattatacatgaaaatgtataaattgatatttagaatcaaaaacgaatctaaccataaaaattgtaagtacataagatgagtctaattttatcaactatacagtaacaaacaaaaaaaataaacataaattagcgacaaaaacaattagcatatttttatattaataattttcaaaacaaccccacgctacgcgtgggaattcatctagtaaaaaaataacgtaagatagatatcatatagtctctaaaattaaaatttagaattatgcttttacattgatattaaatttgatttttttaaacccagacaacaataacaaccaaccaaccaaaaatagaacttaaaaaaatatatatatatatatatatatatatatatatatatatatatatatatatatatatttgagatataaagaagaggatgaaagatgaaagaatgagagaatgagtgaatgagagaatgagaaaatgattatttatagggtgagaatttcaaaaataaataaattatgggagttacaatttaatttactgtgtgttaaatattatcttgatccacaattgttttagtttgtagaaattggttattttagatgaccgttttgtatcttttacgcctacattgtgcccctaaacatataaattaagctcccggccaaggaattggttaactcaagtatgtgtagttggaaacatctcttatgaatttgtgtgcaggcgccgactgatattacttgatgtgtatgaatgagtttttggcgttcctaggtggaggaaactttgctctttctgtagacgaatatatctcttaaggcacgatctggctcaatctcattttgaagaaattcccacttttaatagatttgatgatactcgaacgaaagtttcaagaaggtgaaagcaactggcaacaaatgcaccttctgaaacctttgggaacgaatgtttgggtagcagaacagagtttgtgttaaagaatgtcgaggtaatgctgcatatatgttctgcgatgacaactttattcgacatattatgcaatcttacttggatcttggactaatcaatgtatgttcatgttgttgaatcttacttggatcttgaactacttacctttgagatcgaaccttttctttgttgagaatcatgatacatcaatagatagcaaagcttaccgtccttttccgatcagttgattgtttcagagttatgcttaggcttaagacagtttttttcaggcgttagtctgttgaaagagtgacaataatattacatgtttgtaactaattcagctaagaccttattgaacacttgttt

SEQ ID NO: 5400 - DNA, 3071 bp, Arabidopsis lyrata
  Intron number 2 from transcript 327685 (locus 327685) deri ved from phytozome v7.0 (chr-ID scaffold_6; pos 24588694 t o 24591764 reverse strand)
gcgagggtttattcttaaagaaattttgacgtttagtgtgatattgactttctctctcacggtttggcaaagtcaaaaaaactttccatagaatagctagagaaccagaaattaagagaaaataaacgaaataactagagaacaaagaatggttgttctttatttaaaatagaaggaaaatttgtaatgaatctgaaatttcatggtgaaataattgattttgtttcattatcaagtagagagattagagttaaatggattaagaaatttccagcaagttggaagaaatgacagaaattagtgagaaagcaaatgttcttcctacgtaatcgacttaaccaccaaataactaaacaatacttaaattctttagcttttcgaacttaaactactatcgatttataatatttctatgtaaaaaacattcaaaatgtaaagaaaacaagattatgagataactactaatgacgactgcaaattttagggttgcagaagaggataactcaggttgaagacgactgtaaaattacaattatacccttcatcaaatttctgctgtgtacgtatatataatttacggtgtaataatgtacatacatctttgttggtgacttaattttgatgggatatatttgttgatataataaaccactattggcgagggatctattctacgatgttcctactagagatgaaaccactgttatttaatttttttatgtttctaaatacactccgaacaaacaatatatgtcttgtcgtactaatttatacttttgtctcatcaactcggcatttactaaatcatcgaagactagagaaaatccactcaattaccattcactttacatctaccatgtcaatttgcatttgtgtactttaaatattcactgtcatatacttcctcgtgtacataattagtaatgtacgtacattcttctaaaaataatgtcttagctcgttatgactccacatctaacatgcacatctgttttcgtatacgtcaaacattcacctttacatacttcatgggtacatagttagtagtgtacgtacattcttccaaaaatcatggcttacctcccttacattttcaactgcaacctctttacctctccaagctgtagaatatgaaatccgaacattgagatcatttagaagcaactgtggtaaatcgacagctctcggacccccttgcgtagaactgtatctgctcttcactacctctctgagaagcttataactagcatgtttagtataattcttccaagtgtcaatgtcacacgtatgggtggtatcatacgatgtgattttgaaatatttcgaattcttgacgacttgagcagtcaatgccatggacaattatcatcaactcaaaccatctccaatcttgtaggacatgaccgaggttgcttgtagcaaaatcattctttgattgcaagataagccattgtttgttgtatgactttcttgttcataaaaacacttcccacatacaaagtctcacatgtcgtactcagttcaacttgtgtctcattggcttaatcatcgaataccggagcaacatcattatagagaatctccacctcaccaccatataatgaagaaaagccactatacactttgtaagcctcagctgcggtaactagccgatgatcattcagtgccccacttgttgatgctctaataccacactcgagaacatcatccctagtaacttcgtctataccattaatattggtatccgtgtacgtaacaaaatcacctttgcagcctgtatcttgtacacattcgctagtgtacgtacattggtacaaactatatcgaaacgtacgtgttggagtcacggttggtgtacggtcacccaaatgagaaatgttatctccgccaggtacatgctgacttgtgtacgtacactctgccaatagacgactgaattcccctgaatgttcaacagtctgttgagtgagaatgacgtcctcctcaacattcccaattccatattcttttacaattacttcattccacttgttgtaatcgtaatttttgccactaccttcactaccatctatagtaggatcgagggtactttcccctattcatcgtcgccttgatgatcatcatacccatcaccctctttgttgtcctcctcctcttcatctctatctgttttatcgtcctcaatgtcgtgttgctcatctacggcctcaatatttgcatccacatttaaaggcgctacaatggtttttggtgtctttgcactcccagacacatggtcactttcagcatcatggccatcattcctagagacagtatttctgtctgccttgacggttgtaataaaagagacaaagaagttcactagtatccccaccacgaatcaaaaagaatgtatccaggctcatttaattgtcaatttagacaggaggacatttactttctatcatcatcgacatcttttccggcatccagtaactaattataggattgcattcagtggagttcaaactgaaaatctcacataatgtacgtacacgtgtacgtcatgttttccttaacacgtacacaccgaccaaacctgctttcctctggttcaaattttcattcttcttctttgcatcaccattcaccaaccatattaaatactaaaatatccattacccacctgcatcataaattcagcagaaccccattaaatgcaactgaaaacatgattaaatctacaaaaacaaaaagaatttccaactacacactttataaacataactaataactatatatcctcattagcatttgcaacaaaacaaaaatggaaataaaaatttgtggatttttatatcaaaaccaatgttgatttcgtacacagtcacgatcaagtgtgttataagaaaaaacttcttaaacaacttcattacttacacgatcaatgcttctcttgtctccaaactttgtaaaacaacaaaatcaaaacttctccagcatcacatttgttcataaaaaattgtttgtttgttttttcttgtttatctcttaaaattattcataagtataaacaaatattataagaggta

SEQ ID NO: 5401 - DNA, 35099 bp, Arabidopsis lyrata
  Intron number 1 from transcript 493953 (locus 493953) deri ved from phytozome v7.0 (chr-ID scaffold_7; pos 22400872 t o 22435970)
tctctctctctctctcctcgccagcttctacaattcgaaagttcttcgcatcttgctgtcatcactctctcgcgaatcgaatcacgattcataatcttcttcatctctattgcgatctctctgaaatttgtggcttcatgatttcaaaatctctacttgcatcaccaatcgttgtgggtgaggggttttgtatcgacgacatctatagctccggagaagcatactcgtcttcgatgttcttcttcttcgttttgattttcagatttgtttaactcggccgctgcgttgacttaatattcttgagagagagagagagagagagagagagagagagagagagagaggagaattaagagactcagaatcagtcagactcgggatctttctcggcaatgcgacgcttgttcaccgcgaaatccctctccagagaggaaccaacctttttatcattctcttcttcttcggcgacgcgtttccacaaagctcttcttcttcgctctcgtcttcctctccgttcagatccaagacatgtccgctaattctcatcctcctaattccaaaaatgtcctctgcaatgcagccgccggtgccgccgctggtaattctctcatctgcttctttcgaaactttatcttgattttgttttggtttattaaagtttcaaaatttctgataggggttgttgcggctacgtttgtgtgtcctcttgatgttataaaaacgaggtttcaggttcatgggctaccaaagctcggcgatgcaaacatcaaaggtttgtccttttctcctttaaattttctcagaaattagattccattgctgatgttagttttaatgatatctcgtttttgatcaggtagtctaattgttggcagtcttgagcagatcttcaagagagaagggatgcatggcttatactgcggactttccccaactgtgatggctcttctctccaattgggtagtgagttttacttcttcttggagctatcttctttaattcgtatttcttgtatttggggactgatttggacttttgcagatttattttacaatgtatgaccagctcaagagctttctttgttcaaatggttagtgcttctgaactcaaaccttcttgataatgatagctgtttaagtggctgtttctgcgtcattttttaatcaaaacttaaaaattcttctctgattgttgtaattagatcacaaactcagcgttggtgctaacgtattggctgcttctggagctggagctgcatctaattaaatgatgaatttgtggaattgaaacgttaaggcattggagaatggagatttggagaatggagatttgttcatctcttgggaagctgagtcagacgaaaaggcttatccacatttgggactaatgggagaagtgataagatccaaggaagaacgaactttgagcatagtagcaatgaagttataattgtcatctgccaaacagttaaacttctgtgtttgtagcaattaattaaaaacatgggtttaaattaaattaatcaacaattaagggtaggttaagttgaaaccgaaaatgactatgaccggggttgtggtttagaagaccgccacgtatagtgtctcagagacttcgaaaagatccaccattcctgcttgttgttacgaaatcaaatcattgagttttgaagttaaaagagttcgtggagaggacaaactcgcaacaaattaatttatttatccgacgaattttcatcaattttcctctccatgtccaacattgaattgtatgtagttggagataatcgtaagatacgaataaagaagtgattgatgggatgaagataatgctaatctgaatttctgcataaatgagtatgtttatacatattcagtctatcaaaattacccactcataccaaatgtttcctatcttattttgtaattttgttagaagcataatattgtaatagcctaaagaaaataatatcgactacatcattctacaaaattcgaagaaacccaaccgtgtaagaattaatggcgtagaagttatactaagtgaaagaaaaatcccctaaaaagttaaaatgaatacaaacaaaaacaaggattaaaggataagaagagaaatgaggttcaccagtaaactcaatcaactgaatactaataaactccgatacatcggaagtttatcaacagaaaaagagagagaatgaagaagctataacaaactttattcaacgtaaaactctgtttacaaaaacttgactcactaatctcaacgtcattcaacagtgatctcaatcgtgtcggtggtccaaccaactgtacagtggtctatatctatatctatatatgtatctgtacagtggtctatatctgtatctgtacaatgatctatatttgtatctgtacagtggtcttttgtacaatggtctatatatgtacagtggtctatatctgtacagtggtctatatctgtacagtggtttatatctatatatgtacagtggtcttctgtacagtggttttctgtacagtggtcttctgtacagtggtcttctgtacagtggttttctgtacagtggtctatatctatttgtacagtggttttctgtacattggctatatctgtacagtggtctatatctatatctatatttgtatctgtacagtggtctatatctgtatctgtacattggtcttttgtacaatggtctatatctgtacagtggtcttctgtacagtggtctatatctgtacagtggtcttctgtacagtggtcttccgtacagtggtcttccgtacagtggtcttctgtatagtggtctatatctgtacagtggtctatatctatatctgtacagtggtcttctgtacagtggttttctgtacagtggtctatatctgtacagtggtctatatctatatctatatttgtatctgtacagtggtctatatttgtatctgtacagtggttttttgtacaatggtctatatctgtacagtggtcttctgtacattggtatatatctgtacaatgatttatatatgtatatatattatttgtatagtggtgtgtaatataaattttaaaaattattaaacaaaatgcatatcaaatgatagagaaaaaaacatagatttttatttatatgatcaattttagaaaaattaaatttacgaacgagcattttaataatcaaattttgagggaatgaaatgtaataaagaaagaaaaagaaatttataaaaaaacatgacccactaaaaaagtccctacacgtctatctctctctctcaccaagtccttacttgtaatttccattctttgccctctaccccactttctcttctatctcacaagttttctatttcacaaacagtaaaaactgactattttactaattatgaatagtaaccgtactacttctacaattatgtttcagaaacgtactactttcccaacaaatccattctattacacagctttgttatgttttctcttcccctttagataattcgtcttcaattagttttctcggcttcatttcgatcagttgatttattcggttaccggagaataagagaaatttgcgagttggatgattgaggataaaacctcacacaaaaccagatactttgacacttattaagcattatgaagcgttatctattagatcttaaaaaatatacaaatccattaaaatcatattaagtatttcggttcaaatcaaatcgaattggtttatcaaatcgaagaatgattatacaattaatcttacacatacatgtttatatatgcatgtataaagaagatagatatcatataatatgatcatagttaggtcttgaagctgtatagctccacatgtgttttgacaatatataaaaataaagtaaaaacgacaataagtgtggctaatcagtatctaaagtcatttaagattttggattaaatgttattaacaacaccttaagctcttgaaaaaccttctctataaaagcagtagctacctgcccaccacctcaaaatatcaactctctctctcactttcagaactctccttttctatttctctctagaaaaatatcctctatcaatcatatagagtaatttcattacaatggagaaaagagaaagtagtggtgggtctggatcaggagatcatgcagaggtgagaaaagggccatggacgatggaagaagatatgattctcatcaattatatcgccaatcatggtgaaggtgtttggaactctctcgccaaatctgcaggtcaaattcttttttatatatatatatatatatatatcaagatctccaatataagttatgcataatatatgtgtgtgttgatgaactagggtttgatcttcaccttcgaggatattataaacattttaatcactatatgatgatttcagttttttttttttttttaaaccttttatgggttggataaaaactatacttgagctttttgttactcaatcgatctaaatatgattatatgaattaggaaattttcttttcatatgaaaacaagaaaatggaagcaagactatccccaagatcttaacacatatataagggaaatcagtaaagaaattttttttcttatgcccggatcttaattgaatgtttgctaaaagcggtcttgactgaaaaacataaatcatcgtttataaatctctattgtatgtatatctaactggattagaaattaactacatataattggaactttttcttcaaacagatcgcttacaaaaggtcttgtttcaaactttatatacacacaagcaattagtaatatactaccgcaatagctagggttttaaaaagttgacctttcttcttacactcctgatgtaagataaacaaacttatctggtgaaataatctctggttagaattgtcaccgaaatccactaaaaattgattagggtttaaaaaagaagaataattctaaaagttattttaaactaatagctaaaaacactaatagaaaatgaaaaatatatatttaatttcttctttctttcacaaataaataatacatatatatacatgcatggacataaataattttgttttggctatggacatgcacacgattgatattttgtttcttcgtaattgattgtaatataggactaaaacgcaccggaaaaagttgccggctccggtggctgaactacctccgacctgatgtgcgacggggaaatatcacagcagaagaacagctcatcatcatggaacttcatgcaaaatggggaaataggttagtggttacctaaatacattaaattctaagataatcaggttatgtgtaacgagagaagcaaagctaagttttcgaacattggatccgttttatatatattcttgaggctaaagactgaaatgatctttaaagagacatcaaagcaagacattaggtaacgaagccaaacatattggtgggtataacaaaactttccaattcttttcagccatttgtttgagttttacacacgtttcgaaatttcctcaccactaacattaaacctcgtgccgattctcccacaaacttgtgcatggttgttattcttttacacgaccatatacaaagacatataccaaaatacgcataaaagtgatggatataccgaaagttagatattccatatggtggtgtaactgaaattttgattgaagttgaatattatttattttttcaaaaaaaaaaaacaagttgaagagtatttgatttagttacttatctttcgggtcttggctcttaaatttttttaaaaaataatctcactcttgccatgtaataatagcatatattttttatatatgaatgttaacttcattaaggaatgaaagggtttgtaactaattacaaaatcgaagcatttggcaaatgttgttctaaaatcaaagcttacaaagtctcaatgcaaacctttttttatattcctcgatgtagatgtatgtagctgtttccttgcatcaacaaccttcaaatataaacatttgttcatcataacaaaatatataattcttcattatgattaggtggtcaaaaattgcaaagcatttaccaggaagaaccgacaacgagataaagaatttttggaggaccaagatccagaaatacataatcaagaacggagaaacgacgacggttggatcacaaagctccgagttcataaaccatcatgcgacaagcacgagccatgtcttgaatgatactcaagaaaccatggatatgtattctccaacgatgtcgtatcaacatgccaacaatattaatcatcaccttaactacagtaattatgtgcctgaatcggagtcgatcatgatgccattatcagttgatcaatccgaacaaaactattggagcgtcgatgatctatggcccatgaatttatataatggtaattaattaataagttagttaaaaccttatatatatatttacggtccaaagagggtaacaatatacgagtatttctaggcctaatacttaatataaacagatatgagaatatatgagaatactatatgggtttgcctcattgtttagagggagattttatagatatttttatatataactcgtatttgctatatataagcacccatttcctattgttattgcaccaattcgacttttacataaataaaacagcggagtgaaccatataatttccgtattttaaaatagttggttagtgctctcttgttaaagaatggtcgtttgatgtatcatgtatgtcagtatgtataagaacaccctgcaatatatcttatgtttttttgtcatcatattatgtttttaaatttaggtgtgtgtattttttgtttctatggacatggtgaaaactgaaaactgaaaactagatataattttggagacaaacatccaaaatttgagatctaattatttgtatttttatttacatacattgtgccaatttgacagagtggtgatagtagctctaaccagtacatgtggatcgatgaatgaaaggcccacgtagctctaaggaatttcaaatcaacttttatccttaattaattaagaatataatcaacctgaaatgatcatctatttctgatgtggcacacgtcatgtctatagagtaattttagaaacattttcccatcaattaatttctatagaaaaagtggtctatggtatagatatggttatcgtaaaaatcatttaaaaaaattaaaggccttctctatagttttaaccagaaccgatcctaagaatttgaaggtcagaagcaacaaaagaatttcaaagcttattatttgtaaagattctaaaagaaaaacaataaaaatagaggtaggagattcaaactgcttacctactacttaaacattaatattgacaaaacacggccggttagatacataaaggatttagaactgcaaacccatgcttcttttacttggcctcaaaatccggttctgattgtaacaacttaaaaaagtatgaaaaaatttgatatataatttaatttttgaaaagtccttagatttttttttttggggtcaaatttagaagctaactaaagattaaaatgaaatatggaaacaaaattaaggttacatacttacatatatatcaaaagagttcatcaaacattttttgtaaaaaaatttttcctgaaatttctaaaaattatataaagtctcttttgggtgtggaaatacatgtacatgtggatgaatgaaaggcacatgtcacatgctatataacattcataaacatgtataacctaatctattaacctatatatagtcatagaacatgtgtcatataggtttttacaatttccccacttattattataacccttattcccaatgtatccagttttgtgcatgacaatgcaacatgtggaacccgacgttagcctaactctttgagccgaactttcaaaacctcaaatatttctaagaaatttccattagaggaagaaaagaaagacaaaatgaatgaaccaacaatttaaatactcgatctaaagataatattagcagaaaaattagttttcaagaaaaaaaaatagcagataaaaagaatggtaattgatgtggaatagttgatgtgcatcaatgctgttggtcgactataatgataaacaaagcggttaaagtattggttagtatatcagaaattcagaatgctataacacctaacgtctagattaacttgagctttagcaattagcatgatgattaatttttaatccaaaaatcatctgatattactaaaatagtaataaagaagaataatcggaccggcgacagtggcggaggtacttgagaggtaggggggtcagttgacccctataacttttatgaaatttgtttttttaagcctaaaaaattactagatgatgaatttttggctagaaacatatagtatgacccctatacccacacctcaaatcttctttttgcaccctacgtcaaactttttcaattaatcgtttcttgcttttattgtttaatttataatattgaacccttattctttttcatattagttctcatatttccctacttacatatttttccttttttcaatatataataattaaatttgtattattgtatatatcaacaataattttttattaaactaaaatattataaatttttatttaaaatacatgtatgacccccgtaatatatatttttggctccgccactgaccggcgagggtattattcgtggacgacaagaagttcggtaagggagtgagttcactatagttattaagacggccggcatatctaaggtttaccaaactttttgctttagccacagggaatcttttgccccaagaggcacacttgtaaaaatatataaccaaattaaatataggttaatatgtatatatatcaaactaaatcaatatatatcaaatgttatcctcgcatatatacaatttatttcacatatgtaatagtggtagagatcatcgtcttagttgagacttaattaattaatatgaataacaaattacatctatgtatggtttcgctattatttctaatcatgtagattaaaaccattttcttaggaaagagatatacattaaggtgcacaatctggatttggatggatagaaaaagtagaggcattggtttagttatcaaatgttctcatcacaccaagagacttagatctcaatcaatgtttccatattgataaataaaaaaacttataaagtagacaaaccgttgatataatatttcacgtccaaagagagtagatcacctcatgatgaccaagttgcttatagtgtttagattgtatagcattcatattctaactgaatctagaacatatgctcaaatcatttcgtttggagttttgacccatcctcaagtcatcttatatatgcattctaggcaagtacatacatatatgaaacattaaatttgttgaattaggttgcatgtcttgttagttttgcccacatgtttttcgtgtgaaaattgtgaatttcccatgtgaatcataaatgaacacataacatggtgggtcgttcacaacttacaattgggaattatttaaaacgggcatgaatttgtgttccattttttcattatacttttgttcctctttccttggcaatgtaatgatccgtctcttacgtagccttgggccttgggcttttgagattgattgatacatatcacacaagttgggttcaagctcattgagctttcttttaaactatggttaagtggggaatcatatatatattatatacttcccctaagaatatttttcatacctcttcggcttttacatggtattacagttctagtagagactatatacagttttttcaattggttttactgtcgattctaacatagaatcatggatcatctcgggagaacgtgttgttcgagtaaaattaacacaatcaagaaatttccgtttagatttattgaattaagatatataacacactacacatgttgctcgccaagaaaaaatagatcaaaacatatgaattggatcaaaagatttatttaagcgattttcttagatggtgtaacataatttgaaccaaaagatagtaatgaataagatcggcaaaaccatgacctactaacattgtacctcttccagtgtgcatgttgccaaagttcaatttacccaaaagtttttgaagatataatgggccgagactaagaggttttactctcaccgatagctaaatttttttcacactttcatctttatgtatattaatcagggccggtccttgacattatgtggcctaaagcatgcttaaactatgtggacttcttatatactaatgattaaaaaaattaacattaaaacactataatttttttttgtaaatcatcagatatagttgatgaataaaacattaaatatattaacaacgtaagacaatctaatttatttccgctcacaaaaataaacttttctaattttttcttcaacaaattcagtaattaattaggttttcatagtcgagtaataatagattaaatcagaaatatatatacagaaatgtaattgttgtcattttcgtgatcgtgattcgtaaacatagatattgaatctcacagttatatatgatattgaatatcacagtgacgctagtaattagttctgttgttcttacgaaaatgattagcatgatcactttagcaaataaaatctattaaaaaaaactggagggaagagaagaataaagagataattaaagagagaagctggaaatattaccccaaaaaagaaggaaccgtgacttcaaagggattcgaattctatacctacaataaacttttggactatataaccactgagcaaatataacatttagaaaaatatggccctaaaatttagtttatattcagtggcctaaagcttgtgctttagttgctttatgacagggccggccttgatattattaattatctagaatgttttagaagctttgaatgtcttagaaatttgcaaagattgtatagaagtgtagaaggatatagatcaatctccaccgttagatcagtttaatccatatatcctttgtggaagtgaatttgtttttttctgagttggattcctcattgaaaagcatccaaatatatatacaataccgtcttaatctatagaagggcatttggtaaaactaaaaaaaaaaaacttttttaacaaaaattttcttaaaaaaaaattggaccctttttcttcgttaattttttaaaaaatggctttggacccatagcaaatgtctatattacaatggggtagaaacggaccgtctatgttgccatgggtagagacgggcctatatatatacaagtaattaaacactgctggctttggacccatagcaaatgtctatattgcaatggggtagaaacggaccgtctatgttgccatgggtagagacgggcctatatatatacaagtaattaaacactgctctaagcaactctctctaaataccgggatcactctaaagatgatttgtaactgcaagcactaaattttaaaagactcatcagtcgtcatcaacaagcactaaattttagataactggtgtaataataagattgggccgagcaagtccatatttcacaattttaaaaacggcaaatatatgtgtcgtttcaaataccaaattcaaaatctctgcttttattactcagcttattaagccgtctaagcatattacagctgtcaatcatcgaaagcatgtgacgcgtctctcatttcgcatcccactcgcgttcatatacacgtgttatccattctccattcgattaccgccacgtaagaatccagataatgacatatcacagagaaagcgagtaagctacattttatactcgcggagctggtcagtttgtcgtgaaagcgacacggctgataagatatatagggaaataaattacaaacgttgtcttattcatggtgcaaaaaaaaaagcagataagtaagcaaaaaaatcattaattacgaaaatacccttaaatttctccgatagggaaaaaaaaaagttctgcgccgcgtttcaacgctcaatagtgtttcatcttctctcaaatcaaaatccagagagacaaaaaaaaagattttttctcatcagattctgaagagtgtctttgttcttcttacaaagaagttttcttttttcttgaagattcttcggttgctgttcgaaaagttttcgttttcgtttctctcggagctcaaaatcaggtataaattattaattttcagatattttgttgtttgtttttcatgagatttaaacctaatttataatttaatttggttatttgggagatattgttggtttcgtgtgtcaatagttaggttattttttgtttttctgatttgtttgtcgttttctgatttttttttttcttctacagtcggcgagaacgtttttctcgggaaaaaaatggaaatggaagttgttttgggaatcggagaagaggcgagacctaaaccttgttcttcggagattgaatcagctgagaaaaccctaaaagatgatggtgttgttcaagagaacggtgttagggtttctgaaaacggtgagaaaaactcggatgctattgaagattgtgtgatgaatggagtttcttctttgctgaaattgaaggaagatgtggaagaagaagaagaggacgaagaagatgatgaagaagaagaagaagaagaagaagagcatggatactgtgtaggagattttgtgtggggtaaaatcaagaatcatccatggtggccaggtcagatttatgatccatcagatgcttcagatttggctttgaagataaagcagaaagggaaattgcttgtggcgtgtttcggagacgggacatttgcttggtgcggtgcgtcgcagttgaaaccgtttgctgagagttttaaagagtgttcaaaggtgagtaactcgagagggtttctcggtgcggtggaagaggcggttgaagaaattggtagacagattgagcgtgtattggtatgtgattgtgctgaggagaagcataagtttgatagtcctgtagttaacaatgctgggattaaggaaggtgttttggtgcccgatgtgagacgggaaatgatttcgtcgttactggttgggaaacatggagagattcttaaagatgttaaaagttttgcagagacggttagttttagtggtttgcttgagttggagatattgaaaaggaaggtatctgcgttttatcggtctaatagaggatatggtttgactgagtatcatgagcctcaatcagttccaggacttgaggataagaacaacgatgatgatgatgatgaagatgagaatgttaatgatgggttagaatggcatgctaaacattctagcatagaagaagctgcagacttggatcatgaagagtcgtctcttcagagatcgttagagaagtgttcgggttttcctgatcataggctgccccacagaaggaaggagaaaagcattactgaaattatagagaatgagtcggctgctaaggtgaggtttgagacagaacctaaggatggagatgtaaagtcaaatgttaagtcgggtaggaagaaaacaaaatgccatgatgatgttaatggtgatcttgaaaatgtaaccgccactgcaccgaggaggagaagaaagagtgaagtagctacaattgaagacgctggtcacaagcaagcggtagaaagtagcaaaggcaaaacttcaaggaagaagaagaaaatggatgtggatgatgatgggagtgtagacagagaagagactgaggaaaaagagatttcagatttggaaatagatatcgattcaactccattagcttctttacggaaaagggtcaggtttgatgattcaaacgttgaaaggagtgctgaaaatggcgagaccgctacacaaacctcaaagagagagaggaagaagagcaagtatctttcgcctgattacttgtcagatttttcacggaaaggaagaaaaaagagtacaattgaatctgaatcttcgaaagtttcaagtcagagccaagtgggagagcaaatgactaatgctagtgatagcctcgtggcagtggaagaagatatgttggataaaccttgtgaaccatcatctgataatgggttaggtcacgaagaactgtcagaggaacttagtaacgccgtcgactttctgaggttgggagctacaccaaaggaaatgctggatctaattcgtgtagccgctcttggcacacaatatccaaaagacagtagctcaagagacatggtaagagaattcatgaccatctatagaagcttcacatatcatgatggagccaatcacaagttcttagggagctatgatagttcggataaagaaaaggaagaactgaatgagatgggcaaacatgttgtaactaagggaaaagagaagaaagataagaagcgtaaagccaaggagcaagcagaggagatagaggtaactggaaaagaagagaatgagacagacaagcatgggaaaacgaagaaagagcgaaaacgtaagaagtctgaatcaaagaaggaaggggatgaaggagaagaaacccagaaagaggcgattgagtctacaaagaaagagagaaaacttaagaagtccgaatcaaagaagcaagctgatggagaagaagaaactcagaaagagccaagtgagtcaactaaaaaagagagaaaacgtaagaagcctgaatcaaagaagaaggcagaagctgttgaagaagaagaaactccgaaagattcggttgaatcaaccaagaaagagagaaaacggaagaagcctaaacatgacaaagaagaagtcccgaatgagactgagaaacccgagaagaagaagaagaaaagagagggaaagtcgaaaaagaaagaaactgagaaagaattttcaggagctgagctatatgttacatttggtcctggttcaagtttgcctaaaaaggaagatctgattgaaatatatgaaaaatttggagctttggacaaagagagaactgatatggtcgacaacaacttctctgcccgtgtcgctttcttggatgtagctgatggagaaaaggcctttgaatcctcgctagagaaatgtccgtttacttctaattcgaccgttaaattcagactcaagtatccaaatgagagaacagaggagaagaaaactgaagctgaagttgcagagacgacaatggaggtgggatatctgaagaaaaagctggaggagatgaaaatgttacttgatggatgcgaaggaggaatgactgaagaagtgaaagtgaaacttgaagatgagatggtaaatttgttagagaaagtgagaaagtgagagagataagagatcttcttaggattattatgctttatgtttttttttttttgttggttgggaattttcaggagacttttgcagggtttaggattttttatggtttctgcaaaacaaaagaaaactattttgagagggtgatgatgatactatcatactatgatcttgtcataggttagaattagatcgatgttcttttgggctttaggtgtatcactgatattagtatcaattatcttacatatccattatcttacaagcccactgagattatcttacgagcaaaattttcaaaatcagtcggaaaaattaaattccgtctatgaaatttaagcctgtccattatggatggataatctgtcccttctcttattttttgagaacgagaaaatgaaaaactataattatccgtttggatccacacaattcatttaaacgaattaaagaaaatattaggaataggtttgagatatactattttttttttctgtcgtaaaaatagctaacaatgatgaaactgttataaaccatatggatggactccataaccggcccatggcccattagggttttaccttattctctgtatcctgctattatccttgtatatatatccattattctattaatgaaagacacagttcacaacacgttatcagcacgatagcctctcaccctaaaagctaaaaatctcaaaaccctaaatctctcacaaaaaccaaaaaccctggccgtctgaattaagaaaaaaaaaaaaaattctatcgaaaccctaatcgatgatgtctcagtttttcatcatcttgtctccatctccgcttttgatctccgatccctacgagcctaagttttattctaaaagataagtggcctcgtatttacttatggttctgctcatgatttatatcgctttggtctcatttacttaaatcaaaatttattgtccagcctatttatatggcttcacgatctcatcgccatcatgttttttttgtttgattctatttgtttggttaagaatgctttatcatgttatgctcagatctcattataatactttaatttttctcaagtacataaccgtgatatctactccatcatgatattttaaaagctagattccatcatacttcaccattgatcgacatatgtttattattaattgctttgtttaaaacgtgagttgttaccaaactatattttattattgatcgatacatgttttatcactgatttaccttgaacatgcttttagttatttggtattcattcatcattgagtttggtttggtctatagttggtttgataaagtgggtcttttgtttgaagggatgattaatatctcgtggtgaagtaaaaacaaaatctcgcaaaaccgtagcgatgttttgttctccatctccgcaaacgatcgtcgagattactaaggaaaagctttcaatcgagataagtatttatgttttacaccattatcacatcatgctttaatcttaagatgacataaaataatcacataactttgctccaactgagttgatctagtatttgatatacgtataatttatgaacgattgactcaggtttagtaaatcgataattttgaattatgatgcttagtgctttatattattttatgtaaatctatcgttaatttggtataacgtggttagcttgagaatctctctagtgtaaaatacatgtatacaaagacatatgtatttgaagaattaattgagaagttagtgaatggaaagatgtttaatggcatgatagattaaatgttttaatataaaccctaggttaaaccgaaagtaaaccgaaaccctaaatcctaggttaaaccggtttaataaaccctaagtcacggtttaagatcaagcttcccataaatggaaagtttccagaaatagaaagttccatataaggaaagtttacagaaatagaaagtttcgtaaaatagcaagtttcccaaaatggaaagttaccaaaataggaaaccccttcataaggaaatattcgaaaaaccctaaagtacacgtttgtttaggatttctttctagatgaaagttccatataaggaaagtttccataaatagaaagtttcatacataaaaccgaaatcctagcaaaaaccctagtactataaatcgcggatgctaaaaccctaaaacttaaccgcgaaatcctaatatcctaatctagtatgatctgattgtttggttgttgcatactagatcaatcttctagggttgatttcatccatatatatataatatgattgtttagaaaacacttgctgaagacaagcatggctcggtcttaaataccgcatgacttggcctaaccgattacatgagttctcatttaactctatatattatagatatcagaaatcaactattatgaatacacggcactcaatgcctctggtgacaattatttgaaatgggctttggacactgagattgtcataaaggaaaaaggacttggtgaatctattgtggaaggaaacaatgtcaccagaagagaaagatataaggcgattactaacatacgccatcacctcaatgagagtctcaaaatcagtacctcgctattaagaatcctctggacctcaggacagagtaatcaaaaaaaaaaaaaaaaaaaaaaaaatcaatataaccaccaaagaacggtgctattaccctaaaagcccgattcgaacgaaagaatcttagattctaggaattcaaatccatgaatgagtataactcagcactatttaaaatagtgtcaatactgagattccgtggtaaggaagttactgagaatgacttgctagagaaagtattctcgacctttaatttcacacaaacaatatattgcctcagcaacaatatcgtgaaaaaggtttttaccacatatgcaagtctaaactcttgtttttggggaggactcctctgtagagagtgagtgaggctttggagaaaccgtgatgagaacattgattctgatatgctacttgctgagcaaaacaatgagttataaatagtgaaatgagacctcctggtcctaccccattatcagaagcccgttgggctgaagagcctaaagagcctaaagagcctaaagagactaaagagtctaaccacgtccaaagagataagtatcatggccacagtcatggtaaatggaatgaacgtggtagaagtggaaaatataatttatatgatcaaggaaaccattcatatggttaaggccaccgacccgactttggtcgtaatcgaggtaggccacggtatacccaaaccacaacactcaaataaacttgtttgccactgatgagtaatggggaaaccattggactaagacgtgcaggacacctaagcatctcgttgatctctatcaagagagtttgaaaagaatcaagaagctcatttagttcatcacgatggtgaagaagatttcgaccatgaaatagatgattatgagaattcaataaacgaaatatctaaagacatggttcattagccaaattgcgggtatagctaaatttagtgaaggctaagggcaggcccatggcaggcccatattcccaagggcacgcatcctcagatgcttcatattcacctagctcaagggggcttgttgagtttcaaagaaatgtgtttgaatggtttccacaatgaaactaagggaaaagggaacaaaggattcccacatattactaagagcacccaagaccatgagaaggtcttagagactatacctgcgtcatagacctttactatgccaatgttaatatgataaaggctaatacagtaaacaaaagggtttactaacaaattcactaatggcatgatcggcctggccagcctggttctaacatgatgcgtaaagctgatattaaaatcaaaagggcacaccccttaatgacctcacgtgtgtagcatgtacacaagggaaactcatactaaggccatcacctgtcaaagcaactagaaacttggtgtttgctagattgctggcccagaccataagtctgtgagcccacatacttaagactatatgtctagattatgctggtaaattatgtcccaagcattttatggctaaagtatatccatgagggggagagtagtataccccgtggcacatgtccatacttgaactcacagtagctgcttggggacacgcaatattacatgcaacaagagcttatacgcatcaggccattctagtgagcatagatattcatcatcccaactactcacaggtcaggagccagatatgtcccatctaaagacatttgggtgtatcacctatttacccatagcaccaccacagagagcaaatgatgggacctcaaaaggggatgggaatatacgttaaaaatgattctcccaccatcattaagtatctcgagccaaaggccaaatacaaagattgtcatctcaatgaatccgttttcccaacactgggtggagagactaacaagctggtcaaagaacttacatggaatcaaacatccttcacatggcaagatcctcggactccatcagagatccaaaagactatatatctgcaaaagctagctaaaacagttgccaagattcctataatgacccaaagagagtaacaaaatcgtacataccagcttgtaatgcaccagtacgtattgatgttcacaaggaacacaatcaagttgctacagaggctacaacacgtaagaaaagtggtagacccaaaaggttccaaagacaagaaccctcggaaatcaaagaaaggtgcaagggaaaccgagaaggttcaagaaaccatagacatagccagctaatagacataaccctaaggtaccaatcaatgaggtttgggacgccaaacctcaaggtcctgaaggtgtaaagagatctctataaactatatcatgtctagaatacaatggaaccgaaaaaatgtcgacataaatgataatatatttgcgcacaaggtagcaactgaaatgaatgaggatcaggagcccacgtctatactagagtgcactcaaagacctgattgattaaaatggtacaagaccataaaacgtggagctaagaatcattaagaagaagaatgtgtttggtccaatacgaaggacaccattcaatgtaaagccagtaggacaaatgagtctttgtgattatgtgaaataaacatagtgaaagcgtgatatatcagacacggcttgtcgcacaaggattcacacaaagaccagaaatagaggagatatactcccctgtggtggatgctaagacatttaaatctttgctaagtctggctatataaaagagaaagatttgcggctaatggatgtaatgcttgcatatttatatatgtccacaggataatatatgagattaccagagggtattgagctcaaagataagaaagattctcgagaacagcactgcataaggctggacaaatccttatatggactgaaacaaagcggacgtatgtggtataaccggttaagcgaatatctcatcagagaaggctataaaaacgatccgatcagtccatgtatttttatcaagaggtttgcaaacaaaggatttgtaatcatagcagtgtatatgaatgatttaaacctctgggtaatcgaccaaacagttgagtatatctaaagaaagaatctgaaatgaaagacctaggcaataattaagttctgtttggggttacaacctgagtacgtgaataatgaaatccttgtgcatcaaatggcatacactgaaagagtactcaaggagatttaataaggaccaggcccgcccattgaccaggcccaatggtggtgagaagcctcagattggatagtgatccattcagtccggaaatgccatacctcagtgccataggagttctaatgaatttggctagacacactagaccaaacatttgttttgccgtgagtctcctgtctaaatttagttcatgatcaacccaaaggcactagaaagggttaaaggaaggtttggctaagttttaaagtctattcttcctgcgttgtttacttgggttttgttctatactgatctaaccaaagaagggccagtttgctttggtttagtttgatttgctgatgcaggttattcataagatcagattatggcatggtcaatgaataggaactacgtgtggcttgatcccttctacgggtacgtaggcagccttccttaaggcgcatctactactacatcaaagaccatcatatttgaagacaacacatcctgtattgctcaactcaaggatggctacactaagagggatcgaacgaagcatattctgcccaagttcttcttcactcatgaattacagaaggacggtcaggtcaaagttcaacagatccggtcaagtgagaattcagccgacctattcaccaaatcattgccgacttcaacgttccggaagctcattcatcagatcgggatgcgcggacttaaggatcgacagtgatgctcaaatcagggggagtaatgcgtgttgtactctttttccttcaccatggttttgtcccactgggttttcctggtaaggttttaatgaggcaacattccccagcgcattatagagatcccggtttagtatcgggcacggttatgtcttccaagggggagtgttataaaccatatggatggactccataaccggcccatggcccattagggttttaccttattctctgtatcctgctattatccttgtatatatatccattattctattaatgaaagacacagttcacaacagaaactacgtacgtcaacaaaagaaagagatattactaaaccggtgaataatgttgaaattattgaagacaattgtctttaaaaaaacaatttttagaaaaaataaacaaaaattactaattaaatcttaattttattcactggtcttaattctactctttttttttttctgctttcatccttcattaatgttacgaaaacataaatgatattgtggttttgtaagttgaaaaaatacatcacattattaaaaaaaaaaattcattagactaagtggttcagtctaaatgtccaaccaattggttggaaactagttaagcctacaaccaggacaggcttaaaggacaggacaataggaatatttgcctaagagcccatgatttacttgagcccgctctgcctacaacacttaaattcatgtgttcacaacttcaccgatgttattcgtttccttttttcctttctaacgcgtctccttttctctttttttcgtacaggatgttgataataattttttaaaaaaataactaaaaagaaatgtgatctcgcttattatttatcatagtgatataggttttaattaaagtcttcataatagaacactagatgatttatttagcaacattaccccttattaatctatttttttatttatcacagttgatataagggattttcttaaactaatttcgaaggtgaatttaacttttgataagaagtaatcgcaaatgcaccatgaataaaaatcatccgtgccaacatccaatccaaataagtaataactaagtagtacacgcgcaggatttcgaaacaatgaaatcgaacaggtgcgagtttacgtccttatccatatatttaatgccattgtgtcacccacataaaattttaaacattcctaacttaagatgtcggtaacgatattttataatgcataatctttaaatcatgatttaatattatttattggaaaatattattctctaagtaacaattaattaatgctgataaagactaattatatatatatatatatatatatatatatatatatatatatatatgaatggtggtgcaaggacaaaagagttgttagaaattactcaaactagtatgtagtatgtctgtctattgggtaattgatttgattatgagatcgatacatacacaaaaaaaaagtctctttagctttgtccttaagattcgtcaaggcaattaatataatatgatacctaaatggattatgcagttcttaatactgtcacagtatcactttgattttattaaggccacgttgttggcagttgggacgagagcaaataaagaaatgcgataacattaagaaactgaagggaacaaatcgttggagtgctaatgtagtcgtgattcgttttcattcctcagcaattgtgttaacatattgaattaaactgaaattctcattaaatccaaatgtatgtacaattagtctatatatagactttgagattagtacataagataagcaaaaggaaacttatgctatatattatatctcatatgttaataaattgcgtatgcgttgttcgatctgatgttttaaatcttaccgaaacaacattttcttagatgattgatgataaggtttttgtaccaattattttgttttaaattttgcttaagttaatcttttttttttctttaactaaatcttctttgcatcttaactcaccaagagaaaaaaaatttttaactcgcaaaggttcgtcttatgcgagtagatgtttatctgcactacacgtaaaaacagaacaaaaaattaaaaacaaatttaaagtttagaaatgtagtttatgttcaatttaatttggattataagattaacaaatgtaaaacttatattaatttaataaaacaatttagtttagtcatcacaaaatttaatacttaggtcatcactaaaccacaaaaatttagcttggtttgaatcctatcttgattttaagattttagaaaagttcattcacttttactaatggtttcaaaattattacacatttatacttataagcaatacattttttatttgaaaatgtcatatgaaattgaaaaaaatgatttcgcaaacattatcgctttaacttttaaatcatctaaatcttttctctgattaaaatattcaatttaattttttgatgttaaaaatattctttatatatataaatctaaattacacacaaattaactgataatctctaaaaaagtaattatctaatagtttatgatgtttatatatggttcaaatacctgaacaacaacaacatatatatatttacgaaaaaaagttccctaatttttcttatattatatcatttgtttttcgattcaatgttcttatttctttatatgaagatgcatatgaatatctgatcaaactatacataataccactttagtagctaatcattaatcacccaaaatacaaaagagtcaggtaatatctcattgtcaaatgtcaattaaaatcaattcaaaaaacataaatcaccacctaaacttctggatccaatagagtctttgctctgtttgatacaatgatacattaccatttccttaatttaactaaacttccattttttcattttggatcaaacatattttgccatttttttatgaaccaacaatttcgcctatatatacaaaacgccattacagataaaacttgagagaagcatggagaatgaagatgaatatacaatgtcgctttgccttagctttagctgttacaccaacgatcgcatcgctgaaaccgccgagtgagttcgactcgaattttccgatgaatccaactatgagtttgaatttatcaatctccaaccaaattacgatttcgttttcgataaaattctcatcgataaagacgaattgtccctgccacagtcgacgacgatagttactactcaactgagacatcttttcctccggaaagatccatcatcgtcttcagctgaagaggagcttgacgtaatcaagtgatatgcattcagagccggccttgactacaagcaagcaaagctcaggcttgcggccgtcaaatatacatcaattaaatcggccgtattttaactaatatcttcgttagttctgctggtaaatgtgtgatgtttgagtgaatgagatcaagggttcgattcttacaagggggaaatctttttttcttttttttttaggtcatcgatacccatatttggccaaaaaagttttgctgcttgtggccaccaattacacagggacggctctgtatgcattgtccagggacactggagaaatcgctaaacggaggttggaggaagaactaatcgacgacggggagaattagtgatttgttgaagagaatttatagtgaagggaaataatctcttaggttcttgaattcaagaaacaaagacgagtttacgaagaggaaggagaaggagaaggtttgtgcacatgagaagttttatatgagaaacagagcaatgaaagaagaagagaagagaaaatcatttttaccttataagcaacatatctttgggtttttcttcaacagaatttcactgtaaacattttcagtaaatagtggaacgatcattaagtgagactaagaggccaattaaaaacaattggaggaaggattcccttgtttgggcttaagtctctctttctgaattatagagtctttcactttgaaaaagaatagagcgttggtttgggtaaaccgttcctgtttagtaaatcaaattggttaagtctcgtttggagtggttttttggctgtcggtggaaaatattcacggcgtttgtgtttgttgaggttagggttcttcttcatatcctttgggtgtgaaaactctttgtgggcaatttcgtttttttcggtgagagaagagatgtcagcaagtttagataaagccttgatgggattaagcctggaagatgaagatattccgtttattatgccagatctacccgagtattgttcaagtgagaagaatgttcttagcattattggtcgagttcttaacccaaataagcaaaaggtgatgtatctcgcgaaggatatgccaaagaagtggcagttgtatgagagagtgagaggtgttgctttatcggaggaaagatttcaatttattttcaagtataagcacgatatggaagctatcttggaaagaggagttcacaccttcaatgaatggactatggctattgatagatgggtggagtttcctccagaagattatctgcagtttatcatggtttggattcagatccgaaatattccggtgaatcattacacagtctaagcgattacggctttaggtgagataaaacctcaagaacaaggttttgtaagggtgaaagttaagttcaatgtgtcgaagccgttgaggagatcgaaggtggttacgcttccgaagaatgctggaacggccaccattttctatgacttcgagagagtacaaaagagatgttttgcctgccagagattaactcatgagagagaaaattgtccggtggcagcaaaaaaattacaagtcaaaggcaaggaggggaagttaaaaatccaaccggtagtgacagtgaaagagttatacatcaaaccaggagatccactctttggggtggttggagaagatcaagtgggtttggaccctatgacaggaagattgcgcatttcagaggttgtggttgaagaaatgaggaggtatatcaaaggtgctgaagggcaagagaggctagccaaagaagatcgtattacggcttctcttcatgatttgaagtatgatccgcttggtcagaaatcaatgctccgcttggaatcacctcccttaatctcttctgacataagcaaaggtaaaggggtggtttttagttatgattttaagaaccagagtgtggagcgaagtaacatcaaggttgatggtgttcacaaacagaaggtttttggatttcattcagagaagttggttccgatgcaatctgtggccagaacataccaatcagagggagaaggtggatctgtggtctcttttaaggttcctgctcaagacatttctacggtctatagagctaacccttttgtggctggctcttccgggaatgtcttgagaagtgtgaagtctaggagacgtccatctaagggaagaagaaaaagagctcaacatcaaagagctcaggtagtggaaagtgaaagagaagctatgtcagatgatttactggaaggtcatttcaaaagaaaggctgcggatgaagccaaatttccatcaaaagtcgctcgtcgcaaggaggtggtcccaaatgagggaccgtccaacccataatgagtcttctgagctggaattgtcagggcttgggacggtttcaagaactgacgattcctcgcctcaaggaaatgcgtagagaacattttcctgaggttctgttcttaatggaaactaaaaataatagtaatgttttggtggatcttcaagagtggctagggtatgaaagggtttttacagtgaatccgaaaggaaagagtgatggtttagccttactttggaagaaaggagtagttgttgatattaagtttgctgataaaaatctaatagattgtcatgtacagtttggagctatggagtttttttgtttcgtgtgtttatggtgaacctgctgtggatggaagggcaaaagtgtgggaaaggatttcgaggattggtgttcataggaaagagagttggtgcatgctaggagatttcaatgaaatcttgcacaatggtgaaaaacttgggggtccaaggagaggtgattcctccttcttacctttcaaagacatgttacatagttgtcaaatgtcagaattgactaaccaaggtaatggatttacttggagaggtatgagatatactcattggggtcaatacaagttggataggtgctttggtaataaagcttggttaaaacagtttcctgtcgcaaatcagacttttttggaaaagagaggttcagatcatagatcagttctggtgagtctcattacttccaaagaggcttataaaggaaattttaagtttgacaaaaggctttttaacaagcctaatgttaaagatgccatttggaacgcttggaattggggacaagcaagaagaggtgtgtctgtttctggaaaagtgagactctgcaggaaggttctaagtaagtggaagagagagaataaccacaattcgcatgatcgcatatctcaaattaaggtggtgttggaagccgaggaatctgctaaccctcctaatgcaagaagagtatatgaggtgaaaaaagatctgtgtcatgcgtacaaagaagaagaagttttttggagtcaaaaatcccaagaaaagtgggtaagggaaggtgataagaacacataattctttcatgctttggtaagagcaaatagggggaaaaagagattggatactcttatggatgtcaatggaaattgccaaaaaggagaagcttctaaaggttcggttgctgaagcttatttcattgatttgtttacctcctcaaatcctagtaatttccttgatctttttcaagattttattgcaaaagtcactaatgagatgaataatgagcttattaaggaagtatcaaaagaagaagttagggaagctgtctttgcgattagagctgcaagtgccccgggaccagatgggttcactagtttcttctttcaaaagtactggttcatcatcggggatcaagttacaaaaaaggtccaaaatttcttcatatcaggttccttccctagtgaatggaattacacccatctgtgtttgctaccaaagaccaaaaatccttcccggatgaccgatctaagaccaatcagtttgtgttctgtcctatataagatcgtctctaaggtgtgataaagaggattcaacctctgctgtctaagattatctcacccaatcaatctgcctttgtggctgagcgtcttatatccgacaacattctcattgcacacgaggcagttcatgctttaaggactcatccgactatttcaaaggattacatggctgttaagacggacatgtctaaggcgtatgacagggttgaatggaattatctaagagctttattgtctactatgaggtttcatcagaagtggattcggtggataatgcattgtgtctcaactgtctccttctcggttctgattaatgactaaccatttgggttgattactccccaaagaggccttagacaaggtgacccgctctcaccgttccttttcgtcttgtgtactgaaggtttgacacacttgttgaataaagctgaaagttctggagctttaaatgggattcaatttgcggataatggcccttccattcatcacctactttttgtagatgatagtttgtttatgttcaaagctcaggctgatcaatgtgaagtggtgaaaaagattctcaatgtttatgaagaagcgacagggcaaaaaattaatctggttaagtcttctataacgtttggagataaagttgaagaaaaccttaaagctgctattaaagctcagttgggtattgaagctgaaggaggtgcagggacttaccttgggttgcctgagtgttttagtgggtcaaaaattcaacttttggattatatcaaggatagattgaaggagagattatcaggctggtttgcaagatctctttccctaggtggtaaagaagtacttctgaaggctgtggcattggcgatgccggtttatgcaatgtcttgctttaaactgacaaagaccactgcatcgaacctaactagtgcaatgtcagatttttggtggaactcctttgaacacaagaagaaaatttattgggttagttgggagaagatgtgtttatctaaagccaatggggggttaggttttagggatattgagtgtttcaatcaggctctactcgccaaacaagcgtggagactgatccaagagccaaagtgtctatttgccaagttctttaaaagcaaatatttcgaaaatggtcagtttttggaatcctctgttggagctagaccatcttatgcatggagaagcatcttacatggtagagatttactgactaaaggtttggtaaaaaaggttggtaatggcaagtctttaagagtttggatggatccttggatttatgaggaaggctggagagctccttataggaaacaaacttttttcaaccctgatcttagggtgaaagatttgattcatagaccaactagaggttggaatctggactgtttgaatgagctgtgttttcccaatgatgtcaggttgattttgaagaaaaaactagtgattagaacaaacgatttctggtgctgggatcataacaaaagcggagactacacagtcaaatcgggtttttggttagcttgtaggctgaataaaccggaactgttgcaagaggcttctcaacaaccgtcaatcaatgggctgaaggagcagatttggtcaatacacacagtcccaaaaatcaaagcgtttttatggagagcttctagtaatgctcttccagttacagatttattggccaaaagaggggtcattctggactctcgctgtcaggtttgtggtttagaaggagaatctattaaccacgttttgttcacttgttctattgctagacaagtgtgggctctctctaacttcccctctcctcctgagggttttgatgccttttcgctgttctcgaacctgcattatttgtataagtccagacttgattgtagaattcctatggagcttcgcagaatttttccttgggttctttggaggttatggaagaacaggaacttattttttatgaaggaaagctcttctcggcctttgaaactgttaaaaaaattagagaagacgctgaattttggtgtttgactcaaactgtgaaggatgaagttgaagaggctgaaacaagggaagatattgtccagtcctctaaatggaaaccgccggagataaattggctcaagtgcaacattggtgtgttttgggataaaaagaaacgtgttgggggctgtgcatgggttttgaggaacaaccaaggggtttcattgttacatagcagaagaggtttctcaaacattatttctaaggatcagctgaatcttcaagctcttttgtgggcaatggaaagtatgcacagccataatgtcagtaaggttaattttagcacatatattgtggacttggtaaaggtgatgcaaagaccaaaagcttggccatccttttattatcattatacggaaatggctagactcctaaaaaagatcagggagtggagactaacttttgagcatccgtccgccaacattggggcttttctcgttgctcaaagtgctacaagagagttttttactcaatcttatgttgcagttggttaccctttttgactgcaggaactcaaagagactgagaaaaatctttccaccgcataatcttggcttggatgttggtatagttgtagacttttgttagtctcttttttggacagttagggtgcatacacttttactaactgtttggcatgtatgcctgtacatggcctttcttttgtatgtggttactttctttgcaatatattattcagatgacaaaaaaaaaaagtggaacgatcattaagtaatttagttaattactgcagtgactctagactgatttttatttatttatcattaatatagcggtttggattgaaaataccttacagtaaaaaacaaataaattaaaattaatcttaaaagaatacataaatataattatatcatataaatatataaaactatattcatgcttatatcaagttattatattgatctgtggcactaaataaaagaaacaaattaaatgtcaacacagttatttttataactccaagttgaattgaaaatgtaaaacgacattcttttttaatcagagaattaactttagaacgacactttttgtgaaacggagggagcaatagttattcatgtgatagaggtgtttcaaacaaaagttatgaaatttttgataaacaattttatatataaattatgaaattttagtattacgtacatgagcatgtctgagacatgctaatgaaacccactagctgaagctgttggagtttgttattagaaagagagtctcgtcttctagttctacatttatgaattatctctgttattttcttattcttctagtaatctttttactttcgtcgttgtaacctacaccgagctcaaatgggatcagcttatattggaatcagtcttctctgccactcactcacgttataaactcttctatgccagtcacgtttataaactttaattataacttgaacatccaagagtttatggatggactaaacaatttttatattcttagaggccaccatggccttgttattgtttcattaatcggcggaacatttctagccgaaaaacagtgttttcacacccgatgtgaatcttccggcccgaccggttaatccgcgacccgaacactttttcggtttgggtttaatgtttatatcatgcaatttcaaaactggaaaaacccacaaaatccgcgattgaccctcaacccggtgaaccggttgaacgggccggatatcggttcaaaaaattatttgattttgaaataaaataaagagttttaaacttttagtttattcactatttactaaataaatgaatgtgagattattattttcctcctcaattaataaaaaaaaagatgagaattcaagatatccattgctgtcacaaaatctaccaagtcaagttttgtgatttgttttactccctccgtttcataaagagtgtcgttttaaggttttatttttgtttcacaaagagtgtcgttttagattttcaatgcaaaatttaatgattttttatgttttatgaccattagtattctgtaaattgttttactattgggcacattatgtttaggtatatagttaatgatgtttttgtttagaaaaaacaaaaaaatttaatgttttcttaatctgtgtgcaaaactctaaaatgacactttttgtgaaacagagtgagtaatttttagacataaatacgttttaatgatttggtttacttttttgttggaacaatttattaagtcaaccagaaaaataatctctaacagtcttggcttcttcaactaactttcaaattccaacgtacgaggtctggtcttatctacagtatgaatatgtatatatattaaattcgtgattaatcgtcattaatttcagattacagtgccaactctaacattagtcaatataattaatgtaattaagagacacaaagagcctaacctgacaagacctcattcatttttaaaaaatctttcaagcgggtgatacgtagaaggtagaatcaaggcttgtaacagctggattatcttggttgaccgtaattattgacttaaaatgttaaattttccgacctgtgggcaagcaaagattctattttactctccttttatcattttagattttctcacatgtaaaaattgtttagctataccatttgtttaaatatgttcgagtacaacataccattattagaaagatgccaaactaagtgatataaattagatattgacaaactattatatagggtagtctgtattttccactacgctaaaaattaggattgattttttttttttttttgaaaaaacccctaattggatatagaaaccaagagttttagtacttggtgaaaaagtacatgcgagcaatttatctggcctttctggacttcatagaaacttattccgcttcagtaaccacatagcctttctcaaccggtctttccacaacaactccatctgattcttaggttattactctctttttcataacttccatgaacttctcccctctcaaaaacttgtctgttcctcttcagaacttgtctgttgtatttaaaacctttttggtttctttgtttatgtgagaatcttagatgttatttaagtttgatttggttacattgtctgacttgtaaatggttttggttgcattagagaatcttggtttcaatttgagatacaaaaccaattacaaccggaaaaaaaacgaaattattattttgccaacaagtatatttaatagtcgttaaatcagtcataaaatagtcggcaaatagtcgcaaaatagtcatcataactacaccaaacaaacttctattcatccggtttaatcgtaaactagtagtaacatttaatgactatgttacgtatataattacgactatatttacgactatatgttaagcgtactagtcgtaacgtaatcattaattaacgtctatcgatttacgactataatttttaattgtaatgtaaaccaccatttaacgactacttgtgcagtcggaaaatccatgttttcttgtagtaactaacttgtaaactaatatgggatttaatttggttacattagtgaaataaccaaataactttctataattttcttatcaactgatcatccttacttttacaaaaaaaattacaaaagctacaagaaaatattggaaaaaaaattaatagtattcatattcttattcttgttcattataatctaatattcgataattaattacttctttgaagctaatcatcaaagatattcaaaggcagtacccattagtaaaatccatcatagtgagtgaactaagctcgaagtcgtcttcaagaacccaaaaggtatcgaacagatttggaaccgtagctgcaacttctacgtcagttggtgttgcgtggactggtttggattttggtttgagtttggattcgtcaactaaagtgtcgaacctgacagttgaaattttttcaccggagatctcttgatgagaggaggacgttgtggttataagggccatagacggtggagactctgcgccgcaagcagctttgacggcagttga

SEQ ID NO: 5402 - DNA, 6461 bp, Arabidopsis lyrata
  Intron number 1 from transcript 484849 (locus 484849) deri ved from phytozome v7.0 (chr-ID scaffold_5; pos 10853605 t o 10860065)
atcgtccaccgtctataacgatacccccgccacattaggtaagtaatccatttattcttcacatagtttttcttttttttttgatatgtaaaatttatcaaaacgttccatttcaatttgtagacaaggcggagaagtatattgtggaggcggcgagcaagggagcggagttggtgctgttcccggaggcgtttatcggtggctatcctcgtggttttaggttcggtttagctgtgggagttcataatgaagaagggcgtgatgagtttcgcaagtaccatgcttctgctattcatgttcctggtatttactatttacttccaggaatctatgtttgactttttgttttcttatcttgtatttttagaataaattacggattttgtcctttttcataagggcatttgtggattttgcccttttttgaatagtttatgcattttgccttttttcatgctccaaaaatatgatttaacatgcgtttcactctttatgtttgggtttagtcggttccatttgttcttagggtttagtatttggtataaagtacgtatttttggaaaaaaaaatcctaaatacgtacatttttaagtgttaaaaagggcaaaatccgtaaactattcaaaaaaaggcattttcgtaagtttttcccaaaaaaagggcattttaaacaataatccctgtatttttatccatgaaatgattttcttacactgttttaacccctgttctaaaaatccccgcctagccccgattactccccgcttaatcgctaggcccaccctatccgcctcgattaatgactaatcccctaaaaaatcagtaacccgattattctccgcctaatccgattacttcccgcctaatccgattattttccaccttatcttatataccccgattattttttagattgcaagtataaaaaaaccttttatttttgttattcaatcatttgaatggtgagtttgtgatgttttacaataacttgtgttcaaattttaataaaaatcataaatttgtaataaaaatcataaatttttacaatattggattaatatattttaaaaatattaaaataaccctaaaactaatccccgattaatccccgattttaatccgattttctgattaatcgctaggcccatgccgagcgcccgactaacgcctagcgatttttcaaacaagggttttaaccaatcaataactttgaactctaacctcaattattgtatgcttatctagtacgtacaagtgtattcaaagtacaccacccgatatcggatccaaacctattgggtcaaaaaaattttggatatccggatctttatcttttaaaattactctttaaagatgttacattaaatgttatatattttgaccaaaaaattataaacgttatattattaaagattttttatttctcctttatttggttgctggattgtgatttttgtttggttatgttggctgtggttggagtcatggagatgtatatatacgttgtggacaatggaatggaattttagttggaacaaagaaacctcaactttgaggataaacatgtttgatttcgagttttccgtttttgtcacttttagatggaaattaaatggaacaagcacctaattagtgatattttgtagctctagtttttaaatttagttgagcaatctcaaaatcttgggacacaaaatgactctttcttgcacatatgtttggtttttgtgatgaatcttaaggccctgaagtagcaagattggctgaggttgcaaggaaaaaccatgtgtacttggtaatgggagcaatagagaaggatgggtatacactctattgcacagctcttttctttagtccacaaggtcagttcttgggtaagcatcggaaactcatgcccacaactttggaacgttgcatttggggtcaaggggacggatcaactatccccgtttacgacactcccattggcaaactcggtgctgctatttgctgggagaataggatgcccctctatagaactgcattgtacgccaaaggtcagtttttaacccaatgcagttttgacacatctagtctttattgaaatattacttacaattttttatttttggcgcgcaggcattgagatttattgtgcgcctactgctgatggttcgaaggaatggcaatcgtcgatgcttcacattgcgatcgaaggtggatgtttcgtgttgtcggcttgccaattctgtcagcgtaaagatttccctgatcatccggactacttgtttaccgattgggacgacaacaaagaacatgatgctattgtctcccaaggtggaagtgtcattatttcacctttgggacaggttctcgccggaccaaactttgaatcagagggtctcatcacagctgatcttggtatgtatatgtatatacactctcatttgatattcatcaatttgtttttgagctaatcatatcaataacgttattttttatcaagatcttggagatgtagcaagagccaagttatacttcgattcggttggacattactcgagaccagatgttttacacttgaccgtcaatgagcacccgaggaaaccggttacattcgtgacgaaggtggagaaagctgaggatgactcaaacaaatactcagagacttaaagttcgtctgctggagttatgtcaatcgtatggagtaagtccaaaaatgttctgttgagttttcatatttatgttcaagtttatttatctttctcttcaatggtaagatctatggagtcaagtaataatggtaagatctatgttgttgaataaaacgaattggttctgatctcctcttgtattttaaaattgtgccattgtgttttatctaatttgagcgttgaatctcggaagttgttcagccgtaaaactatgtagccaattgttatgaatcatgatttgcatagaatcacaaagaaacatggaagctgaaaaatatatagtctaagacagaaaaccattcaaattggccgtcaagacagaactaccaaattacttatttaattatttgtagctcgccgaattagagatgataataatggcaaaccaaaacccggaaattcaaaagtcaatattgctatacgtatatggttattattttttggggtcaaatcaacaagcccgctctttacataattaagtaattaactagtatactcacaaaaaaactggttacaccaaaaaaacgttttttctaatcgttttgtattactctctctgttcttaaaaaattgatgttatacagttttcatatatattaaaaagcaatcattgtttaattatttgtcaattattattatactagatattttttaataactttgaaccaatagtattagaaaacagttaatcattacgtcttgaagtttacgatatattaattttaatcagtaaaaaataaaacaaaaacctaaaaatttaaactttgtgaaataaactaaaaatctagataacatcaaatatctagcaacagagacagtattaaacatgtgctaaatttagtgctaatgtaaaaagaaacaacacaggcaaaataaaagtaattttcttaaattaattacatacaacttcttagatagaaccaaacgagagagggaaaaataaagaaaactattacctgtcacgtggaagcaaaatgcatgaaattatatatggagtaataggaattaaaataagaaattcttaagttatacacaatatggatgtatatgtcaatgtatttggcttgtgttggggaaaaggagattttcatacccgtattatcgggaccgtggatttttatacttcgacatttttgtagtgtattttccaacccaaactgaaataaaatttgaatttaatacctgtatttgataaatcgtgcaaaaaacggagtcaatctaacgggtgttagtcaactccgttatgatgctgagtcatcgtacacgtgtacgctgacgtgtatcccatacgacgtcgttttgataattgttctcaaaagtttaatttttttgcaaaatcggggattcgaacccgtgtcccttggcttgtatatgtcaatgtatttggcttgtgttggggaaaaggagattttcatacccgtactatcgggaccgtggatttttatacttcgacatttttgtagtgtattttccaacccaaactgaaataaaatttgaatttaatacctgtatttgataaatcgtgcaaaaaacggagtcaatctaacgggtgttagtcaactccgttatgatgctgagtcatcgtacacatgtacgctgacgtgtatcccatacgacgtcgttttgataattgttctcaaaagtttaatttttttgcaaaatcggggattcgaacccgtgtcccttggcccaacatcgagcacctttaccaattcatcccacaactctaatcgaacattgcccaatcattttaagttataaaccttaatagttgtgtgtttggaaataaaccaaacgacgtcgttttcaattgagggaaaaataagaattctagtgctgcgaattgtgcgaaaattcaccggacgattcgccggcgggaacatgagacacgagaggcttaagagctgggctgcttgatatacgtggcattttctcattggttgcgacgggttgttcgttattaatcagaaacgacgagtttgttttgccgttgaaactccggctaccgaaacacgagaacctcgccgctctctctgcaaatcccggatcgccgtcaaattctgttatcggcgtcgtcgttttcgtcaccatcatacgtctaggcgttggagagctcatcggagttgcgtaacacgaaccagtgacgtttccattgctcgccggtgttccatagatgtcgccgatgttacttaatctcccgattgaaaacgacgtcgtttggtttatttccaaacacacaactattaaggtttataacttaaaatgattggagtatgttcgattagagttgtgggatgaattggtaaaggtgctcgatgttgggccaagtgacacgggttcgaatccccgattttgcaaaaaatttaaacttttgagaacaattgtcaaaacgacgtcgtatgggatacacgtcagcgtacacgtgtacgatgactctgcatcgtaacggagttgattaacacccgttagattgactccgtttttttgcacgatttatcaaatacaggtatgaaattcaaattttattttagtttgggttggaaaatacactaccaaaatatcgaggtataaaaatccacggttccgatagtacgtgtatgaaaatccccttttcccgcttgtgttgtgtccagattctttttaaactagtatactatagtgtttcatttaccttttctcttttgtctaaggcatcaaagatttggtttgggagtgttacttttctgctctgcaaaagaaaaacctttattcctattattttgtcattttttactataaagtcgatatcaaagcttcctgatttcataattgctaaatgttctttattgtgaattttgagaattaaaaagacaaaattctttgtaatctttttgtattattgaacatgcgttaaaaggaaacttttttgcaaacctttcaatttcataaatttaatttaaaaatcaattactggtcctacaaagtagttgtatacaacttattagatagtatggcgagactttaagaaaaaggattggacggtgagaaaattaaaggaaaaagattcatagcaaaatagtaccaaaaaaaaaaaattatcaccttttatgattcagcaaaatgcaaatgcgtggaatatagagtaacaggaatccataaattttacagtcagaataataagttgtagtctaagagttttgagaataaatattagatatcactaattcaattctattagaaaagagtgatttacgtttaaaatgcgatatacataattaacaactgatctgaatatcaaaaagattatggatcaaaagtccgaaaactctactatttttatcaaaaagacaataatttttgttggtctcctttaactagtgaacacgtgaacgcatgatccaccaccggttcggtctccaataccgtctcaagtagattaactaaaattgatcactactgacaaagaaaaaaaaaaaagagtctatatatattgcctctcaagtctctcagtgtcatcaaagtgtaaagtgaaacaaagacttgagttactatgtctactaccgaagaaatgtcagcagtcaaaaacaaaactcccattaacggcgttgacccatcctccaccgtacgagttaccatcattcaatcttccaccgtctataacgatactcccgccactctaggtcactaattatccattaattcccctatattttttttatatgtaaaatttatcaaaacgttccatttcgatttgtagacaaggcggagaagtttattgtagaggcggca

SEQ ID NO: 5403 - DNA, 12734 bp, Arabidopsis lyrata
  Intron number 2 from transcript 492730 (locus 492730) deri ved from phytozome v7.0 (chr-ID scaffold_7; pos 9236846 to 9249579 reverse strand)
gctacacttgtgtcgatttgtctctctacaaggtgaatactcactctattttgcagcactggttgattttacctttttatatcttttggagtttccttataaaccctctgactgattttgaaacaggataaagaacttgttttattattgaacaagacaagcgcaaattccaaaggctcgggagaagcatgtatgatggttgtacaaactggtgaccttccattcatttccatttcaagatctagttctctaaaccagtgggaactagaggatttgaagggattactaatttcaatcattctcatcgccgtttttttgaaaattaaccatgggaaggttgtgtaagaacttatgcatcttgaaacgatattctttactataaaacctcacaaatcagcttttctccaggatgcgattgttaacctggaaatggagaatgaaaaggttcgcaaagttccacattctgtcattgctcctctagcagtaagcggtaagagcttaattttctgtctttttttcttccttcaaactagaaatgctttttcaaaatcatgaaataatttgcttaactatataaaattcttacagcttcaagaggagtggcttgtgtttttgctgaaagaagacgagctttggtgtacatattggaagaagatgaagatgaagaaatctctgatgacaagtaaacctcctccaatgcctgctttgattgttgtttgtgtagattattatttctaagttaagaaacagaaacttgactactagatctgagacctattgataatcttgatctgttttgttcctataggagctgcattaagaccaagaagcacagaaaacaaagcgattgttgtaagggaagtcgagaagaatgtctggccagcgatagaaacggggaaggtaaaaccggtgattcacaagtatttaccattgtcacaagcagcagaagctcatagccttatggagagtagcaaccatattggtaagattctccttgagacttgattctctgcaaagggagaaatgttcagagacaagagttatggtcaataatcaataaaattctggtcgattctgttcatagatatctctctacaagagtttgtttattggctttatgtatctctgccgtggtcaaaaaaactatgtaactatggaacatatatatcaaataagctgttgtacacaaggacggtgctgttttggtgtcaccgccttctctcatttcctcttatcttcttattctttctccgagctcgcgttttttaatttggcggcatcaacaacaaaagaaaagcgcttgaccgattggataaaaccatggcgacggctacaggtactctgatccgttttcaattcatttgtacgttcctagttgatggttctcgatttcccttcaatggaaaaggatttaggttatgattttgtagttcatcacaaagttagggtttgtcatagtgtctctgatttggtactgattgatcagatattgagagatcagaaatcatgaactcgagacctagaaataattgaaaagctgatgaatcaatgaccagtcttgtcaagttttgaaaatattcaatgcgtttttgtttttttaacatgatcctgctgcttttgcagtttctaggggagctcgtaggaagcaaatcaaattagaggaagctcgtaaagctgggcttgctccggctgaggtcgacgagaatgtagaggaaatcaacccccacgtacctgactttatgttaaaagctccatggtattataccacgtctgaaacaccggtaagctttaattcttctattggttcacttggtctgtctacttgctcggacatgcacgctgaatactctgtttgtttgtttttccagagttttaaacatcaaaagaattggaaacttgatcccttttgcacagacgcatcatcatcgtatgacagaggtgcaaagatctatcaagccgaaacataccgcaagggagcctgtgaaaagtatgcccttcttccgcctgtttttcctcttgacttcagattatagttagttttgacattcattcagtcccttgagtgttgctcaacatgtgtagattctctgtgattgctatgtcaaaacacgctttttaagttttgtacttgctgctccattctctaacttggcttggcgtgtctatttttccttgaagctgtggtgcaattactcacgatgcgaaagcatgcacggagaggccccgtaaacttggagcaaaattcacaagcaagaacattgaacccgacgagaaaatccagtctcttaaactcaactatgatggcaagagggaccgatggaacggttatgattcttcaacctaccatcgcgtgcaagagctttatgacgctaaagaagacgcacgtaagaagtaccttaaggacgagaagcttaagaagctagaggagaaacacaagcaccaagaagttaatgacccaaccagcgattgggatgaagaagatgatgacttaagagtcgacgaagccaaggttgacgggagcaagcagatggactttgcaaaggttgaaaagcgcgttcgatcaactggtggtggtagcacaggaaccgtaaggtatggactactcatctacacgacatcttatctctcatcgcacaggttaaatttgtttgctcttttggatgcttttatttgatgggtgtaaccttttcttcttcctcaggaatctgcgtatcagagaagacaaagctaaatacctgtataaccttgatgccgactccgcccattatgaccctaagagtcggtccatgcgtgaagacccgctcccagatgcagatccaaatcaaaaattttattcggttagctgctttgactcttcgtttatcattcgggtagttgtatcaagtccttcaatttaactcgcggcccttgctgtagtaaaacttgtaatcataatacttgtcattggaagcttttcttttggtgtggtagttggctattacgatttacgacaaaattctaaaaacatcctaggaagaagattgcgagtcatgccattgccaaagcactgtgtttcttcgagatagatatttcgaatgttattttgatgtgtttcagaaccatctaacctaacaaaatcactttttcaaggaatatatatgctagagatgacatcaaatattaaaaggtcttaaaagcttaattaattctcattaccaaagaaaaaaaataaaaagcttaattagttcttaccaaaaaaaaaaaacaaagcttaaagtaaagatgtgatgcgctgcatcataatgtccatgagtgaacgagtctttccaagtcgtccacaccgttctcgtcgttcacgtcgtccacaccgtcctcgtcgttcacgtcgtcgtagccggaagtggcgagagaaaatccgatttggtggtgcccaaaatcaaatatcgtatgatattttctgagaaaaggcactccaataatactgtagataaataaataaataaaaagcaaataatgttattaatagtttatttatagaatatctaagaaaaaatatacaactaaacttacaaatatccgggtatttcatgtgggaaatatataggtctgaaaatactcgaagatccgtctaatcaccacaactaaacttacaaagatctgtctaattaccacaaatacataggtatgaaaatactgaaaatacacgtctaccaccacaaaattgagaattaatctctcggataatgagctacagaaataaatagaaataataaattcaattagtaaacaatatttgatacataatagaaattaaagaaaattaaatcatttactaaccggaggaccgtatatatacggacagcccgtatggattaaagctttatgggtgagtaatcctaaaaaaaaaaaaaaaaaaaaagaagtaaatctcatgtactaaaaaaacacacatatatagatacactcattattgtaattaattattaccctgatatccgtcgacttggatggaaggcatcctaatgatccatctattaccttcaatgaggttgaagtatatatgctcatcgacaaaatgatgagattatttctcctcccaaattatagccgtcacaacagtggcctggttcatagtaattccgtagccacaccgaaaatatatttcgatgtaagagcctttgatccatcatatttctcctaaaattatttccaataaaatataattatatttcttatttttatttgttatctaaatatacttaatctcatacctctattaatattttgacgataaatcattgtataataaataaatttatgtacgtgtcatatgtccaaatatatacatttattttcagtagacttttagacacaacatcatcgtgaatatcatagtttcaacatcatatataaattctattaaattttttattttacatatgtgaatgtcaattaaaagataaaaaaataaagaagaaataagtttaatctaatatggcgttagagaaaaagaaattgaaaaaccatgttagatatatatcatactttttaaaataaatttagaatcaagtttttacaatgatgttttcattgattttcaacccatataacaacataaaaaatagatagaagaatatattggaagaagatgagagaataattacttataagatgataattttaaatagacaatgatgaatctttgaaaaaatatcaaaaaactaatgtaacatatatatcataaagtctccaaaattaaaatttagaataacccatacaacaacaactacaaaaaaaaaaacacaaaccaaaaaacaaatatttaagatttgagatggaagaggatgaggcatgagagaatgagaggatgagaaaatgggtatttataggatgagaagtgataggagttacaattttaaaaaaattatgagaattataattctaatttattgtgtgttgaataaaattgaatggaaaaatatacttaatgagtaatttatttgatttcagttttgtatttaattgtgtgttaaatgtatatgataaatgtgttatatttatgatttaattagaaataaatttttaaaaatttgttttatttttttttaatttacattgccaagtggaccaataagtagagagtgaaatcttacttttatatgtatgattacaccatgtttattagataatagtaattattttagtttatttaattagattaaatggcaaattttgattagctagttaaaaaggggtggatttctttgaacccaaaaattgtttctttctttttaatatcttaccatttcatatacgtaatatttaactatatatatatattaatttattctgtaagttttttcaacaaaagtatatatatgacgcatcgtgaatacgtgttttcacaaaactgatcaatattgttattaaaaactcatatacagaattacatatttcttatttattgactttcaaatttgtttcgagttgactttaagattcatagttttgacatcatataaattctattgctttagacaaaaatctagacacctacgtgatttagacgtaaatgatttaaataacataaattattattttttagtcttttcaatgaaaatagtggtaggatattttagtatatatatatagggagttaaggatttagataccccactaggataaaaatttaccaaatgggtggtgaaaagattgttggtgctggaggggagaaagccagaccaacagtgccagtaatacccgatgcataatagtaatctactggtcgggactcagagataacacagactacgttgaaaagtaaagtctcgaggttatcttaaaaaaaaaacatatcgcgatttctcgttgcacgcaaagtaatggttctagggaaagcaacttttctgtgtctaagtcgtagatgtgctacagaaccttagagaaaaacaaaaagaaatagaaaaaaaatttgttaatgattttatacaactaaataagaaaaaagcctagaagtaaattaaaaacaaattacttggacatgggtcatgcgttaatgaattagctccgatatatttatcgaccgctgctgcacccggaaagaggtgacatggaacccatatttcatgggctccggtatcgaacataacaggaaacatatcgtcctgagtatcgacactgatgtaaccatgataccacaaatcgtaataggttctacgtcgtacacggattgccatttgcctaatgaataataataatttaaaaaaaaacaaattatcaatataatgttattgtaatgatttcttgtcaatttcaatcacacacttatcaaaatcaaaatcagacaccagcaaaaccgagttagcacttagcagatatagaaaaacatagaaacaaagacattggagctcttttaacttgagaaattttgtcattgtagctatttagaaatatatatgttaaagttagtgagatcctaatttaattagtattacctaattatctacaacagtagttaattttgtttttagtagtttctctatcccacactctcccaatcaatttatttcaaaaaaatttatcctcatgaatgtgtgtttgttcaaaaactttcatgattttttttttttttttctaaggaaccgatacgcatttcatttttagataaaatattattgtaggtacaattaatagaattgatgtaatctatttagataatctttatctcagtactaaaatgaatactgtacaaattatgcacactgaaccaattcattattaggatcatttggattttgtatcatgaacaatataatctccatctatttgatgtttattattttcttctgtttttaatcaccattggaaaccatataactaatatagtagtgtaaatattgtaattaaatcgacaaatctttattttttataaatatgctcggatatttatgtagaaaatgatgatttgctatccatctattgctccttccctagttttgcaaatatttttttcaaaaatttgttgtagagatcctttaatgtgagcatttaatcgttatttttagagaaatggtctaatattttgcaaatcaaatttttggacaaaaatagcactcaaatgaagtattttgtttttaatttttaaaattcataattaagaaaattcaaaaaatacacaaaattatcgccaaaattcatcatcatcatttcatttatatcactgcgcaacaacaatggcgccaaagaaaccttcgacgaaggctctctttgtatcacctaaagagctaaggtcacacggcttacctactgattttagaagaaaaagcaaaagcaaagttcatcgtgcaactgaacttgaggttgctttcagaccaaaataagggagctttggtcactagagaagcacaatacaagatttggttcaaatcaattgaagaaaatgggctttaaagagggtatgaggctcggagccaaagaccaaggaatgtctgagcgtctttagtagggcagtcccggttcacatggatagtgcggaagtgcaagagcgtggaacttttttttttgaaaactttacatataaaaaaagcccaaataatttttaaaaaatattatcaatataagaattatattttaaaatgttcaattttttttaaaaaaagtataaaaggctctaaaattttaaaataacaatttttttataaaaaagtttaaatgtttgaaaaaattatttttaataggccaaaaattcttattttcgttagacacctaaatatattgggccgggctgatagtaggccatgatgaagttttctcttcttcacccatcttcgcgtgtagacctttttgttctaaaaccccagtgccaaaaatctccaaagcatgaaccgggtttcaatctcagaccgacaaattgaaccgtttgatatctcttgaaccgaaaataaaccaaaaaccggattaggtatttttattggaatttggaagaaaagcccgccagctttgtcactggtgggtctctctgctcccggcggatcgacgccgtccttttatccactctctacagctttttctcaagtgtgtctctggctgcttagttcctatagctttgctagaaattgaaaattccaatagcccctaatcccaataacctcggaatgtcggaaatggcgagtgacgaggaagaaaatatcattcctttccagctccagttcgacaagcccataccttttcaggttttggttttacttctgttcaaatttcgtgtctttttgtgatttaaaggaatttagatggatatatatgttcaattttgattagattaagatagctgagtggaacccggagaaggatttactggcaatggttactgaggactcaaagattttgctgcatcgcttcaattggcagagattatggactatttcgcctggtaaagttctctcttttgttcactttgttagattgaagtagacattttcaatacaagatggtttttgattgtggctcttagtaatttacagaaattgaaagtgaaatgcaatttgaagtaggttttcaatagtagaaggattactcagttagtcagatatttctggtacttagtgtgtttcctttcttttggcttataggaaagcctgttacttctttatgttggcgtcctgatggtaaagccatagctgttgggcttgaggatggaaccattgcgcttcacgatgttgaggcaagtatagtttgaaactaatccatgttttccatgatgaagttgttgatggcctgaatatttcttttaaacctttgctatataaaactagtattatgatttatttatattgtcgaaacggaaaaggatcatgcttatcaaaaagtggtggatactcttttaatacagaacgggaagctattaaggagcttgaagcctcattctgtagctgtcgtgtgtcttaactgggaggaagatggacaatccaataccgtatgttttctcctctaactagttgtacaggaactcatgaattggacatagataatctttcaatttctcatattatatatgatagtataggtgtgaaaaattttggttgcggtatcaatatttatgttgagaaaattaagaaagtttcttttactaatcccagtcaaagcatctacacttttaatttttttttttcacacccaactcttatagttagttatttgagcttgttctaagcttttcttagagtttggttttcaggatgaaagtgataatttctcagtttatgaggaccggacctcccgtttcttccctcctgctccaagagctccgaagatacctggactggtagctggtgactccagtttcatggatgacggtgaagactctttggcagaactatctaatacctcattccggaagtttaacattctttgcagtggtgatcgtgatgggagcatatgcttcagtatatttggaatatttcagatagggaagattgtaagtcgctcttttgactgtaagtaattagtaaggcgttaatatccattcatgtatcatcatcttctcatttctgcttgcatatagaattgcaggatgcttaatgaattttcaactctatttctgcatggaaattgtttttttgaaacccttagttgcttttttattacaagttcttaatattgttagtggtaaagttaacgatttgtaagttttttgtttcttttctagctatgagcaaatattctattgttttatttttagtttaaatcttattttctcttgtatcatgtgtttgctctgctgctcctgcattaccatgacagaacatacacgagctgtttgtttctgtgccccatctggatgagcatgcctcttgcaaactatttaatgcttctatttacaaggtaattggatccttttaagagccatgctttccaaattatataaatgacctctcgttatttctcatgtctctcactgtaaatgcctgttgtggaaacaaagaaaggagagcttgttatatgagaaggagtctttagattcaaattaattattgtatattacatttcttatgttatatgagaaggagtctttagattcaaattaattattgtatattacatttcttaggttgctttgtcgaaagacctctgccgtctggtagtaatgtgcacaggagagcttagggattgtgctataaagccaagagaggaaaaattaaatgttgaagatctgcctggtttacattgccttgcaatggacacatctatattttggaagaggtaaacacaccaaattatctatacttcgcagctgcttctttctctgtaccttctcattgtttcaaatctggattttaatacaggaaactgttagtaaatggcactctttttccgccttgcttctgtcatgttctttatatctcatctaatttttatatcaggaaatatgagcttcatcaggttgctcaacaagcttctaacattgaagatttgactgaggttattcgagcatccctgtcagttatgagcaaacaatgggcggatgcaatgaaaacttttcatgacaagtttcattcgctttccacgttgatcattgataatggtatttgccgctatcagtttgttggtggaggtttttctcttatgcttaatcgcttatagatttacaaggctctgttgcttttctcctaggactggagtcatctcctcaagaagagtttcttagccttttgggtggtgcacggataagtccagcgcttaatcagtttttagttaactctcttggtgaagtggtaagctttacttgtttgatcttcttcagggtaatagtttaatcatattccactaagtagttctcttgttttactagggtgtgaagcgagttttaaagtcagtatgtggtacaggaaaagagcttcagcagattgtccttgaccatcttcaggttcagtattcttcacactcctggaaagggagtttgaattgttagactttttatcctactaatagtttttagatgagttttgtcacgattaagctttcttttcagcctgcagcagaaattataggattcaggatgggtgaattaagaggtctctcgaggtggcgtgcacgttaccaaggcattggtttggatgagatactccttaatgaagccactgaaaatactggtcttctacttgtacaagtgcaacggtttatgatggtactatcttctgttgtccaacaggtacagaggcgtgcattcttttagatactgagaatcgtagttattcagtatattggctgtcccatgtttctcacgcaatggtcagttcaatagaattataatactctttgtttcagttttcaaatttcttcaactggctcgtcagaagcataaagtatcttatgcaagaaccaaatgatcagcttttgtcatacaacaggtatgcacatgtgttttctatgttgttaatgatgttaaaagccaaatctctgcagttacacggtttgcttctttggcagtgaactccttgtggtattcttgaagttcttatatgatcaagatcctgtgaaagacctcttggagccatctgaagctggtgatgacattgaaattgatctgtaggtcacctctttctatatctatgcttttacctaccctttctgcgtagtttatcttgtagtcgttcagaatctctgtcagtttatcttgtgaagcatgaagtccattgtatcctccatagctgtcttttttttttttttgacatcgtatcctccatagctgttcattcattttattttccttcgtttccttcaaactcttagtgttctaatgtcccagcaaaaccataggaagagtcaaagagttacttcagtttggagggttttcagagtgtgactttctgcagaggacattggctaaggaattccaacatatggagtctaggtattttcttcatatttccacacaaaaaggctatggtagagacaaaggtctgatgccatggctttgccttgacaattttaaatacaacctgaacaaccatatttatgtttttggagttttacccgcaaaacaaagtgtgttgagtctttagagtctggtcatactttctcatggtttctctgactagacgtcaaattttgattttaatgcttacacaattttagcttcaagatggctcttcaaatgccctttacaacaatatcaagaaagatatcatgtatgaagtggttgccgctttgccctcttcagttgtcaacaacggaaactcctcccacaattcccatgtctctttccttctataaggtacttgcagcaacaatcttatgcacgttattatgatcacatatgacatccttaggaagagattgctgattactatctccaaagtcttcatttgctcccgatatactgaagtcttggtttgcttttgtagaatgaactttctgatgattcaccttgtcaaagtgggtacactgattacatatcttttcaagtccccaatgaaaccttctcagagattttgaactgtattggcatagctaaaggttttaagcagaactccaacaatgagaaaaatggttatacttctctggaagctgttttgttatctgtacctaatggctacacttgtgttgatttgtctctctacaaggtgaatactcattctcttctgcaacaattgttgatttaaaattttgtgatattttttcttatggagttgccttgtaaatcctctgtctaatttgaaacaggataaagaactggttttattattgaataagacaag

SEQ ID NO: 5404 - DNA, 1592 bp, Arabidopsis lyrata
  Intron number 1 from transcript 473850 (locus 473850) deri ved from phytozome v7.0 (chr-ID scaffold_1; pos 23240363 t o 23241954 reverse strand)
ggaaaaaacccgaaaaaaccgtcatttttttttttttggccgtttaatacccgtgttattaaatttggaataaaaaggcctcgtttaattattgttgtcttttaaattcttcgtttttttaattttggtagattctgacctccgcgttaacggccgttaacgatggtaacggaatcgctaactgcagcgaaaacttaaccccatggtgttttcgtatatatatacaatttatgtttgtatctttacgaatgtagtgtcttagtaaggtggttatacgtgggttgtatttagactcgtgcaggagttcgattgaccacacaactcttttagatttttttttttttttttttttttttgacttcgtcttcttcaaactatctctgttctctcttgtaactccagattgaaattgagaagccgtatagtacccaagatctctcctgtaaccccagattttcttattgaaattgagaagccgtatatatagtggccaaaccctagatctctttgttctctcctgtaacctcagatctagggttattgaaattgagtagtggaattgaaattgagaagtaaagatctagggtttatccactttgtaaaatttggggaattcagtaatcaattcatgtaatagaagctgaaacgatgttaaggtgaacaaaaacatggagtggcttcgttacggtttgatgtgtgcataaagaagtaggttaatatggagattaacaggattgggaagattgactatgctactactccaatctttccctttttcctctttaaccaagaatgctctatttgataagcatggttctgagacgagataggatccaaagaagtttgctgcacttttgtttttaattgaattaggttgaagacgaagtcaaattaaggagaaaaaaaaaaaactaaaagagttggaggtggatcgaactcggcacatgagtgtaaaatcaacccatgtatcaccacctgacaaagacaatacaatcgtaaacttacgaacataaattgtatatatatacgaaaacacaatgggttaagttttaactacagttagcgattccgttaccatcgttaactgccgttaacgcggaggtaagaatctaccaaaatttaaaaaacaaagaatttaaaagataacaataattaaacgaagcttttttattccaaatttaataacacatgtattaaacggcaaaaataaaaaataaatagcggttttttcgggttttttccctaaaggtaatagatttttatcctcgtcctgatatttttcttctctctgtgtgtgtagaagaaactgtggatattgctcatcttctttttaattcttcccatttatgtccatacttaatttttggataagttactaattttgcctaatacttctcataaacgcatttatatcctcctgttcgttgtatctgattttatccacttgactaacattttggaactttgttaatgtatctgctttttaagggttctgatactaaagtttggatttttaaactaaagtttggattttttttttgtattcatgaccattttcagatccagtaatagctgagattattggaaaaaaa

SEQ ID NO: 5405 - DNA, 945 bp, Arabidopsis lyrata
  Intron number 1 from transcript 482071 (locus 482071) deri ved from phytozome v7.0 (chr-ID scaffold_4; pos 14856802 t o 14857746 reverse strand)
aactcaatctcgacctcatcagatccgtacgtttaaatctctcctctctgatatctagatgttttacgattgtagaaacccagatcttcacgagatctagaggttttttagtttgaattttctgggaaacgcagaaacaaaatttgattaggagtgttattgggaatcgcgttattgaatttagaaacgtagaagatgatctcactcactggcggtgacttttctttctttctctaagattttttattttttattttcgcgggtcctatttagatccacgtgatttctccaatttcttttttcaatttttacccaaaataaaagctataaccttttggccgtgaacaagcaaattagttaaccatcaccatctagcttgattctaatgaaatgtttcccttaagtggttttgtagtgagcttaatctgtgttcttttttatctatattgatagtcttgagtatttttgggttcattgatgtgatttaaagtaaatgtgcacatattcgtgtaaagtttgatttttttttagcaatggtgggaaatgatgccaggttgaatatttatgtgtaagaaaagaaaaaaagaaaaaaaaaaaaagaatatttatgtgtaaataaagatcttgattttttatagcaatggtgtgaaatgatgtcaggttgaatttttttgtgtaaatttgtttatatattaacctttacagctaatttcatggcgaggatcttttgcttttcttgaatagtttgatactgattgacccttgtcgtagttaatattcaaaacataaagaatcataaccacatttgggtcccttgataattatattccttatgatccaagttgtgttactttttggtaccaaactggcttttgttttcttatgttagtttgacgtttatgtgaccaatgtggtgtgtttttgtgtaggcgaaagtgtttcact

SEQ ID NO: 5406 - DNA, 1955 bp, Arabidopsis lyrata
  Intron number 2 from transcript 333237 (locus 333237) deri ved from phytozome v7.0 (chr-ID scaffold_215; pos 2370 to 4324)
gcaactgtttgcgccttttggtcagattatagaaggtacattcacaaaatctgattatgtgtctctgctctgattatgtgtctctgctctgattatgtgtctgaactaattgtgtagtgtgtatgttactgttcttagctcgtcttattagggaccagcaaacacaaagacctaagagcaaccccaatggaggggcctagagagactcttagctctgaatccttaagaaaagaggtccaaattaaataaaaaatgtggataaagataagaaacgtaccttagtttagagttttttttgtctgcaagagtccatacgtgtcagttttctattggtgtgcatagagagaaaacaattaatttttccccctctctctctcttctcttgtaatctccgatggctgcgaaatgaagaacatggtctcgactctcgatcatcatcgtcgaagtgtttagatcatcaaatcgtcagagaaaatccgaagaaactggtctcctagccgccgtgatcaaatcgtgatgaactagggttttttgaattggtaattgatgaatttggtcacagacaaattcttagagaaataaacaaggtccgttctctgaatcctcaaacatcgattctctagatctagaattatctttagcatcatcttttgatttgatctctctctaatctggatcttcctcagcgattgatggtttataaatagcttgagtgacttgatctttgcgtgaacacaggaccgaatttgaatggattgtttggaagacaatctggaacaacaccaggatactcatactctgttgggaggagaagactctttacgattacttgttgaatcctaagaaggtatttgattgttctttattattccttaatggatttcaataatagagtctggcgaaaatgaggttcttgatgattgttcataagctaactcgtggatttatactcttttgattatagaggttaatctgttgcagaaaaaattaggtgtttttttttggtgtgtgcaatatatctaaaaaatgtgtcatttgttttctattgcatgtttaagaatttcaccaagaacttagctgcagcttctaaattggttaacgaggttccaccatgattctctagttttcttgctattattatgtctctgtgtttttagatgaaatggtctcataaccgaatcaccgatcaacattgtctttctttttgctagaatatttaggcaaagttaaatgaggtaacttctttggtaggacatgttatgctttagaaactatgagaggccgtatggatgggagaaacagagaagcggtggaaaaagcaatctccatggatagctttactagtaaatgtgatagttttgtttgcactctcgctaccatagccacttcttcttttccatatggtattacgcctttacgatgacttgaatcaactgtgaagggtgttaataaaattatgcagtcttttgtgtcttgtaggttgaggctctagccgctaagttaactcaaaatgaaggtgaattaattcaagataagtttgaagtgaagaaactggcaagcttcatcaagaaggtcttataagtttccttttcatgtttaatacactgtaattttgttagacatttacagattcaatatattctcttctagcttggttactttttttaacagtcaatttatgtcttgtatgtttacaattttaggaaattataataattattaagttttatcaaataaaaatgtttacaattttttattttaagatcaatatattattttaagaaacttatttaaggactctaccattggacaaaattttctataaggattcaacataaactcttaattttcaaattgtcataatttataattaaaaaatgtttaagagtttttttaaggactctaccattgagcttgctctaaaggtttcggattcattactttcgagtctgagg

SEQ ID NO: 5407 - DNA, 7092 bp, Arabidopsis lyrata
  Intron number 1 from transcript 320424 (locus 320424) deri ved from phytozome v7.0 (chr-ID scaffold_4; pos 6281738 to 6288829 reverse strand)
acggataagcctacccttttccacacccgttctaagtataaattatttgaacagaagttctaaaaaaaaatatatattgttgtgtttatggttttttttttttttgttaatagatcacttctacatttagatccataagccaattattaattcatcaacttacaataacgcgctaaatgatcatagatatctcaattattttccactggatcttgttttttccataaaatagttttgaaacgattataatctaggttcacttttttttttaactactaaggagtgacatgctaacatgcactagtcgactacatgtctagtaggaagtggtatcatagaatcgttaatttgttgcttatgaattgaaattaccaatatttgcttaaaactatgcttttgaaattgtaggtccttcaataaaatctatgagagatattgcatgctttcattacaagaacgggaagaaaggtgtgatttttcagattttatattattattacataagtacattggcatggttttggttttatacattggctgactttggtgttttatgtatgcattcaggagagcctacacaataaaggtttgatttattcatcactttacatttatcaattaaagtttgagttttcacacgccaatatctttctcacgattagttggatatatggttttcacaatagtttaagcataaaagatgtatacttattttcatagtttattggtgctatattcaaatctaagtttatgtgattgatattattagttttcaataaaaaataacaccaaaaattaaaattatcagaatattaaaaaatttagccaactaaagctaataacgaacaactaagtaaattttctcttctttttttttttgtatgaaacgtttgtttatttatttattttttacatgtatatatagacgctgataaaattattgaacaagaacaatccagaagtgactatagaaaatgatcaatcttttgctgaaagtgaccaattttcgcctgaaaatgatcaattttcgcttgaaaatgatcaatttttgccagaaaggtataattttgtttatattcaaacacatgcttatagattattcaacatactagatctaatttggatatatttattgcagaagtgaagagattcaggtacgaaattatttcttaaaaaatattttgtttccttttaataaatgtttatttaatactataattaatgaaatttaggatgataataaggtcactaaactgagagaactcaaggaattgtatgatgagaagaagttaattttgaggtaatgattaagaaaaacactaatgaagattcaataaatcatttttattaattttctaattaattttagtttttttttttattaagttttgctaaacctattatttattaattgataagaaactgggaaagtccgaatgaagttattgatttgaacggactcaatatcatggaagactatttagttacttctctcaaccatatcagaaatgtcataaaggtaattgcatattaacatataataaataagatttattctaaaaatcaaatgtgattggaattttgcaaaacaattatatcttgtttcaggttaagatccgagaagagcaacaaaactcttatatgatttaaaatggagagtttattatgtattttggagattggagatcataggaaataatgttatgttcttttttctttcaaatgattcatatgtgatatgttaatttttctttttaccatttatagtgcaatactatttgtgattttttcggaccattttcttgagagttgcacactgtatgattagtctgtttgtaaaaaagaaaataaaaggaaaccaaaaatgggttaaaagataagggatatttctttattcttttcggatagggcgttaataattttttttttttaagttttcatatttttgttgttatttaaaagaaatatgggcttatgtattctattattttatgaaattagattatcgttaattaaaatttcattctaatcatgttttatattttttcaatattaaattttgtatttcattagttagtgaaccctagaatgtcgtacctcttatctcctaatgaactgctaaattattgaaaaatttctgacagaaaatgatggaacttcataaaatttcctataataatatgctgaaagttaaaataataaaatagtaaactatataacagaaaaaataaaaattaagtgaatttaatgattaattatttagtatgtaaagttgttgaggcaaatttcagaaattaggtattctaaaatgactatatgatatatatatatatatccttaatttagaaagaatctatatattaggtgagacttagtttatgcttagtttttttttttttcttcagagtttatgcttagtttatgcttctttttaagagttttatttcaaagtatggggttgagctgagctatatacctaacaaagtttagttctcatgctttaaatataaacctctttaacagaaaaactttatttataaagtgaaaacttaaaatgaatttaaatattttgaatttcatttttccagtttttatgtagaatgatttttcttcattcacaaaacaaaagaaaatgaagaagcgattatatttgaattgttatggaatttaattttttaaaacataattaaacaaacttaaaaagaacgaagtttagtttgataacgcctttgtaaattaggggtacttatcatctaattttgtttagatttatttctactttcactgtttttatagtcaatcaagaaaaatggaaggcaatctgattaatatttatgaaaaaatatttaaaaaattaattaatgtttaatgatatatcatcgtagtatcatagtaattatgattctattatttcatgctacgtgattatataatgttatgaatacttaatttttttgctatgtgtattttaatccaactaaatttagataagtcaaaatgagcataaccaattaagattcaacttataattgtgtgtcagcaaaaaacaaaaaacattgtttgtcttgtgggatactaatgatatcaagtaaaatctgtgaaaccaaatcttgatttttttaaagattttgctattaaataacacattaatctaattatgaagattcttctctagtctcatttttaattaccttcaagataaacttcctctaaaccatataatataaaggggatgtgaggagaacactccaaaatatatatatatttgaaggaaaaatggggaggaagaaaataaaactgaagagtttttaaagaaggcataagaagtagcattgttgtgtgattgtgatataatcttcattgttgtttctcccaccgataagcttactcttttccacactcgttctaaatataaatgatttgaacatgatttttcaaaaatttaaactattgttgtctttatggttttttttgttaatacaaaatttctgaacttagatccataagccaattattaattcattaatttataatgacgcactaaattatcgtggatatctcaattattttgcacttgttcttgttttttcttcataaaatagtttttaaacaattataatttaagttcactattttttttaactacttaggagtgacatggtaacatgcaccagttggctacatgttcaacacgaaatgttattatagaatcgttaatttgttggttatgaattgaaattacgaatattttcttaaaactatgcttttgaaattgtaagtcctttaataaaaattttgagaggtatcgcatgctttcattacaagatcttttagatttttatattataattacataagtacattggcatggtttttgttttatacatagactgactttggtattttatgtatgcattcgggacagcctacataataaaggttggatttactcatcactttaaagtttgatttttcactatctaatatctttctcatgattagttggggaaatggtttgacaatattttacgcataaaagatgtatacttatttttgtagtttatttgtgctatattcaaatctatgtttatgtgattgacattattagtcttcaataaaataataaaaccgaaaacaaaaacttatcagaatattagaagatttaaccaactaaagttagtaacgaacaactaagtaaattttgtctctttttttatgaaatgtttgtttatttattttttacatgtatatatagacgctaataaaactgctgaacaagatcaatcgagaagtgaccatagcaaatgatcaattttcgcctgaaaggtatgattttgtttatattcaaaaacatgcttaaagattattcaatatactagatctaattttgctatatttcttgcagaggtgaagagattcaggtacgaaaatatttattaaaaaatatttgaagaaatatattgttttatgttaataaatatttatttaatactataattattgaaatttaggatgataataagataactaaactgagagaactcaataattttgaggtaatgattaagaaaaacactaatgaagattcaataaatcatttttattaattttcttattagttttagttttatctattaagttaactaaaactataatttattaattgataagaaactgggaaagtctgaatgaagttaatgatttgaacggactcaatatcatggaagactatttcgttacttctctcaaccatatgagaaatgtcataaaggtaattgtatattaacatataataaataagatttattctaaaaatcaaatgtgattggaattttgcaaaacaaatatatcttgttttaggttaagatccgaggagagcaacaaaactcttctatgatttaaaaatggagagtttatttgtattttgtcgattgaagatcatagggaatcatggtatgtttttttgttttttttttcaaatgattcatatgtgatatgttaattcctttttttttatatcatttgtagtgtaatactatatgtgatttttctcgaccattttcttgagggttgcacactgtatgattactttatttgcaaaaaaataaaacaaaaggaactaagaaaactacatacattaaccgttttcctcccaaaaataggttaaaagataagggatatttcttttctttttcggatggggcgttaataattttttttttatgttttcatattttttgttgttatttaaaagaaaatttgggcttatatattctattattttatgaaaattaggttatcgttaattaaaatttcattctaatcatgttttatatttttcgatattaaatttatgattttatttgttagtgaaccctagtatattgtacttcttttctcctaatgggttgctcctatgttattatttatccgatggataatctttctaaataagtctcttgggcaattaagaaatttctaatagaaaattatgtcaataaaaaaaatttcctataataatatattgggagttagaataataaaatagtaaactacattgcaaagacataaaaattaagtgaatttaaggattaatcatttaatatgtgaagttgttgcggtaaattttagaaattaggtatattaaaatgactatacgatatatagatctttaatttagaaagaatttctatattaggtgagacttagtttatgcttagatttttttttgtttcttcaaagtttatccttagtttatacttctttttaagagctttatttcaaagtatgaggttgagctgagctatatatctaacaaagtttagttctcatcctttaaatgtaaaactcattaacagaaaaaaaacttaattataaagtgaaagcctcaaaatgaatttaaatattttgaatttcattatttcagtttttatttagaatgaatttttcatttaaaaaataaaataaaataaagaagcgataatatttgaattattgtggaatatattttttaaaaaataattaatttttttttaaagaacggagttttgtttcacaaggcctttgtaaattatgtgtaaatatcatctaatttcttttagatttagttctactttcactgtttttatagtcaaccaataaaaatgcaaggcaatctgtttattatttatgaaaatttatttaagaaaattagttaaagtttaaagatatatcatcatagtgttgcacttattatgattgttttattttgtgttacgtgatcatataatgttatgaatatttaatttttgctatgagtattttaatccaagtaaacttggaaaagtcaaaatgagcataaccaattaagattaaccatctacttgtgtgtcaaggaaaaaaaaaatattgtttgtcttgtggaatactaatgacatcaattaaaatctatgaaaccaaatctagaattttcaaagataataatagctattaaataacacattaatctaaagattcttctctttttttttggtaagaatctaaagattcttctctagtctcgtctttaattacccccaagataaactttctctaaaccttattatataaaggggaatgggggaaatactcaaggaaaacaaaattagttgtagaaaaatggggaggaagaaaataaaactgaatagaatagaatgcataaaagagagaagtagcaaatactcaaaacgtaaaaaaaaaaagtcttttcaagaaggcaaaagaagtggcactattgtgtgattttgaaataattttgattgttgtttctcctaccgataaacctacccttttccacattcgttctaagtataaattatttgaacctaagttttcaaaaaattaaactattttccacttattcttgttttttcataaaatatttttgcaacgattataaattaggttcacttttttttttagctacttaggagtgacatggtaacatgcactagttggctacatgtccaatagtgagtgttattatagaatcgtcaatttgttggttatgaattgaaattaccaatattttcttaaaactatgcttttgaaattgtaggtcctttaataaaatct

SEQ ID NO: 5408 - DNA, 5527 bp, Arabidopsis lyrata
  Intron number 1 from transcript 891248 (locus 891248) deri ved from phytozome v7.0 (chr-ID scaffold_7; pos 19432343 t o 19437869 reverse strand)
gataagacgtggatctcgctgccaaggtatacacttaattctatcgagcttacttatattatctgattgaaagaaatctgaattcttttccaattgacaatgtaggaatactaccgagtactcagaaggagcaacgaatttcgccaattcatctgcaagaagattgggaaatctatctgaaatgctatgcccatgtagagattgccgcaatttatgccatcagtctatagaggaaattgttgagcatctagtgcttaggggtatggataagaagtataagacttcttgttggaattttcatggtgaaaaaagagcagatacagaagacaatgctcctcaacatgaaacagaggcatttgacttgtttaagacagcattttctatgggtgatgatgatgatgatgaagcattagaggcaaacgacgatgaagcagtagaggaaactgagtttaggaaaaagttaagagaagctgaaactccattgtactctgattgtatcaaatacacaaaggtttcagcaattatgggactttacagattcaaggttaagagtggtgtgtcggagaactactttgatcagctgttgggtttaattcaggacatgctacctgaagacaatatacttccgaagagtttagctgcaatcaagaaattcctgaagatatttggtttcggatatgaaaatattcatgcttgcaagaacgattgcatactatataggaaggagtttgagaagttagatagctgtccaagatgcaaagtttcaagatgggaaaaggataagcatagtaatgagataaaggttgggattccagcaaaggtccttagatattttccaatcaaggacagatttaagaggatgtttagatcaaaaaagatggctgaagatttgaggtggcactatacgaatggcagtgaagatggtacaatgcgacaccccgttgattctatccagtgggcacaagtgaatgataaatggccagactttgctgctgaaccaaggaatcttcgacttggaatttcttcagatgggatgaaccctttctccatgcaaaacactaatcacagcacatggccagtgatgttggtgaactataacacgcctccaactatgtgtatgaaggctgagaatataatgttgactttgttgatccctggtccaacagctcctggtaataacatagatgtttacttggcaccactgatagacgatttaaaagatttgtgggctgagggtattgaagtttatgactcatttgcaaaggagaatttcacacttagagccatgctgctttggagtatcagtgactatccagccttaggatcattgtctggatgtaaagtgaaagggaaacaagcttgcaatgtatgtggaaagcatacaccttccagatggcttaagtttagccgtaagtttgtctatatggggaatagaaagagactaccgcctggccatcgttacagatataaaaaagcttggtttgacaacactgttgaggaagggactgccaataggatacaaactggctctgaaatatatgagacactacaagcttttaggaatgattttggaaaacctctagataaggaaactaaaagaaaaagaactgagttggatcaagatgaggtggttgaagaagaagagtgtgaagaatcaaatgatttatggcggtggaagaagagatcaatattctttgaactatcttactggaaggtaatgtaaactatttgaactatattctcttattgttggatctgaataagcttaacagtttcttatttaatgtgttaggatttgcttgttcgtcacaatattgatgttatgcacgtagaaaagaacatctcagatgctatattgtctatcttgatgcaaagtgctaagtcaaaagatggtttgaaagcaagaaaagacttagaagatattggaatcagaaatcacttgcacacagaggtccggggaaagaaaacatacttacctccagcagcctattggttatccaagaaagagaagacaattttctgccaaagattatctaagtttagaggtcctgatggttattgtggtaatattgcaaatagtgtttcagttacccctccaaatataggtagtttaaagtcgcatgatcatcatgtcctagtacagaacttgttaccagctgcattaagagggttgttacataagggtcctaggattgccataaatagattatgcagttacttcaacaggttgtgtcagcgcatcatcgacccggagaaacttatgacaatggagacagagtttgtggaaacaatgtgtcaactggagcgcttcttccctccatccctttttgatatcatgttccaccttccaatacatctatcaaaagaagcacgtttgggaggaccagtacactttcgctggatgtatccatttgaaaggtttgatatatgtactcatttgattcaatatatgtatttactgcaatgatattggactaatattcatttcttgactgagttataggtacatgaaaacacttaaggcttttgttaagaatcatgcaaggccagaagcatgtatggctgaggggtatttagctggagaatgcgttgcattttgtttagagttccttaaagattcagtaccagttcaagaaacagttaatcgcaatgaagatattgaggctgatagaagcgtggttgaaggtcgacctctgcagaagggtatagaagttaccctatcagataaagatagagacaatgcacatcgctatgtgctaatgaacatggcatctttggatccttatgtagagtaagaggttaccctttatgtctcatctactaattatgattataatttcattctcaagactgttgtttaatgtaaaatcaggatgcatttggaagaattacaagctaatgatgctcgatgtgctaaaagtgaaactttgttatggaaaaaccatactgagcagtttgcacaatggcttaaaaaaaaggtttacagctgcaacttgtcttcttgattatttgttatacagcttgttaaattgactggttagcttgatgtctggttttcttggcacagaattgttagcttcatgatcatgttttgcttaatgactggttagcttagcttgtagcttgatgtctggttttcttggcacagaattgttagcttcatgatcatgttttgcttaatgactggttagcttagcttgtagcttgttgtctggttttcttggcacagaattgttagcttcatgatcatgttttgcttaatgactggttagcttagcttgtagcttgatgtctggttttcttggcacagaattgttagcttcatgatcatgttttgcttaatgacttatgaagcatttagcatgtgtagatcaagtgctcgagatatgagacaagtcgctgatgtgcttacatattatggagtgataaaggagattttacttatggactatgacatgttcaaagtgccgctgtttagatgcaattgggctaacacagggaatggtgtgaaggaggaagatggtttcactcttgttaaccttcatatgaaccaaacagcctatttgaaagatccattcattctaccttctcaagcaaaacaggttttctattctagggaagatgataattcaaattggtatgttgttatgagagcaccacctagaggctatcatgaattggaaacagaaaaggatttaggtggtgcacctttgcctgtacaagaagtcgatgatttggatgatgaagcttttgatgatgatagtgtttatgttagggatgattgtgaaggcttgttagtggtagattgataggtatgtttgtggtttttgtaaacaatgaaaattgaaatgggttattaaacattttaatggtatttttgtttttacaaatattatatttaaattaaaatataattcgtaattatttattattttgaataatttaaaaacaaactaataacacaaaacagatgctatctttgctataggtaaaatctaattaacgagttttaataacatctttatcacgctattataaacattaacaattgcacaaaagacaacgctatcgttgtatacttaactattgcacaactaaaaaccgctatcaaaagtgtccgactttctataacgggcgatgtcagagcgcttaaggaaacgctatggtagatgaataattgcgtttttcggccgctattaatacccacatttcctgtagtgcctctctttttttggtcataaattatttttaagataatattagtaactaacctttgactaaaaaataattaaggaaatagcattgagtcaaaaaaacctttagaaactaatatttttcagcgatgaaatagccttcaaacaaaagacaaaacatacatgtaattaggatttaaaaaacaaaaaataaacactaataacaggaaatctaaaaataaagaaaatcaatactagaattttgacgacgaaagagagacatccacctagaatcagaggaaaaaacaatgtcattaaatataatagcatatcatactaaaagaaatagaagtagcatgtgattgttaatggaagtgacgatggtggtggtgtatggttacggatatggtgatagattgactttaagaacaacatgaatcatgtaaaaattatttatcatttattagaaatatatcatgtcatttatatatatatatatatatatatatatatactttgaattacaatggttttctaaatataggatgttatatttagatccaaagaatatatggcgatggaggcaaattaagaaattatgaacggcaatggacatagactagaattgttgtcggaaagaggctcggctcgatgctagagaaaataaaagaggagaaataagatcagttggaaaagatgagaagaggcggtaatggtggtgttggtgataaatagaccaagatttatattagatgatttaataattagtataaaataactacaaattgtgttttatattgtgcgttatgcataataaatctatttaaaaaataatgaaaatgttgcattttctaaaattaaaacatagctgtttatataattttagttaaactttataaaaataagtgacaatttcgaccagcaacccgtgcaacgcacggatccatatctagttaatcataaagagtctctatatagactcacgtacaagccgacttaacataattaaaaaggaaaaacaccaaaactaatcttaatgcaaaaaggaaaaatacgtaaatcttaattaaatactttgggctcaagttaaggctttatggttctacgtgataccgtaatccgtatcatgttcttgaaccttttgaaagtcaatcctaagtttcttcacctcacttttgactccactgtgtcacaaaacaacaataatagacggtttagtgtaggatattttcctattatgttaacgactaatcttttcttatgtagcttaaactcttaacgagaccattcatatttgtttgtttgtcaggttgatcatcgttgccatctttgtt

SEQ ID NO: 5409 - DNA, 1354 bp, Arabidopsis lyrata
  Intron number 10 from transcript 495172 (locus 495172) der ived from phytozome v7.0 (chr-ID scaffold_8; pos 14315758 to 14317111 reverse strand)
gtgcaaataatcctgagtaagttaaaatcctaaccactatatcttgaaaaatgtgatccatgcgtcgttatcttaattctacacgtaaatgactaaatcatgctatagagaggataggttctcgaagtttttttagaggatgaatcgtgaatcgtgatatccacttaattaggaaaagcattgttgagtattttggtatataaagggtaacaaattcaaataatgtacctaatagattataataaagtggtgtgggagaccacaactaaaacaaactatgtacctaaccaaatatcactattttatttaggtgattgagacgcattatttggttatatatcatgcaagcacgatgtttttgcttctccatgtgaccgcgtaaatctttgggttgcaatatcttatttctcaactttttccttaaaaaacattgcaaggtggtcggataattaattgtgctaggtcaatattctacgttttttaataaatattttgcatcacgtcaattatattgccaatatatatggtttatttactttatcaagttcccattttttctaaataaaaaaaaaaacaataaaacagatgctgacttttcaaatggtcttcgtagtttcctatcttgggtttgagcctatctaactttgagggcacatcacatgtagtatagatccaggtgtacgaatatacttgcatatatacttcattagttttggataagtgtgattatattattctactcatttcagaattctaacgtgaaattattttttatagatttttcttttggtgctagtaaaaatgataactacctaatcattatatcatagtatagagtaagacaaaaaaaacaatgtcacaagggaaagtgaacatgacattcactaaaaagagcttatatacataattaatcagtagtcatacttttttttttttagtcatactttttttaatctaactatattcaaagatattagataggagatgtgtttttaatcaagtggttaagtccacttgactccgccttttccatcggagttcgactccactaagtcgcgttattccgcgtagtagggattggctatggatcgggctttgtcgatccaaagatgtcaaaaaaaaaaaaaaaaattagatataccgaattttgaaagatcttaatgtgaatataatatatagatatattttgatttttgacaaaatattagttacgaccaaattgtttgatttctttataggttttacctagacaatttcatctaagttaatttcttgttgagcaatatataaaaatataatgacatttgctaatgtcaatgtcccttatttcacagcttcccgaaagtcttgatcg

SEQ ID NO: 5410 - DNA, 2325 bp, Arabidopsis lyrata
  Intron number 3 from transcript 490004 (locus 490004) deri ved from phytozome v7.0 (chr-ID scaffold_6; pos 21616579 t o 21618903)
aattctctagctcatccaggttatcatctacttaagttttatgtatttacacatttctgtatattgatccattgcatcataatcggttttgtccataaatttttttactgaaatccattacattttttagtctagactcgcttggcattggttgttttaattttaattttaaacgaagatccttaattttagaaagaaagaaaaatcagatagatcagaaatagaaagtaaggattcgagattaaaacgtggttcgcacatggacatgggtaaatgtttttccttgaagttgcaaaataaaagaacgaagatgtgtgtggatagatgatgagatagtttggagtcaggacaactaacagaaaattctatatatgtagcaataagtttgagcacagtcttcttactcaaattaggcaataaagtctcatatgagatagatattccatttttacttggttcatgtttgaccagatttagaaaaaaaaaaaggttccttcttagaggtgggtttttctatattatatttctgcttatgtgtgtatttgtattatgtacaaagaacttacacccaaacacttactattgtattgatgtactcgcaaattttttttttttttcaaagagcatgtgcaatggatagagctcatctaaattatttggatacatataatttaatttatcttttatttacattttagattatgaaaaaaaatcaaaaccaattacattatgacatgtgtgatagtagtctctcaagagattgttaagagatttgcattgcacatgatctaacttatttctctcatatttttttattatttttatttttatattgttgagaatatctgtgaaaactttccactattataagaatatgagattagaccgctcatattcagatatatatgcatgaatttggttatattttgtgatttgaactaacagatttcacactagtactgatgagatttgagtattttgatgtcatgggaagctaagtattgcattatatttgcatgtatatcattgtatatacattcgaaacatttttctaaactcatttatgtacatacataaacagctaggtatgattatgacatatatttttatgctcgatcacactagctatgtaatacaagtataaaatggtaatcaaagaaaaattatgtgcatgccttctgaatattttttttttcttacatgttccggtaaatatccgatcaacgtttctttaatttatttgtgtgtttaaaaatatgttttttttttaactcttgggcaaagagaaattttaaaaccaaaacagaaaaacactaacggtttttttttttaaaccgtcagtatactaattcattctgccattccactaatgccatccatagttttatgtattcttttttttataatatactattttgaatgtgtgtatatgtagatttatgtatctatatatgttcatgtaagatttatgtatgtttattgaggtaacaaagaagcatttgcaacagcaacagtatacacccacatagtacaaaggcctctttatctcagtgatgacagtgaaggagtcattagcatgtgtctagatcagaatatgttgattctttttatgctttctctatttgttatatttttgtgtagttagaaattattatgtatgcgtgttatgtgattatttaaatatatgtacgtactttattagaccaaaaacaatggtattttagtacttaagcaagacaggggttaattaatcacaattaactaggtgtgaattacttaactaagccatatccatttgactagacgctttgattcagtacatcaacattttatattccctccaatttttttacatttgatgttttagaaagaaaagcttattctaaattagatgatgtttttaacatttaatgcgaattaattaattttttattagttttgacgatttatattctgcatattgttatattattggctgaatcttattgaaatagataataaatgatgttttagtatagaattgaacaaaaattaaatttcttaatttgtatttaaaaatcttaaacatcatgtattaagaaatagagagggtagtaatcttttagttattgaggtctttactctattagtgttctaaaaggcggtttaggtggtcacctgggctccgactaagcgctaggcgcttaggtgacgcctagatgaccgcttcgaccatctaaaatatcactatcattaatgcttgagggatctagcatggacttttgcttcctaataattttgaaaatttcagtataccaaaaacagtagaacgatatcaaaagcgga

SEQ ID NO: 5411 - DNA, 6292 bp, Arabidopsis lyrata
  Intron number 1 from transcript 472432 (locus 472432) deri ved from phytozome v7.0 (chr-ID scaffold_1; pos 9606313 to 9612604 reverse strand)
cttctatcaccatcagctacccaaatccatctctggtaatctaagtggctatttatatacttgcctccatgtatatttatatgctcatgaaaaattggagacttgctttaagatttttatgagtcttttcaacaacgaagtagaggctttgtttctcgaaaattattttagattttgtgaaagttttgggaatggctcggagaaggcgattttatacatgcatgcaagagtttgatatgtgtattgtttcatcatggctgagtcaaaatttgattcacatattttccatggtgtgatattaattaaacaaatatatcatatgtgttcattgaatatacccgtgcatgcatgaagaatgtttttgagtatcattttttgcttttatcaaatttatttttcgattctaaaaacgtagaggaggggattttttgtattggttctctttattagttttttcgtcgtaacggttgagtttttcttccgtttcaaaacgagattcctctttgtctgcccttatctaaaaacatctacggtaaattaaaagtcactaaaaataaaaatgagacactcaaaaatttttatacttaacaaacgtttaactatatatatgtcttacagtcttactagtcccaagttttagtctgagttttgattcaaaattctattagtaattgtaatttttggaaaaaaaatctgtgaatttttgtccaatttttttccttttactgtgtttattctaatgggtgtcattaactttaatcttgtgactcttttaacgtttaccattgggaaccttcacatgaaataaatatctactttatcgagtcataccctcttctccgtaaattaattgatgttcttctccaaattttgagtttttggtttttctaataaactagacgaaataaattggaaatacgtgtttatacttttatagttatttatgtcaaaatttaagtatttcgagaagaggaaagatccttttgacatttttgttctatagttattataaacgtaacggcaagaatctgaacagtacctactcaacggggtccataagtctagtcaacaaatgtagaccccacaaacttatctcttatcttattggtccgtaactaagaacgtgtcccttgatactcttgttttctactattcaattcgtatcctaagaccatggacatcggtgaaacaataagagtatcataagcccaaatatgattttttaatggttcagacacaatttttgggcttgatccgtatcactggggtgagacttttgatacccagtatcgttgacgtggcggcttcttattggttccgaaaacgcgtttttttgtaaaaacaggttaaaaaaaaaaaaaactcattcttcttctttcctctctaaccctagaaacgcgatggagaaaacgatttcttctcctccgccgatctcctgcctccgctccctccgtttcttctctggcttcatctcttcgattctatttcacctctccgtttcttctccggcttcatctcctcgattctatttcacatttcctcgggcgattttcgatttctcctcacctccatggtctaacgagcttggatttgtgcttctctcctctcctccgctcctcctgctgttaaggccagtaataagcctttgaaaggtatgaacttttgttcccttttaccttaaatgctttggtctatgtctttctctgttacataacgagtttggtcttgaaagtttgcatttttatatctatgtttctccttctgatatgtctgatggaattagctagtgtaacttgtttgtctcatgaacccgtaagattggtttgggaatataggtcttagaattcgataggtgttgtttgtctatctctgtagtatatttcaatcatgaattcagaacctttaatgatgagattgaacgtgttattgataaaaactttgtttgctgcttctctttaggtaagagggagcctgaagatgatgttgatactaaagtgagtcttaagaagcagaaggaagacgtgattgctgctgtacaaaagtaaaaagctgtgaagaaggtgactaagaaggttgagagctctgattcatcagattctgaatctgaggaagatgagaaggtataacttttactgtcttaatttatttttgttggtttgagcatgtgaattgagttatttctaatcagctttaatacatttgagaggctaagaaagttccagccaagaaggctgcaaccaagaagcatgctgcggctgcttctaaaaaggccaaggtctgagagttcgtctgaagatgattcatcctctgatgaggactcagatgatgattctgaggatgaggtgataaatttttctgtttgttgatcacttatttcacttatgaactgtgttttactagtactgaaactagttgtatttgtttaatttaaatagaaggctgctgctaccaaggctgcaagcagttcagattcatttgatgaagattctgatgaggttagcttaacatatttgatttgatagtcttaaaattcttttcaaacagctttgtattttctttatatcagtcattgacatcatccatgtttctgttgatatttgcaggaaagtgaagatactactgaatgtcttcatggtgcaattgctgtgaagaagatgcgtaggtgaaaggtacactcctaaattgctttaattgttaatagagattagatagatgtggttgagaatgtagttgtctttaaatgaatcaatgaatacagaaaaagtagatagtgaatttattgtcatctctttaacaatagcttctctgaagtttaatgtatttgtggcgttggtgatgagatggagtgaatttaaacagaaaaaaaaaaaattaaatgcaactgaacttaaacttaaagttcaataaaatggtgatgagacattagccatctaaattaaagttatgttgatggctagtgtctcagtgacttgaattagtattgtgtttgttatttattgaggcttttcctttataatgtcgacaatgagaactaaacaaaccacttaaactcttctaaaacacaaaatggctccaacttaaacttttccgcctctcaatcctttaccaatctcttgtttagccaagaagataatccaacgcctcccagtccttcacagcctcctttttctgaatcccaaacacccacatccttagctagggcgtctagagtgagatggagtgttcctgaagagaaggcacttgcaagtgcctggctcaacacatccaaagactctgttgtggggaatgagcagagatcagctgccttttgggatagggttgcagcatattatgctgcatgtcctgctgtctctaagctcaccatccgagagccaaatacttgtaagcagaaatggcaaaaaatgaatgagcttgtcatgaagtttgcaggctgttatgagtttgcctctcggactcctcgcagtggagagaatgaagatgacattatcgtgctggcctacaagctttaccatcaagatcaaaaaaacaaattcagtcttgagcatgtttggagaatcctcaagactgatcagaaatggtgcaattggtgtgagaccaaacttcctgccaagaagaaagctaaactttcatctgtagaagaagagactcttcaaaggcctataggtgtgaaggcagccaaggctttagccaagtccaaaggtaagggaaagattgaaggagaagctgaagctagttctgctgctgaacttcagcttatgtgggaagtgaaagagaaggatttggctgccaaagagagactttccaagcagaagctacttgacagccttcttggaaggtctgatggattgagtgagttggaaattcaacttaagaactctcttatccaagagtatctgtctggaagcaaggtgtttgtttctgagaatgattattctggtctttaggtatgtgtttgttagttaagttgttttgttaacttaacatgtattattatttgatattctttgcttttttatgtgcaggacctcctcttggaagctagtgatgactttatgcggatgtactttgttttttgctttattcggatgtacctgccaagaacagagctactatttgtttgtttttagtagcacatggcatatggtctatatgtttttgtggtcagaagccacttgtttttactttctatggtatttgtcttagtagcacaatgtattgtggagaaaccacttgttgttttgttttagtagcacaatgtattgtcgacaatgtattattggtacaattctcttatataaatgtctttgtcttctcatattgaaatccatacgaaacaattattcctcttctcctatttttcattacaattcttctctaaccaagtctttgttttcatttacaaaccacaaaactcttttagttcttttccttctcaaacccaattctcttttaaatcattttctttctctaaccaaaatctctttcaaatcattttccttctctaaccaaaatttctttttatttcttatacgttttgcttcttaaataataatggcatcacattctaatgatgatgacactttggaggagaggtttgaaacatgttttgaagatggtttagagaatttcagtagacgtgtagcgggaaaaaagaaagaaaaaaagggctgctaatatagagagagatcacgaagaaggaaatattcgattatggaacgattacttttcggatgaccccgtttaccatgatcgcatgttccgacgacgatttcgtatgacgatttcgtatgacgatttcgtatgacgaagccgttgttccttcgtattgttcaaagtctttctcaatttccatatttccaacaaagggacgatgctactgggaagcaaggtctatctgccctacagaaatgtactgccgcaattaggcgtttggcatatggtcttgcaaacgatgcgatggacgaatacctccgcatgggcgcaaccactgtgagccaagcactagagaattttgtagatggcataataaatttatttcaagacgaatatttgaggcggcctacacgtgaggatctagaacggttacttcattctggaaaggaacgcggatttccgggaatggtaggaagcattgactgtatgcattgggagtggaagaattgtcctacggcttggaaaggacagtattcacgcggacatggaaaacccactattgttttagaggctgtggcatcacaagatttatggatttggcatgcttttttgggggctccaggtacgtgtaatgatataaatgttcttgaccgctcaccggtgtttgatgatatattagaaggtcgagctccacgactcaggtacgaagtcaatggacatcaatacaaaatgggttattacctcacagatggtatatatccgaagtgggcaacattcatccaatcaattacccgcccacaaggaccgaaagcatcattatttgctagttgtcaagaagcagtgagaaaagatgtcgagcgtgcttttggagtcttgcaggctcggtttgctattattcgaaacccaggtctgttttgggataaagagcgaatgggcaagataatgagagcatgtatcatattgcacaatatgattgtagaagatgaacgagacgaaaatactcagttcgatttatctgatttcgtagaaggcgaaggaagcgggacttctcaagtagacaactctttttctacagagacagctacaaatgtgaacaatttgatggccaatcgagctcaaatacgtcatgaacaaacacatcgacaattgaaagaagatttgattgaacatatttggcaaaaatggggccaaggtaattgactacaaccgactaaattattattttcatcatgtttttttcagttttttttgaattttatgttttattttgcttaagtatattctacttttttttttcttgtaatattaccttttgtaatcttatgttttaatatattaatttttgattttgtaaattttttttttatgatacttaaaccggtatcaccaatgcaaacatatttactaggagtatcataaagaatctcaaataataaacaaacattataaataatactaaaaaattcctaatgatactatatgggtatcacccatgtacatgctctaagtatttaattttcatttccagttcaatttatcttctttacgtgctcaattattatttcctaaagatttcaaaatctctctggattttctatgtacagaattgaatttggaccagcacagtaacccaaaccca

SEQ ID NO: 5412 - DNA, 19053 bp, Arabidopsis lyrata
  Intron number 6 from transcript 486626 (locus 486626) deri ved from phytozome v7.0 (chr-ID scaffold_5; pos 20282359 t o 20301411)
ctgacgagcttaagcttttacatctaaaacttccagttgagtatcaacatatccgttatccccttttgttcattcatcgtatcacttttgaaataaatttcttatatatgttttcttggtccaggtttcttatattacccaaaattggcctgttcaacatgtggcagctagcgaggattggaaatacttggcggttgctggtttacatggcctgattttgtatgacgttaggtttaagaagtggagggtatttggagatgtcagtcaagaacaacagattcattgcaagggtttgttatggttggggaagatagtcgtaatctgtaactacatcgaagcttctgagacgtaaggccctatctattattagtttctaatcatggtttactggctatatttattaatgtttagtgccttttggtagaatggtgtttgcaactcttccagacttttttacataacattattgtgataaacgtttctgagcactttttctttgaatattgtttagtttcacgtgtatgttcgctaattattgcagatatgaactgcttttctatccaagatatcaccttgatctgagctctttactttgtcgttaagtgctgcttggcaaaccaatggtgatggattgtgtaccaggattatatacttgtatcttatcttccgtttgtcatccatgtttaccatgtgaagatatatggcgaattgacaccttcaagcaaagcagatctacaggtagttagttattccggttcatttcttctctgcatcatttccagtaaattatacctttttaacttccaaatgtgagcgcttgagttgcttttcatgcaccttaaagtgattaaatgacaaacagctttccacagtaagagagttgtcaatcatgactgcaaagagccatccagcagcaatgttctttgttcctgacctgcacccgagagaaggcgagttggataatgataatttgtcttctgatttgtcagacagggaaccctcaaggtaatcatcaatagagtagaacatcgtatcagtttacgctgtcattctaattgcctttgtggtctccatagatgtcttatactgaggggaaatggggagctttcacttcttgatttggttgatggacgagagagggaacttacagactcagttgaactgttttgggtgacatgtggtcaatcagaggagaagacaaatcttgttgaggaagtatcttggctagattatgggcaccgaggaatgcaggtaattcttcaaagctgcttgttatgcccaattttcttcttcttcttcttcttcttcttttttttactagggttgccctgccccaagtgtctgacagtaactctctatttgatcgctgtctttcgtaatttccttatttgtttaacgctgggattctatattacaggtttggtatccttctctaggggatgatccctttatgcaagaggatttcctgcaggtatgcatgctagtagagtccattttttcaccgtcattggtagcttgtctttttgttctgatctttattgtctgtaacatcattgtttgtgcatttttattatgttccattcttcagttggatccagagttggaatttgatcgtgaggtgtatcccttgggacttttaccaaatgtgggtgtcgttgtcggagtttctcagagaatgtcattttcggctagcgcagagtttccttgttttgagcctacaccccaggctcagactatactacattgcctgctccgccacctccttcaggtattgttggtcctggcttttcttttcttaagttagaagaatctcttctttcttcttttattcatttctcccttgagaatatttttattctctcagaatctttattctgtttttctcatattgtggacagagagataaaaatgaagaggcgttactcttagcacaattatcggcagagaaacctcactttttccattgtctggagtggcttctttttactgtttttgatgcagagatttctaagtatccaatgctatcaatctttataaagtatctctgttcattgtatttttttacttaaccttcttgtcttgcttcacctgatttgatttttgtgctgaacgtatggcatttacaaatttcaggccaaatccaaacaggaaccagatttcaggacctgggcatcttaaaaagttatcccttttgagaaaagcctgtgatttaataaagaatttcccggagtactatgatgtggttgtgaatgtagccagaaaaaccgatgcccgtcactgggctgatttattttctgctgctgggatttcaacaacgtatgtttctctgtctgtgtttggcctttgtttcttgtaacgtttatataactaggtttgttttactgtaccagacacttgaactattaacaattgctaagatggcaaacttcaccaaccttgtctgctctttttgttgattaaactgtattctgtgctacgaaacttgatattcgcttttgggttctaggttgtttgaggactgcttccagcgaagatggtatcgaaccgcagcttgctatatacttgtaagactcagaagtccttaaccctcgagtatgtttagttaaataatgtttgtatcaacaaaacgctgtcttctatatgttactaggcaagtaggagtgtcagacttcatttgattaaaattttgtgggacaaaaaagctcatggagttactattatagaacactgtagaaatctatttggttatgtttcgaatcgtacactaagtatagaaatggtgcaggtgattgccaaactagaaggtgttgctgtcagtcagtactgtgcattacggctattgcaggtaatttcggctgtcgcatgttgaatctatatctttcgagtcctttcttgtcaattttgttcttcctgttcttaagaaagtttatttgtatatttgcaggcgacacttgatgagtccctctatgatcttgctggagagctagtatgtatttgatgttcttgttgtttgtttaaaatgggcaattcaaagcttgaatcctgagtaatgatgtttttctatgaaaattatgctgttaggtgaggttcttactaagatctggaagagacattgagcaggcgccaacagaatcagattcattatcacctaagcttctcgggtttcttattttctgctccagccacaagaaatcatcactcgataagaggtggaaatttttatcagtttgagggtttactatttttgatattctagagtgatacaactgccttctgatcaatttttatttgtataacgtgactctgaagcagctcttctttcaaagagcaaagtcctcatgttgcttctgttaagagcatacttgaaagtcatgtcagttacttgatgtctggtaaagaactttcaaagcttgttgcattcttcaaaggcacccagtttgatattgtggtacgtatacaatttgtacctttcaccttttcatgcttgggcccaataagtatatattcattcactaacaataccaaaattccaggattttcttcaacgagaaagatatggttgtgcacagctgcaaaattttgctgcaggacttgaactgattggggaaaaggtaataatcaactccattgatgttcaaaactcgtttattctcattctgtagcttgaaacaatgtgaaaactaaaacatagatcccatcgcattgtaaaagtctgcatttttgactaaatttatcttacgtcgaagtctaactattgatatctgtcagctgcaaatgagtgagctacagaacaggttagatgcagagtttctattggcgcagatgtgttctgtcaaattcgaagaatggatagttgttcttgccactcttttacaacggtctgaggtgaaaatcttttagatttccaccgttatcacgactttaaagcatcacagcgacataaccagattgtttctttatttgtcacacaacgcaggttctttatgatattttccggtatgatctacggttgtggaaagcatatagcctgactttagaggtaacaacttatctctaattgcattatgataagacacgatgaagataaatttgagaatctcactaaattgtggtgagtgaatattgaacggtccctaagtcttctaaatgtttcgggattttagatacttgaaggaaggggatacagattaaggtatccttgggttggtgttgtaaaccggtctcaagctgacattaataaaagtgttgatatgatagctgctcgtcgacctgaacgtgattacttccagacttccccagaatactctgaactgacagaaggggttcagagtatttaggaaagatgctctctaaggtatataattgagcagcctgtgtatatatgaagctttaaacataaaagatttggtatttgctctaaaaccatctataacttttcagcgtttggaagttgttagcaagtcgagaatcccgggacttcagtctcttatcacaaagactatttccgagttagagacagagctaagccatcttgggaagcttgtagcagctgatgctggtgtaaggatcttttgtcttaagaacctttttcgcctttcattctttggttccttctctcatttcaaatccctccttcgttaatactcattctcttgaatgcagggaaaactttataagattatggaaatttgccgggcctttgatcaaacttttaaagaacacctcgatggcacgtaagtcacccgcatgtttctggattgtggctaatgcaattttctggctttacgattatcaataacaaccccacagacgttcaggtggtgtgaaaagataaattctgtgttcgacaatcaattcccagctgccattaaaagactgcaattcgacaaacatctctctatggacaatgtacggaaactgatcactgaagcagaaagatatcaacttcatcttatagctcctgaacaaggttatcgccgcctaatagaatcatgcttagtctccattagaggccctgctgaagcagcagttgatgcggttcattccatttgcaaggatcttatccacaaatccatgggcgaaacatctgtaagaatatctctgctcaaagtcataaacccaacaacaacaacaacaacacttatgagttgtgaaccatggttatgtgctttcgtcatgactacaagaactgaagcaatatccaacactgagagtagaagtatcaggtgcaaccatggattcattggatcaaatgagagaagagagcaggaaagcaactctgtaacaagtggacatggagtctggttatttatcggtcgagttctcccacaagattctgaaaaagatgggaatccgacacattagattttcaacagatacaacgatgcctaactccgaagaatcggtttgaatgtgttgtcttatgtgaacatggtctgttatgagtaagtatgttaaaatggtttggtgttgaaaacagatgagcaaattgttggatgaggatcctgcggttcagcagcgaagaacttcaattgcaaagaggctggaattgtatagaagtgctcagacggatattgaagcagttgcttgctccaagtagacattttttttgtttccttaggatacggttccttcatttttttttattttttttttgtctcttttccttcccatttgtcttttttttttaatctggtgttcgaattgacattgtttctgaataagtttaaagttttgtacgaggatagttggggctggaatcaaattattattacaaaagtaaatataaatatgagaatctcactaaatattggtgagtgaatatttaacagcctaagtgttctaaatgtttggagattatctgacagaatgggcttagagtatcttggaaagatgctctctaaggtacataattgaggagcttgatatatatgatgcttttaacatacaagatttggtagctgctctaaaacaagctatgactttttcagcttttaacatttctgtgttcgacaatcaaattcccagctgccattaaaagactacagttcgacaaacacctctctatggacaatatacgaaaactgatcactgaagcagaaagatatatatgtagaaagtagctgtaatttactaggaatgtgtaactttatcattgagtcatgtttttctatttgtgaatcctaatattattccttcttttcagtcaatgtgaaaatctggtcggtaaagatctaaactacataatgatatgccacactcaatgaaattgttaagataatagaagataattgtatctgaaagaggaagactctagtgacaaagttatgaaagcgttaaacttgaaactcacttacaaagtaatgaattaggtaatgcaaaaacaaaagcagaacaaaaaggcagagaagatttatttcacctattactcattctcctcttgttttgctaacagtccaaggccacttcaacccatgattctctagcctccagtatgttttctcaagaaccgcatacatgaatcccttctcatcaaaatgatcaaccatatcttgagcaagtttaatggtctcctcgatctcttccatttcttcttttgaagaagctatctgctgagggacacatctgttcagaattgtgttaaacgcatactgtccctgtgcaatcggatgttcctttagaaacaagatcgccatatggatgtagtacggtgtcctcatccttgcatagcaatcaacaattgccccataatgaaccgagtcaggctcaactccataaatcttcattgattgaaagactttgagagttctttctgggtcacatgctatcgtccatgcctcgagaaggtacctgaatgtgtaaccattgggacgaattgtcttgaccatctccagaaacaaccggtctgcatcctcagcatagtgttttccatacaccgagatcatgtggttatatatcagtcttcctttggttttcgaagttctgaatatattctcgattgattgcagggagcatccctctattgaatagagggtcatgattttgcaaatgctcatttcatcctctagcatatgcatcttcatggctaacccgtgtagttctcgactcttgggatgaaaaaagatgtcaccagcatgctcatgactcaagagtatcgataccactgatcttcggtcgccaacataggcaaagcataaaagttccaaattatacatcatcaacttatccaacctctgctccaaaggagggctctcacagtttgttttgaggctggctgctcgatagatatcttttaggaagtagggaggagaaacaatcaccaagtcttgtatgtacgcggctcgactaatcccatatttaatgttgctctcatatatagaaacaaatctctgaaatttctgtgaaagattttgtaagaaaagaacattattcagttaccaagatgtatatataccaactgaatatataccttaaagattttgtaataaaattgtaacctggataaataatggtatttcgggatgctcggcttttgaactcatcctacggaggccattagagttaaatcgacctttttgacaaatagagaaaacatttcctaaaacattacaaataaatttattaaaattttggaaagaaaaaaatatataatatgaaaaacaaaaagagggattaccgagggattgttggtttatctttgaagatacaaactttaagaaattcatagcttctaaagagaaatctaaagctattattcaacacaagaatactttgactaaacaaacttatcaaaacctaagatatgtatttataggaaactcgtattagtttttcctagttacaataactctaacctcctcatgtaacttgggccttaagaaaggctttgaatgtttactctacatctatttataagaaaacataaatcctattcctaatagaattaagaacacattagataactcctaatacattctaactttaactctagttaaccacacctttggttaaacctaagaagcttcctcttcaagttatcctcatcttcaagccaaatggcctgtttagctacttactccatacaaggagattctggttctcctagtcatgaaatggcagcatctgacaaagaaaaggcgagtaatgtggtaccactagttcgtgataaggatcaattaggtatgatgaataatagcactggtcgtaagtcacgggtcactggtgagaaagagcttactcaggaaccgtctcagatgatagcccaagacagtgatgaaatcttcccaaagcagagcgacgtagagcatggtgtagctagagaacacgaattggttgataaaaataaaatccttggtgcagctgtcaacggaaccttgaaatctgcacttgagtctgcttcttctgaaccgctggggaaggatgttgattctcaaccccaaaagaatgattaccaaaaactctcagttaagggatcgagcaagcaaagagattcttcaaataaagagaagagcgcaaaacaagttttttcaaatcagccaaaagttcttctggtgatactgaacaaatagagaaggcagaaccatcagggaaggagaattggatagagaaaaattaccatgaattttgagcctgttgttgaaaaaatgagagcaggatttagggataattatatggccgcaagagagagagaaactcaggagccaggtacggttgctgaaagtgcagaagtttaccgcagtgagtataatgatgagcttgagtgggtgaaggacgaaaagctaagagacattgtctttcttgttcgagataatgagctggctggtagggatccatttcacctgattgatgctgaaggcaaaagctatgttcttgaaaggcttggagaagaaagttgagaaagaaaatgagaaactgtctcatctgcatcagtggattcactcaaacgttgaaatttgaaaacctggactacggagtaggtaatcttctctacaactttggttgagactaagttttctcagtatctcacattcacagtttatgcgttaatcagcttgtcaaaatatatctcagttatctctgttcctcttattatacagatggcatcagtgtgtatgatccaccagaaaagatcataccgagatggaaagggccttcgcttggtaagaaacccgagtttctcaataactatcatgaacgtcgtgaagcattgttttctggaaaagctgcatctttatcttctgtgaaatatgaagaacagagctctcatcaggaattctcagcgtctgcttcctctgagaacactctcaccccttcatctgaaattacctcaagccagccaaagattgctgtagtcttgtagaaggaagtgatggctctgttagacctggtaaaaaatcaggaaaggagtattggcagcacacgaagaaatggtcacgtgggttcctcgagttttacaatgcagagactgatccagaagtgaaagctgttatgagagacatgggaaaagacttggaccgatggattacagaagacgaaatcaaagacgcagctgatataatataatggaaaagctgccagagagaaacaagaacttcatggaaaagaaactgaacaaactcaagagagagatggagttgttggtcctcaagctgttatgagcaaataccgcgagtatggaaaagataaggaagaagattatctatggtggttggaccttctgcatgtactggtatgttttcttgctaaacatttgcactttgcagaaactcagaatccttaaaaatctaatcgtattttttttgtgtgtttcagtgccttgaattgtatacggttgatgacaaaggagagcaacaagtaggattctacacattggaaatggcaacagatctcgaattagaacccaaaccacatcacgtgattgcttttgagaacgctgctgactgtagaaacctttgttatattattcaagctcatctggatatgcttaggactggaaacgttttcattgttgcgcgcccaccaaaggtaatgaatctaaccaaggaagaaactttaattagatcgattctgttatcgattcaaatttgttctctttaacatatacaggatgcatttagagaagccaaggcgaatgggtttggtgtaacggttattaggaaaggagaactgaagttgaatattgacgagccattggaagaagtagaggaagagatatgtgagataggaagcaagatgtaccatgataagatcatgggagatcgatctgtggatataagtgataagccacggaatgtgtatacaagaaagaagaaagcagaggaagccacacatgtgagagaagaagcttgaagaaactaatgttggcacgtgtgaataatgacacctatataagaatagttttctcatttgttaggctttatgcattgtttgttgttgtaacagtgacgtatggtcattgtagagagagagagtaatgttctggtgatgtgctagagctctcctcgagagacaaattgtatcaattcttttcattgataataaagattacggtttgtttctaacaataagctcgttgatgaaaggtgtctttaacctgaagaccaaacctactggtggaagaagaaaacgatcaaagcaggctgtgaaagattctaacaagtaaagtaaagtccaagcaactcattaccaatggatggaagaaagaaaggatcgttacaataagtgggtttcgactgagtattccaaatggactggtctgaaaatgcgacttgttacgtagtgggtttcgaagaaaggcccattagatatattatctattagacccgattttctgctttgtttaaattcgattcaaaactgaaccctaaaactaactaaactcagaatccgccatgtctctcctccgccgcgtaattcagaatccctccgttgcaaaggctacgaagaaggcgttcgttccttacccactcggaagagatccttcctcactccccaagcttgatacggccagctacatcgatcgccgcccaatttctctgcgctacagagtcacggcgatgatcgagatgtctgatctcgacaatgcctcgaagctctcgcgcctcgctgtcctggaaaaatttcgagtcgacagagacaccgtctttatctgcaattccgtaatcggcgccatgtgcagcgccaaacggtacgacgaagccatctctctgttcgattactttttcaacgagtcgcagactctcccaaacatgctctcctgcaatctcatcatcaaagcacactgcgaccaaggtagcgtcgaccacgctcttgagctctaccgccacattttgctcgacgggagtttagctcctgggatcgagacgtacaggatactcacgaaagcgttggtcgatgctaaaagattcgatgaagcttgtgatttagtgagatccatgagccgctgtgatttcaccgtctacggcattctaattcgcgggtttctggatataggcaaattcgtaagggctagccaaatctttgaggaattgaaaggaccgaatagtaaacttccatggcgagactatcacaaggcgattgcaatcttcaacgtttcgtttatggactactggttcaagcaaggcaaagacgaggaagctatggagattttcgcaactctcgaacatgctgaattgctcaacaccatttccggaaacagagttttgaaatgtcttgtggagcacggtaagaaaacagaggcctgggaattgttcatagatatgatagaaatctgtgattccgagacggttggcataatcatgtccaaggagggttttttcgctgaaaagactataccgtttgagcgagttaggagaacgtgttatagaacgatgatcgcgagtctctgccaacaaggaaacatgttggaggcagagaaactctttgccgacatgtttaccgacgtatacggtgatgacttgttggcaggacctgacgtttcaacattcagagcaatgatcaatggttatgttaagctagggagagtcgatgatgctatcaagaccttgaacaagatgaagatttctaatctcagaaagctttctattcatcacgccacataaatttccttttttttttttttggaatgccacatctctaaaagtggtagatttaatcaaattcccatatgtaatggtgctttggatttcatcactttcttagacgttatgttgacccagaggaagactctaatcatatatatataattatatatatatatatatatatttttacttatacatactctagatttctttttaactttcaaaattcatcttttgttattacaaaaacaaaagctcaacaacaattgtattagttatagcttcctcgaatgggatattatttcacagagattttttttttgaggatatcaacttaccatctactattttaaaagtttttttaaattgtttcaaacgaacattaattgactaatgtaatttatatacaagtaatatataactagaatttaacccgcggtacaccgtggggctattattttttttaaaaatgtaatgttatttttttaaaagattaactgaaaatatatcatattaatttgtatttttaaatgtaaatatctatctatgtattatttagtgtatgattactattatttaggtttcaatttttgaagtatagattcgaaaacatacattttttaagtaacgatgtatggtagattttaaaattttgaatattttactccgcagtacaccgtgggtcgatttttttataacttaattttttaaattttaggttatatgttttgttaacattgtatattttgttttgtgtttaaggttgtataattgtattttgattgttaattttaggatttcatccgtgataagctgttctttattaatatcgatccaaacccgtcatcccatataaatcatctatattatccagttagctaaattattagtgttataaaatccaagaaaataaatttttattattataaaatccaataattttaggatctcacccgtggtataccgttccttgaatgattttaaatttatattactaatatatattttaaatttatcatataaagtaaataaattcaactttttgtgttttttatttatttaaataaaccaacggcttaaatgatgatatatatagttctttttcatgtatgtgtatatgatttttctatgtgaatattttgattattataaattagtattttttattactatgcaaaattttaatataaatatttgctataaatcggatttatgcatatctatagatacatttttggatcacaattagcaaataaatcctgaagttgagaagtatttacaatgatatgccattagcattaattatttagatttgttttatttaagtaaagatttttaattaaaattcatttctcatatatttagcaaaagtctctataaaatatttccttatctatttaagtaaagattttgaaatcaaatatgttctcaacaatttaccaaaaatctctaaacaatctttttaaaaatctcgacttagttaacttctgatttttatctacaaaaaaaaaaattaattgtaacgagtgatgtaaaaatcgagaatgttgatactataatttcttctacttcttttttttcatataatgaaaattattttttagggatattttcttaaaacctctaaacaaaacaaagggtttcaaaagatagcttatcttttggcgggtcgacccgcaaacccgcaactctctacgggcttatccgcatgaacctgcgacccgtagtggataaaaatattattcaaaaaaaataacaaatgatgtttaattttacgggacggggttatatggtgcaacgggtttagatcaatattaatattaaacaatatactatggatgaaatcctagaattaaaaataaaaatttaattataaaatcagaaacactaaacaaaataaacaatattaacaaaacaaatacaatttaaaattttgcaaaataattttttagttattaaaaaattgacccgcggtgtaccgcaagaaaatttaaggaagaaaaatcttttttaaaaaataatagctccgcggtgtaccgcaagaaaattttttctcctaaactgaggcaagaagaagaagaaagccaaatgtcgtttaagtgtatatatagatataccatttaaacctaaaacacaattaatatactaaaaactattaatatagatatatggatggtatatttataaaataggtcgaaatattatattatattctctattaataaacaaaactaattatatttagatttttttaaaaaaaattatagccccgcggtgtaccgcgggttcaaatctagttttgtagagtaaaattcaggaaattttttttgaagatatatggaaatattgtatagagattttgaagatatcgtttggttaatatcttttatttaaattttgtaacttaataataaatgtcaatggcataagttgtaaatacttcccaactccaggatttatttgctaattgtgctccaaaaatgtatatatagaagatagattagattcggacattaattgagtaataatgtacttacctaaacttttttttgtacttattacgatttataggaaaatctaaggagtactgtacaataatatatatgtttcgtccaaaaccctagacgtcgtttaaataaattaatttactttgaatttttctctagagttagttagccgtcgttttgcttgcctctaatgatccgccgcctcattcatggtcggcgcttctgcaccaccgtgccaagaagagctgaggacatattatcaaacccagattgccgtcctacggatctatgcttgagagtctcgtacttggtcaactctgttggcgacttagacacggcggccaagtacgcccgtttggctgtcttcacaagaatcaactcggagtacacagcaacaacatgtaaacacatcatcggaggcatgttgcgggataaaaggcacaaggacgcttacgatctctacgatttcttcttcaacaagcataagctcaaacccaacagccattgctgcaaccacatcatcgagtcccgtttccaacaaggtcttgttgaggaagctcttgatttccaccgatccatcaagtccagtgtggtccacgactacccaagccacgatacgttcagggtattgaccaaaggtttagtccactacggtcggctggaccaagccgaagccttgcttaaggccaagacagtcacaacctacccagatcacgtggcgtacaacaatctgattcgcgggtttttggatcttgggaatttagacaaggcgaatctagtcttggacgaattcaaacgcttgttttcttctggtattgctagttgcaagtctacgtatgattttctctgttcagagtatcctggatatgaaaacagagtggcattcctgatggccacattcatggaatactggtttaagcaaggtaaacaggtggaagctatggagtgctaccaccagtctatactagtagcaaacaagttaccggtttgcccagaaactggcaacgcccttttgaaagtcctcctcaaatacggtgagaaaaaacatgcttgggctttgtaccatgaaatattagatcaaagtggaaccgataacagacgcttgggctctgatacggttgagataatggtggaagagtgttttgatatgggtcggtgtagcgaggcaatcgatacctacagcaaggccaaggcgagagccaaggataagaatctcttaggtaaggaatacattatcacaaggtgttgcgaatatggcatgttgtcggaagcagagtctctctttactgattcacttttcgttaccactttcaaaacaatcattgatgcttatgtcaaggctgggagaatcgatgatgctatcaaaacctccaacaaaatggtcgatgcggctctaaaggaggtcacctatctgttttgacttttttcatcattttactttagttgtattggataatgctagtttagttagtttttttttttttttcttgttttttgtatcaagaataatggtagttataagttcctctttagcaccaatgaatgagctatttattagacgtgtgactttcttcagatgttgcaatgcacacaaagaaaactttcttcaataacgataataattaaactgtagaaagataaaaacaacgcaaaatttttctcgaaaaggataaaaaaaataatatatggtattgaattaccaaatcaatatttttagtttcaattaccaaatcgtttataaatcgattaaaacatgatcggaccagattatggtgaaaccaccgtgagaatatcatcaccggaggccatgtcaaaagaaaaaaggaggcccattggcccattatgtttagttgtttacggcatcatttacaaatccggttttcatgtacaacacttaaaaaccgattaaattaaaatccgatcattataaaccggtcggtttttcagcattccaaattttgatgctccgtgtatggatctgcgagatccatcttcttccaattgttttttccaacaaaatgtttcaatgatctctgtaatatgaacagagtctgtaatttcttctcatcagaatcaatcagatccattgtagagatagagagatagagagatataggcaaggaggattagagtttcatttgaggagaagagatatagccaaagatgtatatggcttacggatggccgcaggtgatcccgcttctagaaggatcgtgtccgtcttctcagcgagtcgtgtaccttaagctcgccggccggctattgctggttgtttctccgtctcacttggagctttggggttcttctcaggtgcttgctttatcatcatagctgcatttcgtcactgtgattcgtaattggagtctagagttcgttaacttatagcttttttgtttgaatttcaatttccggaattagcaacgagtgaggttgggaaagtatatgagagatgacaggtcggtgcgagaagaaggagagaatttgcaagctgtgtggagtccagactccaaattgattgctcttcttgtaagttcttactttcttccttagctgagaatttcttgatttggtatacagaatctagttatttgaatcttcaccagattgtagttagaatgagcaaaaaacatgtttttaatattgagagcttgatgatatcaaacattcagcttacgcctctcatttcagtactagtatcttgtttgaatcgtttaatcaagatacctgtttttgttatcacacttgtatgtcttttcaccattttctttttgttcttggttttaatctgcagacatcatcattcttccttcatatatataaaattaagtttactgataaacgagtaaaacccggagagagacaaccctcggagttgtcttttgcgaccatatctcttttgctaagtgagcaggtcccttttgctgggaaggacttgtctgtgtaagtgctttttctgtacgtgcccgtatgagtctacacagtcaatgttctgggattagaaatgtgaggccaattctttcactctgtgcaggagcaattttgtgagggacagcaaaactatgcttttgggactttctgatggatgtttatatagtatttcctggaaaggagaggtaatttagatctgcttcatctgcatagtttcttcttggggtttttgaattctttgtgcaagattcctgatttctaaatttttgtttgtctttgtagtttggtggagctttcagtattggctcccacccttctgatagcaacgatgatagactcttgtcctactctcttggtaatgggctagtctctggagtagcttcagcagcacttgcatctgatgatgaattctcaacaaaatcggctattgttcagctggaactctgcactcgctcgaagttattgtttgtgttaaattctgatgggcagctagtagtatgctctgtgaataagaaaggtttaaagtacactgagagcattaaagctgagaagaagttgggtggtgatgctgtttgtgcatcagtggcttcagagcaacaaattcttgctgtgggtacaagaaaagggatggtggaattatacgatctgtcacaatcgatctctctcttacgaacagtttctttgcatgactgggggtaagtaacttgttactattttgtgttgaacgtttattttttaatattagttttgaaaggtttgggtattactctatatctgagtagttttattctggtgttgtgtaaagaccataatattatgctatatctggaagtttatacgccttcggtaggcaatgctgaatggtttattccagtttaactaagctgatctattcaagattttcaattttatttcttgtgtttatttcacgcccgtgatattttgggtacatggttgataacgctgttttgaaacttgcagttattcagccgattacactgggcctgtcaataacattgcatggacgcctgataattctgcttttgcagttgggtggaagtcgagaggacttgcagtttggtctgtttctggatgtcgattgatgtcaactgtccgccaaattggattgagttctacatcttcccctaaaattaatccaaaacaagacagtaaatacgaaccactgatgaatggtacttcagccatccagtgggatgaatatggatatagactatttgctacagaggaggcatcaagtgatagaattcttgcattttcttttgggaaatgttgcttaaatagaggagtttcaggaaaaacttatgttcgtcaggtaatgtatggtgatgatagactactcatggttcaggcggaggacactgacgagcttaagcttttacatctaaaacttccagttgagtatcaacatatccgttatccacttttgtttattcatcgtatcactttcgaaataaatttcttatatatgttttcttggtccaggtttcttatattacccaaaattggcctgttcaaca

SEQ ID NO: 5413 - DNA, 8183 bp, Arabidopsis lyrata
  Intron number 7 from transcript 481524 (locus 481524) deri ved from phytozome v7.0 (chr-ID scaffold_4; pos 9725120 to 9733302)
gccacagagaagcattcagctccgctgccaagaatgtaagtttttatttcttttatatgttcaaatagttttatttaatttgtacatgtcataataaaccagtaacaattagtagtacgatgctaaaattgttagccgtgattaactatctacacaactcgtaagagtgactcgatataatcttattagaaaattgtgtgtatatatattacataagtatttaaatccttaaatcattacgtatagatataaaataaatcttttatttatattcataattagctattttattttagtaggttactatttaagtttatgatttatctaagacatgaaaaaaatcaattaaaatatgcttaaataagtacttaaaatagaaaaattaaaagatagacagagaaagaaattttaatgctatccaacaaaataaataaaatatgtaggaatattaacctaatttatgttttttataatcaatatttatatataatccttctgtttaaaattacactatgtaagaattcttgccatgcacagacgaatcttaatctattcaatcttatgtataggtttattaataatatatactagataacaacccgcactatgtgcgggatgaagtgatttaagtaaaattattataattaaaattattatccgggatccaagatccgtttgtgtaaaacgtaacatgtaataatttttttttgttttattcaaacttgggactatttatataagaatacgttttacccgtggaatatttgaaccttgaataaagcttcaacgtgataaagaaattattgacgaaatgttaccatttatgacaatatgtctttccgtatgttttaaagatttcgaaattttttattattatttaagtataaaaaatccaaaaatttagcaaagatgatatttgatagtttccgagttaagattttgtattgttccaaatataagattcttatattatgaatgaattatttacgaaatggttataatgtgaccgtttggcaaaaaaaagaggttataatgtggccagattttggtttatatataaatgtggttataatgtttttcttcgaaaagttagaacccctccaaaaaaattggattttaagtatccgtaacatttatagaaaagagattatcttatttatttaagtacaatagatataaaattttatgaaagatttagagattttgtagttttgaattcgaaattcttgaacaaaatgtatatcttttatcatttaaatataagcataaatatatatatatatatatatatatatataaataaataaaaagattttttacccatcggctagagaagatttatataaatgtatataaagaaaaatataaattttaaaatttattaatataagataaacacaatttttttcctttttaattattgaaaatagattattaatataaataaacaaagatcccgtgatttgttgttaaatataaatatgatatcagttgcctaattatttgctttttaattataatttcgtttttttgttatttgtatgatatatatatatatatatatatgtattaagactaatggcaaaatctgtaaatagtctagtaaaatttgggtaaaaatttaaatgggtgaaaattcactctgagagcgacatgtcagcatggcagtttagttaataacacgtcaagataaggtttatcttataaagtgcttctctataaatatatgagaaattgttaaaaatgcccatttttcaataccctttttcaaaaatgccccctttgaaagtccatttttaagtttgccctcttttaatttttaatgaccattttacccttatttgaaacaaaattaggtccacaaaatacaaaatattttttggcaggaaaagtgatcccgcaattttcccgccaaaacacttgtaaaaaaactttaaaataccttgtaaaattttcccgtaaaaatttttcccgccaaaaaattttcccgccaaaaatttttttttgcgggaaaagtgattccgcaatttttttggcgaaatttttttggcgggaaaaatttacaaggtattttaaaggttttacgaagtatttacaagtgttttgtaaggttttacaatgtattttaaaaggttttacaaggtacttataaagttttataaggaatttataacttgtaaaaaacttgtaaaaccttataaaaaacttgtaaaatcttataacttgtaaaaccttataaaatagcttgtaaaatcttataatatcttataaataccttataaatacgttgtaaaaccttttaaaatacattgtaaaaccttataaataccctgtaaaaaacctttaaaataccttgtaaatatttcccgccaaaaattttcccgccaaaaattttacgccaaaaaaattacggaatcacttttcccgcaaaaaaatttttttggcgggaaaattttttggcgggaaaaaattttacgggaaaattttacaaggtattttaaaggttttttacaagtgttttggcgggaaaaattgagggatcactttttccgccaaaaaatattttgtattttgtggacctaattttgttatatttccttatatatttgtgatatcttttattaaaagaagggtaatttagtcattttgtacataaaaaggggtatttttaaaaatggacagccaaagggggcatttttgaaaaggggtattgaaaaagggacatttttgtgagtctccctaaatatataagggatatatatatattatttaaaaatttttaaagaatattcactctgtttcaagagtacatagtggttatgtttagttttattatatgctttcaaacataacacatgaaattaaatggagtatcttccaaatcattaggtctcccagttgaattggtgtcaccatcttatgttcataacttaatgaaatttgaataataaacatacatgcatatatatatatatatatatatatatatatgataattttatataaccagaaaagattggttcaattttctttttatttaatttactaagtaattttatattggttggaagtttttagaattaagtgttgacgtttgttgtaagaaaatttaattcattaaaattggaggaaaataataaaagagaatgttttagacttaaaaataatttattttataatatgaaactttgttaatttataggtcaaaatggaattacttaatttctaatttaaggtgcattaaaaatctaagcatttaatcctctatatattcaaaatctaagaatttagtgacaatgtgctgatgtgcctattttttttttgtcatccgaaattaaatagcactcaaaagagctatttctgtggagtgttgtttacataagtgctatgaagcagttccgtatgaattattcgtgccagattatccgcttttacattagcacaacgagatattaaagatagagagaagttggagaactcttccttgtcgctctgaaattcctccaaatacactgagaatgccggccaccaatcatacacttcatcgtacagaggagggcatcgacttctgtatgtagtggagatagacttctacggaggttggcagcttccatagttggcggcgcatcatttggtgatgcacaaaaccaccctaaaccagaaaacttatcaatgtctttccaagatccgtcaacaaaacaacagtgtccagagaagtttgaatcaaggggtacatcccttattcgagaccgagttgcaagttccactgaaccctgatcttcacaatgaagctctgcttgagctgtgagccacaattgtacttctttttccgctaaccgtaaaatctctagagggtatttgtcaatacttccaaagagtttttcattccttgctttccagatatcacaaataatccatagaaaggttgatgagtccaactccgatgatattctccaaaataagttatccaaattcgcataaatagaatccgtgggaaaaatccctatagctgtaggaatctgagaaagcgctcaaatctgtcgtgatggatggcactgaaagagtgtatgattgattgtttcatctgatgcaccacatctggcgcatcctgtgtaacaatcaattctttttttccttaaattctctgtaaccggtacacaaaccgttaaaatttaccataaaaaatgacgtaccctaggtggacattgtacttgccaagtataagattttaactttttgatatatgggccaatgaaagatgagttggttgcctacttatctatccatgtggtgtgatatcccgagttaactgtatatttgccggactttttgaaatgccaccccaaagtatcctccttagttggcgcacccaccggaaagacacttattaactcgatatcttcttggtcaaagatcaccttaaggagatcaatattccaaaaaatcgaccggctatctataagcatgttaacttttaaagatgggtcaatagttaacccattactttttgctggtctcgagaattgagctggaatccagggatcttcccaaactgagatagatgtcccagatccgtctcttttaataagtccttattgaccatagatctagctgagcatatactccgccacccataggatggagagtaagaatttatattttgcaaaagattggacttccgataataccaccctttaaggaccctcccgaagagagagtatggaaccgtaatcaaccgtcacaactgttttgctagtaaagaacaattaaaatcgtctacattctgaaaacttaaccccccatccgatttactagtacacaacttatcccaagccatccaatacatacctctggattctccattagaactccaccagaaattggcgaccacacttgtaagtttagaagtgattgttttcggaagtctgaagcacgacataacgtaagttgttattgttgcagctaccgttttaatcatgacttctttcctacctttggataaaaattttgccgaccatccattaatttttgtctgtaatctgtctctaacaaaagagaaaatctttgtcttagagccaccaagactttccggcaaaccaagataagaggccataccaccaatgttagtgatacccaaggtagacttaatctcttccttgatatcatcaactaccttatgtccaaactggatcgaagatttggaataatttatttgttgtcctgataccgcttaatattgttttaagatccccaagattaccccacactgatctttgttagccttacaaaaaaataaactatcatccgcaaatagtagatgagatatcggtgggcttgttgttgctactttgatacccgtaattagtttttcccgttctgctttccaaatattcgcaattaacaccttcgtacagaggataaataaatttggagagagtggatctccttggcgcaattgtaacgccctgaccgcccgtaccagtgggccccacgtcctctctcggacccatgggccaacccctgtccgaggactggtccgctacgtccgagaggcattaaagacttgtttaccgactctacaaatcaccacatgatctttccttgtgttttgtcctcactcacacagcaccgataatcacttctccgaagatcacccatcctgaaattgctccagctcaagcacgcttaactgtggaattctctcaggatagttgaccgaaaagataagtgcactttggtgacataggtggccaaataaattcttttaaacctctcagcatgcaccaccatattcctgaaatcggggtgttacaattcacccccactaacagatcgcaacgtcctcattgttcaccaaggtcgtcacccccgacggtgtgagctttcttgactccacacacattcaggttcggctctgataccacttgtaacgccccgaccgcctctaccagtaggccccacgtcctctctcgggcccatggacccatccctatctgatggccggtccgctacatccgagaggctttaaagacttgtttaccgaccctacaaatcagcacatgatattttcctgtgttttgtcctcactcgcacagttccgacaatcacttcgcggaaggtcacccatcttgaaattgctccaggacagtggaccaaaaagataagtgcactttggtgacatagttggccaaatcaattcttttaaacctttctgcatgcaccaccatattcctgaaaccggggtgttacagcaatcccctctctggtactattaatcctctaggttgtccataaaagagaactctatattagactgttgtgatgcaccacattatccaactaatccatttttcacagaacccaactgtgcggatgtgcctagtctatattttttctcaaacattttttaattttattattcctctttctaaacacttttaatgccactatccttataggtatgattctaaaactaaaatcgaaacacaatttcaaattgaataaacttttttttacatttaataaacttaccaaaacttacatttgagatttttcaaatatttaagtttatgtataaaatttcgtaaaacttactatttctacttattactctaaaaccattaaccaaacacattttactgtattgaataaacctaccataattattgtatttggaattacatatattccttaggtattaaatctccaaatagtaaattatacttacaaagtgatataaatcaaatttattatcttagaactacaatgttttgatattttaatttttaattatttaaaaatattttaaatggaatcccacaaaacattaaaataatttctttagattttatggtgcatattcaaactatttgcttaaaataatgaaggagttatttattttaaaagaataaaatagcctgttcttctagactctatatatatatatatgtaaggtttttacaaaataaaatatgtaagaagtaaaataaaatagcctgttcttctagactcttattttttgaagttttttttgtagactcctctcctcctaattgggcaaccaatcaaggagttattaattaagtaatgtgtggttgacaaaaaaaaaaaaaacttaccaaagttaaatatatcaaatttctaaataagaaagtatctatattttatgtatattaaatgcattgagttcttctactggaaaagtaaacaatacgagtgtattgtttatgcatttcaacatcactagattattatatatattataaaattttatattaaaaccaaaaatctatatgccccaacttaaaatgacgtaaatgcaactttatattataatataaatcaataaaatatttgaaaattagtttgttaatctaaaaggttgtgttattgtatggtatgtagtagtattttaatttaaaatattttagcatatattcaaaatttggttttaacatcttgagagataaaaactttgaattttttttatgaatcgttctatcaaaaaatggaatcgttctactttttcataacaaaaaccaacttttatttttagattttgcaacaaaaatacatttgtctttgaaaaataatttaacatatatatacttatgtgcctattattaattatatatgtaacttatacatacgtataattataaagaattatatgtactatatatatatatttgtgtgtgtatatatctttatatgatttttaataaaaattatgaagtcatagttccatagtcaaaccaattcgacttaaagacttggaagattatgtgcttcgattttcgaattgtgtttaaaacatactataaaactaaacacaaacacaatatatttttaaatgtaataattttttaataaaataataaatagatgttttatgttaaataatattattcataaaattaaatacataaaatttaactcaacctttaagtaatttttcaacatagtaaaatttttaataatcttagaaaatttattttataatataaatataactattcataaattaaagaacataaaattcgccgttccatggcacgggttcttacctagtgttcttgtatagtttcttacattaatgataaagtaattttgctatattttctgattaaattggttcaccctttgtagtgggcacactttcctcatattcacttcggcctcat

SEQ ID NO: 5414 - DNA, 11599 bp, Arabidopsis lyrata
  Intron number 1 from transcript 488271 (locus 488271) deri ved from phytozome v7.0 (chr-ID scaffold_6; pos 5778993 to 5790591 reverse strand)
cacaaagagaagagagcttagtctgatacaatattgtacaagaataatttttatgacatgcttaaacagacttggggttgagtttttaattctgattaatcagtataaaaagatatttcgtcggtacaaaaatacagattctccaaaataaatcgtttttttttttttatgttcaaacggttcagagtatatgatcgtcctctgttcccgccaaaaacagagaaataaattacttaaccaaccactaacacatatctctcccactatctccatctctccctttttcttataaaatccgaaatttatcaaccagaatttactctattgttgctgatcattctgaggcgcagaaaatcaatacagagactttaaatatgtttctttggcttgttattgtcttaacgatttcagtttctgtctcttcccatgaacacaaacttaattgggtagttcctcctgcaaattcttctgagagtttcaatgattgggcttccaataaacggttccaagtcggagacatcattcgtaagtatacttacccaactcaactcaaaaatttccaactttttaacatcaagtttgatttatttgtttttcttacgtttgttctgtttcttttggtggggtttgaaagaattcaagtacaggaaagactcagtgatgcaagtgacgaaggggagttacaagcaatgcaattcttcgcacccgagattctactcgaatacgggcaagaccagattcatgtttgatcactctgtgccttactacttcataagtgggacctctggccactgcgagaaaggtcagaagatgatcgtcgaggtcatatctctcgaccagaccactacctcctctgctcctccggctgccttggctgttttgttatgcttattcagcctctctttatcttttgtagcttagtatcacgcggtgcctaatatgggtttggtttgcttatagtttgattgtattcatcatgacttatgtgttcatttgttcaaatgggcttattttaagctccgacggcccatgtccaattcaatgggcttgtttcgtccgttttattctgtcttcccagttcgacatatacatgtagctttggagatggtttttaaaatttacaagttttcttcttaacaggtaaatgtttctataagatattataagtaagttatcctgtacgcttacacgtaatagtttagttatatccctcacttaaagttgtgtagttaatacaattaaaaatataattatgaaaagtatagaagttaattgaatgattgcaaaaatccaaacacttgacgcaagcaacatgcgcgtcgtcattgtcttttatcccaacaactaccatcaccatgatctaaaactgtttaaaaaaatgttttaaccatcatttattttggtccgatcaaatcaaatcttcttaaagaaaaataaacaagacttattcgatattttagtagaagtgattacttcattgattcttttacaacaaagtaataataataatcaaatgcatgatgcttcgaatgaaagtaggtataattgttatttatttatttttttgttatttttttttttgtaaaagtaggtaagtaccatttcttttgtaactcattttcgcgagtttcattttttttctttcttataaagggtttgttaatatcaaaagtttagtttattctatgttttttccaatccatgaaaggccgcattgacctaattcacctaactataaagaacacattgataatatatatatatagtgagcctataatagaaattaatacaaaacttattgtgtcgcacatgtgggttatatgactggatttgctattcacccgtttttttaatttttttttttttgaataaccgtgggtttcccaaaggcttcttgggcccaaaaactaatcccacaaagctgacaattcccctatgtaaacctgccagtagccgtgcctcgaaccctggtggcggaagtcacagctgtgaccccttttaccactaggccacaaggcctgttttttaaatttaaaagtgttactattttatatctcgatatatagttttcgtgtgaaacttcaaatttgacaatgaaacattatttgaacagcaacgatgatggtgatcctgactttgaccgattaaactagaattgacattataattttcaaaaaaaatgatatagattattcaactgagtaaaatgttgtcgtcatatacttattcctcgtaaattagtcattactgatatatgcatacatattgtatgagcaaattataatacaacatcgcacgccttgcataatccacatcttacatacaagagactaagcaactattaattacttgcgataattatatagatatgttacaatgtttttttttaaagatatattacaatgttataatacatttttcataaaaagaaaagactatcatcaagattggcgaagaggtcccatggtacaaaaggatccgtcatatccaagtcccattgctctaaagagatcgaatcttctgcaagatatgatgaagattcacttcttgaaatattactatataacgaagagaaaggcgaagaggatatctcgttgccttgcgtttcaaatagagattccaagtctacttcttctgcacatagagttttgcagtttttcggcagaagttcctcatcgttatcagataatattaatgtttctattgtttctgtgataacatcatcttttggagtttgatccttgatctctgctccttcattgatggtagaacacatatttggttttgtatcctggttaggatcggtttgatgagtaatatcattcatccgtttgtgtgtagccggatccaacccaagatgtttcatcttcttcttgatcttcgtattccagtggttttttatctcgttatccgttctaccagagaaatgtgaggcaattttagaccacctacgacgtcaaaagcatccataaatgataaaacatgcaaaaagcgtttagcatatatcgtgattatatcaatagacaccttttgaaggatatagtctacgacatgaaagatatatatacaaaaaatttatatcgtatgtagaaatctccacatatatttttttcatagccgattcactcagaaataacccacttcaatgcacaagtactttatacgtcaaaacatttttttctttggttttaacccacttccatgcataagtacatatatacgtcgtcgtcgtcaaactcagtttttcttttcttgaagcattatcatacatatttatgttttgctgtaaatattgtttgtaacccctataaaataaacaattcaattctttttataccattctcacaattcttagaaagatatataaatgagttaaaggaagctgtttataagaaagataaaaattgaaggagactgactaaaacatatcggattaaataaaagcacgatgttacattcgagagagatttcatttgcaaaatctagtttgacgccggcaaattaaaaaatatgttaaaaatacatatatatatatatatatatatataatcgtaccggttgccaagttgagagtgaagttctataatccgatcttcttcagcatcagtaaaaccacctctcttgagatcgggtctcaaataattgatccatctcaatctacagctcttcccacatctcaacaaaccttcatgtacacgtaaacgttaaactccccaagaaaaaagggaaaaaagaaaaacaaaaaaccaagaaaataaaacctaattatgcatgcatgtatatatgtatgtgtatgatgaataatgaaatacctgcgagtttggggacaattctccagcagtggatgccattgttaagaatgaaattcatgagtctatgatcttcttctatagtccatggacctctcttcaatccaattttgtcacagcacggttttctccccattgaaaatttttaaaagcaagctaatgacatttaccaaatatattctacatatagccaatgcttttttttggggcaaacatatagccaatgctaaattaaagcaaaccaagagaacttgagctagacaaaaatataaagaagagagcgttggatcaagtaatgggcactgcttataaataataagtggtgagttgggaagggcaaagattctctcttttgacaggtcacttacaggctaaaagacaaataaatccaaatttaaagcaaaacactaataagtgaagcagtaaataatgattgcagagacaattaaagaaagatttggtgagaagtgtgtgaggttgtattagaatactccatccgtttcgttttagttgtcgtttaaggttttttcacacaaattaagtaaaacatttaattttttgttttaccctttattaatatattttataaaaaatttcattggccaaaacattaaaacaatagggataaaactgaaatttccaccaaacatttgcattgaaaacctaaaacgataactattatgaaacaaaatttaaatcctaaaacgacaactaaactgaaacggagaaaataattaatatgaacttgtcgacaaactttcttttgagctaatgattcattaattaattatcaaagtttgcactaaagccatacttaaatttaataggtatagataaattaaatgcgatcaactatatatgctaataagcatataaacagtatataattatattttgttgtttctataaagagctaattaattattttatgtggtgacaaatgcataatttattagtggttgagatatatagcctactaatttgtattagtgtcgtcatcatactatattatctagatttattagtctatatgtaatttatagacgagaaaatataataatatagttagtattctaactaaattttataactgacatggtgattagtgattaccgacaaattagacacattgaattcatttagtaatcagtttttttttttttttttgaaactgaagtaatcttaaaattgctatttttaaaaaagggtaatcagaaaattgctattttcagttactttcctacaaaatatgcactcaaaacatgcatatttaatgttttaaacactcatttaaaaacaagttaccctataaataccagtgttcaagaaagcgctaggcgctaagcgggcggtgacccagtgcctagcgcctagaacgcctaatcagggcctagacgattttttaggcggtttagacgtttataacataaaacattatcaatataatattatatataaaagttatataaaatatctatataaaactaaaaattatgaaattatatataaaaattagataaaatatttatttatatttatattaaacaatatatgaatatttataactatatatataaataaaactctaattgaaattgaaaaaatatattaaacaagatctatataattttaggcggtcaaggcggttatctaggcgtcgcatgagagcctagcgcctagtcggggcctaggcgaccgcctagaccgctttttagaacactgataaatacataaagatctaaattttcgattttgacgatgtatcaaccgagaagtagagtcagttatctttacattaaacaaaaaaaaaaaaaaaaaaagtagagtccatggcaaatttaattggtcattaattttttgtgtatctaagataaaaatcaaataatttctttcaatattctaatattagtttctcattagagataacactttaaataattaaaacatccggttttacagattcaaaagaatcatataaattttaacttgaactttcttgagtaaaaaagacactaatattattataataaagtttccataactacgagcatatttgtttgttttattgtaaattttactctctccgtttcaaaatataagacattccaatataaaataataataaaagttttactagtaactaagtattaattgtatgtttttattaaataggtttagtataacatgttttttgtttttattaaatactttaaaaagaaaaaagatatttaagcttatatatgattagcaatatgatatatgtgattactttaattggtaattgaaggaatttctttgattgattaaaagtttggttaaaagaaaacgatttgagatttgtttggattcatcggtcccctcttaaaagccttgtgcttattcgccatcaaggcatcttcttccttttcaatattctatttgtaaatattttgtacttgttaaaaacattttgagaagtcgactttttacgtcataatttgttagtttgcactgcaccgtcatgattaagcaacttgcttaataaagaaagtcaaaatttgaattcatgtttatcaaaaaaaaaaaaattgaattcatctagtcagactataatttttaagtcttttaaattaaagatatgaacctcatcttgaatgccaaaacaagagaactagcatactattttcttcaatggtacactattcacgacgattagtatttataagatttaactttctttgaaatatccaaaacattatattcacgaattattgtcgtgagtcgtgacaatacttaaaacaataacttatcaaagttataaattttacatacatcttaattatcagacgaatcccttctctataagaaatataatttttttggtaattaagggaaactataaaatataagcaagtcgttgatatgtcattggaaaactataagttggaacaatttttttccaataatttttattacagtatacggattgtgtgttagatagcaagaatatccattttatatggatttcaggtttagtcatattgaaataagttgatcagaagaaatgaagggtaagaggaacaatttgcattaaaatacggaggggttttcgcatttatgcatgaaggcatattctcctttttttttttttttttttcatccgaaggcatattctccatgtacttgaaggtagatgcatcttatatccaaagatggatcaaatattagaaatctatctaattgtagatcagaactgaattactttaggccataggtcctagtctattataatgttcagttaccaaccttaatttaggaatctgatatatagtaaagcaaattatatatccaaattgtattagtttttacccgtgttcaaaaaatcgctaggcgctagtcgggcggtgaggttgcgcctagcgcctagcaaaaaaatcggggattacacggggattaatcggagattagttttagggctatttaatattttaaaaacatattaatccattataattaagaaatttatataatattgtttttaaaattgtattaaacacatgaaaacaagattttaatttcaaatttatgatttttatacaaattacgaacataagtaggacgttttgaattttagatgtaaaaaaaaagtaaaaaaaaaaaaaaaaaaaaaaattgggctaggcgccgtctaggcgggctaggcggccgcctaggcggtctaggcggccaaaaaatcggatctccgatttttctcaccgatttggacaaaatcgccgcggtgctcctccgatcagcgcctaggtggctaggcggccgatttttagaacaagggtttttactatattgaatatttaatccttcatgcctcatgataatgttatgtgaacgttcagtttgtaatagacaactaggtaaccgatcgagcgagttattagacgttaaacgaaattacagatttgatttataatcgacgtacgtatataaatgtttccattccgtacagcgtacatgcattatcgtttgtattatatatgtgtaatgtgtttctatacggcctttatagtcaacaaattaactagtctttcaatatatttaacttttgtgtggtacatcaagaaaattaaattgcagctaaccaaatatttgattttgttttggttcactgaactgaacgaaattttagaaaaatgtaatatatatagagaatattgtatttgtatatggaatgagagggacctccacaaaaacaataatacatgagagaccgttggataaaagagagtatatgagggactatatgtgtaatacaatattaatacaagcgaccaaataaatttaggcccacttaaaagcatagaatgttttagcctattaggtccaacttaaacttgtttaatcactaattgggcctaaagattgaactatacaaatggatcacgttacgttacgttacgtaaaatagtcgtttctttctatctctaatatgtgggttttataattttacactcgttaactaattcttcttgcaaacatatctaccgttttatcaaattatttgtactacctcaaaagccaaaaccctgatcggtcacgcataatgtacatacgacattttctttgatctccggtaacagacccggattgtgctggtcctgctggaagttatccttaatcaaaccaagtcaatttggtttagtcaagaaacgtccctcggatgtgaagaagtaacagctgttccagaacggcaaaacatacacgaaattttaaatgggtgtccactaacaaattcagacatatcaccatgttcactctgtcctttttttttccatttttaaaaaatattctaagtgagcaacatgtaaatgataacgactttaggccctctcaacatcaggactcattctcaagggttgacttttaaacccaataaacatttttaatttataggattcatctctctctataaattcgaccccctttgttgatagatcatacagagaacaacaaagaaataaaccaaagaagaagaaggaggtgaagaagaagaatattcaaatggcaccaagaagttctttgatccgcttcgccttcgtctgcattgtcttggctgtgatggtcatgactgcagaatcgcataacggaacccaccatggtccggctatggctccaatgccacccaaggctcatgctccgtctccaagtgctgccactttctccgcctaccctcagctcgtcgccaccgcattattcggtgctttgtctttcgtcttctgagatgtgtttccattcatcttcagatgtttgtgtctctctgagttttttatttttatttttctcatgtcttccttgtttctttctgtttcttcaaagattgtgatgttctgttcctatcataataatgtcgtctattggtgttttaatcgtttttaatttttcctctttttcgaaccaaatcttctaatcaaggcattataatgtaatggcccgtttgatcaaagttggactttctttttaaaatcaattaatccatagccttttactcactttatagatatatagaacagataaaaatatccaaagtaattaaaaataaaaataaaacgagtctgcctaaacaaattaaacaatgaaatgcaggccttacgtgacactgtcatgggcatgcctcaacaatatatatttagggtgcatttgccatttagacgttggtttcaaaagcaatgagtttatatccttactcatatccagagccggctctttgcacaagtcaatgaagcatgtgcctctggccccataatataaatgtcttaatcggccccaaatttataaaatgtctcgttagtctagtggtttaagtgttaaaagatactatctggtatcttgagtccgatccctcataaagacagtttttacattttttgatttttttgctttgttcacataataattcagcccaaacattaattgggcttgtagcccctatatttactgcgccggctctgctcatatctatacgactatactaaacaacgacaagctttaaactagtttcatgggtctcaaagcatcataaaacaataaatatcaacgaaacactcgaatattgtagtaaacttgcaaccatgaatgcaagttacaactccaatgaatcagatatatgtaagatgaaaaaagtacaaataccttaaaatacatttaaacaacatgacaataacgaagtcaacgaccatctcaatattttgaccatctctctctcttttttttttttttttttgttgttgttgttgttagtaattataaaaaaaaagtgttgaccatctcaagatatagttaacaagactcattctcatccgttgagtttgcatctatccacttaccatatttttatacaatctttttctaccatgactctatcctcaatagcaagttagcaacgtgcccacatggaccactcaagggccaaggatcaagcctttcgtctttctgatcaaatgtgtgtccgtcactgatcaccattcatcttagttcttaagaaacatatctataaatcaattcttttttgttcatcactttttttttgttcaacagctataaattcaactcaaaagagctatctttgagaaaagttatttacatgacgcggtttggtacggtacaaactattcatcactcgttttctcattttagttttacgtagatataaaaactaaaaaatgacggtgatattctttatatgacgtagatataaaaaaaaaaaagtatataatattttgaaaaagaatgagtaataaataaatagtgtgactcctgggccttaggatacaataacgaggctggctcaacaaagaataaagcccaataagtaattgcgttttggattcgacgtttgccttatccgttgagctctctcttcttcctctgaatccgaaattcctaggaagagaagagaacaatggcgcagatggttgcgatgcccgtagcgcactcgctctcactcatttgcaattggacaaaacccagtcctctctctcgcaacactcttgctctcccagcttcaaacactcccaatgtaatgatttctcaagaactctatgttgtaatcgattttatcgagtttgatttcatggcgttttgatatgtgctacgtcaatttttggggttagggattagaagaaatcatgtgtgggtgtcacagtttgagccctagtcagactccatcaattttgagggtatttgtatctggtttttaaagttttgttttttttttttttggtattgaaatgcagaagcagagtctaagtatcagatgtgctcgtgttggtggtgtggagattccggctaataagaggattgagtactctcttcagtacattcatgggattggtcgaactagggctcgtcagattcttgttgatcttcagatggagaacaagatcactaaagacatggctgaggaagaactcatcattcttcgtgatgaagtctccaagtatatgattgagggtgatctggtatacaccctatcccttacattttactcgctttaggacacgagtaatgtgcatagttgcagtttctgtcagtctattctcgagcagtttattgcagaatgggtatttgtatcacttcttgatgattggagaacaacttacgctgctatctttttgctgttttaattgctttagtttgggtttcatgttgttttgatttgtgttcttaggtcttagttgaatgaatttgtgatttgtgttgtggatgtttgtgcagaggaggtttaatgctcttgcgatcaagaggttgaaggagatcca

SEQ ID NO: 5415 - DNA, 365 bp, Arabidopsis lyrata
  Intron number 1 from transcript 490270 (locus 490270) deri ved from phytozome v7.0 (chr-ID scaffold_6; pos 23403370 t o 23403734)
acaatcttaaaaccattctttcaaccgtgatcaaggtagacttctgggttcttactcagtttcttcgatttttttttcgttctatcgtgtgattgagtttgaatttgattctgtttatttttgatcggagacaaatttctgagtttcatcgttagatcacatcttaattctcgattagggttcgtagttttcgctaatctgtgtgttttacgcgttaattctttgaattttatccgatttgttataagaaattgagttttatctgtgagatctatccagatctggttttagtttcttgattggatctgattcttgtttgtgcgatcgaatttgtcgattaatcttagttaattctgaaattacag

SEQ ID NO: 5416 - DNA, 14525 bp, Arabidopsis lyrata
  Intron number 8 from transcript 480895 (locus 480895) deri ved from phytozome v7.0 (chr-ID scaffold_3; pos 23943500 t o 23958024 reverse strand)
gttaatttttcaaatagaaatattgggaacataaattaaggatctagcatccatgatttttagcagtttttgtattctgttaatgatgaatttggatggagaaattgcatccaaactcttttacaaatcaaaacattttgttaaaattattttctacatatcacatgtcattttctttttttagaattactaaatcatgattttgtgacaaaaaaatcacgatttaactatacaaaaaaaggatttcagaaatattatttggtgccaaaattcttgaatgatttttttttttttgtttatctcaaaactacaaaatatatagtaaaatgtttgtgttagcattgtgaatttgtgatttgatggaaaatttgatgatcttgatctcatatattgtgaaagtacaatttctttaaaaagaatataattgatcataggaaaattattgacagacaagttttgcgtcattttgagatagatctgaaattcatctattttacaagctaaaaacagcttaatatctatacatccatatgcaaaaactaacttcatcaacgaacaacaagaataattagcaatctaaaacaaaaatgaacaagtatatatatgcatgttgacaatatatctcaaacttttgtaaatctcatacattcatatttataacattcactataattgtagcgtgtaagaaataatataaggtaggataaaagtttgttggccaataatttccaataaaatcatttttaagtcgttaaaaccaattattctttagtggtatactagttttgtattatactattataaataatctcttatttcttgtatgtaacttttaagatttttttggttaatctttgggacttaaacagcctgtgaaaatagaaattttttctattttgtcatttcatcattaatcattctttattaggtttttaacataaacataaaagttgaaaaatggtagacatgatcaataaatctacgacaaaatgtatatctatcattttctccttccgagaacttccacaaattccatcccgtgtaaggttcttctatccatgcatatatcataaaatagaacaattcgtaagttaagttgtatatttgtaaaaacaattaaaaaataataaataaatatttatagaaaggggtagagaaattaattaattaattaataagccgtttgttgagtgttgtttgggttctagtcaggttttttccagactatgctcttctatccgctcctggtcgactcatctcaacctttgaattcttttgggttcgtctccttgctaagaagaagtttcgcttgtttgttttggatcgatagaactttatgtgtgcagatgcttcttctccctgatgttgttcgctgtgtttgacaaccgtctcgatccatcatcgttctcgttcttgtgattggtgatatttgacaggttgggcctcactccttgtccttgctttcctgaatctgttttgataggattgccttttgaagatttctagttagacattgttggacatggcagtcgtcgtagtcgtattcgaaagcgtgctcgaggttctctcagctcataggttttgcttgccgggctatgaagtctttggttcttggtttcgagagatcagctctcattatgataggagaaggtagatgttattttaggattggccgcgggcatcctatgtaaatctcaatcgcaggtgcttcagaagaagtggtttccttgtattcttttgtctattgtttctcttaaggttttagccttgtgcttctgtcttagtttatggtttcgttctcttgcgttgtcggtttgatatatttgttttgtatttccagtattataagttcctcttctatagagcctagtttccggggacatttatgtcgtccgccggcttatgtttccctcttttgggctttagtttccagggatattcagtttttccgccggcttatgtaatctcaaaatgtatccttctatgtttttatatataaaatcagatgacaaaaaaaaaagggtagagaaattaaaaatagtaccgtgatgaactatggggagggtttgggccaccgcatttgattttgcaacttctaaagcaactacctttgtttattttacaagactttgaacacttgctataacattgaatataagcttttccactcaattttgcttctactgcgaccacaacaatcaccaacatcattatcactaatattgcactccattttgccatcttcgatcgtcttagaatcctacgaaagcaaactttttttttttgttatgactcaattatattattatttttatttaaatcttatgactcaattatattatgtttcaagaaatcaacctctatttataatacattttgcttaactttagagtagattctttacgttgtgtttgctttggttttaattggtttaattaatctattaatttccttcaaatttatgttcaaaattttatatgtttttgcagtattaaattttataaatatgaatagatgtatattaagtgaatgtggatccgtccgttggagagtaaatctcatgccaataagaaagagacaccaaactttagaggacattaattgatagatttcctatgatgggtttcattcattggttgatgacattaatagattttacaagaatatattaatcttcatttaataaaaataatgtgaaatgaaaacactttgtctaacccttttcacttttcttttccttttcatttataaagatagatctgatagtaattaattacatttatcacttcattgattctatttaatcatttttatgtttttaattatataaaacatttcttttttttggtaagaatataaaacatttcaatacaatgtaatagtattcaaattagaaaagaaatggtttaacttattttataataacagattttatttattggtaaaacatattaatagacttaagtgagaactttactcacttaatcataaatatttatgaggaaagttttgttcaatatttgttttctccacttctctttcaagtataagatttgatagtataatttattgcatttttcatttttattttgataatctaattattttgacacttttacaattgtttaatttaattatttgtaaaattactaaattttgtgatgtgatctctatttgctgcaaagacaattggtcaagtcactacaaaaaatgatattttgccaattgcaagcaacatatatatcatgaggtttggtaagaccattcaacactactcttcgttctcccgataaacttatgggtttgttagagatttagtacgtttatgaaacataataggcaaagtagcacaggcactattcataattcgatttgtcccacatggtgtcactgttgtgtttattgggagacccattttgccattgaagaccactgatatttacagtttcatgccactgaaaagtgtaaatgtagttttattcgggacttttcatattctcagaaaaccgacttcttcacgaaggctaacagttcaactctctcccaaaaaatcgcaattcttttcggattcaactctctctgaaaaaaattaatcttcaatgacgaagaagaaagcagttaaatcgaagattcaaagccctgcagtgagtatagaacaagaaaccagtcggcgaagcaagatttctgattctaaaaaaggtaatccttcaaagtcgtaatcaagagacgaaaatgtactagttcccgtctaatctgagtaaaattgagactttcctataaagattctgttactttggcaggtactgtatcggggtcccgtctatctccggcgaaatctccggccaaatcgccgacgaccgatatgaatcaagaacccacgcggcgaggaatcaaaaaggagaataaacgaggcaacagaaacgaccctaaagaaggtgaccgaaatcttaatcatttctgattttgttgattttgtcaatgtcgccccaaattgtttgaaatttgagggtttctgaaatgaataataggagatgcaagaggattagcacattctccggcaaaaacaacagccggagaggatgaggttccaacccctagcctaccttgccgtctgttgccggaatatctggggattctggtggaactactggagggttcagagagttgggacttgctacttgcttcccagttcaaaagattgtttgaacttcctgttgcaaggtgttctcattctgccaagttgattcatggtatgctttctagacaacttttgactcaatcaaagcatgagttgtggactgtatatggtgggtttccactccgcttctctctccgggaattccaaatcaccactggcctgatttgtgataagattccatcggcgtctgaggtagaagatcaccaagaccatgcatttctgtctgtttggaatcggctctttggggagaagaggatagttacagtggcggaagttattgacatgctaaggggagattttaatgcatgtcttaatgcagatcgtcataagcggttctcaacttggaagaagttgagtctcgcattaatagtgcttattgatggtgttgttgtttgtagcaacaaaaaaccacatcgggtgactagcacttttgttgagatgcttcatgatatagaattcttcatgagttacccctggggtagagttgcttttgaagcaacaatggaaaggtttggccctcttgcaaatgagaaagatcctgttgcagagctgaagacccgcctatcacaaaaaagcagttgctgttacggatttcctctagctctccaactacaagttctcaactcaattcctgccctttgcagtaggattaaagtccctgctgatttcagaaattttatccaaaggcgtgcccaggatcttggccgcaccattcttctccgtgagtcagatgttgttgacgctgaatacactgctaatgtaagtaatacagtatactataataactcataataaaatctgtttacctttgagatttatgtgggatgataaagccatttgaagcctaatcaattcagttatgtcaatttttgaattttgcagttgtcagttgaatacaccctataccaggcaacacctgtgaaggatgatctctcttggccaaatgaagatgaagacccaggggtgcagttgattatctctctgatcaagcaaaagcaccaattcaagcctgagacatggcctgtacacggctttaccagctctcccactgtggcacctggggaaaaagaagttgaaccaagggaagctccatcagcaaaaggtgaagagtttggtggagatcctattaatactgaaggtaaacagtttgttggcctggaatctgatgggccagaggacgatgagacatgtgaaccaaggacagctgcgaagaaggcgaaaaaagagaactaccctctccgtcggaagccattcacacggtcagccaggcttgcagaagatcttgttgatccccagcctcctcgcaagaaagctacttcacataaaagtaaggatcaaccccaaacctcggctgcagcaatacctataggacagtatggccctaagaagacaggcaaaaaagtccatactcatggtgatgcagcgcagcctggtgcaggaagctcctcttctcagtttgttacgcatgctgaattgtctgacttgaagtcttggatctctcaacagcttgaagagctccgttccaacataggtgaagatcttttgaagaatttagggaatcagagtcaactgcctaaaccaaggcagcctcatacagagacatcaaaaagtaagaggacgaagaagaaggaggagcctgcatccaggaaaagaaaaagagaagaggttacttctttatcttctggaagctcatcctctggttctaagcaaggtttatctggagaaattctcattggtaaagaaggtggaccaagtatgaattttgagtcctctgaaagaacatgggatctttatggggctgcaaaaactattgctaaggtattagtttaatacaaacagattcctctaatgttaatcagtgctgaccctcatatgtttgattttggaaattacaggaaataagatcagacatcccggactctactatttcagaccccactgcaggagagcctgagaaagaacccgttgaggaggaaatatctggaagagagcctcagcaaacaccttctacaccggtaacaccaattgctgaggtaaagttttatgcaaacaagaattgaacctatcctcattcaatttccaattccagagttttatatgcctaactgagacgcatggttttgcatttggaaacacatttgtaaagcatggaatccctgagacgcatgaagcttcacctaaaacagattgcggtgcaaatgagactcagaaggaaaccagtggcaaggaagtttttgaaggttcgcctaagcaaactccttctacaccggtaacaccatttgctcaggtaatgaattagcaaacctgaattatcacttggtcatcaactttcccattacagaattatctatatacacatggttttacattttgtaattcatgctttatcccaggttatccctgacacgcctgaagcttctgccaaagatgactgtaaataccgcaatctctcttccattattgcagcatcaccagcttattttgttatagagtcaaccaaccctcgtcagccgcttttgggaaagcgtgttcctaggcgttcttgcttcctcgacagtgctgagtatagcgtagatcccagaattagtgctttgtttaagagccgaaccaaggaacctgcaacatggctgtacggaatgctatctgtacagcaaacaatattgttttctaaataggtagtgttggatttcctttatatttgtatagtttatttatgagggtttcggttagagttaggttaaagtgataagcggaccccttatttagttatctataaataagacaagacatttaggttaaagacatttccttttctctattactcacgcttagcacacatcaaactcttgcttcactgaactcaaaattatgtgtttgagtgatttaccggatgatatattccatatcattacgaagaagcttggagatgaagacgccagacacctaggcccgctactgctcacaaacaaacgaggaagggacaatgcgttatcaaaggagatcctacagtcagcaaacataactcctctaaccctggaccccgtcgacatatatccaggtggggttactagaaccttctttacccgttgtttggacgttgagaatcctaaggcaatttattatgaatctttgcgtctaataacccgagagggtgatatctacgggtcccttgctttgctaaaccaacttgtgcctacttgtgagcatgccactctcacgtatgcaatgtttcaaatgtgtgctgggaggggtgatattgctggggcaacattcgaccaaatttttgaaaatttgggtacgcgtctttggttcgataattactctcccgatttggaagatgagtgtaaagctttgattgacacactattatcatttgaccctcctggtgaagatacctttgggccaatttgggagtttgcttattctaagaagataagcatgcctgattgtgcttattggcatgggtacgattattattgcgaaggatgttacatctacaatgcagcattacgtatatgtgaacttctctagagtttcatgtaatcaagaaaccttttaatgttaaaaactaatatttaaaattctgtgattgtataattatttaacattttgtaacgaatgttgtattaatctcttatgtcagtttaattaaatcatacataattatacaatgagagacataataatttaattatacataattatacaatgagagacataataatgttgtatcacaaacccaccaattagtctttcataaatgactacttctattgatataaataaatagatttttgtctttcttcctctgacacaacaataatgaataagtctgcatggccaaggtgttgcttttaagaaagtaaaattgcaaaaaaggagaggcaaggttcgatgacataaagaataaaacgagtaagattcgtaaatctcgtaaggggagttgtttggcatcaaatcaacaatataatcttccaaccatatttttgttatctaatgtttataaaataatttaattaaacattccttccaaattttaattaatttgccaatgagacttaagaaattaatacaatgagacataataatttaattatacataattatacaatgagagacataagaaattaatacaatgagagagtaatgagagacataagaatgtgaccttcgtaaagttagaaaacaaacagacaaaatcaaatatatctttgtgttttcttacaaatgtaattattactgtcagggagtgaaagactaaaatcttttaataattttttaagtacaagtctaatcgtttatcagtgtagaaatactcaagtggctgaaaagtcataagtatcaatcatatcatccaataaataactttttactttcccaatttgttcatttcaacacaagaatctataacaaaaccaaaaagattttataataataaaaggagcattgagataatatccacaacagtggttataaaagatgatagtttgagataatatccacaacattgagataatatcgacaacatttagataacaaaagcaaaaacgatgataatttgaacacaacagtggttagaaaagacaacaggattttttttgaaacaatatctttaatattatacatcacaataccctaaaacgacttaatacaatatttctagcatatagtaattagctaaaataaaaagcgctataattatacaaagcaaataatacagaaacaagaaaattacatcggcaaaacctaacataatttaaacatcttacaacttaaaaattatcgaggatgatttcatagcatttgacataccttctttgacatccaccatagataacactcttcgcacaagttttcataacctccatatgcaatgcgacagtccatggcacaatccgccgatgggatgcccctgcaaataggatagagatacgtcctccagtatgaattgttgctccttcttcgatatggacgcaaatcactaaccaactcctctccccaccatctgacagcctctgtccccaaagcagaatgaaattccccaaatagctcaagatagtgtacagccataccctcatttccatcacaaatggagaacacaccacatgctagagttgccaccccatcctccgggaccaactgagctagaagttcaataccagccttgagacatctctcaaaaaagggcggtgccgaccttgctctagacggccggttatctgactatggaatgtgtagaggtcgcttgggtcagaacatagggagtaaatgcatgcatccctcaaaacatcgtctctgtacaccacatctcttccccttcgaccggccttcaatatagggccaagcaaccaccagcgatcatcagccacaagcttaacgatttttgcaaacaactcatcagggatatctggcatttgggttcccatttttttcctttttgtgagaaaaaaaaattaagagtagttttcttcttttgggatttttattttgattgcagctttgttgtatatataatgcattaggtgtagtagttaaggaaattacagttgagatgaatttaatcctcctatcaaacatatttataacttgttgaattttttaaaattcaacaagttaagtaaattatttacctcccataactgtacggatctgtctatgtaaattgtaatatatcattcacgaaaataaatgaaaaaatatgaattagtggcgaattaattatatatagtaagaagcatgatgactagctagtcacaactcacaaccatatggctttagagtcctttaacatctgcttgagggaaatctgaccagcaaacgtatttaaaaccgtacaccaaacgtaaaccaatatctgtacatcattcctgcaggtacgtctgtacagcaaacatacaacaatatatgtacagtagacgtacgtttgaaatctgaaaatctgtacagtaccaactctagtaatgactgtacagcaaattatctgtacagcactccaacaactacggctgtacagcaaacgtacagaaatatctttcaagtagacgtacactgaagacagcttgatcgttgaactgtacagagaagtgtgtatgtttgctgtacagacggagctgaactattacatctgtacaacaggcttaacgatccgtacagcaatagcttgtgatttaaaaagatcaacttcttagccaaaatattaagttcaacaaataaaacttggccatacatagacatcactaattcttcccacttcaaaacaagttttaataatatttacatacctaaaaggagacatttatctgaaatttgtctcccaacatatttcatatgaatgtctacccattccgaaaacaatacattttaacataccaaaaaacgacccctgccaaaatcctcctccattgataagacaaactcccaaaaaggcattacacatctttcttacattccatagcgtcaaccaagtgggttggtacacgtaacccgattgtgacctacacctccacatcttccacacttgttaggctgttttgacttattattcccttacattggttaagatgaattgttacacttgagttatcaccgaacctgtggaataaattcaaatttactaacctcatattccccaactgaatgtatccgcagctttgggggtctccccgggggtcttttttttttcggaggcattaaacatagaactcttatttcctcaggaacatccacctccgatggatcgcgtactgggaggatagattcttggaccgttggtgaccacatttccagcctatgcatctctccaaccaacgttctgaattccaaagccctatcatgagctgcagccatcgcatgaacacatggaattctaattttttgaaactccaagcaagagcaagtctgttgttccaaggagacgaggaactgttccccatcctttgcgactacttcaaaatcccacctaccaacagccaaaactgtcatccccaaaccacctttgaaacgtttcagcagctccctttcaacagcaattggaatgtctccgacagttctagcgattttcttccgacgcgattcaaaccacctcccgagcattttccttataaattcaagcaatgctacaacaggactacccctagctggtagtaaagcattgttcaatgactcagcaatgttactagacatcaaattatacctctcccctgaaaaatgaaccctactccaattcgaaaccccaattgcttccaaatattcccaacaccccttattccttctcttgattctttcacaaacaagattaaactctttgagacgaaacttgttacctgcttgccatactagggctggaagcccactcttctttccatactttcctttaacattccttcttatgtggactaagcaagctccatgatgtgcttcagggtagacaagtccgacagatttgattattgatgaattccgatctgagataaaggtcaagtctggtccatctttaattatttctgaaagcttactcatgaaccaagtccatgattcatctgtctcgttgtccactatagcaaaggccactggataaatctgaaagttcgcatcctggcaacttgttgtaagaagacagccaagatatttcccaaacaggtgggtgccatctactacaacgactcgccgtatatattttaaccctttaagacatgcacctaaaactagaaacacatacttgaatcgctcatccccagtttcatccaactctgtttccaaatgataaactgtcccagggtttgcaagttgtaagacatggagatataccggcaacaaggtgaaagaactctcatatgtgccctgagctgtttcaacagccagctctttagctttccaacctttccaatacgacatcctaacattgtgctccctcagcagagaatcgggtaagtctcttgctcttggaccacaaaacgccttcgcatacttagcccttaggagtgcggctacaaccttggaagttgcatgttttgaaaacctgctcctagtctcaacattacacatatgttccaacttggccttcgtcacctcgtattcttcactctgtccaacttggtgtgctacaactctccagtcacagcattttttatcataacattcagctaccaagtactttttctcatacctagtaaatttgaagcggaatacacggtttatagcatatattgacaatgcagtcctgaaatcttccctagactcaaacgtccttccaacatacatattgtcatcctctttgctcaagtcaacatgagctgattttctatccatatcattgtctccaaacattggctcaatgtcctcataaccataaacttcatcaattcttatccccttctgaaaagtgtgaagaaactctgtcataacacctcctacacatgcaagattgtcagtcctttcttcaattcctttacctttttctttctgtctgactttctttttcgggagctgctcaacaaaatcatcatcgccactatcttcatctgccataatttctctaccagcttcaaccctacctaccatgttgttctcgtaatcgtaatcatcatcttctgattgactccctccactataagaataagaatcatcggagttttctgaacactcttcatccccactgctctccattccatcttccactgctacagatgtggttagacctgtgtaaacaaccaaatctgttttagacgccttctccacatcttctacggcttctaacagtatttcatcgcttatgtcccacccaccggagctgtcagtaacatctgtactctgggcgattgctaactgggagttattgccttgaactggaggatagacactgttattgtcttgaactgaagataagagtccagcaaaaaatcctactccctctgtcgctcttgaactacctccagcctctacgatacctgcagattctccagcttgcctacccatggcaaaacaactcccgatccttcgagcttcgtaggtaggcccgactaagactccatcgccttctctaaaacacacgaacaggttcacagatttatcatcaatgcttaaagatttaaagcttcgaaactgcctatcacaccgaatcattgttgggcccggctgaacaccagctaacagtgctaaattgtcctcaaacatgtagctaagctctactgatattgagctgctctccattctgtacagttgcctcactttaagctccaaatccctgaaagtttttaaccccatcaaactcaacgccctcccctgccgataagaatccatcttgaactcccattcacctgtgctaaacaagatccatcttccagcctgtacaacaacaatatcatccactgcaaaggaaattcaattagaatcagtttctaggccagtacaataggaaacattaaaagaaaatttggaaatttgtttcagtactgaattccaccttccattctttgttctctgatctgtacgtcctcaggaacttagaaaacctaccgaaactgacaatcatcttcttctttttatcttataataaattttccatccaaaaaggcaaaataaatttccctccaaaaaatttgcctactttcgaaaaaaatctaaagagaatctgagtattatatgatttctcacacgaacctagcaactaaattcgttgacataaacttctcattaatgcaggggtttctgactactccaacgccgccactgatgaagacgacttgtttgataattgacttcgggtactatttaattttggagataaaatggggaagaattttaaggcccatttaaaactatctaaaacctgttaatcacagttggcccatgtgtccaacaaaccaaacacgccatctcgtctagaggcttcctcatttccctgtaaaaagaaggaagccctcagacgtaatttccaaaacaacctcaaggccccactctttttctatcagagagaacgcgtatttgtatagcagtggggacccgactatttcttgagtattgaatagcacctgtactagttatcctattatgtttcataaatgtacgtactagtttgcaacatattcctaaacttattgtataaactcaaagctaatggaattcttcacatattcatagaatcgtttcatctctccacaaacactctttccatcgttccttaaattaaatctatcaaaattttaagcaacacaatctcatcttcttcactttacactctctgaaacagcaccttcttttatatgcagcctcaggcaacatctacttgtattttgtaacaatatcgggaacataaattaaggatctagca

SEQ ID NO: 5417 - DNA, 9669 bp, Arabidopsis lyrata
  Intron number 1 from transcript 486287 (locus 486287) deri ved from phytozome v7.0 (chr-ID scaffold_5; pos 18849270 t o 18858938 reverse strand)
gtttgattgcagaggaagcttcatcaagtatcaatggggaagaaatttaacaagaagatcacttggacgattaaagatttctcctctttaccagctgacattatttactctgatccttttgtcgtcgatggctgcaattggtaagaagatttaggtttaaccgtttaaggggatattcttctccgttttgctgattcttttatattatttgtgtttcatgcaggtgtctaagtgcttatcctaagggatataactttattggttacttgtctctgtatctggaagtcgccgataatggagcattgccttttggatggagaagacatgcacgatataccctaactatagtaaatcaaaactcggaaaaaagcttccaacaaaatggtgattatatctccccactgtgctttgcaagagcgtttgtctccatattttattttaatgacagtattataaacacaagattaccagttggactgttacattaatgccacatgagcatagttcaaatagtgtgaatataaaagatgtaaatgaactgattatgatgtattgtgattttgtagaagcaaaagagtggtttgacgactcgacccgatggggttgtccatccataattcccctaaatgaaattaatgccaaagatagtggatttctcgtaaacggggaactcaaaattgttgccgaggtagatatccttgaagttattggagacgtagatgtatcagaaggtatttcaacagtgaaagaaaccatagatgttaatggctttcaacttcttccttcccaggtaaaaaagaattgatgttaatggttatattatatggtgcttttgaggtgtctaccaaaactgtctctgaatacgagatcgaatttattcttgtgttttcatttggcaggcaaaatgtgttagccatatgtttgaaagacacccagcgattgcatctgaattccgcccaaagaatccaagtcttaggactgggtacatgagtttgctactcagtctgattgagactttatcccagtcacctcaagaactttccaaggatgacttgtgtgacatatatattgcacttggatatatgacagatgcagggtttaagttggattggttggagaagaaactttatgaggtggcacaaaagaaggaggatgatgaagctggtgagactcggctacgagaactggaggaagagttgaaggacatgaagctcaagtgttcaaaaatggaagctctagtggaggaagagaaagccaaggtgtcggctgcaaaagctcctctctcattcgatgatgttgtttaatgttcttgtgtttttaggacacttggaggttggttctgcttggtgtgccggtctggtcgtttatagcatttggtttcgtaatgaaagtcctcttaaaacttagggaagataaaagagactcatgtcttggaaattttccgcaatgttgtcgagacgaatctctaggtttcttcttgctgtgtcttggcttagaagtgatgactcttctttaaactttggaaaatgaattatcgtatgtctaattttcctcatgtagtcttttgtaatggagtgagtccattggcttttggtaagaaatagtcttaaactaagttacttgatgaaaaagtaatttctctgtatctgaacagagtgtggtaaacaggacaaatcctttggtcagacgattccctgaactctgtgacataagaagctcaccatcttcttcttgtaggagacaataccacatgctcatcatcctccagagacattgattgaagtgctatttgctcagattttagatccataacaagcagatagattgatcaatatgcactaacgatcttgaatgcaacgaaccacacaaataaaacagattgtgcggatattaaagaaatctccaacacactgctgaaaagatcttaggaattgatgaatatccattcaaattgtttcatatcttccaattgatttcgaaagagtccggcgaaacaataagaaggtctgcatgactctaacgtgatgaatatgatcaaagatactaaagcagcaaaagaaggcaaagctctcaacgatttcttcaccatgttttcaaatgatccaaatcgagcatgttatggaccaaaacatgtggaagttgctcatgaacgaatgtcaatccaaacacttcttattacagatgggctattcaggaactctgacgtaaaaacaaggaagaagtatgtggactttgtggagtcggtgaaaaaagattcagaaggagaggttttaatattttcgtccatgcatgcttcaggggaacaactggcacagcatactggaattgcagctcgtctcaggttccctttaccagatctagaagatattgagatgtaacatatatatcttcttaaaaaatcttataggtctcattttcacttctgctagctataagttttagttactggttttgtaataaagagtatgacttaaaaaaaatctgtttcaagattatataaaaagcgtcagtttaaatcttcattgactttagagtaatccattgtctggaaactctattttagagggatacattggagcaaaatttcctctaatatagaggttagcattggagatggtctaatactttaaaaatctgtatcctttactaaaaaataaaaaataaatcttcatagagatcaacataatgagaaaaagaaattagcaaaaccccttttgaaaacgtttggcatccctgtttctctattttcaatgcaaaaggacctaaccaagtctattcacctaaaaaaaaggaaacagaatctcaagcctaagtctaaccaaaccagggtttctagtttctttccttattggaattggatttctcttcttttgatccaaaacatgtaattttcttaggaatctcgtttgtgaactattcgatccaagtaatttgttttttgaattgggttcgtagctctgacaaacttggaaaaagttggtaagagttctgacttctgagtcgctctctctcctttttaactcgcctctcaagggtaatcgcttggttaactagttttaagtagtttagcctactggctggaacttcatatggctttgcgttcatagtaaaatctttgttaaaatagagagtgtgtttggttggtagctaggtatatgaatttggtttaattctcttcatgttcttgtagtttcatcgcgagtaatggagaaggaagttgacaagaaatttgtctgactgatagataatctcagcgtttttagtcctaagcagagtcattctgatccatttctgattgctggcagtagatggtaaaaactgaaccaacttttgttctaaaagtacttttcatttaattatgttgtggtgatttgatgatttttttttcctatgtaggcgtcttcttgccctacccaagggaaatacttttgagttcttctatcagtatatgggagttgctgattcttgccaatcactgacttctacatggagaagacatgtaaaacttcgcttaactatagtaaatggaatttctcataaacgctccattgtgacaggtgattcttctatgtgttatacattttgcaaaataagtgactgatttagattagttatttagttttaacgtttcttgctaagctgtgatattgatgtttaatacttgtcgtgatgatacagattcagacctctactttgatgagaatcttcccgcttgtagttatccaacagtgccactccctttcaaccttcttgcaagagatgccgggtttctggtttgccgagaaataacaattgttattgaggttgttgctcttgaagttattgacacatcagataatgatggtgccaagtctaatgatgtcaatggatttcaagttcttccttcacaggtaagaaagtgctcaactagctagagtatagttcttaggggagaggttgtggttttctgttttgcaataatctctgatttacaagtctttgagtttctggatttaagtggcagagtactaaactagtatgtttctctgtatagtatgatatctttttttcttctttcacaggtagaatctgtgaagcccaaacattgcataaaagaccgttcaatgaacccatgtctgaggacaacatacatgaatttactcctcggaataattgagacgttgtgccaattgcctggggagctctctgatagtgatctgaatgaagcatccgttgcagttttatacgtggcacaaggtggctttaaagtagattggttggagaagaaggtcaaggaagtaaaggaaaagaagaagaatgtggatactggtaaggctcggctgcaacaaatggagcaagatttgcagaatctcaatcagaaacgcttagacctgaaagatcttctagacaaggagaaagcaaatgacttggccgctaatgctcctctctcgttcaatgatgttcttaagaagttttagacaaggttttgaaaaactgccctctgataaggctgagattttgtctgcccaaagatcctctatgatgttgtcttgacttctttctttaggcatttgtgctaaagcattatgagcttgaagtttttttttttttcttactaaaaccttaaaatttaggaaagtttaagatgtctattatagatcaataaagtaatcccttgaaatatatgctatgagatatatgcaaatcccttgaagctaaactgtatcaagtaactacccttgatcacatccaaactaatatatacatatcttatcccgaatagtaaatgtgtttaaaatctaaatttttgcataattaaggaaaatttggaaactgagtgacaagagaaacagagtatccctggtaaatcacaatgattggggaaactattgattatttataatattgcattaacttatatacaccaatagttacactagttttcaattcatgtttcctaagccatataaaagtgatttactttcctatgcgaaatggatttgcattcatgtctctctctttctctccaagatgttttgaagtagtacttcattgtattattgtaagagttcagagtctgaaccgttttttcccttagtctctgttgtcttaaaacaaccattttcatttcctcttctcaaggtaactagtttaagcgtttggttcgacctggacgtctttatagtggaatctaagattactagctttgaggttatagtgtcagttagagtccatagtggaattttagattttggttttgattttgttactcgagatgtgtttccactggtatataccgtgaatttggacgtgacattgtttttaaaagtagtttggttgcgaggagtctttaatggggagtgaagaagttgataacaagttcacttgggtgattaagaatttctcctctttgcaatatgagaaaatctattctgatccatttgtgattggtggctgcaaatggtacgtaagaaactaaaaaaaaatttctaactgtattggtccaatttaggtttacaaggaggacatccacttttttttgtttgcaggcatcttctggcctatcccaagggaaataaatttaataattgtttgtctctgtatctggtggttgatgattctagagcattgccttgtggatagagaagatatgcacaattctccttaactttaataaatcaacttacggaaaaactctcccaacgaggaggtaactcttaatttatacactcggcaactttatgagataaggatattttatgactttacttgtcatgcactcatgtgactttgtgctgctgcaagtttcttgttatgcattgtgcagttttattgctttttttttttactagagttctatatcttttgtgaatagagaaacaaaattggtttaatcagagaaatcttggctcgggttttacatctctgatccctctttccaaccttcatgccaaaaatgctgggtatcttgtgaacggagaagtcaagattgttgtggagatcaatgatcttgaagttattggcaaattagatgtatcagaagaatctgaagaggcaaaccaacctctgaaaaagataaagctagatgataatgatgcagtgtctattgattcgctcaacgagacttcaccagttaaggaaagcattgatgtcaatgggtttcaagttcttccttcacaggtaagaaactcaagattagattatgtctctaaaaacttctatgacatggtttatgcatctttaaattacactcgcaggtagaatctgtgaagtgtatatttgaaagacatccagactttgcatcaaacttccgtccaaagaatcggcacttgaagtcaacatacatgaatgtcctcttaggactaattaagacgttgtgccagttacctgaggagctctcggatgatgatcttgacgaagcatccgttgcagtgtcatacgtggaaaatggagggtttaagttggattggttggagaagatgcccgcagaagttaaggaaaagaagaaaaaagtagagaccggtaaggctcgactgcaagaaacggaggaagagttgcagaaattaaataagaaatgcttagagctgaaagcttttctggagaaagagaatgcagatgtgtcagaggccaatgttcctctgtcgttcgatgatgttgtttgatgttattgtgtcacagaatctttagttcgattatatacttggtgttcttgctgtgtcatggctctgaattttaatcttcttgaaagtttggaagtacgtttaatggaatccttttgtttcagtgcatgaacaaatgggtttaaactttatatataagtttcttgatgacaaagtaattgctctgtatcctaacattgtgtgatgaataagaccaaccctttttttggaaaattggaattgaaatttaatatatgttatgatatgttttcaggtctccagattaaaactgcttgaggattttgttgctagagatcctctctcgtttgatgtcttaactcttaagcacttaggagttcactgagtgcggttgaagaatctctcatcacatggattatacaaataagaatcttgatgaaattttttttgtaaaatcttagtatgaacacttaaacagatcgagtagcaaaaaaaataaaaataaaagaatatcgagtgggcactagatgagtcacacggccaatagagtggctcgaggacttaattaactccactaagtcacaaaagcgcaatttaccaaattaccaaaagaaaaaaaaagagtcgcgatttaccaaaaagaaggaaaaaagttaaaaaaaaaaaaaaaaaaaaaaaaaaaaaaaaaaaaaaactccttgaagtcacaaaggagtctcatctaaaccttttacggagaaaaaaggagtgagtcaaggctctttgatttaatcctatacggtaagaaatcgttttagagcggcatttaaaattgtcaagatttcgattccatattgaaagcttaatttcaattgtggttacgctgcttgagattgttgattgattatcaaattaatttctaggtttttttttttttaatattcaagaaaaaaactattctagggtttttcttctcttcaggttatatggtagtttggttgcagaataatcttcgttaagatcaatggagaataaacttgctaagaagatcacgtggacaattaagaatttctcatctttgaaatcggaaaagttttactctgatccattcaccgttggtggatgtaaatggtaagtttttcaagtgttttcctccatctagatttaggtgattatcctccacaattttgctgattctttcatttgagtatttttttttttttttacaggcgtttttttgtctatcccaagggaaataatgttgattatttgtttctgtatttggaagtcgctgattatgagtcattgtcacctggatggagaagacacgctcgatatctcctaaatgtagtaaatcaaaattcggtaaagcgttccaaacaaaatggtgcttatttcttcccactgctcttttctccaaaaatcattttaatggcaaacacattgtagttacgaatctttaagtcgtgaatcttattttgttttgctacattttatatctgatgttttatgaggctcgttttggggactggagttgaatgttactcatgggttgtgttatagtattagttttcacgttttttccaaagttgtgagcattgttgttcagtccaaagaaacatagttcatttaatgctttgtttgcatgtaaatgaactgattatataaattctatttgtgattttacagaagaacaaaagtggtttgatgcccgttctcctcgctggggtcgtctatccatgtttcccctaaatgaaatctgtgctaaagatagcggatttctggtaaatggagaactcaaaattgttgccgagatagaggttcttgaagttattgggaaacttgatgaatcggaggaaacttctacaataatggaaaccatagattttaatggctttgaacttcttccctcacaggtaaaaattaagaatgccacaaactttttgtgtaggataatcaacaacaagagacaacgtgatgtgttcaatatttatggtgcttttgtgttaatgttctctgaatatggattctactttataactctcaggtggaatttgtgaggaatatgtttgaaaaacaccctgagattgcatctgaattccgtttaaagaatccaaatcttaagtcaggatacatgagcttgctactcagtctcattgagactctgcgccagtcgcctcaggagctcaacaaggttgatctagctgaggcatatgttgcactcagatccatgactgatgctggatttaaggttgattggttggagaagaaactttttgagatgtcagaaaagaagaagaaagaggaggctggtgaaactcggatgcaggaaattaatgaagagctgaaaagtttgaatcagaaatgcttagaccttgaagctcagctggagaaggagaaagcagaggttttcgctgcaaaagctcctctatcattcaatgatgttttttaatatttttgagttcataggcatttagagtttttcttctccttggtctgttcgttttgtgatattgtttagataacttaacaactgctacgttatttcacctttcattggtgattaacagtttctattctgctagtattgtttcatcaaatttcatttttacaaattgttaatagcttagtgttatggtgataaaataaaaatgatagcagctttgtctaaaaagagtaccaacataaggcaaaatacatgagataaaaaagggaaagaaattgataagtagctgacatgagacggtctgcagaatctggtcgagatagaaagagggagaagaagaatctcattaagatggaaagaaggagaaagaagaatcgatcaaagatagaatccaggttgcccatgctccaagtaaccctaagaggagccgcaagtgattcttatccctcgtgtacgtaatctaaacaattgacatttctttatacttaattaaggtttcaaaaccatatatataggaatcttagtttcaatttggatatgctgcttgagattttaggttggattctagggtttttcttctcttcatgatctcttagtttctttgcagaggtatctttatcaagatca

SEQ ID NO: 5418 - DNA, 7502 bp, Arabidopsis lyrata
  Intron number 5 from transcript 473078 (locus 473078) deri ved from phytozome v7.0 (chr-ID scaffold_1; pos 12649615 t o 12657116 reverse strand)
agaagagtgggtcatctgacgcatagaattcttagatgagtacaactgatacaagttggtcaaaaaattgagagaaagtttactgataaaaaacatgtatgttccttagtgcttgtagtagatcatgttcatgcatgtatttgagtatttgacaatttgtattgttgttatgtgaaataaatttaagggtcaatttgtgtagagacaaaaatgagatagaaaattaggtaatcaacattattggtttgtggtcttcaacagagataaataaagctaacaaataggcttgaagttcagaatatttacgaaaaaaccacctctttttttaatgatgcacgtggaagcaacggttttgactttttgggaaacaaaaaaagcaactgacagttaataaatgttcaacagtgaagtaataaataagacatttgatttattgcaaaaacgtagagaacgaaaatgtatgtagagttaggcctgggcatattaaccggaaccgaatacccgaaccgaaccgactcgaaattttgcaattcggttcgggtattgagatttggttttaaccgatcggttcccactttcaatatatttcgggtatgtcttcggtttgggtaaaaaccgatacccgaatggttactttataaacccgaaattaatacccgattaatactaatctaccctaattataattgtcaacattaccctatactcggttcttcccctttcccgacatttataccctaagtctctctaaaaaaaccctaagcctctattttcaatattcaatctggaatcttcatcaagaaatcgatctgcagtaagtcttctctccttcatctgttcttctttccttcgtgtgttcttctcgaattgatggttgtttgacttagggtgtttgtcgattagatacaatttcgattcaaccgtctgttcttctctacttctcgattcagtcgtctgttcttctctactctctacttctcgactgtgtttcttgttgattttagtattttagagttttgttgattatgaatttcgatttcaatctgattttgattgttcttttcgttttgactatttttattagatgggttcatcatcacttccagaagaagatgttgatgtggatacgaatgctgaaactcaagatacagaagatgatttgagggctcctgagaatcgaaagagaagaaaagagtcaaaagaagcttcagggaaaagttcttctaagagtaagggcaagggaaagagcaaagaagagagagaaaggtcgtatgtatgggagcattttaccagattgaaggataatactaacaaatgtacatgtcactactgtgggaagacactagcctgtcctacaacatcagggacttcaaatctgtagaagcatctgacattcgcgtgcaagcaattcaaggcttggcaagatagtgaaacgaagaagattctaaatctggatggtagtcatgtgatggctggtaaggtctcaattgaagtggttagagaagcaacaaatgaaatgcttgtattaggacagatgccacttttattcattgaaagcataacttggagacatttcactaccaaatgcaacatgtacaagccagtttctagaagaactgcaacaagagacatctatgagatgtttgtgaagcggaaagaagatgtgaggaaatggatgcgtgcaactaagcagagggtctctctcactactgatatatggacagctcacttaactggtgcaagttatatggtaataacttgccattttgttgatgcaaattggcatttaaggaagctgatcatagggtttaagtatgtggctgatcataaagggtcaacaattgcagctgttttgatgtcttgcttggctgactggggtatagtgaagatcttcactatcacttttgataatgcaacagccaatacttttgctcttcagaaatttgaaagagacttcagggcaaagaatgggaatgatgcattcatattagatgctgagatgatgcatatgcggtgttctgctcacatcattaatttgatagtcaaagatggattgcagaagatcaattcccatgtggaagcagttcggaatgcagtgacttttgtgagatcttctacaaagagattgatctcatttgatcaaagggttgatgactctaatttgagtagaggaagcttacctctagatgtcgaaaccaggtggaattcaacctatttgatgctcacaaaagcgcaattattcagagaagcttttgatcggatggaagctgaagataagatctacaacaactacttcttagagatggaaaaaggcaagaaaagggttggtcctcctacttatttggattgggtggagatagatagaatggtaaagtttctgaacttcttttatactgctactttaattgtctctgcttctacataggtcaactcatataagtgttatggagagatagctacaatagagaagaatatgatactattgagtcatgatcatgatgaggaaatgaggactagggctaaggatatgaaagagaagtttgataagtattgggagggttttaaaaatatcaataagcttttgattatggctactgtctttgatccgactaagaaaatgcaatttgctcagctttgctttgatagggtctatgggaaagatagtctagattctaaagagttgtatgattctacatattttgtgttgactagtctttttaaggagtatagtagcatgtttcccaaagtctctgattcatcatcgtctaatactgttgggagcaattctgctagccatgaacaagctactggatatggtgaaggtgagttagaatatgcaaatgcttctcttggtggtggatttgaaagaatgcagtctgtttatgatgagatggttgatgagataggagttcatgatgcaagggatgaattagacatgtatttgaaagaaaaggttgagcatccaaagagtaatatgtttggtaatgagtatgatgtcatggattggtggaggcgcaattctggtaagttccctatattatcagaaatagcaagagatgtatttgctatgcaagtgtcatcagtcgcatcggaatctgcctttagtacaagtggacgcatgctggaaccaagtaggagttgtcttagtcattacaccattgaggttttgatgtgcacagaccaatggatgaagtcagagatgaagttaaaggagcaatatgctatgagtaatgcaagtatatatgctgactttgagacacaagatgagctggagaaaggttggttttactttatttctcaattatacttgtagcattttaggtatttacctactgataattgtgttctctaaatgattttcagagtttggagcattaggagtaggcgagtagctctacaagactcatactcggcttttttttgggtaataatcctcaatcttatgcaaatttctctgtctaaactgtttttggtattgatgaatcttcttttccatgtaacaggaacaatggaacatgttgtgtttctgatgcttgtatgtttctggtaactttaacaacaattgaaatgtttgtgtttcgtttctcttttgaatttagacaattactaagtttatgtaactgttttgtttggtttcaatttagacaatgcatcagtttatctatatgtttgtctttggtttcaattcaaacatgcatgagtttaggattgagatggtttgtataaccaggttttgcatgtttggttatttttggttacttttggttatttttggttactaattacccgaattgtacccgaacccgaacaaaatctaaatatttcgggtattcaacggttcttaaattaaatagaatacccaacccgaacccgaaatagaaccgaaccgaaccgaacccgaaccgaatttttagaatacccgaatgggtctcgacccctacccgaatagacccgatacccgaaaaaaaagaaccgaacccgaacgggtacccgaatgcccaggcctatgtagagtgctattaatatttatatacatataaacacgtatatagagcgttattaatatttatatacatgaaaccacatatataaagagttattattatttttacatttgtaaatatttaaatatagatcttcaaacaaatttggacatccacgcaaaccaaatttgggcatccacacagatctataacgcaaaaatgcagatctaactgaactcttggagagatatcaaagaatatagataaataaaaaatatccggattttccttcacgacataatgaatagtatatacggcgaattctccgacgcatcagagtaaaatagtatacacgatacaacaaagtgactaatatacacaacgaaccagttaaatcaaaatagagaaaaattgaacaatagtgttagaggaagatgatgagacttgagaaaatgatgaacagtaaatgaacatccaagagataatttgacgtgtttgtcttatttattacgatgaaaacgcgtggggtcagtttaggcaaaaaattggactaaatattacattgttttagactctatattggattaccaaaaaactaattttacccagatccatagtctctcacccaattatctctaaatttaaagggtattgttggcatgtttcatgtatagtccacttcatacggagagtaagtgagtaacaaaccagtgacggcttggataacttgcaacttcaccatcgacactaatcgggactgttgatcgtatagttaggaagcggctatcccctttctccaaaacccgggctcacactccatggaacatgtgtaaaatctttttccatattccttcatttttattgatcaatagacaaatcttcccactactctgactattaattttctttcctctatttcaatacatccaacttccattcttttactctagtgattaaccaatcacacccataattagagtaattacccaaaatatgtactagatatcaaaattgtacctaaatcatttcattaaccacaacccattcattgtggtccaatagttaaaagattcattatcgagtttgaaagtgaaggttccagtattgccactatgatcattataaaggaaaaaaacaaattatccccatgaagctcatccctaaaccacataaaaaagatactacgtctagtgtctccgagccaatagtgtctctttccaaaaaagttattttgaaaagtttccaattaacctctggcctctcatggcttctctgatcatgaagaagctcctgagcttctttctaattctatctactgttttactcactattgtgatctcggaaccacagtgccataatttcaaatctatcattagttttggcgattcgattgccgacacgggaaacttgctcggtctctcggatcctaacaatctccctcaggtcgcgtttctaccgtacggagaaaccttcttccaccatccgaccggccgtttctcaaacggccggctcatcatcgacttcatcggtacgttctctttagttgaggtgtgagtgagagtgtgtacgaaggtagaaattcagatcttagttgatacgatacgaccagagactttcccgaaaaaattacttccacaaataaaagttccaaaaagtttggagcatgtactattttggattggcatgacacgtgtttaggtctagctccatagactttctctggagcataattgaatcatggacttgtaatattatttggtttcaccgagcttgaaaaacacaaatgaacaatggattttaatgtataagcataaagcacttacatattatgtaattttttttgttaatctaaacgcctagcagacaatgatcaatgttttctgcttcttgttgaaaattttgtgagaagaaaccaaaagatctttggctctttctttgtctttttttcctgatgtaactcctcccctgttttattgtttgtgtgtaactcttcctttaacttcttcttgatactttggcttgagtagcaagtttgattaattaaaagctgagattatctaaatacaaaaccattaagtgtagtgaagaagccttattgattcctgaatttacagttcttttctttggttctgttctcacagctgaattcttgggttttccgcttgtgcctcccttttacggatctcgaaatgcaaactttgagaagggagttaatttcgcggttgggggagcaacgacactggaacgttcctttcttgaagagagaggaattcattttcctttcaccaacgttagtttagccgttcagcttagtagcttcaaggagagtttatctagcttatgtggctctccttcaggtttggaagatcaacatttagtttctgtatttggtgtttcctgttttatatgattagaatatcaaatctgatttcttacgctcccatcgtaccatactagagttatgaaatattagcagcatggaatagtttctggcggttcattttggttaagaagaagaaagtcacaacaaaagtgaagaaaaaaaaaagttctgttttgagatgtgcttagagatcctacccgtttttgttaaactccaagatgcaatgaatcgagctcacttgtaaaataatggtttactttgtaatcttgttttagactgcaaagatatgatagaaaatgctttgattctcatgggagaaattggagggaatgactataattacgcattcttcacgggcaaaaacattgaagagatcaaagagctggttccacttgttattggaaccatctcttctgcaatcacggtaaacacttctctttctgaatatagcagtccaaagttttgggactgagttgagttttgaattttggaagcataaaatattcaggagttgatcggtatggggggaaaaacatttctggtgcccggggagttcccgctcggatgctcagtagtgtatttggaagcataccaaacaccaaacatggaggaatatgatccttcaaccggatgtttgaaatggctgaacaagtttgcagaataccacgacgagcagcttcaagcagaactcaaaagacttcagaagttgtaccctcatgtcaacattatatacgctgactactacaacgcattgttgcgactttctcaagaaccagccaaattcggttagtagacttcttgatccttatactgaacctacacaaaaagatttaattttctaaccgagttagttaattatccaatcagggttcataagcagacccttgcccgcttgctgcgatttaggaggaccgtttaaattcaccttaggtaggaaacgtgggactcaagtacctgaatgttgtgacgatccttcaaagtatgtgagttgggacggtgttcatatgactgaggctgcgtacagattgatggctgagggtatactaaagggtccttatgcgattcctcctttcgattggtcttgtctcagctctgaaattaagaacaatggatcatctgatacatataagtctttg

SEQ ID NO: 5419 - DNA, 385 bp, Arabidopsis lyrata
  Intron number 1 from transcript 335563 (locus 335563) deri ved from phytozome v7.0 (chr-ID scaffold_1; pos 10294937 t o 10295321)
ctcctcgaccgagcaacaagggtactttactactttctttactttaacgttttttttatttcgtcttttttttgttatgatagggaaaaataatcgtgatttgtcaaaaagtgttagcaattggttatatactttgcttgtgtgataaatattctctttatttgtttcttataatgtttgtttccgtacatttttgacctacatgcattagacctactatgaagtatgaactacttggtttttgtagaaacgtactaaccatttcacaccatttaattaaagaacttttgacttgtgtatttttgacatatacgaacataaactaattttgaataaatgtatattcgcaggtgtttgcgttcgcccaaaagtaccgaggagcgta

SEQ ID NO: 5420 - DNA, 11574 bp, Arabidopsis lyrata
  Intron number 3 from transcript 896627 (locus 896627) deri ved from phytozome v7.0 (chr-ID scaffold_5; pos 3631929 to 3643502 reverse strand)
ttaaggtcagtttttcaaatgattatgtatgaatacaacacacaccctttcttaaagatcctcaatagatttggaactcattgttggggtcggtttcaccctttggcgccgagccagacttagaacactttgggagtctttcagagatcatctcggggcatcgcaccattcacctcgggatatcctgtctaaacgatttagtatacccgagcccatcgcctcggagatacattaacaagactacgaaggcacccgagctctaccgcctcggaggcacccgagcccaattgcctcgggggtacccgaacccatcgcctcggggatatcctgaagcagacatcagaagcacccgagcccaattgcctcgggggtacccgagcctggtcgcctcgggagtttccgagcccatcgcctcggggacacccgaagaagccaccctagaatgcccgagccagtccttcatgtgtatccgagccggtcttacaagttccctgaagcgaagtcttcatcatcgcccgaagcaaagacttagtaaatattcttctttaaaggtatcatttctaagcacattgtcatttccgaaaaagaaggatcatttccgataatctcggaaatgataaggaagaatcgcgaaggatcaactcaaatcaggaaatcttccgaaaactccgaagaataaggaaattatcctaatccgcgatattctagccgacttcaagataaatggaaatcttccgagaatatcgctggagaggcggtttgtcctccctatataaagagattcaaggctagaacgatgggggcaagcaatatcgctctagaaattacactacgcaaagctctcacagcacaaacactttttcttttacgatcaaactcttgtacgatcaaaatcgtcttttcattaataatatcaagaacgccatctttggtatcaatcgtttctgttgttctttgagaattcacgattatcgtatccctaaaataaaaccctagacaaatcttgattgtgttagtttcgacttccacagtttggcgccgtctgtggggatactttagaattctcttaccctaagacgcagaactcgattactgaaaagcatgatgaacgaagacggtcgtcagtcgccaccagctggaggaggaatcccgaaccctccgaaccctcagaatcctcaacccgccgatccgacgatcctagcgactctagccgaactgaaagatctgatggttaagttccagaagaaaactgacgatcaagagagagccaaccaaaccttggcgcagcgaatcgacgaaatcgcaacacgcgggcaacaaaaaaccacacgtttccaaactcggccaccacgagctcggagggacttgcctggcatcaacccaatgagactcacgttcgcgacaccaaccggcaacaccagagtcgcaacccgagccgaccctgtcaggcgcgagaaccaggatgatcccaccgagccggacgcagtggacttgacggacgagccagatgatctgcaagatgaacgtacgcgagccggagctaactccgccgagcgaacagatctcactgacgatgaagaaactgaggaaaacataaggtgggccgaagaatccgaaagagaggacgagctaagcaagatccgagcctccctagccaaggcggaagccgatatgaagctcgtcaaaacccagatacatagcgtctcgtcctccgcaccgaacatcgaccgaattttggaagaatcccggaatacgcctttcaccaaaagaatttccgaaacaacgatgtccaatctggggaagttcaaaatcgattcttacaacggatcaaccgacccgaaatgccacattaaatcgtttgtgatatctgtggcccgagccaggttcaagcccggcgaaaaggatgcaggtctatgcttactgttcgtggaacacctcaaaggacccgcattagagtggttttcaagattggaacgaaactcggtcgatagtttcgacgagctatcgacattgttccttaaacaatactccgtgctcatcgaccccggaacttccgacgcggatctgtggtctttatctcaacaacccaccgagcctttaagagatttcctcaagaccttcaaatcgacgctagccaaggtcgaaggaattaccgacgtagcagctctctcggctttgaagaaagctctctggtacaagtcagaattcaggaaagagttgaacctgtctaaaccgacctcaattcgtgacgcgctgcatcgagcctcggatttcgtcgcccacgaagaagaaatggcgctactagcaaagaggcacgagccgacgaaacaggcgtcccgagccgagaaaactgagaaagcccaagcggcaactccagtccagaagaagacgcgtgagagcagtacgtatacgcatcacgaagggcgtaatttctcaggataccatagctaccaaatcgacacaccccggcagaggccggggccgtgggcgaggaagagagtccttcacctggacaagggatcagccaccgaacaatgatcaggaatattgtgaacaccacaaaattttcggccatcatacctcgagatgccgaagcctcggagccaagttagcaaccaaattcctagctggagagctcgggacaaacgttactctcaaggacctcgagccagaaccggagcccgagcagaccaatccagggagagaccccgaaccaaggaaccaggagtctcagaaaagaacccgggggtcggaagacgaagaccgagatggtacgcgacagaaggttcttaccataatgggtggatcaccttactgtcctgacaccgtagcggcaattaaagcttatcaacgccgagccgagatgcctagcaactggacaagacgctttgatcgacctaacgacgtgatcacattcgaagaaagcgagacaaacgggctcgacatgcctcataacgatccaatcgtcgtcacattagcgataggagaccacgatatttatcgagtgttgattgacaccggcagcaccattgacgtgatctttcgcgaaacgctccaacgaatgaacatcgacatgtcacaggtggttccgaccccgaggcctgtcctcggattttcaggagaaactttgatgacgcttggaaccatccaactaccagtccgagccggcggggtaacaaagatagtcaacttcttagtcaccgaccgacctaccatctacaacgtcataatggggactccgtggttaaatctaatgcgagctgtcgcatcaacatatcatctgtgtgtcaaattcccgacccctaatggcgtgaaaacaatatggggcagtcagaaaaattctcggatgtgtttcatggtagcacacaaactccgaaaccccgtcaccgaagcgaaggccgaaaccaatcacaagaaatcaaaacttggccggagtgaagagaaggctatatctaaacagttatagcaattacagatcgaggaggcgcgcgaggagaagaagcctacctcggatcctgtaatctccattagcctcgacgatgaacggcccgaacgatgcgtagaaattggcagcgacttgagcgaggaaatcaagatcgagctcatctcattcctcaaagagaacatcaacaccttcgcctggtcagctgaagatctacctggagtaagcatcgacataatctgccacgagctgaatgttgatccatctttcaagcccatcaagcagaagcgaagaaaattgggccgggatcgcgcagatgccgtgaacgccgaagttgaaaagctcctgaagatcggctcgatctctgaagcaaggtatccggattggttagcaaatcctgtcgtggttaaaaagaagaacggcaagtggagagtctgcatcgatttcaccgacctgaacaaagcttgccctaaagacagttttccgctcccacatatcgatcgtttagtggaagcaaccgcgggaaataagttgctatcattcatggacgctttcgcaggatacaatcagattctcatgcaccccgacgatcgcgagaagacagcattcatcacagaccgaggtatctactgttacaaagtcatgcccttcggactcaagaacgccggcgcgacgtatcagcgactcgtcaacaggatgttctccgaacagctcgggaagacgatggaagtttatatcgacgacatgttagtcaaatcccttgaagaaagcgatcacataacccatctacgcgactgtttctgtcagctcaacaagcacaacatgaagcttaacccggcaaaatgtcgtttcgcggtaaagtctggagaatttttgggatatctcataactcaccgaggcatcgaggcaaacccgaagcagatcgatgctctactaaacatgccctcaccgcagaacaagcgcgaagtccaacgtctcaccgggagagtcgcagccttgaaccgattcatctcgcgatccactgacaaatgcctagctttctacgatactctgcgcgggaacaagaaattcgaatggaccgatcgctgcgaagaagctttccaggaactgaagaaatatttggctaatccaccggtgttagcgaaaccagtcccgggcgagccgttattcctatacatcgcagtctctgacacggctataagcggagtcatagtcagggaagacagaggggagcagaagccgattttttacgtctcgcaaactttcaccgacgcggaaacacgctatccgcaaactgaaaagctcgccctcgccgtagtaatgtcagcgcggaagctacggccatatttccagtctcactcgattgtcgtcatggcgcccgtatcgctccgaaccatcttgcacagtccaagccaatcgggacgcttagccaagtgggcagtagaactcagcgagtatgacatcgaatacagaaacaaaacatgcgcgaaatctcaagtcctggccgatttcatcatcgagctgccaacagagaacgtccgagaagagtcacccaacgctgtttggatcctccacgtcgacggctcatcctcaaaacaaggttctggcgtcggaatccgcctcgcatcaccagagggtgaaatccttgaacaatcctttcggctaaatttcgacgcgactaacaacgtggctgagtatgaagcgctgatagcaggacttaagctggcgcggggacttaagatcaataagctgcgagccttttgcgactcccaactcgtggctaatcaattcaatggagaatacgcggctcgcgacgaacgaatggaagcgtatcttgctctcacgcaggacttggtgaaacaattcggagagtttgagctgaccagaatcccacgaggtgagaacacatcggccgatgccttagcggctctagcttcaacctctgacccaaatctgaagaggatcataccggttgagttcatcgaaaagccgagcattgaagataatagcaaggatcaagttctaacagctcgggagacagaagaactagaagaaatggacatcgaacaactagaccagcaaactacggacgcaacagagcccgaatacggaagcgacgccaaatggatcggagccatccgaagctacattgccgatggagaagttcctactgaaaagtgggcagctcggaagcttaaggccaaagcggctcggtatactctgatcgatggagagctctttaaatggcgattttctggtcctctccttatctgtgtcgaaggaaacgaagctcggagagtcatggaagaagttcacggcggatcttgtggaaaccattctggcggaagaactctggctataaagatcaaacgccacggatacttctggccgacgatggtcaaagactgcgagaaattttctcaacggtgtgataaatgccagagacacgcaccaaccattcatcaacccgccgagctcctctcttccgtcacttcgccttatccgttcatgcgatggtctatggacatcatcggacctctacacaactccaaacagaagaaactcgtcctcgtactaacagactacttctccaaatggatcgaggcagactcctacgccagcatcaaagacgcgcaggtcgaaaacttcgtctggaagaacatcatatgccgccacgggataccttatgagatcgttacagacaacggatcgcagtttatttcggctcggttcgaaggattctgcgagaaatggggaattcgcctcagcaaatctacgcctcgatatccccaggggaacggacaggccgaagcgacaaacaagacgattctcgacgggataaaaaagcgcctcgacgcaaagaaaggccgctgggccgacgaattagaaggagtactctggtcacacagaaccacaccgcggcgggccacgggagaaacacccttcgcccttgtctacggcacggagtgtgtgattcccaccgaagccgagatcccggggctgagaagacgttttctccccgagcaggaaaattccaacacccagatgatgctagacgagctggacttaattgacgaaagaagagatgcggctttgatccgaatgcagaactatcagaattcaacggctcggtattacaactctcacgttaaacatcgccgtttccacgaaggagatctcgtactacgcaaagttttctagaataccgccgagcagaacgcaggcaaactcggcgcgaattgggagggaccttacacgatcgcaaaggtaatccgtcccggcgtctacgaactcatcaacatgaacggcaaagcggtacctagatcctggaacgcaatgcatctaaggaaatactaccgctaaaaacctaaggtacgcatgtactcgaactacggggtggcttgatccctgcaaagggtacgtaggcagctcgtcctcggacgagttcagctaccccccctaattaaaaaggggggagtgggtccgtatacttatatactcccactaaatttttcaaattccctaagtctttacccttcgggttattaattttatccacctcgaagatttgatcggtcatcttatcgacctataaagctaaaagttcgctcggacgatggccacgtcctcggatagaaaaagctctttgcaccgcctcggttacagcgcgctatataaacagtcgagacgattcggtcggagatatcctgccataaagaaattgtcttcaaaaaacccagttgacttcgacactggtaccccagtccgcttctaagcactggcttcgactatatcggctcgggtcgcaaccgataaagattagtcctacttaaccgaaacccagttatcctaacgatggtacacgattcatttcattttcggctcgaaagataaggcgttcggatttaacttctcaacgagcaattcttaaacccggttaacttaacaccggtgcatgattcttttgctctcggctcgaaggataaaaccaaatacttgacattagttttgaatccagttcggaaaaatgtttaagaaaaaatacttggacataatattcaagggataaagccatccaggcaagtcttacaaaaaaaaagagaacaaaaaaaaacatctcgggatcagatcgaatcttggttaaccggcgaaacttgagctacctcggtacctcggttcgaaccggactggtcggcaacacccagcgccactgcggcgccttcgatcgaacggtttccgaagctgtcatcgacagaatccggggaaaccggaggaagcttcaagtcctctcgcagctcggtcccaagacggacgtactcgtcctcggcgctcccatattcagcagtccactgaaggacctcggccttctcgtcttcaaccctctttccttcctccagctcggctatcagctcggcattggcccgcgcttgcaccaagtatatatagcgcgtggacacctccccgaactggtccatcttcgcctcgatagccctgaccttctcggcgaactccctttttgctgccttcctttctctgacaatctccttttcccggagagccttctcctcgttgaataaccgacggagtcgttcgacctcggcctcaagctctctctgagtccgcaagctatcctcagatgctttcaatcgctccaccttctcggccttggccaacgcctcagcctcctatttagccgcgatcgcctcggacaattcagcttcgatcctagctcgtgacgcctccgatctctcacgggccagctcggacttccgagctccagaatcataggcccgaaccatggaattcatcgaatggaaggcctgaaatagaacgagaattattagcaagtattacatggaaacgatagtaaaacaggtcaagaacagatcggtaataccttcaagaacccggcagcggtttcacggtagttttgagcctccaacaaggcatcaggagcagacagtggcggcccggagcaagaagcgacaaagttcgccgaagcaatcttatccttgtacactggagtttcgctacgactccttttctccttccttgagactcccgagccatcgcctcggggtctttttcccctagttttggatttcgcctcggcgaccggagcagcaacgaccagagtccctaccgcctcggggacgtcggtcgtaggggagatgtgtccgaccacctcgggaacaatcggaaccatgtcccgaggtacatcagttgcctcggcatccatgacgacctcaaggttggcctcgggaggagtaggaggtctgaagttcgcctccaaaacggctttttccttagccgccttcttttcagcggccttcctggctctcagagattgcgcggctccttgcatctcgatgaggtgatctaaacgatggtcggatgattctgaagaagactggcagggagctccgtgcaacaaacgcaaggctctctcaatcctttcctgggaaaagtgcttcgtccaatcacacttccgagctattagttcgtcgtggaggtctagaaagccttcgggaatggtttcgagaaacgacgggttccgatctgcatgaacaagagaaacggttagtaaagagaatataaagaacaagacagcaaatacagcttcgggcgtagtaccgatttgtctccactttccaacaactttccctaagtagtcctcgtggacactatactcattcaaggctacaaagaagaaatggtcggtatatttttcatccttgctcgggaaaccgccgataaccctcctatttggcctcggagatatgtaaaatctctcaacagggcccggtattcgccggatctctaggagattccttaagtggcttaggtcaaccaggttgaccgtctcaatacttcggactaaaatccccactagatgccgcaagcctcgggtcgttatctgagataaagcaatcttgtacgaccacagaaacgccaaaatcggcctcgggattggaagccaaaggaagcaatgatagaagaacccctcgtagagggtaaaaaacccctcgggtggatcatcagctcgctcgtttggagttggaagtctcagttcaaccccctcactgaaaccaaatcgagccttgagatcccgaagggagtcctccgtgcataaagtagaacccgggggatcaggtttcctagccttcttggctcgttttctcttctgctgacccttggctgctcggactttagcttgaagcaacctagccgcctcgtcagaatcgtagtggacttcctcggccttaacaggaagtagaggcgcctcgggggcgttccgccagcacgatactccagcttcaccaactgccggtggatgggccctccttctactcaaaatcgcctcgggatcatcaggcaaatcctgatcccgagccacatttgcaaccgcgtcttcccgaacaacgaaacggctcgggttttcttcccgtgaagccgactctgcatcactcccacggcgtaacacgatctgatggtccgcctcggggtcgctcgaggaactccagaccatctttctcttgtagacggggagaagagtgtcgcctcggggcgaatcgctggaatcagatagagacattttttttggcctcgggagattgaagaagttgatcggaggaacaaagtttgacagatcggggaaatcaacctagatctaatgacggtggcgctatgacggaaatattaacggaaaaagtagaaaattcaagaactcaagatcagagagaagaaaacgaaccttgaaaattttcctttgcaattgcgaaatgaagaaatgaatcggaggcttgacatttatagagatttggagcgcgtcgggtacgaacgagccaaataaaacacatcgaatccgcgtctgaggcgcgtcgggcacaaacgaagtaagtaagatacttcgcatccgcacgagtctcgggaatcagcgaaaggacctttccacttctcgagaaggaatcccaaccgtcacacgccaagagaagatgaaacgacagaggaatccgaatcgccaaaaactttaaaaggaccgaactgtccaaagtaaacggctcggcctaaatgtcataaagctcatcacgcttggttttccaaactaacgagctggggggctaactgttggggtcggtttcaccctttggcgccgagccagacttagaacactttgggagtctttcagagatcatctcggggcatcgcaccattcacctcgggatatcctgtctaaacgatttagtatacccgagcccatcgcctcggagatacattaacaagactacgaaggcacccgagctctaccgcctcggaggcacccgagcccaattacctcgggggtacccgagcccatcgcctcggggatatcctgaagcagacatcagaagcacccgagcccaattgcctcgggggtacccgagcctggtcgcctcgggagtttccgagcccatcgcctcggggacacccgaagaagccaccctagaatgcccgagccagtccttcatgtgtacccgagccggtcttacaagttccctgaagcgaagtcttcatcatcgcccgaagcaaagacttagtaaatattcttctttaaaggtatcatttctaagcacattgtcatttccgaaaaagaaggatcatttccgataatctcggaaatgataaggaagaatcgcgaaggatcaactcaaatcaggaaatcttccgaaaactccgaagaataaggaaattatcctaatccgcgatattctagccgacttcaagataaatggaaatcttccgagaatatcgctggagaggcggtttgtcctccctatataaagagattcaaggctagaacgatgggggcaagcaatatcgctctagaaattacactacgcaaagctctcacagcacaaacactttttcttttacgatcaaactcttgtacgatcaaaatcgtcttttcattaataatatcaagaacgccatctttggtatcaatcgtttctgttgttctttgagaattcacgattatcgtatccctaaaataaaaccctagacaaatcttgattgtgttagtttcgacttccacactcatatatatttgtcatcccgagattcttaccatcggaatttgacaacgacgtgga

SEQ ID NO: 5421 - DNA, 238 bp, Arabidopsis lyrata
  Intron number 2 from transcript 492496 (locus 492496) deri ved from phytozome v7.0 (chr-ID scaffold_7; pos 7943865 to 7944102 reverse strand)
cgaataaattgtgattttgtgatttgatctgaagaattgcatcgtatgcttgatccgatcaccgtttaagattcatgtgttttgtgtagtttgtttaaacaatgttgtggttcacattttttggattctgtggtttgatttctcacttagttttatgtaatattcgtagaagaaattgatacgatgatttgttttgtttttgacacaaacagatttttgaggattttttcaagaaaat

SEQ ID NO: 5422 - DNA, 4464 bp, Arabidopsis lyrata
  Intron number 3 from transcript 893824 (locus 893824) deri ved from phytozome v7.0 (chr-ID scaffold_6; pos 7981344 to 7985807)
ttccactaaaaactagtcaacaagatgtagataataaatcaaaagctgatggtccatcaagaagaagccagcgaagtcaagtgccttccatttattctcagccaccttacacggcagagaagaagaagcacccaacacttcacccctttgcaaaagttgacacaaaaaggtttgaaagtttatgtgaatggaagaagtcgacaaaaaacaagtgagttttaagtttgtaaaactcataataatattcataacgtattttaaaggttttacatcatctctgacttttacaatgtattttaaaatgattttacaacgtattttaaagattttacattgcctcattggatgttacattgactcattggatgttcttataattatatatatatatttgttgtagggtgctaacagttgggggaatcaaagtagattccaaatggttcacaacactagaaacgcaggggaaaccaatatcaggatcggtatgtatgattttctttcaagtattctaatcttgtaaaactttaaaaaaccattgtaaattataaagttcatatagactagcaaacatgagtaatttgttttcctttttgtgtgtgtttttcttagcatgttgatgcagctttacacttgatcaaaactagaagggaaaatcatccagaaatgtaccttaacaaaactgttgtttttgttggatcatctttcttaaatgcgattgacgatgagtatgctgagtttgtagtcgcaaaagatgattttcagtttagttctgaagagataagtaagctggagattggaagcaagacaaattacatatatgctcctatgtgcttgaaaggaaaatgttgggttccagtagtgattaatatcgagagaaggtctttgatcattctcgattacgcgacatcatttgtttcagaaaatgttaaaaggatgcatgtggttgcatattctgttgcgatgccgtacatattgcacaagctcctcaacaaaacagatatggatgtttcagcattcaaaatatctgtagtggacaatatatcacaggtaatttttgtgataagtgagattgtagattgtattcattaaaaccttttttatatgtctttttttgtttttgatgctaggctgaaaagattgaagatactgggatgtacatgatgaagatgatggaatgctatgctatgcatattaatgcaaatgagaaactttcagaaggaaaaattggagacatgagaaagaaacttgcggttgacatctttacagaaataacagatttctaggtaagacttctctcaggttttaacatgtaaattaaaaacctacaactaagcttatatttcttgatttattactttgatcaggggctaattgtaagagctgggaagaaaagattgctggggaaaaatgatctattctttttgaagaaaacgttgctgttttacaaatttttaatttttgctgagaatatctgtagtgattttcgcatgaattttactttgtataactctctagttgtgaatttaagttttttttttctatgtacctgcatctataacatccaatcttcatttataccattttatcttttgatgttaatttttaaaagctatctaaacattttacaatgttaagtcttcatctataccattttaatgtttttacaatgtatatgattatatatagaaagaacttttaaaatttttacaatatttataagcttatgaaaataaaaccatcttatttatatttttatcaaatttttcatgattctttaaatttacaattgttttacaaagtattttcaagtttttaaaagatttttcaaaattttgcaaggtaattttagttttataatatatttttcaaagatttacaatgtgttttaaaagtttataacgtgttttaaaatagttttacaacctgtttttaatcgaactaagaataagatagttgtaaatagttgggccgaaataaaaaagaaaaaacctttaaaacactttaaaacccatttgatagagaaaaaaaaaatagaagggggaaaaaaaaccgattctctcagtctccttctccgttgagtacaagaagaataaattaagggttttcgcttagcttcacggctttagattctacagttttggttccatctcggcttcttcgttttcataaggttcaatctcgtcttctccgttttcataaggttcaatctcgacttttcggcttcttcgatttcatctgcctagggttttgggttccgtcacatcagtcgattttacggttaaattactttaaaacttcgttacttttttgattcatatgccaaattaggttatttccccttcaaaatcgagtttttgtgacattggatgatttttgagattttgtgattttttttttgtagatccgtttttattcttacaaggacttaaaaggactatagaaattcaattaattttacctttgttttaaaatcttttacaatcgattttacaagcaatttaaatggttttcaaaagggatctaaatggtttgattctttgagaatgtgtttgagtattgatgagacttttcacttttcacaaagcttccaagtaggtaatgatgtttgcaatgtactactctatttgcatttctagagttgttcgtttacatgatttaattttacatgcgttttaaagcttcttaaagctgttttacaagcagtttaaaagcttacaaaggggttgtaaatggtttgatttttttgagaatgctttttgatggagatgttttaattgtttttctatctttcctgcaacagagtgaaaaatgagtcaacctacaaagaggctgtttctcccaaaaagactgattgacccagggaatgaggtggataatttgaaaagaatatcaaagtattcttcagagaaacttgtattgaatgttgtcaaggattcacttagtcccactgagttcaatcggattcagaattctttcttgggaccaatcatagattttgcggaacgtgaagggatctgtttctcatcacagctggtccatcactttcttcagagaagaataatggttaacaatgaggagttgtggtttgtcttctcagaacaacccctcagattttctctgagggagtttgttattactacagggctgcctttgggtgatgatgcatcacaaagccagtcaatacgaaaaaagagaaagaaagaagatacatggatgaaggatggtttaagtttgaaagatctccttaataccttgtctacaaaacgcaatgcgatggatgctgatgagagggttaggttaggtgctctgattctagtggagggcatcttaattgcttcaaaccctgtaaacaatatagagaaagaacatctggtaagagctagtagtttcacagagttctgcaagtatccgtgggctcgcattgtttacgggtctttggtggattgcttgaagaagataactccgactcaattgtttagaaaccaatgtgggcttcctgggtttgtttttgcaatccagatttgggctttaaccgcagttgcagagttgggacagaattttggcagtcgggtcctagaacccaacgacaatcgtccactgatttcgcaatggatgacaacaaaatgcccaactaagaaagatatagcaaaagttacaaaggttgcaacggtatgacagtttttctctactacttttttccaactaataaggtttacaattgttttactttgttatacaagaattttaagaagtttacaagggttttaaaaaaatggcaagatttttacaagacatttttaaaggttttacaagacattttaaaagtttttacaagctttaatacagattgtaaaacctttaaaatagatagtaaatgctttatgaaataattgtggttcacatttctaacttaaattcatattcttttttatgcagtttgatattaaacatatcattggcgatcctgaacaatattctcatttggttctccccccaaatccagaagacaaggactggtttgaagtctttgaccttgtagtccaaggttataggatgaccaggcaacaatggattcatggttggattgaggttgcagaatggaaaacgcaaaagcctgtgaatcagcctagacaaaggcaaccaaagtctgagactgtaaatcagacaaaaccaaggaaatcaatgtctgatagtgaaacactagaattgatctacaaggcatgtttagaattgaacaagagaatgttggtggtggagaaacatttagggatcaaagaacctgatgccagggatgatgaagaaaaggaattcccagcttcgtcaagtggagttgtaagtggaaacaaaacgatatctttttaaatatatctttgatctataggatggtcaaatttgattatgtttaaatatatttttggtgttacaacagaacaaaaagactgaagaagagtttataattgtctc

SEQ ID NO: 5423 - DNA, 1603 bp, Arabidopsis lyrata
  Intron number 2 from transcript 484844 (locus 484844) deri ved from phytozome v7.0 (chr-ID scaffold_5; pos 10832372 t o 10833974 reverse strand)
aaatttcagatagggaagaagctgtcaaagagaaggtactgattcccaactctttcatgcgtttccgtgtgttcccttttagaagacaagcttttttagttgtatgcaacatctagtttagggatggtgaccttatggttcatatgtatctgttacttggcgtcatgcttaaggttcatatgtttgcatcagctaagtcagtttttaaccccctgagaaaaatgtcctggttaccatggtatctgttggtttttaatcgactttgttctttgcattgattatcttttatggtaatttctgcaatttttaacgatttcttggattggatttcgtgtcttattctgttagtctctgtggttgtgattgcttagtaggttttctcttatgcatatgataattgagaggagtggaaaatctagaagactattttagacataacttctttaatcttacattttagtaccataaggatccaattggaaagcactggttcctaactctttcatgcatttttctgtgtgtttcccgttagaagaagagatttttagttgtatgtaaaatacatgaaatagttttgagatagtgaccttatggcctaaatgtagtagtgtcatgatgatttagcttcatctttatatatccgttgcttggcggcatacctaaggttcatatgtatgcatccattaaatcagtttttaatccttgttttgttgtcttagaaggtgtattgattaccatgggatctattgtttatgaattgactttattctttgcattgattaccttttattggactttctacgattctaaatgttttcttggatagattttcgtgtcttgttctatacctctctgcagttgtgtatggaattcttcaataagatttcttcagaatgtgtttgaatagtttgcttggattgcttggtgggtttcctctgatgcataatatacttgagagaagttgaaatctataagactgtaattagacataacttactttgatcttacattttagtaccacaaggatccagttgcatttcattgagtaaccttaggttttggcttagtcctgacctcaatgtattctctatcaatttctatcttagtaatctacatcttcccttgctaatccatcttgaggctatcattatttatgtggatcaggaatgagtagcaatgctaggatcaaaagttttcatttagacaacaatgacaattatagtagctgcaaatccaagagtttaaatgaggttaggtagaacgattaggtagatcatagctttcgggactcaacatgatattagttatggtcttgtgctctttttcatctctataataagttaataacacattccaggttagtttcagataattgtttacttcatctgctcttaggacggttctcacttaggtattttcagtcaccatctacaaaaagctgatattctaaagaatccaaaaggctgcccttattttggtgtgttttctgtatcaggctcggctactattaatctgtcgttctcaggggaagcgtcaaatctaaccgcaaagttcattgttttttacagatcatcatatcacaagagagacatatccagaggct

SEQ ID NO: 5424 - DNA, 9093 bp, Arabidopsis lyrata
  Intron number 2 from transcript 489019 (locus 489019) deri ved from phytozome v7.0 (chr-ID scaffold_6; pos 8965713 to 8974805 reverse strand)
tttctaaatatttaggccgtagtttctgagttttgcacttgttagagataattaaaatttctcaataatacacttgttatctccctaatctatgttataattgaaacagtttgtcattacatatttacatttccagtaataaaaccagcctcatttgttttttacatccgttctaacaaaattcaatagcaataatttgtagcctatttataccagtgatatatatatatatatatatagtatcatatcagatgcaatctataaagtgcaaatgagtgagatgaaagagaagttgacgaaagctccacgaataactcgtgaaacttaacctactatttaacaagcaaaattgaaattgtattacatttttcttttttgaagtctttttcctttgtgatctggaaaggaatggttccccagaaagaatttcgaatttggattgctccattccatattaattaggacgccagtgttgttgtgtatctctggtaatattcttttatttcgagttaatatacttttgacgacttttttttttttttttatcatctggttttattgatgataataaacatgaaatgaaacttgagatataaatttaagccggcggaagataaaaatatccccggagttaagagcccaaacgagggaatctaagtccgcggacgaagaaaattgtttcggaaaacataagccggaggaaaacgtaaattccccggaaactaaattgaaatcgaaaaacacttaaattaccaagcacaaaatgaaaaccccaaatcgaaagagattgcaacctaagtctaagaacaatagcaacaaaactttaatcttaagaaagacgctagctcaaagcaacaaaacaacttcatcttctggaaatcctaagaacgagatttatcaatgatgccatcagcaaacccaaaaataacaaccacttcctcctaagatgagagccgacctctcgaaaccaagaaccgaagacttacaaaacccagcaagcaagagacaagatgaacctcaaccacttccggatgcgacaacgataacgacagaagcgccaccaatttacgcctagatagaaatcttcaaaacgctttcagatccctacccgatctgcaaagcaaagacaaggagcgaagcctaaccactcgaaaaaacccttctcgcgagcaagaacaccattagaacgagccagctatcattcatcgcgaaatgcaccctgaataggaaaatctgtaaactttgaaactagcatcaacttcagacaaatcaaagcaactagaacaaaccagaaggaaaccaaggctgaaccaagaagagaaagagcaagcggaaagaagaaggcttgacggagactaacgagagaccaccaccaaaccacaacggcggaatagagacgatgaaaaacacaaaagcagacacatatctaagttggggagagcaaatagactggaattattaaacgaaccacactgtggatctaacagatccggcatcaacctctctgaaggaacctcgaaacaagtagatttgaccacccttgaccgcttccgcaaagaccacccttacacaaaccgaattcaccagcaactctccaatcgaaggccaaaattctgcgaaccagacaacaacaagctaaatcaaagccggtcatcggaaggaaatggtgctttttttctctctggtttttcgtgtcttgaccactcccaatccagtgtaattcttgttgacgacttctaatcggtggaaaagtttgtacgtccactaaaatttatatttgtggatatatcacttagaaatgaatatatccacgccaaaaatagtgactgaaacactatcaatttaagtcgctcaaacatcgttgagtaagaggaggtgaagaggcttggtctatcatttattataagcttttacttaatccgattaacaagatacattataggagtttaaatttaaatggcgacgactactgcaattttgtgaaataaacacacatatcaaccaaacgtcgatctagcaccgggtttattttaagggctaacatgtttcatgaaccattccctggttaatccacaaccaaacgccttgtgcggtatcatggtcttatcgatctggtctactgcctcggcaaaaatcacgcccatacccatatgcaaatgcggttcgatgtggcaatgaaaaaaccaaaccccaggattatccgttacaaaccttaacgccgtccatccatacggatacaaaacgaccgtgttccgtaacggcggattcttcaaattaaacgtcttctcatcaattcccggtttaaatttcccatcaccgtaacccaaaacccagaaatcgtgaccgtgaagatgccatggatgaatctcactgactttctccgtcaagacgttcgcgttctggagaatcacgtcgacgactttacctgacgtgaaactgtaaatcccgctacctttcgtggtgttgggattcgccggcggtttcataatgtcgtaattatccattgcgaacttcttttccgacgatttcaaatgctccgccgattttaaaccgtatttgatagatccgagatacggcgtcaccggcacggacaaggagacgttgttgattgaccattttgtgtaattgtcgagcagattctgcgtgttgaggaggatgagctggatttctgatttctctaaagagaaactagaaagcttagaacaaaaggaattcaacaaagtataactctctttattgattgtttagaaactctcttaaaactaaacaagctttctctaaactcatgaggttacaactcaactctagagccttatttatagatagcacaactttgctaatcatattacaattaggaaaatataactccaaacctaattagaacattctagacctatcttaaactttaacctcctcattaaagtcatcttgggccttaagccttttgaagattatccaacattcacccccttaagcttcaagctagtctttgagaggtcttgaactccaatcatactcctcatttccttaaacttgattcttgctagggcctttgttagtatatccgcacgttgctcttctccgggtacaaactccacttcaagttgcctatcttcaacgcattctcgaatgaagtggtaacgcttgtggatgtgtttgcttctcccatggaagacggggttcttagtaagctcaatggctgacttgttgtcaataagaatggtagtcttctctccttctttacccgtgatctcacttaacaagtcttggagccatatcgcttgcttcgcagcttccgttgcagccataaactcggcttcacaagaggacaatgctactactggttgtttttgagagcaccatgtgatcggtgattcaccaaagtagaagacatgtccagttgtacttcttccatcatcttgatcacaattatgtgagctgtcactgaatccaagtagcttctttgatcctcctttcttgaaaactaaaccgtaagccgttgttccttgtagataccttaagatttgctttaaggctcctccgtgtgattctcttgggtcttgcatatacctacttgttactccaactgagaaagcaaggtcgggtcttgtatgcaaaagataccttagacaaccaatccttcttcgatacaaggtagcatcaacttcgggttcttcgtcttgtcccttagatagctttaaaccaaactccataggtatgtgagcaggattacaagtatctaagagcgcttccttgagaatccttcgtgcataggcttcttgttttatctcaatcccgtctttgctttggttaacttctatcccaaggtagtaagtaagcttaccaaggtcagacatttcaaactttgtagacattccggacttgaaatctttgatgatcttcattgttgttcctgtgacaaagagatcgtcaacatatacggcaataataagaagattttctccttcttccttgcgatacacggagctttccttagaacacttcttgaacttcattcctttcaagatttgatcaagcttcgtattccatgctcgtggagcttgtctcaaaccgtataaagccttatggagcttgaaaaccttatgctcttctcccttcttttcaaatccatcgggttgagacacgtaaacttcctcattgagttctccatgtaagaatgccgtcttgacgtcaagatgatgaatctcccatccataagaagcagctagaccaattagtaaccgtattgtttcaagccgagccaccggcgcgaaaacctcatcaaaatcaatcccggatttttgaacgtatcccttagcgactagcctagctttgtacttgttaattgatccatccgcgttcctttttatcttgaacacccatttaagaccaattaccttaactccaataggtttagtaactagagaccacgtcttgttcttgtcaattgaatcaatctcctcaagacatgcattagtccataccgcaagttctttagcttcttgataacatgttggctcgtcattcattgacaagagtaatttctcacactcaatgtcagctagaagggcatagtcttcaagatatctaggcgtgttcacttggcgacccgatcttcttagttgcggtggatctacaacttcttgattttcttgagcttgatcatttgtgtcttcttgtggttcttcatcattatcatcaccttgatcttcttgatgtgtgtcttggttttcgttttcgggattatccacattttcttgttgagtcccgataaacggtccatgaccttcatccatcacatctccccaaatcatttgaaacattcccggactccttgtagtttctttgtcgtctcccttccaattccaacatgacttctcattgaaagccacatcgcggctcacaacaattctcctagttgttggattgtaaagcctatatgccttggatcccggctcgatcccaaggttcaccaaagtttgagatcgatcatctaacttctttaagtgctcggattcaatttttgcatgagcaaggcagccgaatactctaagatgatctacacttggtttcttgtccttcaagcattcgtatggagtctgatttttcaaagctttcgtaggtatccggttgattaggtaagtagaatgacgtatggcttctccccaaaggtagtttggcacttgcattgcttttaaaatgcttcttgtcatctccatcaatgtacggtttcttctctcaactacgccgttttgttgcggtgtataaggagccgtcaagtgtctctttatcccattcttatcacaaaattcttgaaagtctcttgaagtaaactcaccacctctatccgtccgtaaagtaaagatggtctttccaagttctttctcgacaagagctttaaacatcttgaacttctcaaatgcttcacttttctctcttagcaaaattgtccacatatatcttgaaaaatcatcaatgatcacaaagatatacttgttcctagcaagagtagcgggtgtgattggtccacacaaatccgcatgtagtaactccaacacacttgaagcccgaaattgtgatgctttaggaaaggcttgacgagtttgttttcccaccaaacatgactcgcaaattcgtttttcactacttagctttggtagaccatagaccatctcgtttgttgacatcgattcaatggttttaaagcttacatgaccaagtcttgcgtgccatctccatgtatcttcttcgattcttgaatgtagacaaataggcttaccaattttgagattgatcttgtagagcctatttggagatctttcaacttttaccaagagacgtccattcgggtcatgtaatgttaggtaattttgacgcatcctaacatcacaaccatactcggtggcttgtcctagacttaggatattgctctttaacccggggatgtagtaaatctcggttaaaagttgttgctcccctgtttttccttgaaacagaattgatccttttccatcaatgttaacacacgatccatctccaaatcttaccttgcctttgacgttttcattcaactccgagaagtaagtctttactccggtcatgtgattgctagctccattatctaagtaccatattccttcttctcctttatccgattcatacttcttaggaatcaaattttcttcattaaggaatactatctcatgcatgtagagagctgcatccgcctcttgtgtctctaccttgttagcctcttgtagtttttgtttcctttcagggcaaaccgaagcaaagtgacctgccttatcacatcggaagcatacaacattagatcgatctttcttctccttttgttgatcttgtgtgttgaaacctccacggcctctaccccgattacttcttcctctaccacgacctctccctcttcctcgggaattctcaaagcttccttggtacccacgcgaatccgtgcttgtaaataataggtttccttgtgtatcaatgttactttctacaccacgtatacgtgactcgtatacctttaatcgtcctactatgtcttcaaagctagtattgtttaagtccaagacttgttccaatgaagctatgatttgaatatattttgattgtggtaagctgttaagaaatttcttaacaagttttggcttatcaatcgtatgacctagggctgcggattgagacgccacctccgctaaccttcccgcaaaggtatcgattgattccgagtctttcatcaccatcctttcaaactcagccattagggtttgaagtctagcttccttaactctttcagctccttgattcttagacttgattgactcccatatactttttggagagtcggtttcaccaatttgcaagattagggcttccgtgatggattggaacaataacccgatagcaacatcattcttctctccatccgttgaaccaggatctatggtgtcccaaaccttgtttatgcgtaacaagaccttcatcctcatagcccataccgtgtagtttgtatcgtttagcataggacattggatgacggtcttcgctaccttcttttggcgcggcacgggatcaacatctgccatcactcggctttgttgaatccgtgtttcacaaggcgatcgttaaaccgctctgataccaaataaagagaaactagaaagctgagaacaaaaggaattcaacaaagtataactctctttattgattgtttagaaactctcttaaaactaaacaagctttctctaaactcatgaggttacaactcaaccctagagccttatttatagatagcacaactttgctaatcatattacaattaggaaaatataactccaaacctaattagaacattctagacctatcttaaactttaacctcctcattaaagtcatcttgggccttaagccttttgaagattatccaacattctccggcggcgatagagttccctccgctgcgaagatcttcttcgtgaaagttatgctccgatcgaaatcgtcccaccgtggagtctccggtggatgtttagctgggcgatcagcttcaggggcattgacgtaatttaacatggtgagtgccggaggagtttcaggtttccggccacgaacgccgacggagatccagtacttcttggaaatagatccgttggttctgagaagaacggaataggtctcgccggaataaatgtcaatgtcgctgacgttgaacggtttgacgtaattgccgtcggcttcaacaacttcaagctcgtgttcctgcacgtgcacaatcaaccaaccacacgtgtgaccttatgtatcacgaaagaaatcgtttttcaaattaaaataattgtttgttctatagaatttcgattatttcaaaacagaggaaatacatcattttattcaaaaagaaacaaagtgaacttcaaatttctctgaaaatgtttcaaatcaaagataaacatccattcgatgatcgaatttcgatccaatccaaaagtaatccaaacatataatcgagccataattggattgactcggttttatcatttacatgttgattcgttcggttttatgttaagttctataaatttctcaatttaattactataggtgttttctaacaattcatttcaagatcattttatagaaaaaaagttgttacaaaatttaaacaaataaaatggaaagagagaaacttacttgaacggccaagttgagggaagcaagagcagtggtgctagcgattcgaagacggtaaactctattaggctcgacccgtagagtgtgagatgcgcactgatcttcgtctttccctttaaacgtgcattgatcatcttttttggtaagatgtgctgcttgtgaacaattaaactgtccttttccgttgatcaacaagctcttaggttctccgatccaacgcattggttgagaagaaagagcgagttcttgcgcgtgaatgcttttatgccaccagtcgctaagcaacaaattaaactctccatcgtattttaatgtctcttccggtgatttcactatcaacattccgtacagtcccgccgatctctgcatcccatagtgtccatggtagaaatatgttcctggctgcaccatgtcattccccacccaaaacattcatcgtttatgtaccttgtaaatgttacaaaaagaagtaactaaagatttaccttatcaacaatgaaactgtaagtgaaagtttcgccagggtttataggacattgcgtcacacccgctgctccatctgcccatgctgtcccgttctgctccataatcacaaaacatatttttttgttaattcttttttgtaaatactctttagtactaactaatggttctcatttggtaacatcttaaattgctgaatataaaccaaattgtccgagtttagttttattttccgttatgaataaattgtagaggacattgtcccctatccactatcaaaaaaaaaaaaacgcttaatggaattggaaatttgcggaaaagccgtttcacatttatgtatttaattgatttgtgggattaggcagtatattacacaaaaaaagcgattaagttaattacaaat

SEQ ID NO: 5425 - DNA, 4635 bp, Arabidopsis lyrata
  Intron number 2 from transcript 475796 (locus 475796) deri ved from phytozome v7.0 (chr-ID scaffold_2; pos 12054163 t o 12058797 reverse strand)
actattcttctcaacgcatttgttgaaaactagaaacccaatatggcaatatctatgaatggcaaaagaagaaaagaaaaagaaccctactacaattagattgactcagtcccagatggattgtttttatttgtcaatctcttattaaatccatgttagataaagtccatatcatttttagtaggctcttattattggcccaattcttgtattagttcgaaggtaaacgcctcagtagataattttcaaattattattgttgacatttataaatttctatttatataatagttaaattgataaatgaatctatactattaattggaaagcattagataataaataatcttataaagggtaaagaattacaaagaatgccattaggaattttgcattcaaagagtaaaaaaagaaacacgtagaagggtaaaacaataatttgaaaggaagtaacccgcagatcttgggctactggaccgaataaacacgcagatcctggggttctttggcgggtcgacacgcggatcatgggctcgatcctttgcttgatccggccggttgagattttggcaatctgaacaaaattaattggaaaccaaaaatgacatttacgaatttaaagatattaccaaaacaaacgtatccctttaatttcgaatacaaaataaggatagatagtaatagtaacaataattcgtttcaaaaatatccaaacttgaaggttgttttcaatcttttcgaattcagttaatatattttccaaatataacaataactatatattctatacctctcaaatcaagtatataccttaaaactttatttaaaaaatggatttgcaaatatattcttttgatctaataggtttaaccctagccgacctcttttccctataaatatagaatgactaataccattttccatactcattaagctttcaaacgacccctaaccttttgctacttcttttttaaaaatgactgcaaaagaccaatcttgctatttcaacattgctacttcgtttctcatttctaacaatggatgaaatcttatatcaccaatcttgctaacatcaaacctttcaagacaagatgcagaatccaagtaaaaatcgttcattcgtgtaaaggtgattaatgcatatcaaacaatggtagaatttttaatactttgcatctcttatttagtactttcattttaacatactagagaaaaacaaagttttctatattaagtaacccacaattagactcaataacagtaggtaaatatgcaaatctaataaacaaagtgtataaattatgatctcactaagacactaaccttcaaccaatagatttttgaatagctccaatgacaaaacgtgatagcctcctccacatttttaggttactcgcaatttatacttgacctgaatacattccatgtttaaatttttggtaatagctattgttttctaataatcgtatcagtttttcttctttgtttatccttttcttccattaacatcattatatttgaaatatatatatagaagctaaattaaatagaactcttttcagctaacataaatatactgtaaaaaattgatgggtttaaaaaaaaaaatagctcggtaaactggaattttaatgttcatcttgcttctgtagctaacgagaaaaactacacgaaatcaaattcgtattagttgatttaattcagtgaaaacaaaaatttggatattcaattgacaatagttacccgtagaagatctggtgtttcttgacaatccttggacaaggatatctattcaaacataaaaattcacagattgggaattgaggcagtaaaactatagatctgattcgataacaaccttacctctttaaagaattcacgatttgcaacactgtataaacggagacgaaatagctgtcgcaattgattcttcgatcgagccatgttcttacttttgttcggtgggttttttttttttttgttttttaagatgagacaacgattattcttttcgacatttttttttctctgaattttattgatataagacaacatacatcaacaagagtacataaagatatcttacaaaattaagcggcccattaaaagtccagtcgatgatacgttaaggaagaagaagagatatcttcactcagacacgtgttaggcattaagaagcaacaaggacaataacgattgttctaaaataaaaaataaatctgtccaaataaataaattaaaattcattaatatactaaatatcaatttatttaaacgaaaatattaaatgggtgaaggaagctttataattgggtcaacattaacattatattccgtccacaaaaaaatatctcggcttgattattgtgccagtaaattatatttccgtaaaaatgtttgagaattaccgaatagtaatttataaacaattatattgcattaccaactatttaatttataaattttaaaatattatattctttcaatttttaacatttgtataataacttttagacacataacttctccaactgttcaaattatttcttatgcaccaatctatatatttttaaaaaaacacatataaaattacttaaatctgacgctaatttatttttaaaactctcaactttcaattctaaatttaaaactaatcaaatagaaaacacaaacttatgcaccaaactatttttaaaacacaaaacataattctacaattattatgctaagtttagggtatctatactattatataattcactaaccaacaaaataatatattaatacaaactttatgcaaagacattcattaaaaaattttccccgcacgaatgtgcgggtcaggatctagtttactttaaaaaagaaatcatccaatcgtgttttccagccaaacacgtgaatcatgtttttttttgtgtggtaaaaccgcataataatgttttttcgtcgaacatgcaaaatcacagattgcgattttacaaatttggtaaaaattcctattttcgtaatttagaagtattggcgggaaagagttatttcacaatttttccagaaaaattacgatctcaaaattttggtggcaaaacataattccgtggtttttgattttggcggaaaaaggtactccactgtaatttgcgaatatttactttggcaggatacatgagttcagaaactctctttaagtgttaaaccttgagccctacgcttttctttcatcacaccataccagtgttggtctttggccaccgtagaaactccaacatcagtaacacaacacaaaaaatctcctccactgctttcaaagcaattgaaccaatttcagaaaaattcaaatgctcttattttatccacgagcggtccttgcaccttccacagtttttcctcttcaggccctatgcggctatgcctcctcttctccttgtgttgttgtcgcctgaaatcgttctactcaacagctaataatgataacttaatattatacactgattataccaatcacatattgtacacaatgagtttcctattactaaaaaaaaaaaaaaagaagtaatcgttatctatatatctatatatacatttttggatcacaattagcaaataaatcctgaagttgagaaatatttacaatggcatgccattagcattaattatttagatttgttttatttaagtaaatatttttaaatgaaattcatttctcatatatttagcaaaagtctctacaaaatatttccttatctatttaagtaaagattttgaaatcaaatatgttctcaacaatttaccaaaaatctctacacaatctttttaaaaatctcgacttatttaagttttgatttttatctgcaaaaaaaaaaattaatagtaacgagtgatgtaaaactcgggattgttgatactacaattttttctacttttttttttcatataatgaaaattattttttagggatattttctcaaaacctctaaataaaacaaagagtttcaaaagatagcttctcttttggcgggtcgacccgcaaacccgcaactctctacgggcttatccgcatgaacctgcgacccgtagtagataaaaatattattcaaaaaaaattaacaaatgatgtttaattttacgggacggggttatatggtgcaacgagtttagatcgatattaatattaaaaaatatactatggatgaaatcctagaattaaaaatcaaaatttaattataaaatcagaaacactaaacaaaataaacaatattaacaaaacaaatacaacttaaaattttgctaaataattttttagttataaaaaaatcaacccgcggtacaccgcggggtaaaatctagtgataacgtataacgaattagtcgttttatttatttaacataagactaaggttaccaaatttgttttggtttcaaaccaagcttatcattaacctggtaaacagaattaaatttcttggtcaaccgttccatgaagaccaccacttctttcatcttgagattcgccgtcgcagtttttctcgcggcggtcccgtcttgcttctccgccgacgaacagtacgaggggtgccttgcacctctgagatgtggcccgggtccgacgctgttgccaaacgtcacatatccttt

SEQ ID NO: 5426 - DNA, 1274 bp, Arabidopsis lyrata
  Intron number 4 from transcript 488319 (locus 488319) deri ved from phytozome v7.0 (chr-ID scaffold_6; pos 5966219 to 5967492)
tgcacctgcttcagtcatcacttcaaatttggtatgtaaattatacaattagctctctctcttctctctgttatcatctcatgttgtcatatatgtgtagttaacgggatttgagtatttgtttctttactatgtgaatgtaatatgtagggatatttgaatggagcttataatttggatttgtatgtgatttctactataatacgctttaaattttatcacaagtaaaaactaaaagatcatttatattagtgttcatatatacatgcatgttaatttcttggtcaatcacgtaagagagaggttagtgcgagtgtactttctcctaacttccaataatcttggaacatattctcgtgtttccatttctttccttttcttactaattaaacaatccgtgattttttttatctttaacgtaaagagggaattctatatatatttttcaaaatcagaacctttatagcgagggaaaaaaaagaagaactaaaagcaaacacattcattaaaatttaaaatcattactataaaaaagccacattcccagtatcagtccatcacatcacatccttacctctcaagatttaaaccattcaacgttagacaggcataattatggtcattgctaattatgtagtacttagatttatatgtactacaagtctacaaatatactaccatatacagtatgttattgaatgggtgtgtttataaaagtaaagttgtgttgtagttcatctttgaatctttgataactatgtattgttaacacaatcaaatccggtctctctgttttcaatataactagtggttaaattacttactaggtaatgggccatactattgtctgagcattctttaccttttacaacttagaaataaagtttagatatggagttaaatctcaaatgatttaatgaaaatctttataaatttgaccatcaatacaaaattttccaattttaatataaattttgtttattttggaattaaatcttatattacttcaaattagatagtcaaatattatttgcagagatagatgtaggtaataagataaaagctttattctttttatttaaaaatgttataagataaatacaactccgatccaattttaagcattactattatatatttttttttcactcattctctctctctagttaattactttttaaggtaaggtatgagaaacttgctttttctggtaagtgaattatttttcatcatgaataatttgtttgtgtcaatgacttgcatagagaagaagg

SEQ ID NO: 5427 - DNA, 943 bp, Arabidopsis lyrata
  Intron number 1 from transcript 490039 (locus 490039) deri ved from phytozome v7.0 (chr-ID scaffold_6; pos 21932761 t o 21933703 reverse strand)
gagagaatcgtcgttcacagattccttctttgatcttctcctaccaggtattgattctcttcactatcgtaatcttctttctccaatgttgaatttcgtttttctcgcgtcgattttttgttgcttggtgttagattctagggtttttaaatttccttgttctgaagaatttttctatatcgatttcgaagaattactcgttcgatttttgtatggatcgatgtggtcaatgttgaatctgaagcattttcatggaagtaatttcatcttacttaccttcacgcttaagatcttcgaatctagattaagtagttcaacaaattttgtaacatgcatttaggaacattttctgtattggctcgtctgattcatcagctttttgaaccatttatagactcattacaggcttagcatttagagttcttatagtttcggttgtgtgtagttcttggcactcttgaattggaagtgtgtttgttcttgtggtgaatgcgataatcgtttaccactttatcgtttaagtacctcggatgaatcttttttgaaagcgacagtgcgacacagaagtagaaatgatgtaaaaatagctttaagtaatcaactactataggaaaaaagtcactttgtgttgctacatgctaagacaagatgctagcgttagattagatatctgtttgctttcggtttctaagttttgattcgtcgaattgaagatcttgaaaatactagaagcagagaatttcaaaatctattgtgactcgttgaatattgatgtgaggaagctttcttgaaactattgacatggggatgctttgttgtcaaatattttgtgcttttttacattgtactcgcattagatcttgaggatatattgttgtttactaagttgtggatgtatttcttgatgtggatttcgtcttccaggtttttcaaactcggcaat

SEQ ID NO: 5428 - DNA, 6628 bp, Arabidopsis lyrata
  Intron number 2 from transcript 471462 (locus 471462) deri ved from phytozome v7.0 (chr-ID scaffold_1; pos 5427642 to 5434269)
cggaagctctcggtggttgagctcttcagctccaaaaagcttcaatatttcaggtatattagagaggaagagaacgacttgtgtgtcaagaaactctctgatttagcttcgagacgatctccggtgaatcttgagaaaacccttttcactttagtcggtagtatagtgtgtaggataggtttcgggttaaatccccgtgagtgtgagttcgttgatgaagatagcatcgcggatcttgtgcacaagtctgaagtggtcataaggaattctatgttttctgatttctttcccggaagaatcggttggctcatcgagtggatcttcagtgagaacaaaagattgaatagtctttactcggaagtagacactttctttcagaatattcttgatgatcatctcaaacctggaagagagagctctgatatcatcgatgtgatgatcgacatgatgaagaagcaagagacagatggaggagactctttcaagctcaccactgatcatctcaaagggatgatctcggtaatctttcaagttatctaaaattttcagtggttaaaataaatcttgcaacacagaatttgtgagtttgtgctttgttttatgtcaggacgtatttctagcaggagttggaacaagctccactacattggtatgggcgatgaccgaactgatcagaaacccgagagtgatgaagaaagtgcaagacgagattcggacaacagttggggataaaaaggagagaatcacagaagaagatctaaaccaacttcactacttcaagcttgtggtcaaggagacattcaggttacatccagcagctccacttttgctcccaagagagacattgtctcatgtcaagatccaaggctacgatattcctgcgaaaacacagatcatgatcaacgcttacgcgattgcacgtgatccaaaactatggacaaaccctgatgagtttaaccctgataggttccttgacagctccatagattacagaggactgaactttgagcttttaccgtttggatctggtaggaggatatgtccagggatgacaatggggatcgccattgttgaattgggattattgaattttctttacttcttcgattgggggctgccggagaaagaagaagccaaggagatcatcaccggaaatgaagttgctcttgacctttttcaagtttttctccactgaatatatggtttggttatggaatgtttgtactatacactaagcttgattctaaatcaataacactaaagatagtagacactatggttaatcttccattattataaagggtcgttctgaaatgtgtctaattaacttaactgtatttttgaaacatagtaaaattggtatttgataagatttcgttgtacagaattgtttctaaaactgatataaaacatagagtttcccaatcattcttttagaagaaatttgttgttttaaaagtttagataataggaaaaatagttcctcaaataacattgctaaattcagtttcgatggatagtcagctttctatcaagattctgcaaagtaaacaaaacttgcgttttgtttcaaagcaaagagtatgaaactgtttttaaaacgtcgatatatcgaatatactacgatgttcaaatcaaaataaaaagcacatgattaatttccagtaaaatttttttaacaaaaatggagttccatagttggtgacctaacttgttgtttggttttgaggatggaagtgttttaccattgtggtgctttctcggtttggtgttttacatttattataacaagttaggtcaccaaattattataataaatgttctaataatcatttacgcatttagccgtcgcaaaaaaaaaaaaaacaaaaaaaaaaataccatttacgcgcgtgtgagtgtgtgacattgtattgaataatcttcaaattcatactataaataacgtcttcaagggccgctaatagtcatcagtatcacttccaagtccaagaaaaaagtttttttaacaaaaaatggcgatcttgatctatatgtcctgggttttgttgcttaccctcatttctattatttttctaaagaagaagaaaaaccctaactctaatcttcgacttcctccgggccctcggggtcttccgatcatcggaaacttgcaccgtctcaacggacttcctcacaggtggtttcatcagctgtcagccatatacggacccgtgatgttccttcgtctagggtttacgccagttgttgtgatctcctcaagcgaagcagctgaagaagttctcaaaaccaaagatattgagacatgtagtcgaacaaagttgatggcgacgggtaaactctcgtacaactttaaagacatcacttttgcaccctacactgattcatggagagaatatcgtaaagtcgcggtgatggagtttttgaaccctaaaaagcttcaaactttaaagttgataagagaggaagagatggatttcgtggtgaagaagatatccaattcggctcccgtggccgtggatctaagcaagatctctttctgcctcgcggccaacatcttatgcagaacagcgtttggacaaaacttgcgcacgaacaaggttttcgacgaggagagaatcgtaaagcttgttgaagaaggctcgatcggtagcctcaggttgtcttggtttcaatgatttctttcctggtaaattagcaaagtttgcagattggttgttccgaagaaacaaggggatactagagaaaatgtttaaggagcttgatgagttttaccaacatgtgattgatgatcacttgaagtcattagatggaccgaaaagtaccgatccttctgcggatatcgttgccgggctgctgaatatggttgataaaaatggaactggcaatttggatcacgtcaaaggaacactcatggtaattaaaaccttaattctatcatcattcaatagtatttctttatccttttttttttggaccacatgtttttttcttataactatatgtaaatttagctactctacatatacatgtgttaaatctgtgtgttgatcatgcaggatctttttctaggagggatagatacagtggcaataattatagtgtgggcaatgtcagaactcatgagaaacccaagagtgatgaagaaagcacaagaagagattcgagctgtcctggaagtaaaagagagaaaatcactgaagaagacgtagataaagttgaatacttgaagctcgtgatgaaggaaacattcagattgcatccagcagttccaagtatacctagagaaacaatgtctcatcaaataaagatccaaggctatgatatccctccaaacacgcggatccaactcaacgtatgggcgattggacgagaccccaagatttggaaaaaccctgaagaattcattcctgagcggttcattgatagtgctatccactacaagggacaaaactatgagttgttaccctttggttctggtcggagaatctgtcccgcgatgccaatggccagcaatatagtagaattggggctcttgaatatgctttacttctttgattggaagttacctgatgggatggtcggcgaagacattgatatggaagatgctttcttgatctccttttacaagaaagcacctctcattcttgttcccgttaaacaccaccattaatgggatcgtcacaaacagtcgtcattttaatgtttgaaagcttcaacaccgttgatgcttagcttgtttgcttgctgtatttgtatcgattttagcaaataataagttgcactacttggttaactacttattctatttcttattatgtgaaagatttacttctacaatgttaaaaggaactcaatcctcagtattcacccaatatagaagaatatttggtttttgttgtgatggaggttttaaaaaaaaaaaaaaataggaatgtgaatatatatcattaaaatgaagactacatgcaacatgccaacacgtaagagcatctccaatggatgcattatcaggttctctttgtaggttctcttgaaattttttttgaaaaataaatcaaaactgtgaattaagaagagagctgtctctcttgagagaaatcttgaataccatgagagccgacgacgtggccttatctcagccgtcgattgattttgatcaaaaaaaaaaacgcgtaaaaaaaaaaaatgagagtagccgaaatatatcatttcccgactcttctctctgtttctttgcgaaggcgatggcgatgccttttctccgacgattgaggttacgattaaggccgccggcgacgattgagggaagatggagaggccgcaggtggattaattaaggtcggaaacgttatagatcagagattttcgtttctgatacgttatcgatttccggaatcctttctaatgaattgatttcaaatttgtatttttggtagaaatttcgttgttaaggatctctctttcttgttacttgagatgttcttcgatggcttagttcttggtttgaaactcattagttcttggctgagcaattgttttatggcttgcaacttaaggaacagagaccaatgaagtaattagagttctttggaatatgttttaaatggtagtcaaggatggaaggaagttcggtttgatttcaatttgaagatgtatgaagtcttggagaagtcatctttatactgaaacttgcaaggtttgcaggcaaaggcttgctttttcatgtttataatgatggcttctattgcaggagaacgtaatgccaactcttaccatgactttgcaacctattactttccttatggtagaacttatgttaatttcaaactttgaagacagtaaatgctggtgggcagccaaaatctgaatcatatgacttaaagaaattccatgttggagatatgattattgggagaatcaaacgtgtggagccctatggcttattcattgacattgatcaaactggcatggtaatgatctagtttcatgctgcaaggtaattccttttccttttagtccgaagtgagtgtggttaagatttgctgcaagatttgttgtcactttcttgtactaagctctcattgtaatacacaaaatatctctttgtcaggtgaaaaagaagactatagctgcaagacggagtcaagtgaaaatgattatattcccggaggctaaccggaaagattttgatgagctggcggaaaacgtgaaagaagtgcttgatggaaacaagaggtatatgatgctgatctactaaagagttctttattgttgttgttgttacaagaattaaaaactcttatctgtgatgattggctatgtttgcagaaatgttgaggctatcttttagacttaaaaactcttatgtgtgatgatttttttcagggattgtcattttgggtctcacacataaaaactatagaaagtaaagcaatagtgtagtatgtgtgtgctttgtctaatcaaagaccgatcaatgatatgtctgttcaattttacacattgaagatggagaagtagcagcacacagcaagaatcgtttgacatggcaacatggtcctttgtggtactcactgcttctcctcaacttcacggccattatcactattctctttgatacctttgtggtactcactgcttctgctaagtcttcttccttcctcctccaatgatgatactgttgactacagctattctgctatataaaacactttctacattccacttgcatttgtattgccccttgtactgtcaacactccatttatatgtgatgcatttgtagcgaaaaactttgtgttttacgagtttgctacttctggtgtgtaaaatatatgatattagtgatgaatttttctttattttcttttcatattgctatatatcacacaaactagcacaaaacattacatcaaccacaaaaccatgacttgaatccatatcttttttttctctacataaccaaaacacaaaaatttgatgaagtgtgtttatcaagacttaattaaacaccaaacttcacttgtctcttctttatccttcttttcaaaaattcaaaacaccaaatcctatgtttttatatatttattttcaattttgcaataatatttttcagatttatgaaataaaataattaaaaaaataatttaatttttttctgagaactccacaaagagagcctaccattggactttgcaagattaacaaaagctctcatctcataaatttgaatattttaatcttaaaaaaatggtgagagcccatggaaggcccatggagggctctcaccattggagatgctctaagagtttggaatattttataaataccgacaacaacccatgagctcatgaatcaagttgaccgtaacgaacatttataaaaacaccccaagttgtttatttttttaagagaaacaatttggagtaatatatctaaattaattgctaagctccagctcttcaactaaaatacaaaacccaagagttagaaagagatcaaaaaatggtattcttcctctgtttcctcttcctcttaccccttatctttatcttcttgaaaattttcaaaccttcgaaatataaatggaagcttcctccgggcccaccaaagcttccaatcatcgg

SEQ ID NO: 5429 - DNA, 5838 bp, Arabidopsis lyrata
  Intron number 3 from transcript 492279 (locus 492279) deri ved from phytozome v7.0 (chr-ID scaffold_7; pos 7126081 to 7131918)
tgtgatatatacgacaacggatcatggcttcgacatggaggagacgttagtggaggcttttgtgacggcggaacagagcgaagaatcgatttatatagacgaggaggcaatgtttgggatgccgagtttgttggctaatatggcggaagggatgcttttgccgctgccgtcagtacaatggaatcataattacgatgtcgacggcgatgatgacttatcgttatggagttattaaaaacctatgtttatttccatttttctaagatccttttctataatggtttcttcattttttttcttataacagattaatgagtgtaaaggattcagtaagtgtggatttttcttaaatgcaagtatttttaagttcaatatataagcaacaaaaaagttgcttcttataataataataataaaaaaaagaggttcatcaacaataggaacagagaggataggaatgtcattaaaataatgacggaaacatttgtcttaaaaacaaaaaatcagatacataaataattaaataattaaacaacctctctcgagttccaaccgtaaaaaaaattaataataattctagatcgaggctggatcgcggtggcttcctcagcatcggctccagcctctccttttagctttaatctcgtctttgcttctagtttctttgttggtatggctttgattggaggtacggtttgccggttttttgccgggttttggaattagatgtggcttgcgatggttgggttcgccctttgttggagtgtctccagtcgtggccgcctcctggtttccccgttatggccaattgtttctcggtgaggtcgtttctcttctttcatggtgattgcggtggttagattgagtttttgcgtttatccggttgctaggattgtgtagttggttagtttgcagaacttttggcttgcgtctggggggtctcttgggttgtttcgagtttcgattttggatttgtggaagcggtagttgcgggaagatttgggttttgtggttacggagaagatgttagtaattccggttctggtagatctacggtgtggctcgattaataaggtatcttctttgcttgatcctacccttgttctgttcccgttcttgtgcatctcatcgttttgaagccgttagtgttgcctggctgtgtttgcgttttatccgcccagcctttgcatctcctctcctcggtctactcgcccagcctttgattcccataaggcgcgatccctttctaagcataggcttcacattgtttgttgatatgttagtcttcaaggtttgcatttggcgcttctcattgttgtggttcgttgtggttgttagttgtctcgttccagctcagttgagtttggtttttcgagaggttaggctacgctccttgtccttgcgttgtaggtccggtttgacctgatcgcgttttgaaggcatctacctagacgataaaaggacgctgagtcatcgtcgtcgcatccggaagtgtgttcgagtctttgcttgccgggttatgatagctttggttctagtttcgagagatcggctctcattttgataggaggtggttgatgttatctttggattggctttgggcgtccttggtaagtcttttctacaagtgcttcaggagaagagttcttgcttcttgagactagtatgtttcttaaggttttagcctagttgtttatgtttttagtttaagggttcgtcctctttcgttttgctttgagtttttctgttttatggttatagtacttctgtttcccttttatagggcttagactccggggatttctcgtttttcctccggctattgactctgaagacttctactgcgtctgtcggctttagtttccctcttttgggttttagtttccctcgtttggattgtgtatccaacaagtttatcaataataaaattagttgacaaaaaaaataataattaaacaattacacataaaaataaaaatagaggcgtttcaaatctatacttatccaccaaaaaatgtttcctaaattagagtgtaaaaccgaaacaacacattcagcaaaacgtcaataaacagaaagatgggtcccacaagagagcccttgttccgtagcttcctttctgttcattggccttggccccctacgtggctcagctggaatcaatgttacgtcattttcaagttttactttctatttttataataataccttatttgtcgttttctgtaccttaaccactctctttcgacccaccactctttgtcgtcttgtttctctgaagatgtcaattgtcaattactccgtgagacacttgatagtgaaaggtagcgagagagaaacgtttgtcgtgcagatattttatcgctgttgttgagatttgtgatattttattgctactactgaaatttgagtgtgatgtattacttgctactgtattggtctaatccttggcttaaaccagttacaattttttgtttagttttatttaacttaatgtctctacgctagcttaatttgttattattagaagtaattaaacatttgagcttatttatatagtggttgaacaaaaaagagtaaagaggaggaagaagctcttggagaagaagaggaggaattcgtcaccaccactagagaatggagagaaattagactattgttagagatactgacaattgtgatcaattaccataacaaaatgccttttttaattaccatattttccttttgccaaatttacccaaacatttgtcctattttgtctatcatatccaatacacaccttgccagttgtattcacgaccatgtatatttatgtactaaatattctagaaaatatactatactattatttggggagtagaatttacaattatccttaattaactttcctttttgtaataatttacttaagaataccattagaaataaaattttatagagtaaattaattcaactcattaaggataaacaagtcaaatattgttttatgtaatttaatttaattaaaaaaacgaaaatctattattaatttctttaaaaagaatgaccaatcaaatgaacatataagatttgatatctaacttaccgtattaatttgttactaatcattatacttcatctctcatctttatatgattctatttatataaataaataaattattatatcatctatataataaaaaaaagtaaattttttccgcatataccaagatttgaattttaaaaaacgaatataaattattcaatgtatgaaaaacaaatttaacaggtcaaaaattcatatttgagtattatattctttttttgttaatatcatcaatatttaatagatcaaaaaattatgaagtataaatactctaatttgattttttgaaacaaatatttataataggcggcgggttgaatataatatattatatgatgaaatgagttatgatccttataactatttgaatatttatatttaatttcatatcattttaaaaaaaaattcataaatttacatattacaataaaaaaatttaaaagattttaatttggaacattctaaaaaagtttaatttaatatattaaagaatatcataaatatttaatagattaaaaagataaaaaaattataaatacattaatttgattttctaaaatgatatgtttaaaatatttatagtaggcggcgggttaaatgtaatgtattatatggtaaaaaattatgatccttataacagacgacattttaagatttatgatgagatgagttaaatagggtttgacacttctaaatatttgaaaatttgattctgcaagcaattttgtattattatataccaaatatatgttcataacatatttgattatgtgaataattggtaaattctgtaattagctcaaacaaatctctatttcaacaaccaatgaatcagaatttgaaaaaataatttcctaaattaattcaaaataatagctaattttcttaagtaattcaaaataatctacgtttagatgcgattcacttatgatattttgatttttgatctaactaaattaactcattgttcaaacaatattattttttttaaaaaaataatcttattttccgttttaatatcttaaaaaaccatatccataattgaataccatagagaaaaagaaaatatattcattctaatattatatatagggactgacaaaaaaatattatttttgtacttactattataatatatcataactttattctaaaacataaaatttataaattttgaaataaatgaaatttaacccgtattgtagtacgagtgatgatctagtactaatttatgcgattaaaattatgtttccaactcgtatcacaattttttttttctgtcatttgcttttattgatataatgcgaagattgatacattgttggaataaataagccagcgaaaacacgatatcccaatatctaaaagctgttttttttctttacgtttaagccaacatgggttctcaatatatttttagaaatcataataaaatttcatagccttcatgaaatcttaggaactttagcatattttttttttagacaatatacaaaataaaaaagtaaaactggttatttttcaagattttacgggaagtgttgaattaaatttacatgcctactagtctaccaccaaattttgattaatttagttaatcaaactttttaatgttttaattagaccaacaaatatatatatataaatattagtagacaaatatctactccacttatattctagaagtctttgaaatacgttatgccaatgaagaaaagacagaaagagcattttaaaatatctcatttcacaaatcttttatctgtatgtctattattgtatagacgagcaactattataaaaatttgttttttcatggaaaagtatatttaatagactaataatagtaatggttgtcgtacactagtataacagcagccacacattcatacaataagatttttcttttttgaacaaactcatacaataagattaataagttaaaaaactcacaatggtcataacgcgggaaggtcagaaacttcccaagatgggtcaaaggacacatggcagactctgagggattgacagcctaaatgattacaaaaaccgtgggatcgcttagctgtgtcttaaccacgtggcattcacagagacagaaactccgtgttcgacgcccacaaatatccaaatatcttccggccaatataaaacaccaagctcccactccaagaacttcaaacttaccagaattagaaaagaaagagagagaaataaaataaatattttatcaaacccatacaaaaaagacctagatcatctacttacactctactcgtaaccttatccagtttcttgaaacagagtactgatcaatgaactcatcattttctgccttttctgaaatgtttggctccgactacgagtcctcaggcggcgattatattccgacattggcgacgagctgtcccaagaaacctgccggaagaaagaagtttcgtgagactcgtcacccaatttacagaggagttcgtcaaagaaactccggtaagtgggtgtgtgagttgagagagccaaacaagaaaacgaggatttggcttgggactttccaaaccgccgagatggccgctcgtgctcacgacgtcgccgccttagctctccgtggcagatcagcctgtcttaatttcgctgactcggcttggaggctacgaatccccgagtcaacgtgcgccaaggaaatccaaaaggcagcggctgaagccgcgatggcttttcaatatgagatgtgtgatacgacgacgacggatc

SEQ ID NO: 5430 - DNA, 21998 bp, Arabidopsis lyrata
  Intron number 2 from transcript 896296 (locus 896296) deri ved from phytozome v7.0 (chr-ID scaffold_5; pos 1720162 to 1742159 reverse strand)
ggtttgtcgttgggagacaagaggtactttccactcacactcactaaatcttcttcttcttcttcttgtattgactaaggtacatatactttttttggcagctatgaagccgattttgtcaaggatgttgttaaggcggttcggactgttgtagcagaaattggtcttgaggaagaagagaatccatttgggaaaaagaagagaaaggattgcaaatgtgaacttcctgatttcaagaaaagcagaaccaaaaagttgtgacgtaggaaattgttctgcaatttgtatggatagagactgctttttttagttgtgtttttaactgaaggtactttaattttctctaatattttgcttattacttttcaacagattcggattaatcaattaattaagggcttatgtcaccattctctgtttcccctgtatcaatctttctcttgaatacatatcaatatttgaatagctaaaatcgagtgtgatatgatttgttacaaaattcctcaacttctttttttaagtttgtgttatatattcattattcactgacgacatccagcttgagatccaacggtaatcaaaaagatgactatcaatctataatctgctgagcctctgttttttggatatgtgacgttttagtggtttccttgtgattccattatttcaagaagcccagaaggagttattccgttaaggctgctataaaaaagctagggatgaggtagaatagaaagacaggttgattaaattttgtaacactcagaattttgattctgcttttagtgaaaatctcatagacatgccaagagtctcgatcactaaaagataaaatttgatcgtagattaattaacatacgatcttctattatttgagaaaaatcgaaacatataattcataagatagagagcctaaaattacattaaagacacataaataagctattgaatgtttttactaaaaatgagaccggaggcaaaggtttccatattccctaacgtaggcacgggctctgtggaagccatagagacgatgagcacgtgtgctgaggctcacccttattagaagccgaatcactgaaggatgctaacgaccattatactaaggaagtcgacgctttcctccagtcgaaatcaaaggaagcagatgcgttgttgacaaaaggagcttgcaaagaaggggtcgacctccttagtaaaatgtttgccagcatttttcagcacctccaaaaacggctggtagtaatcaaagtgagcctccatacactcgcatccggattctttgggaaactttccttgtctttcttttcttcttcccagctatcactccaagccttgactgattctttgcaagctcctttttatgcttatggtttctttctttctttcttgtttagggggatatttgatacaaatatttcatatttcgtgattaaagaaattagatagtactttaaatttacgtttagttataagtaaagacgagctttcgttggagatactcatccataatagagtgtttaatttggaggttttgacaggtcgagtgaagagaactttctctttggaaagttttactcttcttactgtattctactgttataataaagattttagttttgatttcggttctatctcttacaatataaatatttggatttgcaaataaaaattgtgagcggttccttctgaattactcttccttttttatatgattcgagaactctaaaaggcatgtttcagtcgtcgtcttatttttttttattttaattcaaagttacaaattaaacaaaccaaatgacacataattaagtgtgggatgtcaacacacacatgcaagatgccacatgatcccttggctaccaaattttgattaacctaataatcatccctaatgaagacgttggctaccaacctaaggtgtatacatatcctctcttactcttagtctcttgacactaatctttgcttaaaacgtaacacatgataaacaatttaaaaaatctcaactcaatttaccactctttaattcatgataattttcattgttttgagttaagttttgatcaaacagttttacaaacgagaaaactcgaaaatgtaaatcaatcataattcaacaaaacttaaactacaacttagtttttttgaaataaatcatacatatgattggtgacattttttgaattaaatgtgaggtacgaccataaagagtgtgattgctaacatgagttaccatcttataaacacatggtaactcatgttagcaatcacactctttatctaaagccgtaacagaaatttgagttattttagaatgttgagatgcatacatgaactagaagctgtcgttagagatcctaaaaaagcttgagcgtatcaaggaaactttaccctcagaagacagatcattacggcttattcactacgtaacaacccaaatctcaaaattcgaaatggagagatcatcaaaaatcatcacaaaaagttttttacgctttaaataaaataagttcagttatatatagctccctaatggtattttagtcttaccatagaccatagtcaatcaaagacatgagcaaatgagtatttgtgtgtacgtgtactagttagtggatgagtttctttttctcaaagaaagtattcaattaaagtgcataattgtagaccagagctgcataattgtagaccagagccaccgataaacaaaccccaaactcaaccacgccatcttcaagtttgtggaactattcagtatttgcatttcttcttccctggttggtaccaccaaaccaaaagacaatatataacaagtataatcaagctcatcatatctctatcttcaaacataaaaaaactaaggcatcaaaaaggtttgttcttaccaacgttgtattggcccagtggtaaatctcccaggtggaggtattgggttcgatgaccgttgggagagatctcttctccaaaggagatgaatttaacctggtgtgggtcacgcctctggaaaatgtagggctttcgagcttgaacttccagatattaaaaaaaaaaaaaaaggtttgttcttagtctatttacctttcgcgaagataatacatctcttcgttgattaatcgaacttaattaacttatggttttctagaaaaccataagtgacaatatgtaaccctgtggttagataattgttaattaagtgtaagaagacatgcaacaatgtgttgaaagaaaaagaaaagtaaagaaaagaaaacaataaatttaattttttttaagtagataaaactttgccaccaattaattatctactttaaacctaggatagccaataaatgatggtatcaaaactttagtcccagaagaacactgtttagacattctctgtctgaacgaggtataaaattaaggctcttggcgaaaaaaaaaaaaaaagattttgttaaagttacaattgtgtgaaaaacagctgtgtgaaaggtttcaaagtgctagtgaaagtttctctttaagaaaaacagttggcaaaaaataaataataataaaaataaaataaaagttagcaaccaatatttttgggtttttaaaagcttgttagagggaagacacgtggtattgaataacctgagaaccctaacgatgtcagtcttctctcccgctcaagtgtgtcaagtttttttttaaattataggggagaggaattgcgttacagcttcgtgagccacctgattgtgcatttgaaaggaatgaggtaaacgtcttcgtagacaaatacgagctgagaggcaaagacctcaaaaatgtctttgtaaggatcgaagaatcgaggatcgcgctggccatcttctctaccaggtttgtactatttttttcactctatgaaccataaaattcaagaatttttcatcatcctttagttaaatgtataggtatgcggagtcgccgtggtgtatggatgagttggtgaaaatgaagaaacttgcggatcaaggaaagctcctagtcattccaatcttttacaatgtggagccagaagacataagaaaacagacaggtgagtttggtgacaacttctggactctcgcgaaagtttctactggagatcagatcaagaaatggaaagaagctctcgaatgcatctctgacaagatgggtttgtcattgagagacaagaggtgccttcctctcacactaactagatcttattcttcctcttttatgaataggatgtttgatggactaatgtatacattttttcttcttttctttaacagctctgaagccaattttattaagaaaatcgttaaggaggttcagaaagttacaaaagcaattggacttggggaagaagaaaaacatcttagaaaaaatgaagagaaaatgaaaggtcgggaattgcaattgccaatacgatctctaatttaagaggagcaaaaccataaagtaatgacgtaaatgatttttgaggttttatttttttatcaaaaatattgattttctgtaaatttttatcaattaatgttaaaatactagatttgaacccgcggtacaccgcggggttataattattttttaaaaaatctaaatataattatttttgtttattaatagagagtatactataatatttcgacctattttataaatgtaccatttatatgtctatattaatagttttgagtatattaattatgttttaggtttaaatggtatatctatatatacacttaaacaacatttggttttcttcttcttcttgcctcagtttaggagaaagatttttcttgcggtacaccacagagctattattttttttaaaaaaaattccttccttaaacttccaaatctagattttaccccgcggtacaccgccggtcgatttttttataactaaaaaattattttgcaaaattttaagttgtatttgttttgttaatattgtttattttgtttagtgtttctgattttataattaaattttgatttttaattctaggatttcatccatagtatattgtttaatattaatattgatctaaacccgttgcaccatataaccccgtcccgtaaaattaaacatcatttgttatttttttgaataatatttttatccactacgggtcgcaggttcatgcggataagcccgtagagagttgtgggtttgcgggtcgacccgccaaaagagaatgtatcttttgaaaccctttgttttgtttagagttttaagaaaatatccctaaaaaaaatttttattatataaaaaaaaaagaagtagaagaaattgtagtatcaacattcccgatttttacatcactcgttacaattattttattttttttgcagataaaaatcagaagttaactaagtcgagatttttaaaaagattgagtagagatttttggtaaattgttgagaacatatttgatttcaaaatttttacttaaataaaataaatctaaataattaatgctaatggcatatcattgtaaatacttctcaacttcaggatttatttgctaattgtgatccaaaaatgtatatatatagattgtgaactatgaaaaatggtttggtatgactaaataatgcatttataactaaacattaaatgtatttctaaattagtgtgaaaactctataaccgaagtcgtcactcgtagaggaatctcagagatcgtatgtcaaaatcgttcgtcttttaactccacaaacgttttcattttggtcaatgaataaaaaaacaatcgaattaaaatagctccaaatttgaccgactttgaaccgcatcgtgaccgtgatatcactacgcacttaattattttgtaaatgacggctttaaataacgtcgccagcacactttgttttatcctttttgatgtaagagcttctccatccatccgtacttccgtaaaatacgatggaagtttttcaaaaaaaaaataaatattatttaattaattttttatatattatttttttaataaataaaacaatatatttataatacatgtgcagaaactttctcaaaatttctcaacacagacagtatgtctttcaacagcttaagctgttgacaaaaaaaaaaagacatcgtgtctctctcccttcatttattatatattttattaataaattttagtagatactctaatatttgggatttttgcaaaatctaccacatttttcaaatttcttatcatctctaccacaattgagaatgatttagaacttgtaccacattcatgtggtattgtagtatgaaaaagacggttttgcttttggctgatgtgacagataaaatgtaaaatttagggacaagtatctagggaacaaaaaatctattcggggacaataatcaaacgaaatataaacatcaaacaaaataaaaagaccgcaattaaagtttacatactaaaatccaagaacaatgaattaaaattgagggacaaaaactagcaaacatgcaaaaataagatgaaattatggagaaatttaaacttcggggacaactgtatgtaaacttctttttgtgtcttcaatctatgaattttgtccccgaaatttgagcaaacaaaaagaagggcaaaatggtcattacacatcttaattgtggtatagatgctaactatgcttcgaaagtggtactggacctaaattttaggccaaatgtggtactcaatcttttcccctaatatttcccgacacacatttctatataatattccctacttttaatttttcttttgtttaaagtgattatcccgtttgtagattttatacttgtcattttttttttcttttggatagagattttgtgtagctttgatactttttcttcacatttccattgattcacactacagattatagagtatatattgttttatatcgatgaaaaagtccttatcctatcttttttattactctccccttcttcaatttcttattacattttgttttcatgagacctttcaatcttttcacatctcattatatttttttttctccacgtgacattcccatataatgaccaattttctttaattacgtttactcaataccttaaaacacatacaacggcagtgctgtagtcaatacaagtcatagatcgttcaaagtcatagagacattaaagataactttgtcgacacccactaaacattaaagaggactcacgcccaaatatttagagcatctccaataatattttcctacaaaaaaaaaaaaaacaatttgaaagaaaagtagaaaagagttttcgaataagaactttggatatcttaactaaaacccttctttacagttgtttgtttttaattggtttatttttatttaaaaactaaaattaaatatataatcacgtatagtaaaagattctatctgtttcaaaatatagtatgttctagagatttttttgtttcagaatatatgatattttacaagttttaatgcaaaatttttgaatggatttaatattttgtgactatttatatactatagtttttttgtaatagttgattttcataaaaatcaaatattaaaggataatttttttaaaaaaaattaacgatgcatttttaactaaaacatcatatattttgaaacagagagaatattaatattttgatgttaagatacttttttgggtatgtaaattattggtaatgctcttagataacaaatttaatttttgtggttattactttaaaatcgtaaggtttcatgatgtttcaatatattttaataaattcgaatctttttcatatgtttttcttactatcaaaactaaaaaatagtaaaatcatgtttcaaaatgttttaatatattttctgtttattagaaacaaacgagtgagtacaaaaagaacaaaaagaaaaacttattctcctttcgtttctttttgtaagatgatttggataaaaatatatgtatcttcaaaaatttattattttatatcaaaattaaaacaattcaatcaatcagtaaaatcattgcataatataaatgattactccctctgttttataatataggatgttttacaaatttttatgtaacttttaaatatatttgaatattttatgaccatttatagtttgcagtcttttatatcattggttgaattttcatatattaaatattaaatgataaattttaatagagataataattttttaaagtatatgtttttacctaaaacattatatatattaaaacggagggagtataaaacattaaatgtactttaatttaacataaaaacctaaaaacatttaataaataaaataaatataatttcttgaaacaacatataaaatgaaatgataggaatatagtactccctccgtttcacaaagagggtcgttctagagttaatgtcgttttacattttcaatgcaacttttgtaactaatttctagatttgccccttatgcaaaactaaaatcctttgtatttaaattattaggaatatattaaataatggtatatttatatatttaacttatttttttatttgtgttaaatgtgtcaaaatgatatttttgtgaaacagaaaaagtattaaaaacgaactaagagttacacgtgggaacaaaaggtttatttaatcgtcaaaaggttttttttagggtgggttagcggatatgaagagacgtgcggatgaagaaaagctccaaatcaataaagtggaagcaagaagactaggcattctagttcactgttcaatttcattggttttacgatttatctgagaaaaactgtgtaattcagtttggttcggtctgtttttttaaaaaaatttatttattttataaaactaaaactaaatagattttactaggtaaaaattcgtgccatacatgataaattttatgaacaggttaattttataacaaattatatagattctattaccttattaagaatttctatacgtttaaaaaatatactatagtgtttgagtttgattttataacatgttttaaacacaattcaaaaatcaaaccgaactattatatttattttaataatatcttttaaacataattaggaaatcaaagtggaatttcttccaaatatacgggtcaaattggtctgagagttttagaaaattgaaatttggcaattctagatatatattttttggtcggtggtaattctaaatattagaataaacttaggtatgtttggttaatagtttaagaaatatggggataaagattaaagaaaaatgtgtttggcacgtagtggaatagtaaaattaaaaaaatattaaaaaaaaaaaaaaaagttgaaaaaaattgtaagattatcacgccagtaaaaaaactctcttttaatatatagatcgatgtcactgtcacacacaacaattgatggatggctgctcttgtaaccgatggaaccacgaaaatttggtttgtctttttttctctcaaagtgctctgttttctagattctcctgtggtatgatactcttgtttgatcgtcatgagaattaaatagtgttgaaataagaagcctgagctctagacttaaattcagtatgaaatattggaggaacttgtgggttctggtgcaacagtgcatagtgagacatagcacaaaatttgcctaaccaatgcatgattatcaggtggcaaacaaaaacaattgctgaagatatatcaaatgatcaggtaaagaaatgatttatatattttgaataatactataatataacaatttttataactttgattttttaatctgattccaggaaaatgcccatacaatatagctgcagactgattttcagttatagtagtgtgtattgtaataaggatatgttgtattttcttcatagttctgcttgtatattaacatggggaaaattccctaaaaaaacccacttatttaatatttgccacaaaactacctaaacttttttcgttgccaaaaaaatacacaaactaatttgggttggaaataaaaaacacgatctaatttttttttccgattacctcccttcgccgtaacggccgtcaacgacgttaacgaaatcatcaaacgtttttagttttatttacgaaaaattctagaaaaaacccaacttatttaatatttgccaaaacaatacctgaacttttttctttgccagaaaaatatacagatcaatttaaagttgaaataaaaagtacgacctattttttgttccaattttacccactttattataacagttatcaacatgttaaccaaatagtaaataccgttatttttctcaatttctttccacatgataaataagaatggctaaaaaaccgatgttatccccttataaaatcaaaatcgatataatacttatattaaatcctagttttaacatacaacatctatctatatctgatgcgaacaacaataaattgaagaaattaagaagaaccttcagctaacaaaatgggtaaaatttctttaatttacgttcacatatgatagattgatgaaaaaagcattagcaatttagaaaaaattacacattaataacatgattttagttgatattactgaagaactgaaggttttagaggatttctttaataagtcaagttttttaggaattttccttaaacaaaattaaaagcatttgacgatttggttggagaaatccttaaaagaaaaacagatcgtgttttttatttccaagttaaattagtctgggtatttttatgacaacaacaaaattcatgtattttttggcaaatattaaataagtcggggatttttttaggaatttttccgtaaataaaattaacagcgtttgacgatttggataacactgttaacggccgttacggcgaagggaggaaatcggaaaaaaaaattagttagtgttttttatttccaatctaaattagtttgtgtattgttctggcaaccaaaaaagtttaggtagttttctggcaaatattaaataagtggggcttttttagggaattttacctattaacatgtaatatttggataattgaaatttttgtatggtcaaattttcaaatttttttgtaaaatgtactacatataattaataattattttttctaaaaaatgttgtaagaaaaagaaaatttgtacgaatagaatcaaaatgtagatgcactacacgtcgattataaagtcaaattcaaagcgttgttaaattgctgaaaaccgacgtaagtaaaataccgttaaacatgacgtcgtttgtttaagtgacattaaaattttttacgtaggcccatgatagataagacggtttccaaaccgacgtgaatatttttgcttcggtctataaccaacgttaacaagtaatataaccgacgtcaaaagccttctttcttgtagtctagaggatggatattcatcagttcagtttgtttttggttacttttacatttgttccatttttccaaaaatatataacaacaaattgctgcaaaacttgaagtcttgaacacacggaaataagatgttcttcgagtattttaggaaaataacattagattttgtgtcttgaacagtatcatcatctatttagcttctgttaaaccgtaactgcattccaagtttcgaacatagtatcaactaagatattgtagtagatgaactcagccccggctcaatatatttgagagccttaggacaaaaaaatttttttggcctattactatatacaaagagaaaatttacttaaattttaaaaattttgcggagtttttatagtaaaaattgttattttaaaaattttgggcctttttatatattttcttataaataattaggcctcttaaaatataattctcatattaataatatttttaaaaaatatttgggccttttttatatgtaaatttttttataaaaaaaaaaagccccgggccgtcgcacctccgccctacccatttgagccggggctggatgaactatatattctaacataatgttatgaactaatatcatcatcaaaaataaattattttcccttttaaaaaagggttttctgcaaaacaataatcttctaagtcaattttatttgcaagtttacccttccaatccgaattatgcaagtcaaccccacaatcttaatagtcacccgcaatattgccctctcgtgtagcgatgacgtggcaagacaaactttcatgtcaaataaatgcaggtcaaaccacaatctccaaagtcacctgcaatatagcccttccgtatatcgatgacgtaaaaatcgataactcattttatgtaatgtagaaatatcatgcatctcgaggctcaactaggttaattcctccattattgcttcatcccaccatttccatatgtggcatgccccagtctatcaaaattcaacaaaaacttcaaccaaaattcaaaattttatatgaatcacttaaaattcaaccaaaattcaaccaagatttccgattatgtaaaaaacaattcaacaatcacttacatcaaaaagtttacatgtgtagaatagctttcctggattcgtcgttgtccgaaaaggttatggaaggctattctacacaggtcaaaattttgatataagtgtttgttgaattgttttctacatgatcataaatcttggttgaatcttagttgaattttaagtgattcatataaagttttgaattttggttgaagttttggttgaattttaatagaccagggcatatcacatatgaaaatggtgggatgaagctatgatggaagaattaaccaatttgaagctcgaaatgtatgatactcctacatactacattacataaaatgagttatcgatttccacgtcatcgatgtacggaaggactatattgcaggtgacttttgagattgtggtttgacctacattcatttgacatggagatttgtcttgaaaaaaattgcattgaggtttttttttgcaaaaaccccttatgttttcaaacggagttatcgagtgccacgtcattgctacacgggagggcagtattgcgggtgagttttgtgactatagggttgacttgcataattcgaacttggagggtaaacttgtaaacgaaattgacttagatggttgttttgcagaaaacctagataaccgtcttgaccgcctaaaattacatagatcttgtttaatatattttttcaatttcaaatagatttttatttatatatatagttataaatattcatatattgtttaatataaataaaaaataaattatttatttattttttgtttataatttcataatttttagttttatataacttttatatataatatcatatttataatacttatgttataaacatctaaaccgcctaaaaatcgcctaatcaccgattaggcgttttatgcgctaggcactgggtcaccgcccgcttagcgcctaacgctttcttgaacacttattataataaaaatgagagggtatgagaagaagaatcaaatcctatatatagaaagagagtattcctaatttggaataatacgaattaggaatttattttctaataaactttgaaaatgaattaagaaaaagttaaaattaaacaaaagaaaaaaaaaagaattaggaatttattttctaataatcttgtaacatattaataaaaatatttttattagggaataaaataaaattattttttaataatcttgtaacatattaataaaaatatttttattgaagaaaattgcacaaaacctccaaattaagtacgtaattttgatagttgaaagttgatgactttgaaaatgcgcttagcaaatgaacaaaatgacaaaagttcgtaattctttcgatgaatatgaagtagccaaacatgtatcatatggtccctgatccaaacaacaatccgctccaaatgatgcaatgccctagaaaagagaaaaaatatcaaaaaaatcatgaactttcgaatttgggacgatttaatcatgaattacgaaaagaacatataaattgtaaagtttttgttgactttaaaattaattaacaatgtttggttgactagccattttagacataacattaagtagactaacaaaaaaaaatgattacagtgttacactcccatttgccttctctgttatgtcaaaacgatattgtttactgtagcgacaaaacgacgtcgtttcgacgatttggggaaacttaaacctaaatccccaaatcgatttcattccttaaccctagaacttcttcttcgagaccacctccatcctttacttcttcttccacaccacctcgatcatttacttctgcctggacaccacctccatcatttacttctgcctcaacaccacctacatcgttttcttctgcttcaacaccacctccttcattttcttgtggaacacataccatgtcccattgtccctcttcaccaacttcttcgttgttcaacagagggagcgagagagaaattctagagttaaggaatggaatcgatttgaagatttaggttttagtttccccaaattgtcgaaacgacgtcgttttgtcgctatagtaaatgatatcattttgacataacagagaaggcaaacgggaatttagttttctgttaacctacttagcgctatgactaaaatggctagtcaactaaactttgttaattaattttaaagtcaacaaaacctttacgatttatatgtcttcttcgtagttcatgattaaatcgtcccaaatttgaaagttcatgatttttttaacattttttcccctcgaaaactaggtctgggcataatatccgaacccgaagaaccgaaccgaatccgacctaaaaaatccgacccgaacctgaacccgaagttttaaaatatccgaactggttttaaacttcacaacccgaaaacccgaacctgaacccgaacaagtaccagaatatatccgaaatataaatacatagatataatatattagtaatatttatacttgtaataacctaagtgtctaaattattcgaatgttaaaatatttttgggtgttttagctacttttggttagattcaagtataaaatacttaaaattcatagattttttgaatattttcaacattttgcataaaatcggatacaaattttttaatatttggatactttgggtaaacccgaatccgaacccgaaataccatatccgaatccgaaagtttaaaatacccggacggatcttagttttctaaacctgaaaaatccgaacccgaaaaacccgatccgaatatctgaacgtccaagcctatcgaaaactaagaaagaaagcattatcttgtttttttttttttttttgataaatatgtgaattttcattggatgaaaagaattgtagaagctttagtgggaagcttagtgggtttcgctcatcttctacgagaagcttagtgggtttctctctggttcagctgggcagtttttgtgctttgggctttgttcgtttctcagtaaactgtttctgtagatttttgttgtgctctataccttgtcgtttaatccttgggttttatctttgtctctggaggtttgttacatgctggcttaggtctcccttttttaggcttttgattcggtgatatctttgttttcacctgtatagtattccactttgtaacatttatgtcattatatatttttagatgacaaaaaagggatcgtagaagctacaatatttcgtaaacaaaagatcgttccttggcatccttgccaaaaaaaaagagagataaaaataaggaagaatcttaaaaaagaaatatgagtagaaatgaatctagtgatactttagccaaactcgcataaggtttttgaatgtcttgccttttctctttgcaaaaattgcatcgcgaatctgtctatctagagccttgaacgaggcatgagtctctgtggaaatgttgttatggtacggattgtttctctccatccaaatgacataaattattacttcagaaactagtctccgaagagtctgagatgaggtagagtctttaatatctagccaagctgagaaagcgtctcaagtgtggaaagtaaagggattgtagcccagtcttcttgttgttttggaccaaagaccttcactaacctgacaatgaagaaagatatggtctctagtttcacggaacaagccacatcataaaagactttctctctctctttgctccaagccaactggtaattggccacatcctcttactgtaaaagactttagcttgcataattgattataaactcacaaaatgtattgtttcagcttaatatttaaacgtttgggagacatgaaccagataattggggcttcttcacttcgtaccaacccaaatctcaaaaataatcacaaaaagttgtttttttctttgccttaaaaatgaacccttaaaatgaaatcagttgtatactcaaaggctatatatatatatagctctctcatggtcttctagtcttacaacagtgaatcacaaacatgagcaaatgagtatgtgtgtgtatgtctactgcttagatgagtttctttttctcaaagaaagttttcaagtgccagaattgtagaccagccaccgataaacaaaccacaagcgacccgaaactcaaccacgccatcttcgagtttgtggatctattcagttcttgcatttcctcttccctagtcacaccaaaccaaaacacaacaacaagtataaacctcattatctatctctctcttcagacccaacaaaaactaacgctaaaaggtttgttctttgtctaatttacctttcacgaagataatacatctcctcatggatggaattaacagtgtccatcaaggtcttaacttgatactccatcatctacaaaaacaacatcaaagatccaaaaacaactaggttaagtaaaaaacaaactctctacactatcttctttcattttcacattcgacaaaccctagcttttagatcttgaagcataaaaatggcatacatactcaaatatcatcaaaccaaacacaacctaaaacaacctttgaaaccaatactataaagacaacttacaacaacttgactcttcttagccacattggtccactccttagagtgaacaccagtcttccaatcaaaatcaatggtcaacgtagtctccggcttataatcaacggctgtgatgcacgctacgtaactcccattttcataagcagtaaacgagaactgaccagcctctacattatcagcttcgtgtaaattcttcccttgtggtgaaatctataccttgacgatgatgatcttcgttagggtttacgatgaagtatttgccaacagacatggagttttcgtgaatatcctctccgatgcacttcgttgtcgaagactttagctcgtaacgcattgatagtgtcctgggatataacaacgcaatgatcaaaagcaaaatcgagcttcgacgaagatccatggcggctccagagaaaagacaagagagagagagagacaaaatcttgcagtagttgatagaatccatgaacaaagaaaacttgtgaaatgattttctatttttctcaatccgaaaatgttgttacaattggtcttatatacaattacactaaaccaaagctaaatcacaaaacaaataaaccggatctaattacatggttatctgatcaattctaagagcccccctcaagatggaggtgcatatatattaagaactcccatcttggacatgttttcccgaaaaggaggtggataaagagctttggtcaggacatctgcaagttgattgtctgtgcgaacatacatggtcttgaggatccctaattcaatgcattccctgactttgtggcaatcaaattcaatgtgtttcgtacgttcatgaaacactgaattgttagcaatgtgaagagctgcagtgttgtcacaatacaagtaagcagggagagtaaaaggaaccttcaaagcctttagaagagcacttaaccatatcaattctttagtaataaccgacatggctctgtattctgcttcagcagagctcatggaaacaatatcttgcttcttggatctccaggagactaaagaattaccaaggaacactgcaaaaccagtaacagatcttctggaatcacgacatgtaccccaatcagaatctgaaaaccctcgaagtgtaaaatctgcatctgtaccataaaatattccttgaccaatagtacctttcaaatacctcaaaactttatgaatggcctgcaagtgaatcagcttaggagcacttgaatactgagccaactttgagacagtgaaagtgatatcaggtctagtgatggtaagatactgcaatttaccaatcaatctgcgatactgcttgatattttcaatagtatcaccttcagcttcagagaatttctgatttggctccataggaatggaagagggcttgcaatctgaaaatccagaagatgccaacaagtcaagtacatatttcctctgacataaagaaattccctctgcagtcctggcgatctcaataccaagaaaaaattttggttctcctaagtctctgagttgaaaataaccacgcagttgttgtgtaagctcagatgctgcagcctcagtagtactggcaatgagaatatcatccacatatactaagaccaccaaataattgccattactgaacttcacaaacaaggtgtgatcaccatgacatttctcaaaccccaaaccaaccaatgtagtagaaaatttaataaaccattgcctggaagcttgctttagcccataaatagacttgtgcagtctacacacggcattaagaatccacgacttcaccatactgttgcatctgctccatagacggaattttgaatcactaacaggtggtcttagcagagatccatcaataaaacctagcttgttttttgcatctaggctgattctcatcgctattgacgaactattgtagttactaccatcaagaacatgagctacaatcgataaacctggatgatcggaagagtgaagaaacatcggattttcgaaaggatcagaagccttcgatacagatccatgaacttcatacgattccggtttgagagaaaaaggttgtttcatgctcgcaagctttggatcttcatcgatccctgaatcacgaacagatttgaccgcagatccttcatcctccggtgttacacttctgtttctcagttttcctcctttcttcaccattttctaccaaaccgaagctgcggaatagcaatcggacgtgataaaagagattttccggtgaaaaattgaagaatctgaagataaaaagaggtgaaatcaccagattttggagaagaaaatctctgataccatgatagaatccatgaacaaagaaaacttgtgaaatgattttctatttttctcaatccgaaaatgttgttacaattggtcttatatacaattacactaaaccaaagtaaaccaaagctaaatcacaaaacaaataaaccggatctaattacatggttatctgatcaattctaagagtagtcaatgttttgttgtgccgtttcgggtaagacaaaagagagtcaaagacgttctttgcatacgtgtaattattttattggtgaagacacgtgcacaaggtctttttttgtcatgaggctttatatatggactgggcttagttttgtaatggactttgacttctccccatatttgggcttaatattgatttaatatagccgatacaaaatttttaaagtaatcaaacatttccatattttaaatggtgaaaattagcatctataccacatttggcccaattctttttcatcctactacattgcaggtctatttatcactcataccacaattgaggtgtgtaatgaccattttgcccttccttttgtttgctcaaatttcggggataaaattcatagattgagcatacaaaaagaagtttatatacagttgtccccgaagtttgagtttctccattatttcatcttatttttgcatgtttgctagtttttgtccctcaattttaattcattgttcttagattttagtatgtaaactctaattgcggtctttttattttgttggatgtttatatttcgtttgattaatgttcccgaatagatttttttgtccctcagatacttgtccataaatgttacattttatctgccacatcagcagagggcaacaccgtctttttcataccacaataccacttgaatgtggtacaagtgctaaaccattctccattgtggtagagatgctaagaaatttgaaaaatgtggtacatttggcaaaaatcccttttaaatttaataatcaacttttaattttttttataagatgatccaagagagataaaaatgagatcaatctgttgggattttcatgtttttctgattttgaaaaatacactctttgcaaatttttcgatatttttttgaataatcttattcaaagtatgtatttttctttagaaaatttcaatctatatgctgatatgcatatgctattggagtagcttggattcacaagtagttgtttaggagatcgatcctttggcctataataaatagaggtcactggtttagatttggagctctctactttgcaccgtgatatggcaatggaatttagcaaatgccagtaaaaggagtagtgaccacctttttatcaagtgctccgacagtttgagcatctagtcagtgaatccacatattaggactcccggccatgcaattcagatcttggggcttccttttagcttggtggctttaagtaattctctgagtaatggctccgttttcggactgccattgagaggcttccaacccatggagtattcgattgctcctgctcgtcaagatgcttctatggttacacttttgttgttcttcgagatcatgtttcacttcatctgacaatgcgagcttgtttgcttctattgatggactgaatttccgattttatctttgcttccatattttaaattttttcttccatgggactaaacctttaggtattgcaatccttgtaaaacctaaacattttcatttttaatgaatatttacattcttagcaaggaaaaaaaaagagggaatttttgtttggtgacgtagttcatttaatcttgcacagcctatcctctgaaggaaggttcgccacacattttgttactgtattgggaaacaaagaaagcaagacttcactttagatgatgcatgcatgcatgatcacgcatggggccgtctttctttaatataatagatttgttttcgtatatattttagtgtttcgtatgactacgtcgttaaaaataagacacttttctgtgttataataacaaagcatgtgcttaatttcataggtacttccgaacgatgacattcttctctcccactcaggtgttcttgaactaccggggagcgcaactgcgttacagcttcgtgaggcacctcattgatgcttttgaaaggaatgagataaacttcttcgtagacaaatatgagcagagaggcaaagacctcaaaaatctctttcttaggatccaagaatcgaggatcgctctggccatcttctctacgaggtttgtactatatattctttcacattatccagaagattcaagaatcgtaatcatcctcgtcttgattttcagatacaccgagtcgagctggtgtatggatgagttggtgaagatgaagaaacttgctgataaaggaaagctccatgtcattccaatcttctacaaggtcaaggtagaagacgttagaaaacagacagctgagtttggtgacaacttctggacgctcgcaaaggtttcgagtggagatcagatcaagaaatggaaagaagccttggaatgtatctccaacaagatgggtttgtcgttgggagacaagaggtattttccactcacacttactaaatcttcttcttcttcttatactgaataaggtatatatactttttgtggcagctctgaagccgattttgtcaaggaagttgttaagg

SEQ ID NO: 5431 - DNA, 334 bp, Arabidopsis lyrata
  Intron number 2 from transcript 341959 (locus 341959) deri ved from phytozome v7.0 (chr-ID scaffold_3; pos 7807948 to 7808281)
gtagggtaagtagctaaaagagatagatcactggtttgaagtatggtatatgaatctataatggagaaatcattttaaactgtcaaacgcataagaatattctatgatcttcatccgcatctttgttttacactatacaatcagagatttttcaatttgtagtagtagctttttgtgtaggtattggaatactctctgatcttcacattgaaccataacgttataagagttttttacctttgttcttttgagcctgatgattctaaatgctgatatttcttgttgtttatacattacagtgatactagtatttcttctgctaattcattttcaa

SEQ ID NO: 5432 - DNA, 12684 bp, Arabidopsis lyrata
  Intron number 2 from transcript 489292 (locus 489292) deri ved from phytozome v7.0 (chr-ID scaffold_6; pos 10553754 t o 10566437 reverse strand)
tggtgacaataaatttgattgtttcaaactaattaatactagatcctgacccgcacgtccgtgcgggattttatattttaagaagtggtataatagtttattttgttgttttgtgatatatattaattataatgtacacataaaaatgtatattttttttattaaatagctaaagttgtgattaataagacataggtggttgaggagacatacaaattagtaatatagacattttacaaattaatatagacataacccgtcttcatttaaattcaatatagacatacaaattaccacagttgtgcgggtggtattttttagtatatgtttttgattaaagtttatattaatattttgttttttgttgagttaatgaattataataatataatagtatatataacatattttttgtgtttataaaatagtgtggtgctgaagtttgtatattctgtttaattagttattaatttaattttcaaataatttaacataagaaaacacatatttatgtgtaaatgtatagtttggtgcataacaaataatttgaactgtaggataaatcatgtgtgtaaaagttataatccaaatttataattttaaagattatgaaatttaataacttgtaaattaaataatcgctaatgaaagataaatatataattaaatatttgctaattgaaaaaatgagtttaccaaaaaaaatgcttttcctggcccattagtattggcgagtaaatatttgttgggctgatttggatattaataatgacccattatagattcttaacccattttattaaatatcaatcttgaatttatttttcttagatagttttttcctgtttggacagtcgttgtcttatctaaaagtaaaaacaaacccccaccgaacaaaatttggaacatagatcgatctaagtcaaatttgtgaaatctcctgtaattctactattttgtctccgtttataatatgtgtattgcaatcgaatcagatttttactttaaaccattttttatatgtcgatcgaatcactttctgagtaatcttttgttcgaattgtgttcttggccaatgagcatcaggaagacgaatcttcttatgggtaatgattgttaattgaattttcatcattttgttttcactataatttatcaacgaatacacatttgattagatgtagttttaacttgtttgattgagtaggaagatgaacctttaagaatatgcttgctaatcgtatcaatatattgtgtttactggaaactggaaagagttctaataaatttagtttccatataaatttcaatttacacttttgtctaatgacgttcacataagaggaggataaaaagtggctacaaactgatacgattcttagaaatatatgcagccattttctgatcttaatcatgtattaaacacaattatgcaaacaatagctatgagcaaatttgcagaatcatgtattaaatgaaattaaatgttttcaggtaaaccttcgtgtggagcaatataagaaaatgaaggaggctatcacatttatccattggagcaatccttcaaatctatatgtaaaaggttagtgagttcaactattacagactttcgttattagaatttattgtttatcttctattattgagttcttgatgttaggtcatatagaaaacagttttttcccttagtaagtttaaatcaaaatactaaataagagatgcaaagtgttggtgtcggatcccgcagttcggatccggcccggaaagatagtggatcaataagacgaagtgggccgtcggcccggtccaggggacgaaaagagcggcccaataagttccagcccagttcgagtaaaacgtcgggatctcacgagttaaatgaaaggcgggtttcacgggatctgctagatcgggaagattcgaaacggaagcaataatgaaggcgagatctgcggcttgatgagcgacttcggtttcaaatcatgtaattataaataggaaacgaaaaccattgtatagggggatctttcttgagcaataaacgaatacacatacttcactcttttgttttctttttgacgattgctattcgaattggcaagactagacgatccgatacacatcatacaatttgtattgcggattccgacatccacaatttggcgctagaaggaggggatttatagtcttttactccagaatatcaatcggaaagatgtcagatatagcgaatccggcttcagtcctcgacgagatcaagaagttgcttaaagatctgtccgagaagaccgaccagcagcagctcgccaccactgcgttgtctgagaaactttcagcgtttgaagagcaaagcggcagccaaatcgcagtcctcacagcgagttgctccgaaatcaggtcagcccataatgcttatgcggatcgggttgatacaattcttgcaggaactttgcggaccagcgggcctcgcggccatttggacttccatggtccgaacgtttcggaggttcaagatcctaggctcgtttccccgaacaacatactcccatcttctttgcctcttggctctcagagtgaacctggagatggatcccgtcatactcaagcacttcaaaactcagccggcggtccctttgttccagccagaacacctctccccattcatcttggcagtaccccgcatcatcctcaaaccgagtcccatccacctcaccttccggtcaacccggaaatccagagcttacaaaatcagattcgggaaatgagttcgaaggttcatcaagccaccagttcggctcccgaagtcgatagagtgatcgaggagacgagaaggactccctttactccacgaattgtagccctgcgaattcgagaccaaaggaaggtcaaacttccggggtacgacggtaagggggatcccaaagaatttttggcgtcttttcaggtgaccgcaggtcgggtacatttggagccagacgaagtagacgcgggcttatgcaagctcttcgccgaaaacctatccggaccggctttgacctggtttactcaactggaagaaggatcgatcgatagcttcaagcaactatctactgccttcatcatgcagtacggatacttcatcaagagcgatgtaactgatgcccagctgtggaacctctcgcagggagccggagagccgctacggacttacatcacctcctttaaagagattatggtccagatcccaaatttgtctgattctgcagctattgctgcactcaagaacggtctatggcacgaatcccgtttccgggaagagttggttgttaaccgaccagccactattcaagacgcccttcatcgggcaacgaactggataaacgcggaagaagagcgggccgctttagctaaaaagttcaaagcagctccgaaacctgctcaacttcttcctcagaagaaacctgttcaacctgaagctcggaaacctggagctggcacattctcagtggatcgggaggagccaaaaggttctccgaagatttcacctgcgaagcaatctttctcgccaaaaagcaaaaacggcgctttcccgagtaacaagtggattcgtgacccaaacgcctactgcgaaatccacaaagtcaatgggcatgctacgaaagattgcaaggctctaggaaggttactggctgccaagttcgcatccggggaaataaccgaaatcgacatttcggagctcgaaccaactcatccgtcggagcagtcagtagcaacagaggaaccatctcctcctagcaaaaaaaacaaaaggatccagtcccctgatgtttttaaaggaccgaagaagcaaatccaggtgattatggggggatccaagctctttcgggattccattagtgcaatcaagcaacacgaacggagggcaaccccctggattatcaagaaggccaaacttactgaggaacaattacctgaagtaacattctccgaaagcgaaaccagtcaacttgataaaccacacgatgacgctctgttcataacactcgatattgcgcattgcgaagtatctcgggttctcattgatactgggagttcggtggatttaatcttcctcgatactctgacaagaatggggatatcgaagcgagatataaaggggccaccatctcctttggtttcctttactagcgaaacttcaatgtcgctaggaacgattgtgctcccggtatccgcagagggcatagtcaaaatgatcgagttcacggtgttcgatcgtccggctgcttataatgtcatcttgggaacaccctggatttatgagatgaaagcagtaccttcaacgtatcatcaattcgtgaaattccctacgaaatccggagtaaagcaaatcctgggaagtcagcgagctgcgaggatgtgttacatgtccagccataagcttaaaattcaatagcaaccacagttcgaggtgcttgcaaatcctgtcaaaaaaataagcagtgacctcgtggaggcagtggtagttaatgaggagtatccggatcaaactgtgagaataggagtaggattaagcgaaacactccgagtcgaactgataacttttctaaaaaggaataaaaaaactttcgcctggaaaatcgaggagatgactgggatcgatacaaaggtcatttctcacgagctcaacattgacccgactttcaaaccagtaaaacaaaaacgcaggaaacttggtccagaccgtgccgaggctgtaaattccgaagttcagcgcctgctcgatgccggtttgattcgcgaggtcaaatatccggattggttggcaaaccccgttgtagtcaagaagaaaaatgggaaatggcgggtttgcgtagattttaccgatcttaataaagcctgtcccaaagatagttttccacttccgcacatcgaccgacttgtggagtcaacaacgggccacgaaatgatgtcctttatggatgctttctccgggtataatcagattttgatgaatccggaagatcaggaaaagacagctttcatcacggaccgtggaacttactgttatatagtcatgccgttcgggttgaaaaatgccggagccacttatcaacggttggtgaatatgatgttcaaagatctcctcggtaaaactatggaagtgtatattgacgatatgttggtgaagtcaatatcaagcacttcgcatattgagcatctagagcagtgcttcgcaattttgaataagttcggaatgaaactgaacccgtccagtgcacttttgcagttccttcgggagagtttttgggttacattgtcacagagcgaggaatcgaagctaatccgcgacagttgaacgcttttctggcgatgacttcgcctcgcaatatccgggaagttcagcgactcacggggcggataacagctttgaaccgattcatctcgaggtcaaccgatagatgccttccattttataatctgctccgaaaagcaaacaagaatttcatttgggatgagaattgcgaaaaggctttcgaagatctaaaagattatttatccaaacctcctgtgttagcgaaacccgagttcggagaagagctttttttgtacgtttcggtttctgacagcgcagtaagtggagtgttagtgcgattggatcggcacgacgaaagaccgattttctatgtaagcaagtctttttcgggagcggagtcaagatatccgatgatggaaaagctagctctggcagtaattacttcagctcggaaattaagaacgtattttcaatctcatacggttattatcctaaccacgcaacctttaagggcaattttgcatagtccaagtcagtcaggaagattggttaaatgggcaattgagctaagcgagtatgatattcagttccgaacaaggacaagcttgaaatctcaagtcctcgcagattttctgatcgaactacccctggtctctgtggaagtcaaagaaaatgaaggaccttggatacttcatgtggacggcgcgtcctcaagacagggttccgggatcggtatccgattacaatccccatttggtgaggtaattgaacagttatttcgtctcgcatttaatgcgtcgaataacgaggcggagtacgagtctctccttgcaggacttcgtctagcggttgggataggtgtcacaaaattacgggcattttgcgactcgcagctcgttgctaatcaattttccggtgattatgaagcaaaagatggcagaatggaagcttacctcgctcaggttcaggaattgagtaaaaaattccttagtttcgaactcattagaattccgcgaagtgagaactcagcggcggatgccttagcggcattggcgtcgagttccgaagtaacagtgagccgaatgatccctgtcgaagtaattgaacatcccagtatagccaccggagagctgaatttcgtgactacacggtctatgcaaagaaggatgagtgtggaacaagaaccacaaagggtcgaggaaactgagcagaactccgaagtagaatcactaatcggaacaccgctaaatccggaaccactaccgccagcgctaccgcttccggattggggggcagactggcggatacccatcagagaatacatccttaatggtactctccctgcggataagtgggaggcacgaaaactgaaagctaaaagtgctcgtttctgcatttcgagtgacatcctctacagaagaagcatctcgggtccagacatgatctgtatttttggacagcaggtccgtactgtgataaaagagattcatgacggagtatgcggaaatcactccggaggtcgctctttggcttataaagtaagaaagtacggatatttctggcccacgttaatcgcggattgcgaggagtatgcgcggaagtgcgagcaatgccagaagcatgcgccttcaattcaccaacccaccgagccattatcatcagtctcttcgccttatccatttatgaaatggtctatggatattattgggcctcttcatgtttctactcgtggagtgaaatttgtcttggttcttaccgattatttctcgaagtgggtagaggcggcagcctacgtaaacataactcaggttcaagttcgcaagttcatttggcaggacatcatttgtaggcacggtttgccatatgagatcgttactgataacggacctcaattcatttcacggcaattcgagtctttctgcgaagaatggcaaatcagactcagtcgatcaacgcctcgttatccgcaggttaatggtcaagctgaagcaatgaacaaaactgttttgtctactttgaagaaaaaactcaagtcgcacaaaggaacttggtttaatgaactacagagtgttctctgggcaattcgcactactcctaggcgtgcaactggtgaaacaccattttcattagtttatggaatggaggctgtaatccctgctgaaatatctgtgccaagtccgagacggatgaataacccgcagaacgaggcagcaaatagcgaactgatggtggacgttattgataccattgaggagcgacgtgatcgagctttgattcgaatgcaaaattaccagaatgccgcagctcgatactataattcgactgtccgaagtcggcacttcgacgttgggacattagtattacgcaaagttcagcaaaatacagccgaagacggagcgggaaagttaggcgtcaactgggaaggtccttatcgaattactcaggtagttcgcaatggagtttatcgccttgaaaacatggaaggaaaagcagtccgaagagcttggaattccatttatctgaagagatactttgtttaagtattttattattttcattattgtaaatcgaactacgatagacttgatccccacctttgggtacgtaggcagctcgaacttcgagtgcagtctctaaatcaaataaaatgtttatattcttctaaacatttttcaaagaagccgagaattatctcgcaatccgtgaaaccgagaagaacctcgtaactacttttctcgaaaaccgagctcagatctctggtaattcttgaaagataagcctaagttttacttagcagaaaaagggtctggttcaacacagactagggatttctgcggactccgagtcccgatcctcattttttctattaagaacacccacttaactctcgttcttagtattttcccttatccattgaaaaatgaattttgagttcatgtaaacagcgcatctcgttgaaatcttaagtatttcttaatttttcatactaggtattcaaatttcttgaatactccggatttataattcaaaaggacttatataaatatggaggggaaatattcaagtctttaaaaaataaaacaacaaaggggggcacactagccatcacaaccccagaaccagatcattgacccttgacgtcgggaaagccgaactagagtcggtaaaagccgaactctagttcggcttttaactcctcaagaagttctcggttcgcccgagtctcggcaagacgtgtcccaatcatctcgttatcactgatggccttgtagtaggtctcatgtttcgagtcgagtccgctatagagttcacgaagcctcatcctttcatcttttttcgctgctgcgagctcctcgtcccgtttctcagcagcgatcttgcaccattcctcgcttcgcttaacttcagcttccagcgaggtaatcttgtcacatgcctcgaggtacaagttcttcccgatcttcagcttctcggaaagatcagttttggcaatgtcaagaaggttgcagcgaccttcggcttccagcattcgttcccggatctcgttcgcctttgccaccgccttggcattttcctcctccatctccttgagttgacggatcccttcttcaagttcggcaacccgggccctgaggccatccagctcgttaactggaaagagctgggactcgtggcaggagaaggtggtgttgtactcgagcattaactgtcgaaacgaagattcatgaggacggaaagaaaagttcttatttttatataaggagaagagttcaaagaattacctctccgagtttatcagcgaagcgaaagtagttcgctctgttgacctccttcaagtcactaaagggaggaatcctcatcccaacaggagtaaagttcctcatgaaatcagctggtgacttcggaggagctgttaaaataaaacgtcaaaatgaactcgaagcgagatagaaatacgaagtgactctacttaccagtggggatcggaatctcctgacggacggatccccggttctcagagtcccgcgaaggcaggacaagaagctgagttggcaagtcggactccggggcccgttgtggatcttctttttcttctggttttgaccccagactggtcccagcatcctcggaaggatttttctcgtcgttcagacgagaacgactcttgcgttggagggaaggaacttcagattcctcgttcctgcgttaccttgaggaggttgcactatgacctccttcagaaatttctttttcccgagaagatcgggaggagcgagaatccgagatccggattaggtcttttcccgaagacaccttctttagatcacggtgatcagaggtcttcgattcggaaaccggatctacggtacccgagttcttccctttaccagatgaagatctggacttcccttcatccaaggccttcaccatcctggccttatcttctttctctctcgcttctctcgctttttccctttccttttggagcctcttctcttcgcggtaggaaagtggagacatgttagtggcaacagtaggggaggagggaggagtggaggaaatgaggtcggatcgcgagacaattcgagcacacgaactccggatgcgttcgcaagtgaacaattcccacgacaggtcgctgctattgcaaatctttacgaattgccccgcaaaagtatgagaaagcgttttcttcggaagtttagctgcaaaagcaaaaacattgacggattagaaaggaaaaaaaaaaagacgagtgaaaagcagtgaaaaacctaaggagctatctaccgggacgacgagtccattcacgaacgaaataatccgtatttggagactccggagaatctgtcggacccggagtaatcaaggagactcgacgagggatctggcaggcacctttcagcagagccagctttttattgtcgagattcgaagaaaaatacttcccgaactcgccttccatgatgtgagtctcattctggatcttcctgcttcgcttcggagccataacgtaattaaggaagatgtagagacgaaacaagatctggtgccagggatttgggaagatatttcaagaacaactcaagaacacgcttgagcaaacttcgaagatcttcgtgaaaacccagaaaccggaaagattaagcggtcgatgttcttcggaaaacggttgcgattcaacggaatatcaagaacacggcggaggagatgaagaacagcgaacgatttcggagcagagggctgaaaatctaagaaatcttttagatctctggcctaaatctagcacggaactaatctagagcggtgaactaacacgaatccgaaactaaatagcaagaactaagcgtaatcggaagagtgataagagagaaaagaggagagggttcggtaccttaaataagcagacgacgaagaatgaatgaacttgaagcggttgtgcagaacccgaagagtccaaacaaatatttataggaatctctggcgggaatatggaaaccctaggaactcgaaacgccgccctcatcccgagaagaatccctcgatctgcgggaaaatttataccctaagatctcgaaacgtcacttcggtcgaggaaccaaatcccggggaaagcggaattaatgacgaaatctccgagcccgagaagagtttgttatttaaagtatcccgaagtgaatacttcggaacacttgggaggcaaactgttggtgtcggatcccgcagttcggatccggcccggaaagatagtggatcaataagacaaagtgggccgtcggcccggtccaggggacgaaaagagcggcccaataagttccagcccagttcgagtaaaacgtcgggatctcacgagttaaatgaaaggcgggttgcacgggatctgctagatcgggaagattcgaaacggaagcaataatgaaggcgagatctgcggcttgatgagcgacttcggtttcaaatcatgtaattataaataggaaacgaaaaccattgtatagggggatctttcttgagcaataaacgaatacacatacttcactcttttgttttctttttgacgattgctattcgaattggcaagactagacgatccgatacacatcatacaatttgtattgcggattccgacatccacacaaagtactgaaatgtttggtattgtttgatatgcattaagaactttttctgtttctgtaaatgaaacggttaacttcagatagcttaagaaaataattaactttgtcatatgagagttaagcaatcttaaatataaggtttgcaaaatcatgtaacaaaattaaatgttttcagataaagattcatttggagaaacattagaaaatggaggagtctatcatatttattcattggaggaatgcctcaaatttatatgtgacatcttaaaaccatgcttggttgccttgtacttttccatagattttgagagagtaaaaatttccacaattctacactctccagattggaaaaaccattgaagcttgttcacttgttatttttttatagtagcatgaatcaaagtaccatataagaagttaaaaacaattactattaaatatagggtctaccaatgattattagaaaattcaaaacagtataaattaggtgaatctatacttacagattcatcagcaagaatcatttccattgtaaagtgtaatgagtccaagcatgcaaaaattttacttggatttattttccaacttgtcttggatggtttgatgtcagcaagttttgcagccatttttttaaaaggagaatgtctaagattagggatcgtttgaaagcttagtgagtattgaatatgttattagacttgcatatttataggaaaagtaggtcggcttattttttttagggtttactgaatcaaaatcttctaattatttgcgaaaagggattgttaaggtatatgctaaatttgttagggtttgaatttatagtcaatgttatatttggtaaatttaataactgaatttgaatcgtaaagatttatcatcatttactaataggaatttattggattcgtttgttacggaaatctctttaaatgataactaacatacttgattttgacattaactgcaggatatattttcaaaacattcgagaagctctagcatatgaagacccgcgtgtatgaccgatccaaacgccctagatccgacccaacaacccaggatccgtgtgtcatttgccagcaaattagccattttacccttgaacgaatttttatgcttactcttagaatggattaattgtaatggcattcatcgtaatatttttaccaaaataaggttttttatcttttaatgtttcccaattaataaaatagatatataacatttgtaaatatttaatacaacagaaaa

SEQ ID NO: 5433 - DNA, 4773 bp, Arabidopsis lyrata
  Intron number 1 from transcript 905449 (locus 905449) deri ved from phytozome v7.0 (chr-ID scaffold_3; pos 11089133 t o 11093905 reverse strand)
aacagaacaaaccaagcccagcaagcttgagcccagtcagtcttcaactctccaacggtccactgcaaaagaacaagaagacaaatgtgagattgttgagaaggaaacctccaggaagctgctcaaaagtaaaagcaacaatgacagctgtcttggtcaagatattaagctgaccaataggtttgaggctctaatggatgaggatcaaagttaacctagttagtctagtataaatgtgaaaccttaatgtaatcgaaaacaaaagagagaaataagatggaaatcatttcagtctccttcacacctttcatctaaaagctctctatttttatggtatcagagccatggttaatccaaccatggatctctataattatcctaaactaaacatcttaaactgtgttaccccaaaattaacacaaaagaactatatctcttggaaatcacagtttgaatcttttttgtcgggtcaagacttacttggatttgtgaatgggtcatctcctgctcctgctgcaatgcttcaagctcctcaagttggtggaatggctctaacagttccaaatccagattacagtgaatggtttagagcagatcaaatcgtcagagcttggcttcttggctctctctctgaagacatccttgctgaagtcacaggaacaaaaacagctcaggaactgtggtcagctcttgcaaaacatttcaacaaggtatcatcttctagactatttgagctatagagtaaactacaaacatctcaaaagctagataagtctatgagtgattacctaagagatatcaagaatgtttgtgagcaactagcttccataggcagtcctgtctctgaaaagataaagatttttgctgcattaaaaggcttaggtagagagtatgaacccatcaaagtctctatagaaggaatgatagatttgtcacctgctcctacctttgaagatatcagtcctcatctcaaaagttatgctgacagacttctgagctacaatgttggtgtggagatctcacctcatatggccttttacacaaatgattctggtaactccaatggtagaggaagaggaaactcctatggtaaatctggtggttcccgtggaagaggaggctactacactacaaaaggaagaggcttcccacagcaaataactcagagttcttcctccactggttcctacaactcagaaaacaagattgtgtgtcaaatatgtggaaaaccaggtcatccagctctgaaatgttggcatagattcaacaacatttatcaatatgaagagttacctgctgccttagctgctatgagaatcactgatgttacagatcacaatggtcatgagtgggttggagacagtggtgcaacagcacacatcacaaattctcctcacaacctgcaacattcacaacaatatggaggatcagacacaatcatggttggcaatggtgatttcctgcctatcacacacactggttcaaccagcatctcttcaagctcaggtaagctacctctaacagatgtgctagtttgcccaaatattgaaaaatcattactttcagtatctaaacttaccaatgactatccatgctctgtgaattttgactgtgacactgtgcgtgtggttgataaggcaacaaagagagtgctggttctgggaaacaacattaagggtctttatgttctgaaggacacccctgttcatgcctactactctacacgtcaactatcagcttctgaggatgtttggcacatgaggttagggcatccaaactcccaagtccttcagcaactgtcaaagatcaaagcagttcacattaataagagctccaaaggattgtgtgaagcatgtcagtttggtaaaagctcaagattacctttcaccctctcaagcacgacaacctccaggcctctctagaagatacattgtgacctatggggacctgctccaataatgtcagtgcaagggtttagatactatgttattttcatagacaacttttctcggttttgttggttgtatccactcaaaaataaatcagattttctgcaaaccttcattgtctttcaagctatagtggaaaatcagtttcagaataaaattgcaagttttcagtgtgatggtggtggtgagtttacaagtaccaagtttacaagtcacctacaacaacatggcattcaacaactgatttcttgcccacatactccacaacaaaatggattagcagagagaaagcatagacacctggttgagttaggattggctatgatttgtcaaagcaggctacctctcaagtactgggttgaagcctgtcatacagcaaacttcctcatcaacctgttgccaaccaaagtccttatgaagctctacatggtcagaaaccagaatatacctcattgagagtctttggctgcacttgctatccaaccctgagagattatgcaagaaataagtttgattcaagggctctgaagtgcatctttctaggttataatgagaaatacaagggttacaggtgcttactcttgtctacaggaagggtttatataagtcgtcatgtgttgtttgatgaacaagactttccttttcacaggataacaccaactcctcagatgactttcactcctcttcttgctgcttggtacaagagtcttcctcttcaaatcagtaaagaatctgaagaacaagcggtcaagatgtcagaaaacatttcaactacttctgaagatgctaatattgtaaagccaattcttacctctcaagactctccatcactgatctcatcaagtcctccagcatcacccactgtgcatcatggagagaattatgggtgtacggcaggctttgatcttgttcctataggcaacagttctcttccattgttgcacagtattgataatgctgacaattccctgagtgactcttcaacaacatctcagactgaacctgtcaacaatgaacaaaacaatgatcaacatgaaaatccaaataatgatccacctgcaacagaagttacatcaatccaccctatggtcacaagatcacaagcaggcattagaaaaccaaatcctaaatatgttctgcttacctcaagagttgcttatccagaaccaaagacggttactactgctttaaaggattctggttggaatggagcaatgcatgaagaatatgagaactgtcaagaagctgaaacttggtccttgattccgagaacacaagatatgcatattctaggcagtaaatgggtctttcgcacaaaattgaatgctgatggtactttggataaactcaaggcaagattggtggctaaggggtttgatcaagaagaaggcattgattatcttgaaacctacagcctgtagtgagaacagccacagtcaggtcagttttacatcttgctacaattatgggatgggagattaaacaaatggatgttaaaaatgcattcttacatggagatcttaaggaaacagtatatatgactcaacctgttggcttcattgatcctgcaaaaccagactatgtgtgtcatcttcataaggctctgcacggcttaaaacaggcaccaagagcttggtttaataagttcagtacttatcttttggagtttggtttcttctgcagcatgtcagatccttccctgtttgtctacatcaaaggcaaagctattattttacttttactctatgtagatgatatggctataacaggcaacaattcagaagctctaactatgttgctggtggagctcaataaacggttcagaatgaaggacttgggtaagctgagctattttctaggaattcaagtacagtttcattcagggggactttttctttcccaacaaaagtatgcagaagacttacttgcagtagctagaatgctagactgtgcaccaatgcctactcctctaccactgcagttaaacaaggtacaagatcaagataaaatctttgccaatccaacatatttcaggagcttagctgggaagctgcagtaccttacacttacaagaccagaaatacagtttgcagtaaactatgtctatcaaaagatgcacatgccgactgtctcagacttcaacctcctaaaaagaatcatcagatatattaaaggaaccatcacaatgggtatttctttcaacaaagatgcagactgcacattgagagcttacagtgacagtgactatgctggttgtggctctacacgacgatctacaggtggcttttgtacctttctgggcaccaatgttatatcctggcagtcacaaaagcaacctacagtagcaaagagttcaactgaagcagaatatagagccttatcagaagcagcatcggaaattacctggatctgcaaagtattgaaggaacttgagattcctctttactgtccaccggagctgttctgcgacaatctctctgcagtttacctgacagcaaatccatctttccataaacgcagcaaacacttccagacacactggcactatgtaagggagcaggttgccttggggaatctccgggtcactcacataccaaacactcttcagatcgcggacatcttcaccaaatctcttccgcctggacctttcaactctcttcgattcaaactcggcgtcgatgtgccacctactccgagtttgagggggactattaagaacagagatccaatctcaacaaaagaagaagctgaagattctaacctagctaaagagaaaaagggtttctcggtttcagacaacaagaagacaaaacaggagccaaag

SEQ ID NO: 5434 - DNA, 7006 bp, Arabidopsis lyrata
  Intron number 2 from transcript 913019 (locus 913019) deri ved from phytozome v7.0 (chr-ID scaffold_1; pos 14604181 t o 14611186 reverse strand)
gactactaaccaacatcgggctgagaaaacagtcagtaggaagagataaagtggaacttacatacttacttgagtaggattaagagtaatgtaaatgtagtttgatagaagctgcgtggggcttaatcaataatgacatcctcacttaaccagcattactgacagtatctattaccgcctcacaatattttgaaaacaaaaccgagcaagaataacgtcgctgatatcgagaccgttcttgagaattgttaaatttgtattcagtgggctcgcttccgggataagcaatggaagaaacaaataaattgatcattattagcaataagaattattgttactgacttaagtttgttttggatttacataggctctgtaatctttatacaactctttaatattgtggtattttgtctattcttttgcaatgtcctttgaacaagactaatcaattgttatattgtttctatttagcgaaactacagtcctagctgatcagaaactggctgtagaaaagttcctttttggtctctattttcaattttgatcatattactacatttgaaacaaccagtcttctctgaattcaccacttaaaaagacacaatttacttaagaataatttcatagaaaaattacgcgttcgagaaagttctactccacttgaattaacttcttctatcccacaacaaaaataaatttctcaaaaacaccgatataggcgcttggatatgttaagaggttttgtagagaaaaaacaattgttactctttttcataacatggttgttgtgttgtagaaattaaaaatagagcaagattcaaaaaaggctttcgtaatggaaatttccattttacttatatagaaagaaacagttttccaaattgttaatctaatataaccacatatttatctttgtgaaagttatatattaaaaaaaaaaaaaaaagagccaagtcttcttatgcatatacaatcgtgtaaaagagtcgcaagcgtcaacgttaaccctagttttctatttgaaaacaatggcgatgatgtccgatctttcacaggatttggtagaagagatattgtctaggcttccgatgacatctctaggagcagtgagatccacttgcaaaggatggaacactttatcgaaaaatcgaattttatgtaaagcagaagcaaggcatcagtttttagggtttacgatgatggatcaaaggcttttctcaatgagattcaatctccatagaataggcctcaacgaagacggtgaagagtttgttgatccgtcaataaagccaataggcaatttacttaatcaagtcttgatgtctaaaatcttttattgtgacggtttattgttaggataattttcagggcagggcataaaaccatgttttattttcacggtttggcaaagtgagcatcacctctcacgttttgacaattatgccaaattctgaccaaaatacccctgccagcgtaacgatatattgttccgtgtacggttcagttacgcggttcagttacacggttcagttatgtacagtgtttatcgttgggatcagatattttcgttttttatttattttttgcgactgtacagtgaaaatggagccttaataacattaaaaaactatgtgacatcaggattaaatgcccaaaaagtttagacatgactattgcccactttaattaatgcaaactcatcattacctcttgtaatatttgtttatacgtacatgaataattttagggaagagataaacaagaaaaaaaatcaaacaaatttatatgaacgaatgtgatgctggagaagttttgattttgttgttttacaaagtttgaagacaagaaaagcattgatagtgtaagtaatgaagtcgtttaagaagttttttttataacacacttagatcttgactctgtacgaaaacaacattgtttttattataaaaatctagaaaattttatttatttttttgttttgttgcaaatgctaaatgaggatatacagtaaaacctctataaattaatattgttgggacccctgttctaaaaatcggccgcctaggcgctgatctggtggggaccgcggcgattttgtctaaatcggtaaaaaaaatcggtgatccgatttttttccgcctagaccgcctaggcgtccgcctagacggcgcctagcccaattttttattttttttggatctaaaatttaaaacgtcccacttatgtttataatttgtataaaattcataagtttgaccttaaattcttgttttcatgtgtttaatgcaattttaaaaacaagattatataaatttcttatttataatggattaatatttttttaaaatattaaatagccttaaaactagtccccgattaatccctgcttaatctccgatttttttgctaggcgctaggcccactctcaccgcccgactagcgcctagcgattttttaaacatgggttgtgaccatgatattttattaatttataatgatattaatttatctatttattaatttttattgtaaattaatatttattaaattataaagagatatgttttaattcttaaaattttagaaagaaatgaatttataaattttatagttttggacttgaaattttaacagtttcaaaaaactttttcaaaaataaattagacaataaaattacaaagactatagatgaatttatttatacaaaacgatatacgtaaattcaaatttattattaatgacctcaattatcatattttaactgctataagactattgtaatgaaaatgatgcatattcaaaaattaaaaacttacagaaaattttgactattttatgatacaattatagagtatactacaccactataatttaaaatcacaatagaccaattgttttattcaataaaagttagacatatgttctaacgaaaattccatttaataaaaaaaaactaaaagcataccttattataacaacttgtaaatatatatatatatatatatatatatatatatatatatttacataattattaatttaggatattaatgggaccatatatttacatagagattctaaaaaaattattatcttactatcttatctaattttgtcaaattttacattggcccgacttgggaccggacaattttattaatttatagtgtttattaatttatcgagtattgatttatatatgttctactgtattagtatttttaaagtgtgtagttggaaattctttttgtttttgtagatataaatcatgatttcagttgccttttatggggttctgatgaatttatgatgcatgtgagtggagatgcaaagaataagaatggaaattcgaaccagaggaaggcaggtttggtcagtgtgtacgtgttaagaaaaacatgtcgtacacggaatttgtacgtacattatgtgaggatttcagtttgaagtccactgaatacaatcctatatttagttactggatgtcgagaaagatatcaatgatgatagaaagtaaacgccctcatgtctacattgataatcagtacattctttttgattcgtggtggggatcatagtgttaacttgtttgtctcttttattacaaccgtcaaggtagacgggaatactgtcgttaggactgatggccacgatgctgaaagtgaccgtgtgtcgggaagtgcagagaaactaaaaaccattgtagaggcttcaaatgtggataaaaataatgaggccgtagatgagcaagacgacgttgaggacgataaaatatatgaggatgaagaggatgaggacaacgaagaggatgatgtgtataagtgtatgatgatcatcatggcgacgatggatctatgggggaaagtaccctcgatactattatagacggtagtgaaggtagtggcgaagattacgattacaacaagtggaatgatataattgtagaagaatatagaattgggaatgtttaggaggatgtcattcacactcaacagactgttgaacatacatgagtgtacgtacacaagtcagcgtgtacctggaagagataacatttttcatttcggtgagagtacaccaaccgtgactccaacacgtacatgtcgacatggtttgtaccaatgtacgtacactagcgactttgtgcaagagacatgatgcgaaggtgattttgttacgtacacagataccaatattaatggtagcgacgaagttactggagatgatgttctcgagtgtggtattagaggttcagcaagtggagtactaaatgataatcggctaattaccacagttgaggcttacgaagtatataatgagtttttttcattacatggtggtgaagcggaagaccatgttttattttccacatttttcacattttcactatttttatttttgtactttagtttataattaatttttttctttcgtttaagatccatattctaaaaaagaaattatatactttgaatgataattttttgttttactataaattgttgttagtaaaaaatttaaaattaaaattatcatgtacgtatgtatatgtacataataaagattatgcttatgtgtacgtacacgtttaaaaaattatataaatgtaaagtattttttgaatatatgatgcatgtgttaatgaaaattcatgtatttattattgttagtgagtagagattcataaaagaagaatagttaaaaattttacttgagaactttttttaagtaggtgtgtacgtgttatagaaaatatgacgtacattgtcagtcatgcacgttatgtgaggtgtttaggttgaactctactgagtttattccaaaaattagttactggatgcctagaatgatgtggatcatgatttaatataaatgcccttctgtctacattgacaatcgaatgagcttgaatgcatttttttttatccgtagtggggatgtgtaaacatgtttttgtcattttgtccaaccgttaagaaatatgtaaatagtatgtgcacgatagaggaccatggtgataaaactacccgaagaccagggtgaaaacacaacaaaaaccatatttaaggtttcaaatgtggataaaatgatgaggatgtagatgaagaagaagaagtataggacgataaagaggatgaggagaaagaggataataacgacgaaaaggaggatggctaaaatattgatgaagaagacgaggaaacgatggatatcataaaaccgactatggacagtaatgaaggtaatggcaaagattacgattacacaagtggactgattttgttgttgagaaatatggacatttcggagacgctggtgacactcaaccgaccgtgggaccaataggaaaattcaatcgtttattacaaacgtgtacattccctaattaacgtttacataattgaaaaaatatcactagaatcgtgacattcaactatctattagttctaactgggaggtaagatatgatttgtaagaatgtacgtacactactgactgtgtacttgataaaatatgtaaagataaatgtttgacgtacacgaatatagatgagcatggtatatgtgaagtgaatggtaatggtgtggagtttggtattcgaagattgtgaaaaagagtcttacgaagtgtataatgacttatctacatttttaactatgagacggagatactcgataatgatgaagcttcagtcgtcttagacgatttaactaatgtccgaatggtgagacataagtgtttgtttactaagttagcagtgtcaaatcattgtaaatgatgtaatcgttattcatactcggtagttggagtataaattatgttaacatttcataacattaacattcttgtaagctatgttatgaaatgttaatcaaaataaccaaagatttctaatgtactaattcaataaatattacgtacaccttaaattgcatacgtacacagaaaatattcaatgaaggacaaaattgtaatttgacagtcatcttcaacctaagaatccttttctgcaaccctaattttgcagccatcgttagtagttatctcataatcttgttttctttatgttttgaatgttttttacatataagtattgtaaatctagcataatttatgtttgaaaagctaaacactttgagttttgtttaattgttcgttgttaaatcgataacgttggaagaacaattaatttttcacaattttctcattttcctccaacttgcaggaaatctcttaatctgtttaactctaatctctgtagttttttttttttttttggtaggatctaatctctctagttgataatgaagtaaaatcaattatttcaccatctaattctagatttaaaacaaatttttttcaattttatgataaagaacaactctcctttgttctcgagctatttcgtttctttttacataaattttgattttctaaacttttatatatatttaaataaaaatatatatatatatatatatatatatatatatatatatataactatttttgtcttttacgtagtttagttgtagaacaaactaaaccaacactgttataaccaacacagttatgagggcatttttgtcagaaaaaactcaaatggccaaatagtgagagttcaatttgactttgccaaatggtgagagaaaaactcattttattactaaacgtgaaaataacttttattggttatgtgtcacaatgaacaacaaaaggaagctcgtagtttggaacccgtatttgggacaaaccaggtggatccaacctaaaaacgattaccgcgaaggcgccaagtatgctcttggatacgacaacaacaagaaccacaaaatcttaaggtttttcgatcgtaaaggctactacgaaatttacgatttgaagtctaattcatggagtttatctaatgtcattcccaactggcagatatattgttgtgagcgctacacgtcgttaaaaggaaacacctattttatctctgctaaaaaaaatggaggggctggat

SEQ ID NO: 5435 - DNA, 429 bp, Arabidopsis lyrata
  Intron number 2 from transcript 473768 (locus 473768) deri ved from phytozome v7.0 (chr-ID scaffold_1; pos 21950691 t o 21951119 reverse strand)
caaatcaattctctctttttccaattcttgaactcttctctccaattcactcaggtaaaggaacaatctttcgatcatttagtccattgttgatgaaaccctcgatgttggtagattcaattgttgcattctactaggacattgtgtttctttcttgattttgattcaattctgtgtaattgcttttgaattgtgttgttgtttgagttttacaagtaaagcttgatcctttcgtgatgggtaatctcattctcgctctaaacgtgagacctgatgttctcttgcattttctcgttttgtatgaaacggtttagataagaagaaacaaaaaacccgatttttcgatttctttataatattaatttgattcttctttttggattttggtatataaagtgcagctaactttctgcacctaaaggattgact

SEQ ID NO: 5436 - DNA, 3818 bp, Arabidopsis lyrata
  Intron number 1 from transcript 480616 (locus 480616) deri ved from phytozome v7.0 (chr-ID scaffold_3; pos 21969997 t o 21973814)
ccaatttgctctcgcttcctttatttattggttagatctcggttcctctgatgataatctcgtttaatttcgtctctttaagcattttcttcttcgacttttatgtaatatcgaggttcaagcgaaccctttgattaaagattttatatcatcagtgttttatttgaaaacactctgctccatccaaaaaatggttgttgctatttctaatcttttaaacagtgctatccaccccatgcattgcattggacaatactaggttcataatctttttccgtagtatggtccaatgcaatgcaagaggtggatagcatctagtttttcttgttcttaaaattgtgacggtccatgatattaaagtttagatagtttaatggatgaaagataataaccgcgcattgtctctatcaccaccgaccagaaaaagttgtagcggacgttttgtagtttctctttcttttggaacccataacaaatcaaagctaccttttgttttttaagagaatacataaaacccccaaagaagtaaccctagttaccggaagagcttgcgtttacgtagcaatgagaagagtcacccgaataaatcgattgtaagacattaaagcaataaacaagatgaaatatggcacacatatttgttctgcattgaataaagaagattataaacaaaggaggaaagaggtgatgacctctcacctctcttttgccggctctcaagataaggtactttcgtccaaaagatatcaaaatggttacttgttacgttttcataattatatgactatattctttattctccctatttatacatgtatgtatagaatacttatattttttccttctcctaccgttacaatttcattttcagctttttgcttttgaaaataaagtcacaaaatacaccgatgtttagttttgtcatactgaaatatattatcaatctatctttaatttcctcattaaaaagtgttgcaataaattgttcttgatttgttgtatatactttattttttgttattttctcaataattttgaaataattttcaatctttcactttgttaaatattagaccatcacatggtacttacacatatgtatatatcttttcgacatatatacacttttatattcaatgttaggatctaattttactttgcattagtaatttttcaaaaaagaaaaagatcattaaagttactctcctttcgctaacagaggattaaatacagtttctcttctcctatttttatcagcgaagactaaactaaaaacagaagatctcatggctttgcaagtgaagcttccatgggatttggaggaagacatactctctcgtcttccacctcaatctcttgttcgattcagaagcgtctgtaaaagatggaactctcttttcagcaacaaatatttcctcaacaaccacttgtctcgctcccatcccgaattcatcatcttgaccaattccaagatttattcggtagacatcatcgatcacaaaaacatcgatccaacgatagagttgcgtgagctaccctcctctgatattccagaccgggaaacaaattggaactacggaaccatcaccactacttgcgatgagttcttgttttgcaactttaggttttgggagaacaagacagcactctggaatccatggttgagacaggttagatggatcgagtacgagaataaagagttctgtgttttcggcttaggatacgataattgtagactccaaaaggtatacaagatcttgggctattttgtttctcacggtaaagtcctgatcaaaaaaggtcagagagttgcgatctacgggtgtgagtctcacgcgttgaggtatatcgatacatattggagataagcaagatgtgtatcttgcggaccaagtaatatggaccgttaaagtccattatgaagtgaagcccgtgaagcccaaaccgaagaatattctagatctctatattacttcttgtacaagttatttacttatatgtttaggaaagttttacattatgtgggtgttaacattatgttaatgttgacactatatatatgtatcttatattctcatatgagagacaactcaataaagtattttatagattctataatatttgacatggtatcagagcagtcgatccttgtggatctgaattaaacgcttccgcattaaaaatcttgtggtcacaataaccatgggatgtgaagccatcgaagacggtggtgacgaagacgatccggatgatgacgtgaagcaaagtttgctttgacgtccacatgagagttttatatttcttttattctaagttaatgttttaggtttattttgagtttatgatttggtttagcacaagaattagagatctttgaggaattattatgttttaagggtttgggatttcacaagtagttgtttatttatgagatttattcttgagtttagaatatctcatttttttaatgtgagttttgatttctcatattacgggggagtttattggaacactcatgttttaggctattttttagtccggtttgtggactgtccgagataggacgattatttgtggagttgcaggatttgcgcccacggaatattgttattcccttttactaagaccaaagacgagctgaagttccatcctcttttgaaaattgaagtttatacctgaggagactgttgacatgatttgtccgtcctcgacatgatgtccacgacataggtgtttcgctttgtggttgcatattttgcgtttcgcatcccacctttgtcgtgcgggggagtattggagataagcaagatgtgtatcttgcggaccaagtaatatggaccattaaagtccattatgaagtgaagcccgtgaagcctaaaccgaagaatattctagatctctatattacttcttgtacaagttatttacttatatgtttaggaaagtttacattatgtgagtgttaacattatgttaatgttaacactatatatatgtatcttatattttcatatgagagacaactcaataaagtattttatagattctataatatttgacaatacacctgaggatgactggcccataattgaaacagctaaacgatcaaatgtgtccttgaatggaaatctctattggtttggttgtagtaattataagactcttaagtactacatccgaatctttgatttctcgacggagaatttcaattatttctgtctccttccgtgtcaaatgaaccatcgtattgataaacttgtcctcgcggtttataagggagatcggttttcgttgttgaaacaatgcagtgtaacaagggagattgggatatgggtaacgaaggagaggattagtaataacaatggggacggtggagagggcgtggagtggataaagttgatgaccttgtcaataactaactttccaaagctatttggtaagtcttatagcattagttacttcatctatgagaagaccttattcatgtgtaataacgcgatgaaactggattggcttgcatttatattgtgagtgaagatctctgcaagaagattcaaataggttctggaattttaaagtgttgtcagtgtgtttatactcccaatttgctctcgcttcctttattttgaggatagattgcgtgctttgcaagtctagtttttataggtcagattgaagattactagaatatttcttatatggcttcccgataaagcttgcctcttcgctcgaatggtgcttcggggatcctccttttcctccgatgatactcagagttgcttcctcttttcgtctccttaagcattttcttcattgtt

SEQ ID NO: 5437 - DNA, 3807 bp, Arabidopsis lyrata
  Intron number 3 from transcript 494175 (locus 494175) deri ved from phytozome v7.0 (chr-ID scaffold_7; pos 24500841 t o 24504647)
ctgagatctccgtagccgctctctccatctggtaaattctaatttattagtatattttcaaattaataatgtttataagatttgttgtttgatttgttcagttttatattttaaaaaattctcatcaagaatctctaggatctatttatcagaaaaaaaaaacaaatctctaggaattagcactaatataattcgtcgtgcggagttgacttatattattcgttagttcttgagcagtgaaaccctagctagtggctcgtcattttttgctgcattaatatgataatatctatcaaaataatttgcttgcattaaattaatatgatgattctttcttttactattattattcgtttcatttttttctgcaacattttatttttagtcatgcagtactagtaatcccttatatattaattgagaagcatttttaaaaataaccttacccttatgtgtgattaacaaaaatgccatgctgatgtgtcgttctcacagagcttctcaatccatttaattaaaaactcaaaatttattaggatatttacagattttgccattagttttaattatgtttattttctcattaatttatgctttttattttactcaattaattaaaacgaaaatacaattaaaatatgtaattaagagatacaaatctatacaaaatggagtacctaatacagtaaaacctatataaattaataatgttgggacctgaaaattttattaatttagagaggtattaatttatagagagaatttactaaatttgtaatttcttaaaaaaattctatctaaagggaggttttttttatttgtaagcaatatctttttaaaactaattataagtagagaagcaattattaagtttaaaaaataacacaaacttttttcgaataagagagtcatatttcattcaaaattttacatataatattttaaatatatattaagctaaatatacatatatattcatcagtttatacaattattaatttataaaattgatgagaccatatgtccatatgtttgcataagatttttagaaaaattattatcttattaatttatcgatttgtgtcattttttacattggtcccaactcgggaccgcaagaatttattaatttaaagaggttattaatttatcgagtataaatttatagaagttatactgtattttttgtatctattaatataacaagatatatatcattaatcatgataaacacaaaacattaatacatagaaagcacactcttggaaagtgcagtgcccaccgaagatacgacatttcttatggcaaattttaagcggttgtgtaccggttacggaaaatctacggaaaagaggaatggattgtgacacaggatgtgccagatgtggtgcatcagaggaaacaatcaatcatacattatttcagtgccaccggcacgacagatttgggcactttcacagattccaacggcgatcgggatttttcccacagaatctatttttgcgaatttggatcacttattttggagaataccttctgactttgatttttcagcttttccatggattatatggtatatttggaaagcaaggaatgaaaaaatctttgaaaatatagataaagacccattagaggtattacggttagcagaaaaagaggcacaattatggcaagcagctcaattagagctccaagaaggaaatcatggtgttgtgagttcggcaactctgtcccgggtgagggaggtttcttttgattcgaacttttcaggatatcgttgttttgtggatggatcgtggaaagaaagtgataagttctccggtacagggtggttctgtacatcgtcaaatggagagccgccaaccatgggagctgcgaacctccgtagaagtctatctccactacatgccgaagtcgaggcccttctctgggcgatgaagtgtatgattggtgcagatcatcaagatgtagcggtctgaacagtctgtaaagaggagtgttcagacctggtgaagatggtgtcttctccaaccgaatggccggcgttttcagtgtatttagagaaatttcagagcgacaaagaggagttttcatctttttctttatctttaatttctcgtagagctaatgtcaaagtggataatctggcacgaaaagttcgtacagaaccgcttcatatcacatatgtaaacaacattcctcaggaatggttcttttgaattttatttaatttcggatgacaaaaaaaaaaaatgaaaattttcattaatcttgataatattactccctcctttcttttataagttatgttttaggagaatgcacatatattaagaaattatttattttttgtttatttctaaactaaaacatcatttattatctaatcaaccagtaaaaaagtaacctactagaaatataaatcgtcaaaaccaagaaaaaagtaattaattttacattgaaaataaaaaacatcatctatttaaaaacaaaattagaagcttaaaacatcacttataaaagaacggagagagtaatacactaccgtttatctaataatataaaattcgaacactttcaatataattaatacattaaaatgtatttaataatcgttttgtcccgcacatagtgcgagttattatctagttatacatatatataaaaaattgactgttttcatatatgtaaacaacatttctcaggaatgactcttttgaactctatttaatttcggatgacaaaaaaaaaaaaaaatcgactgttttgaatgtgtccagagcttgttcaacagtagttattcatgggagcacatataaacttaaaaaaaaaattgtatcgtaatcataaattttaaaagtaaaattaatcatgggggggggggggggggaacctactacggtagaaaaggggtcattgaccttggttcaatcattctaaattatcgattaatatacaaaaaaatgtcaaaagaattagtagttgcctagttggtaattaaatttttcctttttgaccggctacacttaggcatgaccaaaagctaaccgtaacggtatttcgtaccgtaactggaccatttctcaatcgtaaccgtataaaacggttaaaaaccgtaaccgttaactataaaaatagattaattacggttaaaatatactaaccgtaaccgttaattaactgtaaacgtatcaaaaccgttagttgaccgtatggttaaccgcactattaaacgcatagttaaaactttaaaaatataattgtaattgcgtttagtgaaaatataaatatcggatgttcagataaagattttcaaaaatgtaaatgataccgcatatgaaaattctacgttagaataaatgttctttttctcaaacaaatatattgtaatgttatgttgctcgaaatgaagaaaatttggtttataacttattttcatcttattaaaagtagtataaaaagtcaggtaactcataagatttcgcttccgatattaaccgtatcgtaattatcaaatacctgtaaccgtatttaaccataaatgttgtaaccgtaaccgtctttaaccgtaaccgttttaaacgtatataaaatggttaaggatacggctaaagaaaatttataactgtaactggtggttaatcaatcgtaaccgtaatcgtggttatgcctaactactcttatcgattcaacacctatattaatcatagtaaattctttgtaattaaaatttatacaattcgtatcctctaaaaatagtatgattaatcgtttcttttggtcttgtaacgatattaaaaatgaagc

SEQ ID NO: 5438 - DNA, 2984 bp, Arabidopsis lyrata
  Intron number 1 from transcript 894920 (locus 894920) deri ved from phytozome v7.0 (chr-ID scaffold_6; pos 17989329 t o 17992312 reverse strand)
tttgtttttaacttttctggtccttttgtcctcatgtaagtctaaatctatttaattgggatcttatgtaagatatatatatggtcgtttcttcaatattgatttgataatttgaaatatattttggaaattttataggtacatcaataattattcaaaaagctaatttagaagagagaacatctcttgacaatccatcagcgagcccttcaatggatcaaattctagtggatatacatcttggacagtctcttcgtcaaggcgtaatgggtttttgttatgactgcggaaaagcttgttttagaaggggtaagtatattcgtagttgtacaagatttaaatgtcgttgcagtattagtgacattaaataagacttcataattttcttgtaaaaattataataaaattatcgtatttaatattcttctatggttttgctttaccttgttgaacatagataacagggtgaaagttatgcacacgacatgatatttgtgctacttattagtgtaaaataaattgacttacttagcttaggagaagagaaattaatttttcttctagagtttttgctaggtttgagccgaaatttcaaactgaattgaccaaactgatgtttggtaaatgtggttttgttttagtttacacacataaacagttaagtagaagaataaaacaaattcaaatgttggttccattaaaacccagaactcgaattcaaactgattgatttaacgaagttgtacatataaagataataaaacctaggtctaagtcgtttcttttttttttcatctgacgaaaaatcatctatctgtttgtttctcttttttctcctctcatacaaaatcaattatactctttgttgtctttttcaccaattctaccaagttataccgtcaaattatctttacaaccatgtcggatagctcgttttgaccgccgccacatatgttaaacgacttaagatatgtggtttgaatgtttttttttcgcatttctcatttgtgtcttatatttatagttggcctaattatttggctgatacaattatgaaacgatgaaaatacttatttataaaatcctaataagaacaaaacgtgcgaaactgaatattcgtgtccattccgcaatttcatttttacaacaaaccgaaccaaattttgtacttttaaatcgaagacttcaatatgatttttatttggtgaaatgtcttaaaaactgaacacactaaattacttccaaatttccaaaacaaagcagaccaattaaacagattacccggtctcagaaattacttcaaaatatatttaataagttaattattattaattttatagagttgccaacgatatatattggaacataaaattatacatacttcaaataagtttttagtattaagattttatcaaataaataataatatttttttcgtttatcaaatttaaatatgtaatcaaatgtgttctcttgttcttagaaataaaaatattttgagacaaggtgattctagaaataacacagggatcaataagcagagtaattatttaaaatatattaatatatatatgtatacatatattcatttatatatcaattcgagacgctaaacaaacacacattatttgatcatccataaaaaataatatttagccttattagacttacaagatagctttcacaactcggtagcaaaagaatgattaagggtaccacaacgtatattgattcgaaaatgtgcaactaatttacgacatctaaacgacgagtataaatgttttcaaaatagtttcagacaagcaaccacattttactttataaaacgtagcaatttggccaatgatacttttttgcaatagtttttaatataaaattacacatttctgttataaaaatatggccattaaaattataaaatatgtttttttataaaaaactagttcaaacttttgctatgatgtggttttctatattgatttatttattttgttgatttaacgaaacattttggttattgacattttaatattgtttgcttcagttattttcatcatttgcagttaacatttgctagaacaataactatatttgaactaatcctacattcttttacatcgaatctctgggtaggtctcttacatccttgacgttatatttaatatcaccacaagtaataaaatttaaatatattttttaacttagatataatattatagtcctagtaaattaaataaaaatatttataaaaaaatattttataaaccaaaatttaagacatttacctaagaattatccttaaatgtatagttataaataataaatgttgtattgaaaatataataatttagaaatgaaaccattattttaaaacattactccctctgtttcaatttagttgtcgttttaggatttatatttagtttcataatagttgttgttttagattttcaatgcagatttttggaaaaacttcatgttttctctctagaactttattatttttgaccagaaatttttttaaagtatattaataaaggaaaaaataaaatgtttaatggttttcttaatttgtatgagaaaatcttaaatgacatgtaattcgaaacggaaggagtattgtttacttgaatttcatttataacaaaataaaacgtttattaaaacaataattcattcgtaacatattaattcataaaaatatatataaatatgacactatgtagttacctacttcattgcacaataattcttttgatatattttttcttcgatactattatatcatacataaagaatgaagacaattattttgtttttaacttttctggtccttttgtcctcatgtaagtctaaatctatttaattgggatcttatgtaagatatatatatagtcgtttcttcaatattgatttgataatttgaaatatattttggaaattttataggtacatcaataattattcaaaaagctaatttagaa

SEQ ID NO: 5439 - DNA, 736 bp, Arabidopsis lyrata
  Intron number 1 from transcript 932067 (locus 932067) deri ved from phytozome v7.0 (chr-ID scaffold_4; pos 281685 to 282420)
ctcacttctccaggtttttcttctcctctttggttgtagagttggtgatcgtaatcccgattctaatcttgtgatcttacttgaatttgatggattctgtgaaattaatctgatttagttgtgaattgacttcaatttttaaagaaatctagcgagaggttatcctcaatcgaaaattcagttacttaagttgaatctcccaattttaatgagaaagctagtccaaagtcattagatcattctcaatttcactttggtaatggcaattagggttcatagttgtagatgcttaatttattgagatttgagttagaagttctgttgttttttttgtatatggtaggtggtttctcggaatcgaaagatgtcaaagatctgccagtacttctaatggtctcttcaatacttcactattggtctcttcaatactccatgttccgttatctaacacgctttcacctcttgctacaacaattattttcattgcattatcttcatcggatttttcatccagaagaagctgattattgtaacttgttcggtggagcatctgatactcttgagtaagaacccgattgtaacatggtgatggtactaatccactctttctgataaattatttatgagaaatttctatagattacgcatcatctcgttatgataaatacttaggttttgtgtatcttttgttaggtgtttgtgaagtcctccaagtccaaataccaaattaccaatc

SEQ ID NO: 5440 - DNA, 1173 bp, Arabidopsis lyrata
  Intron number 2 from transcript 340386 (locus 340386) deri ved from phytozome v7.0 (chr-ID scaffold_3; pos 597739 to 598911)
cggtacatgcaaacggtgaagaaacacatcttattctgccaaaaggaatctgatgtctatgagctagagacctagcggtttgagctgtacaagcacgacattgacaaaggagccgaatcttacgtggcagacattggagatttctgcattttctttggtaagaacgaacccttctgtatccccgccagtgtgtaccctggccttaagcctaactccatctacttcaccgagaagactcacgtttctgtgtatgatattgccacccacaacatcgatcaactccctaatcaagagcatctgcttacgcctttttggcttcccccaatcctgcactagtaatctctcatttaattcacatcaagtgttagtcctggatttgctcttgtcatgattaggataatatgatgcatcattctatctctatccacgattattgcatgagtatggtgttcaaaaatttgtcaagcaccatggctagtgtcacagcctgctccggcgaaaatggcaaacaaaattgtgtggtctttactgacttagccaaaagaaaaaaaaactgcaaacgagaaaacaggcagaacagatgagcaaaacagtgttgggtttaaatcataacatatataagctgggctcaacctaagtgggctaaaaacgaagaagcccaagaaaatgtgatccaacaggcaactgtagacagaagccatcaatctcgtgttgaagcaaccctaaattggccacagatgaggagaaagagtgaggataataattaataatgtcgtcgttgcttacttgcttttggtgaaaagaatgtcgcgagtagggttctttgacctctctctcttctcttctcgaagtcagattcgaagaggaggaattcgcttgttgacgacgtcatcttctttatcaccagctccatatatgctactctcgatggatggtatcagaagattaagcaagagatacaaattagcgaatttcaactactacgacccaataaatcagaaacgagtgacgatggcagagcagaggatccctgaaagcatctacctttcaagcaacatcggatcttctcgtggttggatgatcaggatgaacgaagaagatctaaccgtacatctcaccaacatgttcaatccctcagctcccaaatccactcacaaagtcatatccctccct

SEQ ID NO: 5441 - DNA, 2295 bp, Arabidopsis lyrata
  Intron number 4 from transcript 478326 (locus 478326) deri ved from phytozome v7.0 (chr-ID scaffold_3; pos 3977452 to 3979746 reverse strand)
acaccaaagtttcttcaggttatataatttatattcgtaataaatttaaaataaatatagtgcatatatattttttgaattatatataattaaaattcgtagttaatattaaaccaatcattatccaatattcaacccaaaatctagaaattttattatataattaaaattcataatttatatcatagttattagtttagttccatcactatctaacattttcagaaaataataataaaaaattttgagtatataatttttttaatataaacagtttaattgtaaattttaaattatatttgtaaaaactaactactcaaattattttcttttcgttttctgaatttttagttattatttaaggacaaaaatatcattttggaaaaaaaataagatacatctcaaattttaaaaaattatagtatacattacaaatttctaattaaatttagggtatacaatccaattatttctaacaggaaccccaattgttaaagggagattcttataaatacaccaaattatataagaaatttgaaaactacactaagtgttatagtaatttgaaaactactctttttatatttaaaatttaccatagtactctttctattaatttaagtactatttaaattaataaattaaaaataatataaaaaatttaaataactaaaattcgttattatttattaataataaaaatcaaaaacttatttacaattttggagtaatcatatattatctaaaattttgaataaatcaaaaataaaaaatattattgttgataatattagtaagatttgtaatttacttaaaataaataatttcaaactatataacttataataaataaataaaaaattcttcttattttatgataaatttattcattctatgttgatttattgataaatttgattttattgaactttcgacttattttttacttttgttgacttaattttcttttctattgacttattttacaacactcacttatattttgactagttgatttataaaatagtcgatttgttgaactaccgacttatgtattttgttcattgatttataatttttgatgtcgacatgttaattcatggtagacttaattcattctatgttgactaattaataagatcgattttttgaactgtcgacttatatttcatttcgttgactaaatttatttcctatcgacttattttaaaacagtcgacttatattttggttgattgatatttgaaatagttgactttttaaaacaaatgatttatttaatattccatcgatttattgataaagtagatttgttgaactgtcgaattatattttatttttatcgacttaatttttttctctattgacttatattaaaacagctcacttgtattttggttaacggatttcttacattgtcgattcttttgaactattgatttgtttttttttgaatagagataattatttttagttataatatttaaattaataatttattttggaattaaatttaaattatataatttatattcataataaatttaaaataaatatagtgcatatatatatatatatattatatctcaaaaatattaactatgaaaaaatctaaaaaatatttttgaattatatataattaaaattcatagttaatattaaaccaatcattatccaaaatatttactacatcaacccaaaatcttgataattttgttatatgattaaaagtcaaaatttatatcataattattagtatagtttcatcattatctaacattttcacaaaaaaaaaaaaaaaaattgagcatataatattttaatatgaacagtttaattttgaattttaaataatatttgtaaaaactaactaatcaaattattttattttcattttctgaatttttagttattaattaaggacaaaaatgtcattttgaacaaaggataagatacatttcaaattgttaaaaatgatagtatatatacatttcaaatttccaataaaatttagggtatacaatctaattattcttgttaaatttgtagaaaaaactcccaatcaataagtattttagacaaatttattttgtttatggtaaacgtaatttgtgtttgttttggagttatacatttgcactttacaaatatttttatgaaaaattggaaacatttttatttgtttaatttaatatgtgattttattggctcaaaatgctagtattttaacttttgttaatgtcttggccatcgtttttagtcgtttctagctggcttagctgcttcaggagcatt

SEQ ID NO: 5442 - DNA, 803 bp, Arabidopsis lyrata
  Intron number 2 from transcript 481544 (locus 481544) deri ved from phytozome v7.0 (chr-ID scaffold_4; pos 10118317 t o 10119119)
cctaccggaagcttatctgctcttcttcacggtttgtgtctattctcttgctcaattttgttcaatttcattgttaatacactataagctagatacattgtgtgaatatcttatgaattgtagttaagatagatagaatcttgattaggttttgagttcctatggttatagtctaagatttcgaaccttagtgagattagggagtgatgatttgatggtattcatctgatggatactaatgtgattatgctttgctggcaagaaaaacattcttattacactgcatcacattctttagatttttttatttgttgaattgtggtagttatagctggagttgttatgcaattattaaaatagaaaaggtgttgccgacattgttatgtgtctgtctggtaattgtcataataatttatttcataattttgcttttctctcactctttaaagattggaataaagaaaaagaaaaagactcttccacatgggcttttctcatcatgcatatcttaaacccttttccttgaagtaaacttttgtctaaatgagtgatggaactgaaatgttttaaagaacctttaatatatgaatgttttcatttactgaaactgtttttacaattttaagctttaacctaagttatgatgggaattataatgttaagttgcaatttctggctaatattaggaacattttggtcttttgaaactgtgtttacaatttgaagttaacctgcaatatctggctaatagctttgtgtttgttttagggagccgtggatcagggcgaactccgttagattgg

SEQ ID NO: 5443 - DNA, 859 bp, Arabidopsis lyrata
  Intron number 1 from transcript 337983 (locus 337983) deri ved from phytozome v7.0 (chr-ID scaffold_2; pos 552854 to 553712 reverse strand)
ggagagagtgattcgcacagtagctagctgttcaggtaatttttacatcaacatgcaatttttcttagatttttttacttgttcatgagtttttactgaaaggacaaagtttttattatgatacatacactctgttttttttttcctgtttgatgagtttttattgaaaagacaaagcttttcattacacaaactctctggttttgagattcgttgtgggttttgtcgttttgaattgaaaccctaaaaaaatgattctggttctgttcatgaatttttagtaaaaagccaaaagctttcgatcttaacattcactctgctttttggattattttagggtttgaattaaaacctcaaaacttgaaatggatttatgtattattcatgagtttgtagctttttcattactcacattctatgttcttgaaattcttgaaaccttcaaaaatgaattttttgttctgttgagtttttattgaaaaggcaaagcttttgattacacacacacatatagtctgtttatgggattctttatgggttatgatatgatcccttaaaaaatgattttgatttttgtctcgttcatgatttttttaattgaaaaaccaaagcttttaaaatcacacattcttgggattctttaggtatttgagtttgagtgtgagtttaaatttaagttttgtcttgttaatgagcttttgctgcaaagctttgaataataatacgtcttgtttttggttttctttatggatcttgatttgaaatttcaaaagaacgaaccaccttaaaaagatcttcctaagtctcaaggcctaaatctttacatttttttttttttccaggaattacaactattaca

SEQ ID NO: 5444 - DNA, 14158 bp, Arabidopsis lyrata
  Intron number 8 from transcript 475392 (locus 475392) deri ved from phytozome v7.0 (chr-ID scaffold_2; pos 4169343 to 4183500 reverse strand)
tttagaatttgctgaaactgtggtgtttgtttattgtgaatattatactttggttgttatagtatggtggcttgtctaatctcataatcgcatgattacatttcttaagaaattcattgcttaggacacattttttgtgtatgcatttcgcttctcaataataaaaacaagacatgtgtccggcactcaaggtctatgacacacatatttgtacgcttcattcacatcgactttatttgtatccatatcgttcttaagctagaaggaggacaccagtttccattgatgcaatatgcctgaacttggccacaagacgtaccttgacaggacctttttgttacacttgcattccacacaatcttgtccttcatatgtatataatgtgtttcatgacctatcattagtttttacatttttttcatgatctattattttcttatactaattataacatttaaacaaaacaaaatttaatcccatttgttgttttaaaaaagcagtttttaaaatttttacaatatttgattcgttttaatatgaaaataaaatttctcatttctcgtaaaggtcacccaaataaaattattttgttctcctttcataagagctcattgtcatatcaacttatcgtcttctatatattaaaagaaggttttagttaggcaagcccacaatttttctcaacatttttttgtaatttatttatcccatttgtcaaacactattatccttatccatattccctttaaaatactaaccaaacactctttttttttgtgcaaaagctatatcaaattaaacttagagttgggcaaggtccattacaagagaaagcagagacagagactgcttagccaaagaatcggcttcagtgttctgcaatcgagggatgaacataaacgaaattacatcaaagatagaggataaattcaggatatcgaagagaatcccatgaagctccttgtgctgtagctccgattttaaaactttgactagctgtgctgagtcggaagcgagagagagatgtgagaaacccagagtttttgcatgctggatcgtagagaggacagccatagcttctgcctgaagtggcgaattaacattcttggaagatccagatccttgggagattatcaatttggtatggtccaagaagatccagccaaaacctgcaagttgatttggtttccaagccgcatcagtcctacaagttaccagacgagggttaattgtggagaggcaagcaatcgggttgggttttgttttttcttctgagccaaaaaccatacaatgttttaatgaccaaacacactctaaatttcttaattttgacattcctcagttatttcctatgacaaattcaaaaaatttaataaaacgaattttatttaaatggagatcaagcggagcggatcaggcggatcatgtggatcaagcggaactagtacggatcaagaggatttggcggaacaagtacggatcaagctttcctatgacagttcaaaaaatatgtttgaatggtgaaaccgtattaaatggtgcggatcaaatatttatataataaaaaatgtcaaaatatgctaaaacaaaattaagataataaagtgatatatatatatatatatatatatattataaaacatttattaaattcaaaattattgtattatttttgtatatttaacatgtaatcttataactcagtgataaatacttatataattttattaacactgtttaacattttatatagcaaataatagtcaacgacatttggtctgaagacaggaacacgaatagagagcattcttgtctctcttccgcttgcagcaagatgggaatgtgaccatgttagcttttgctagttcaaaactcagacaaagagataataatctaaactagaacttagaaattcaagttatcataaacttttgtctaagtggtttcttcgtcaactctcttacacttccacatgtcgaaaattgtcgtagttaacaggatcaactcttccttcggctatgtccttagcaatatttgctggcaaaggtttgcccgtagcatctgtatacttttcaatgtcaaattcatcgtcagactcctcaggcttactcaagtgttgaagctcgctactttcttgattatagacatattgaaatttgaaagccacaaaagcatttttaaataatctcttcaaattcacattaagtggagtcggatcttttaataattgctctaaaacctgaaagaaaattaataacacacatcagacatgcaaataaaaatctaacgtatggtatactagtttgaactaaatcaagtaaaaatatctgtctaccacatttatgttcctcaattagtttatatgctcttccgagtcccccgtagatgataattcaaaataatcgcaaccacaaagaatgcacatctccagaaacatatcgtttgtgaattctgaaaaatcgtataatatttttttgtcctcattatttttgcttttgggaaatttcttcaataggtgtctcatttcgagttcgaacaattgagggtctttatcgttgacaaaaataatctttgaacacaaaagtttaaagtggtaaaaaataataatacttaaaaaactataaaaaaataattgataagtgtatttgagaacgtactattggacatctaaatggtatgaggtcagaatcagtagtgagaaccgcataaatgtctttatctttattaatagccaaatatgcaagctgtgcatcggccgagcaacgataaactcgacattctcatatttcttctttttaagaacctttaaggagagaaaaaaaaagaaaaaaaagaaaaaaagaggttaataaaataaaataaaaaagcaattaaaaagaactgaaattttttaagataattatttacaataaatgttatgaaaacatatgtcgcataaggcgtaatatgtatattatcaccactatccttctcattcccttttttaaaatcggtacacgttgtccatcgaagacaaggataagcttcacattctgtttgaggagttggtcgattttacagatgacaaaatcgatatatttagagtcgggtgtgtgaggttcattcttgaaattatttttgtccgaatgagcacctctatacaaccacactgaagtgtcaatggcgacagttcagaaaaccggattgtttcataaccttggaatcttgacagagagagtacaaacccttgatgcccataacttaagatttaactttttttttagcaacaacacaaagggtctctgtaaatatatatagagatgaattttttttgaatttttccatttctttgaacattcatttctttgttttatagccgagagagattcactgtgcacgataaactgacacgaaatgttcgtacattaccgcatctttctacttatgtaaacaatattcctacacattggctaatttgagccaatccaataaagctgttgacaaaaaaaaaagagattcactgtgctctgctttttactttacttacaacttcttccaacagatgggtgatgaagaagaaggattatccaaacgaaggtctaagttactacgcttaaatcgtggctagaacaacgtcgttaatggtaacagattgaaagctgacgagaaacatccagtctttggtctttcagtatatgcgataaggatccactaaacagaattcctcaaaaacaatttacgtctgaagaagcggaggaggaaaacgaccttaaaaatcttaagaaacatctcgaagatcttaatattcaaaattgtaaagatatagcaaataatagtatagaccgttaataagtataacaaatcataatttactaaaaataatttaaatttactatacaaaaaatgctatacttaacactaaaaataaaaagacattgtttaaattgtttgcaagtaccatgcaacacaatcaactagtaatatagagcgtaatatctttaaaaatactaccaaaatataccgagagatagataatataggtacttcacataattgatcatgttcgaatgattatgatacctaaaatattaacataatttatatagtttattcatattattttcttcatctttgtatatcaattaattcataagacttatttctaaaaatgatgtgtcgttttgttatcttatgaccaaaaatattgcattaccattcatattattattttattataaaacaacgtggttcacacgttaaactcatcaaatataatgcgttcttactatgtcaaacaaaacacaaattttgttcatgattttggaacacatgcagtttaaatcaatattttaatatatattttaagaatgtcataatatttgttgaatgtcataatatttgtggttcctccattttgcgtcttgaccgtcttgtaccatgtatccattgagaccctaacttttctactatgttgttcaagaccaatcctcatttcctcatacctcaatcaataccattgatgaattgtgcaaagaaaactttgtttggagttcaaacacaaaacatggaatccacgtgtatgtatggtttatcaaagttttaaaaaatttacaaaagttttctaagagatttaaaagagttttttaagtaattgccgacatattttggtggaaaaattttgcacgttgctgaaatattttggcaagaaaataacttttagcttctttgcgggaaatttttctgaaaatagacttttcgtagttaaatgaaaaataattgagtattttcgtagttaaaaagagtatttttgaaaatagacaaacgaaagagtatttttgaaaatagacaaacgaaagaatatttttgaaaaatggcattgaaaaaaagcatttgtaacttggcattacgagcatttgaatgcaagttaccatgtttctcatgctgaagcttttgcatgtcagcaaccaaggtctcaatgtatccagaagtggtaattaagaaggaggggttaattgaccatcataacagttatagttttttaaattataagattatttacctaatgattatgagatgtttggtacaaaattttcaagttgacccccatatcatgccataatttattttctttgaacccgttcatatttaattttattcaacattaacttttttttccatgtttgttttgtgttttgtgttttcaaaactacaaatcttgaatatcttcttacatattgattttgatttcttctcatcaattttttttgtcttaccttattctcaaaatctatatatacatttttggatcacaattagcaaataaatcctgaagttgagaagtatttacaatggcatgtcattagcattaattatttagatttgttttatttaaggaaagatttttaaatgaaattcatttctcatatctatatatacatttttgaatcacaattagcaaataaatcatgaagttgagaagtatttacaatgacatgccattagcattaattctttagatttattttatttaagtaaagatttttaattgaaattcatttctcatatatttagcaaaagtctctacaaaatctttccttatctatttaagtaaagattttgaaatcaaatatgttttcaacaatttaccaaaaatctttacacaatctttttaaaaatctcgacttagttaacttctgatttttatctgcaaaaaaaaaaattagttgtaacgagtgatgtaaaaatcgggaatgttgatactacaatttcttctacttttttttttcatataatgaaaattattttttagagatattttcttaaaacctctaaacaaaacaaagggcttcaaaagatagcttctcttttggcgggtcgacccgcaaacccgcaactctctacgggcttatcccatgaacttgcgacccgtagtggataaaaatattattcaaaaaaaaataacaaatgatgtttaattttacgggacggggttatatggtgcaacgggtttagatcaatattaatattaaacaatatactatagatgaaatcctagaattaaaaatcaaaatttaattataaaatcagaaacactaaagaaaataaacaatattaacaaaacaaatacaacttaaaattttgcaaaataattttttagttataaaaaaatcgaccagcggtgtaccgcggggtaaaatctaaatttagaagtttaaagaaaaatatttttttaaaaataatagctccgcggtataccgcaagaaaaatcttcctcctaaactgaggcaagaagaaaaagaaagccaaatgtcgttttagtgtatatatatagatataccatttaaacctaaaacacaattaatatactcaaaactattaatatagatatatgaatggtacatttataaaatagttgaaatattatattatactctctattaataaacaaaactaattatatttagattttttttaaaaaaaaattatagccccgcggtgtaccgcgggttcaaatctagtatttagcaaaagtctctacaaaatctttccttatttatttaagtaaagattttgaaatcaaatatgttctcaacaatttaccaaaaatctctacacaatctttttaaaaatctcgacttagttaacttctgatttttatctgcaaaaaagaaaaaaattaatagtaacgagtgatgtaaaaatcgggaatgttgatattacaatttcttctactttttttttcatataatgaaaattattttttagggatactctctcagaacctctaaataaaacaaaaggtttcaaaagatagcttctcttttggcgggtcgacacgcaaacccgcaactctctacgggcttatccgcatgaacctgcaatccgtagtggataaaaatattatttaaaaaaaataacaaatgatgtttaattttacgggacggggttatatggtgcaacgggtttagatcgatattaatatcaaacaatatactatggatgaaatcttagaattaaaaatcaaaatttaattataaaatcagaaatactaaacaaaataaacaatattaacaaaacaaatacaacttaaaattttgctaaataattttttagttataaaaaaatcgatccgcggtgtaccgcggggtaaaatctagttgtttttacatttatgtttgtaaagaccacaaaaaaaataaatacaacaactattcaatttccacaatatagctatagattttgataaacttatattttgaaaataaaaattaaacacaactgaaaatatattaaaaagttgaacgacatctatcttttttgaaaagtgaagcattttaaatactacatagaaatttctattatgaaaactagatttagatttacttaagtgagaaaaaatgttttctagaccatttaaacaacaatttttttttatttttttgtaacatctatttaaacaacaatttataggttaaatatattaattaatattattataatcaataaaaattattatatatatgatctttgtaaacaaaaatcatgattgtggaagcctctttggtccattagttgattaaagaaaaatttaggatcttcaaatttaatatagccaagctatttacataattacgagatgtcattaactttattcaactactccactagaagccgaaacgaaagccttattagtagcaatgcaccaatcctgaattcgtggacataagtccattatctttgaaggagattgtgaaactcttatccaaacagtcaacgattcaaagaagatcggttcattgacaaatcttcttaaggacatcaaattttgggaaaagaaatttcacactattcggtttgcatttgtcaaaagggatggaaacatgtcagcgcattttctagcaaagtttggatctgtatcctctgttttttattcaaattctgtacttcagccatcttggctccaaaaccaactttgtattgactctttaaatttaatataatcatgtttttgatgaaaaaaaaaaaaaaaaaaagctaacaggcccaatgtttggtttacagaaatttaagccttaaaaaaaagcccacagagatatttgttttccatgtcaaagaaccctaatgaccattttgttgctcaagcgccgtttctagggtttttgttctgaagacgaagcaatttcatttccctgaatttcatcaacaatggcggaatcaggaggagaacgcggcgcagagcgtggcggtgaccgtggtaacttcggacgtggattcggcggtggtcgtggcggtggccgtgatcgtggtccaagaggtcgtggacgacgtggaggccgtgcctcggaagaaacgaaatgggttccagtgacgaaactaggtcgtctagtgctagacaataaaataacgaagctagaggagatctacctccattctctgccagtgaaggagtaccaaatcatagatcttcttgttggaccttcgttgaaagatgaggttatgaagatcatgcctgttcagaaacaaaccagagctggtcaaaggactagattcaaggcctttgttgttgttggtgatggtaatggtcatgttggtttgggtgtcaagtgttctaaggaagttgctactgccattagaggagctattattcttgctaagctttctgttgttccggttaggagaggctactgggggaataagattgggaagccacatactgtgccttgtaaggttactgggaagtgtggttctgttactgtgagaatggttcctgctcccagaggtgctggtattgttgctgctagggttcctaagaaggttcttcagtttgctggtattgatgatgtctttacttcttccagaggatctactaaaacacttggaaacttcgtcaaggtttgattttgcatccttcttttttgaagcttttgtttatgttttagctgatggattatgtgatttagctctgcgtttgatgatttgattatagctttgtagggatttagtcacaattgcttagttgttacctgtgaagattatgtgataagcactaattttcgatagttaaaggaagtgtgcaagtgtagctgattaaaatttgttgatgagtatagattgattgatatttagctcaattacttaatttgatggatataattgcttcattattgattgatattcttgatgatgtttttaactcttgggttgatgttgttggtgttatgatgcaggctacatttgattgcctacagaagacatatgggttccttacaccagagttctggaaagagacgagattctccaaatcgccataccaagagtacactgatttcctggcgactaaggctgttccagccgccaaagttatcactgagggtgaagaccaagcgtaaaaccttcatgagatgagtttggttttatagggtttggttgtcctaaatactaattccttgtttgaaaaagagtcgtttgtttcttggttatctatcatatttcgatattggcggtttcgttactgtttggattgttagatgtttgcggtaatgcaaattttaatgaaatagcttttgcaatagatcctagtacacctgacctgagttgttctctgatatcagagacgtattcattcatatagccaacttatttatagaccaataaataaagctcgtctcgtatgattgtgcaagtaacaagaatactgtgcactatggtacaaaattatgaatatttcattacgatgctatatgcacttttgctcttctgcatggtcgtggatgatgaaatcaagctgaagtgaaaagtgaaatggaaaaaccgctgttattcggaacttaattgaaatgcagctggaccttattaccaaaataatataggcaacaaacaaacagttatcagaaagagaaacaaacaagcatatgctcaaataagagaaatccaatgagctatctagaggtcttatgatacaatgagtgttgagattgactgatcatcagtagtcaaaccagcaaacataaaaaaagcaaatgttaatatgaagcgcaaagtagtttcgctcttcagtcaggatagtctgattatacaacaaaagacatcaagaaaacaatgcaaagagttattatggattagataggcataggaccaatttgattgggaaaagattcgtctgcaaaaaaaaaaaaaaagaaagaagtaagaaagaaaaaggcagaataatacttccctctaaaaaaaaaagtagtataataaacttcatttttgaatccattttgaaaacaaacataaaacatattttacctgtagctgagagcctcatttgaagtagcctcctatgaattcaacagaaggaatgtgttgtactttgtaataatcttctcctcctaccgaaaatttcttcttccattcggtgcccaatttcacaagctttaaagaatagatgaatctcaacccatcaggaagctcctttaactcttcacaatccaaaatacttacagtatgaagaaagggcatggagccttcttctactatccactcttcacacttatttagtccttctatttcaagcttcttcaactgaggaaacccaccgcccgagcaaaccatcctcctcccgcagaaagagcttttcaataacttaacttctttcaagtgaagcagcttctctagaatcggcattggatcctcctccaaacaacactcacttagctttacgaatgtaagtcgagaagggaagtgttgttgccttggcatatataaatccaacgttagatgtttgagatgaatgaaatccaatacaattccctcttctctcattttttcagagtgagtacccacaatataaagatattcaagttgtctcagtccacgtattgatgcagatagagtttctgtactcgtctcacgggttaaactgatcgcaagagtcatcaacctggccataccacatagatcctttgagctgctatgccatgttgagaaataaatcaaggtctccaactttactagatttctcaaattcaacttcgtcttcttatgcatatagaagggtaatttaagatatctcaattcttgcatcctcttgaagacatcgggcacgaatatatattctgtatctacatctaaatttagatagatcagtaacattaggttacctagagaagaaggtagatgagataccttagcatcttgtaagctcaagtatcttaagtggatgagatttccaataccagaaggtaacttcattccttcaaaatctacataaaagagatctaacactcttagaagttttaaccttgtaaagcttgtacctaatagcttccaactttctccccataaatgatgccagacaaccacaagagatcgaagttttggattgtttatatctctctcaacatgtaatgtagtaggaaattggcagacaagcctgcgagatctacaaggagtttgcgagtttgcggtcgaggagcaggtacctacactttttactgcaatttgtaggaagttttcttctttggctttaaacaaacaaacttctctcatcatgtcatgcaaatgacaagttccaaatctcaaagccgtagcttctctttcccaaatgatcatatttctcctaaccaactcctctatgtagctttctccaacatcttgaatggtctctccatcgtgataatcttcggcggtggatattccttctgcagcccaataataagacaatttctccacgtttatcttatgatcttctggaaaatgggccaggtaaaggaaacaatgtttcaaataactaggcaactcttcaaagctcatagacaatacatggtatatcgaactgttgttactgctgtttcttcccacgatatgagatccaatatttatggatagtcttttccaatcacgcattgtgtactttgcagctagcaaacctcctaacactttgatggccaatggtagccctccacaatgtttgatcatttgcttacccatatctcccatttccttgtcaacctcaaattctgcataacattaacactagattattaaaatcaggacattaaaaaaagttacatgtcaatttcatgcgataaagagatatcaaaatgaggtatttagggttaaaacaattgtatcgtgatcaaactaaaaaaaatagaggtacgtattttaattgtgtcatggaatgcttaccagatgcatcattttttggaaatgctattctttggaaaagtgtccaactatcctcaatggctaggcattctggtttaaagctgagatatgttgtatcaccacgtactgcgacactctcatttcgagaagtaagaagcaccttccaacctgtagcaaaagattacttgtttcataataactaaacacaaacaacgtaatcataatgggttgttttcatctttcttttctactaagtaacaaataaaagtgcaccttttttgggtggaaatattggcttaattaggtcccagtcttcctctttccatatgtcatcaaagacaattaatgatttagttgtttccaacagccgaaagagttcatcctggagttcagcttctttcatctttaagatttcatctttattttctttagatgtgagattctgcaagattgtttgccacacagatctctgggtaaattcctgtgagacacacacccatgcgcgtctttcaaactgatgttttacatcttcatggttaaaaacctgtctagcaagtgtggttttaccaagaccacccatcccggttatggagaccacttgaacgttttcttcttccaccaaatatccaaccagtttcttaacatttgcgtccaaccccacaaaatcgcttttgtagtccttagaaaacgtttgtcgcatctccctttgtctatcaccatgaggttgcatatacccaccatcggcaatagcctgttgtactccaaaactctgcatatctcggataacatcagagatcctcatacgtatgcctccaatatctaatgcatatctcctcctatctggaataatgaaagcaagccttctgatactcttcttgattccacttgtttttctaagactttccttgagaagatatgtttcaattatatcttccgcgtcaaaaacaatttcctgtatttcttcaacacaatttctcaccaccgcagttgtgtgtttctttgcatccgcatctttaagaaaagagcctaacaagtcacgttttagtccagtaacttgatcttcaactccctgaaatctctcggattcttgacttagtaggtcccaaagcttttttattccaaacgacacaagttctccagccataattcctcctgtttaagcaatatgaaaataagaatcaagttacgtactattgatgaacatgcattatcgccaagagtaaaacaaagcaatatcggaattttatattccatacatcgatcttgggcatcttatagacacactcatacaatatttgcaatgtaaataagttttaaatgatgaaaaaaaaaaaaaaaaaaagttttaaatgaaggtatacacattttttttttgtcaacagctatattagattgactcaaataagccaatgttggggaaagttgtttacataagtgataaaatgcggctggatacgaacagttcgtattaacagtattattattatagatttagagaagacatttatatagttaacaacaaaaatatattaaatcaagaatgttttcacggccgtgagcaatacaatctgtaaaaccttttatacatcctaaggtttcttgacaaaccaaaaacttaataaactgtagttaagatttaacatttttagtgagatctaatcaaactgctataaatcttttcaaatataatgaattcttggcataaggcttgttattcaacttacagaagtcaacaaaatatagatataactatctttaactatattcaagctttctgtgtctcgtcacccagatgcaattacagagacaaattaaatagtagttgcaatccagaccaagaccatgggcaaagaaagttttctaagaataaaagagaaaataacattacaagaaaattttactaacctcttgatggcgtcaaggaactctcctgttgttgctctttatgaaaaagagagatgcttaattcagcttgacgttgactcttctcggggaagaatgataccaaaacaaaaaaaaagtctct

SEQ ID NO: 5445 - DNA, 45424 bp, Arabidopsis lyrata
  Intron number 2 from transcript 493953 (locus 493953) deri ved from phytozome v7.0 (chr-ID scaffold_7; pos 22435922 t o 22481345)
ccatagacggtggagactctgcgccgcaagcagctttgacggcagttgaatgatctccgagaccaagtttcttgctgagatgtgtgttccaataattctttacttggttgtctgttcttccaggaactctttttgctatcaacgaccatctaaatattaaaaaaaaaattacgatattagattaatctgcaataataataaataaatattgtatatctattcgaatgtttaataaatatgtggcaaaacttttgaaacaagaaagcttgtaaaacggagttaatgcttatgcatggacctatatagagcaagcatgtgtgtaatacatgtagccagattatatatgttgtagatgttatatgagccatgtgtgtatatgcagatgatccataaatgaatacaattatgagtcattgtaaagttcgaaaaagcatattttttgaataaaaacctagctatacaaattaatggccgaaaaaacaaaggagagatctaatatttacgatcccttttttactactactatttttgaataaccattatatgcttgtggacgtttgtaaatagattaataaaataaacttatataatgtaacctaattgatatgtatatgaatgaatataatacatgagttaaatataagtgatatatacatacacaattaaacaatttagagagagaataccgtgaactaaggatccaacaacaaaacatatattatacaaatataaatcatgaattagatatatgtgatatatagctagcaagctgtacacatttaaacaatttagagattcacgtgaattcagcaccgaacaacaaaacacatgatcttacatatataatattattagaattgtataaaaaatttaagcaagataatctctgaatatatgggaaaaaaaaacaacctgttgccgaggagcttgtggagtctgatgatgagatcttcttcttggtcagtgaaattgcctctgttaacattagggcttaagtagttcatccatctcaacctacagcttttcccacatctcttgagccctaattatcatcaaaagtttcaatctttagtactaatttttattgcttataacaagaacaagagaagtgagagagcaagagcaagtataccaaaagaaataagagagtaaaatatagagagagaataaagaccagttttcttggcgatgcggttccagtggccttggccatgagttcggacataatccatgaggatcttgtcttcttccactgtccataaacctttcttgtattcatgttcttttccatctcttgtcattctcatccttcttcacttttcttgatcccgaggagagagagagagagagagagagagagagagagagagagagagagagagagagagagagagagagagatattgaaagtggctgagtcggtgatgcatgtttagtcgagcccgactctctatatatattccatgtgacgtatatatattgtgttttgtatacatgtaaatgtgtgtacatattacatatacgtaaggacatgtttgttttgtttgctgttttctctccaaaaatccgtatatggtaaagtcaatcccaacattcttttaccaataagtcaaccttacgaaattgatttaaccatttaaacgggtgtagatatatataacatgttattcttacaatatatatgcgaaaatttcgtaaactaataataaagtatactattagttagttgtggcaaagtaaaaatatgtttttatcaaaaacggaggtaaatgatttgttttttttttcaaagtgattagatagatggggttagtaggcaaactatgtaaagaattggaagggcttgttgactctctatgttgttggttttggttaaataagactaaaaaaatgtgatccgaatccataaggttacaataaactcaatattcctcaactaattatagttgaaaacggtctgctaagtttctatctagattttcttataaaaaagattcggaaacgcttttgcctaaaaatctaaaatttatttgagagcaaaaacgtcttcctacgtaaaattgtggtgtgttaacacccgttagacttagaaaacaaaatgatttatttcatattccgagtttcaaatttcttgctcattataattacccaaaaaatgagaaattaaattaaatttgtattatatttttctgaaaaactaattatataaataattttttttttttacatatgttatactcaagcctcacattttttcattttaaatatatattgttagtaaatactaaataggttctgaaagaaaaatctgggatttatttataaccaaatttatccatatctaataaagtatgcatgtaaaaactgtaacaagatatgtctaggtagacatgtgtatatcccaactaacaagttaagtagaagtgacaattgaaaaaaaaagtaaggtaattactattagacacaataatgttcccttgggatagacagatagcatttttaactttttatattaataacaaacatagaagatcctctggctcatccagctaaagccatctataatggagcaactgatcttaaaattattataataatattatatatatatatatatatataatgatattatatgaggaggtaagagagacagagagaaatgctcaagatcagctcaagatcagatccagctcaagatgagattttgctcaaatgctctactgttggagttttttctattttttttattactcaagatcactccagcagttgtgccattgcagatggcctaagctttatacagtaaaacctctataaattaatactctataaattaataatttctctaaattaataaattcttccagtcccgagttgggaccagtgtaaaatatgacataaatcgataaattaataagataataattattttgaaaatctcatgtaaacatatggtcccatctatatcataaattaataattgtataaacttatcaatatatatataacttaatatatatatatatataggatataaacttatatatatcatatatgaattactataatatatattcaaaatattatatataaatagtttaatgaaatatgagtattgttcggaaaaaagtttgtgttgttttataaactcaataattgcttctctacttataattagtttatataagatattccttaattataaaggaaaaaaattatttttagatagaaattttttaataaattacaaaatttgtaaaatctctctataaattaataattattaatttatcgataaattaatacctctctaaattaataaaatttcgtggtcccaacattattaatttatggaggttttactatatgtcatgtgtgtagatcatatgagtattagtttttggatcggatcccaatggagagtgaattaatttgaattccatatatatagtatgaatcaactattatccattcgagcaattggagataggtgatatgataaaggacttcaaacttggttcgctttgagaagctgacttcttctaaaaatctcggttctaatgttttaaattttttcaaaccaccgttgtacttgtaaaaacgatatgtttttttttttaatttaatttaacattacattaaaaaaaaatagacaactaaaaaaagaggtaatacatatatagtctgtatataatagtttagttcacgaaataggaaaatacaactttaacaaaaaaaaaaaaaagaagtataacatgcaaaatttggtataagaatagttactattctcttcagctgaatttttgcaaacaatgttatcagttataactaaactatagaattaaacatctttgatacaaaacataagtatctgtgatacctaactctagacagtagtgtagtatgataatcactacactaaatatcttatgtcgtgcatatgaattatgtacgttatagattatatatagcttccacttgatttagcctactttattaatttttatggataattaatgatataggacctatagaccttttaattccaaaccttattttcagaacaacccaactagttgatgttgatcatcttatctattaactacactaacattcatacattgtatcggtaaagccctagagactaaaataagctatgcaataattgtcttcattctctacttgtagattttaaccttgcatggaataaatgcgagttttaatttaaactttttatcagtgcgaatctttgaattatttaaattttaatagattttactatacacgtgttcattatctttccataatagtaaatattttttcacacttttcactataatttttcttatttttttctatgattcattcgtcgtctcccaacatctactatcttttcaccttatattgactcacatataatatactcaccttatgaattagttctcaagatagatcgtatatattttctcattaatatctttcaataatcaattttttttataagttgcatgatctctttattaaagtgaacattagaaaatattgggagatatttgtcataatgattctttgatcatgtttggtgcatgtaaaattgttttatagacaaaaaatctcatatatagtctccttcttattcacaaacgtcggatttcaacatcaaatttttcgctttatcttaaccgtttgaaaaatacaaaaaacaaattaacacatataatttgaagtatattatgattttatatagtattcttaatgttgatttttgtaaaattcgtaacttacaaactcaaataaatcattataattttaaaatattttttttaattcttaatttttacttctaattaaaaactcttcaatataccattactattctaatttccaaatagcattcacaaatatcattattacacagtttcctattcgattgaaatattttatttttatttgtaatgtttagaatagtttttgttttatttcaaatccttaaattttttatctatgttaaaatttcataaacactgattaatatttagtttttattttttaggtattcatttgatttttttaaaaccaccactttttaattagaaaacactgataatatagaaaattttattaatgtaactatttatattatattaaaattataaataataatatatactcaaaattttattaatttaactatttatattatattatgactataaataataatatgtactcagtcgttcttatttctaatcagaatcatgaattgatattttaacatgaaaagtattttttttttaattttaaatgtgtatttttcagaaataaattaatttattttcagtaaaaacctttaaatttagtatagtttaagttttatttttttattctactatataattgtaactcttaaaaatgattgttctatcattaaaatatatgataaaccttatttttatatctctagccatttaggaatattctcattatatgttaagatatagttatttaattttatatttatccaatcgctattcaaaaatttcatattttgtgttataattttttttttttgtttttttattatctaatttattttttgtaaattattctttttgtttaatgaaatataataatataaattataaaatgtgtgaattaattatagttttaatattttttgttttaaaataaaatatgtggagcccacacaaaattaaaataagatggcttggatgatgatgtggacactctagatggagagacaattctctcattatatgtatagattaagatattttatttaccatgttactcatcagttgttagtattgtcaattgtgcacaataatacttatagtgtaacaagttgttatttaattatgtgttacagttactttcaaacataaatggaataatttactagctttttttttttttttttttttgtgcaaaatgatctcttcattaacttagaacctcaaaagaggaatgttcatacaacttaaaagtgaaacaatacatgaaagataaagatagagactcaatgagttttccaaggagatgcgcaacttcaaaaagcttgcaatggttgaaaggtcttttgatgtcttgaaggattcaagcttgaagacgagcttcgagaaatccccgaccaacaagtggtcataaatagctcgcgcgaataacgcataagagcttttgttaaattgctccacggaggaggctaaggttcgagacggtttcaaaatgccggtaaaggtttgcgggaatattttctccatggtggagtaggtttgcaagattcgccaaaagtaatcacaagaccaaaacacagataatattgtgagactagaatgtagtccttgtccattcaagcctaagcaataagaatctgatttaagagaacttgagaaattgttagattgaacatacggaggcggtttctccaaaatggttcgagagtgttgagatgcatcgcccaataaacttgaggctagataattaagcttgaacttggacagtttaccattcgatctatgatctcctaacagtggagaagcgtgaccagactcacgccatctatggatcaagtgtggaactaatccaaaaagcttctaagatgaaattgcatcggatagcaacaaaacttctaattccaacaggtttcgtaattgacagtggcaaatccagcctaaagatgtcactactaccctaacatggagtcctctaccaatcgtaatcgagtagtaaatctttagaactgaacctgataagatgatgaagtgcacagacctgggaattgaatgaggagccttaagacagctttgggaatcgtcgtgcgccgtcgacgaactcaccggacaaagcgcaactgacggtccaagagattctcttgccatcaacgaaatccggtgagtataaactgtttgagactgtggtgatggtccagatctagagctaaaaggctctgatttttgcaaagaggcgcagatgggttgaaaagaaacttctcccgatttgaacctctgcaatgagaaaaccgaagaagcaaactcgccgagaagatccaccggaaaagaagggaggggaaagagaggctgaagctgaagcatgacgaaaacagagattggagatctcgacgaaactttgatggaactgaaaaccgaagaaagcaagctcaaaagacagaggagacgacgaagagaagaagcataagatccagcgacgtcgaccagagccgacgccgccggaaaacaggttctcggagattgtgccagagagcaaacggctatggcgaactctcaagaagatatacaataatttgttttgtttggaataatttactagctataaatgtgctttttaataaatgtaaatttatagatttgataaaatgaatatttttggtgtataaattaatattattttttagtttgtaatctttattaatgattttatatttgtttaaattctgtgtattttgccaattttaaacttaatttgatattaaaaatagtattatgcatttaatatatatatatatatatacagtataaacttatgctttaaaatatttaaatagttcattaaaattacattggaatatattttcattaaaataaaaaataaatgctagtattttctatatattttgtctaaaaatatttcaataaatttgatgagagaaatgtctccaaaaataagtacagtctttaattaaaccccaagttttaatggaggtgatctcacaaaaccaagttcatgattcatgaggctgcctagagcttcaagtgaactttgtttgcgctaataagcttggtaggtatgttgggagatgttactcaggcagtgaacatgtggtataaacattgggagtctgatattcagagtgaaaccaagtggttttgtcacacctagtaaagttggaattccagagaaattcaaatgtgtgcaaacaagaaaatttcccttgattatctgatctcccgagattgatgagctaagagctaagagcttccaaacatactttgtatgcggactaagcatcatacatgggatgagatacttttctcatagatggtaaaacgagctaccaagtgtcgttagctcaactggtaaagatcctagacgaagcttagagatcaccggttcgagtgacgcttgggacgaaactaatattaaatgatgtggtttcggatttggagggattacggactttgactcagaacctcatggttttcaaaaaaataaaaataaataacgagctaccaaggttcaactttcgtattcttgacttgttaccttggctagcatattggttagtatacttttgatctcatacaaggaacccagagtggttagtatacttttgaggatgagatccgatactaacaactatattggcaaatggcaacaaggctgatacaaaaaaattatatatatggtatagattattttgatacagatacttaacttacaacgctgcattgattatggtactagaagttgttatataactatgtaaggttaggaaaagaaggcaaccatatatcattagcatagtcaaacacacaacacgctattgtctaaccaagccgttggcaatcgacatgttttatttacaatcacacattgattttatttggaatttattttatgtaaatgttcacgtgcattttcttcatacattgaataattaattaatttatttattgtgtactccaaataaagaggaggtttcctaatcattgatttgtcgatcgaaagtggttaggctataaatagaaatccacttacaaaaggccaagactctttaccccacaaattttaattgtcaaattatgtttctatatttttcttacggcaatttgattagtaaatgcagatatatataatttgtgaaggttttgacatgttcggttacaaaattgtgtaataatctagtcaaataatgctacagattttagagaatgggaaattatcttcattttaccattgcgttttgttttctatggattgtgaactctgtctgactacttaattctgccgacgtagtaaattcttaaaccagcttagtaacgatttttgctgctagatacagttagtcagtgttattctttagcttactaggatttataaatcctagtacacgcagaacaagatcttaatttattattttatatatggtgatttgttatttaataggatttaaaattttgattaaaaaatatgtttcttcttttatgtcaaagaaatatgtttctatttactgtatttatattaaaagtaacatcgttaaaggttataaatatagtttttcggttattgtaattttcgttataatattttttttttactttttaacgctatacagttatttatcatataactaagatatttgattatcgtattttgtgtttatctttttgtatatttgaattttctaaacccactcaactttagattttcgaaaatagaagcatttctagttcttgcactcagtcatatgtaagagatcatgtcattttttgaacacaaaaacgctaaccaaataatttactgcttcctaaaaatgtttgttgatgggagcaaactttagaagtgttttttgaaccttctagacctagacgattttaaatttttgaaatccaaaggagtctaacgcatgcacattcatcaacaaattttagacatctccatcgcaagctcacacatcactatcgccactgccaccctctcacgttaattttagttttatactcaagagttcatttattttagggaaattgtttcgatttctcaacaaatcaatacacaaatccaaacctcatcattataaaacaaattgtatccgattcagtttggtttccactatactcaactcaggtccaatatacttcgctattggctacctaaataaaaaccaaccaatgtctaaaaactttgtgtttggttttggtttaaatttcgattgagaaaatgtaaaaaaaaaaaaatatcaactgttaaaaaagtgtcaaaaaatttcaactctgcctcggataaaatatacgataagataagcctcaaaaatatcgtgtcttatttttgagttttgtttttttaatcaaaacgatgtcgtttagtattttagcatagaatctcaacgaaatttaactacattagtttatttcgttagtcaacttaacgaatttcaaaaatcaaccaaaattagcgattagaaattaaagttaatttaaattaacgattaaattaaaatattaataaaaattgaggaattattttatccgaaacaaacttaagatttgttttaatattttttatatcatgatattttttatattttcccaatttcgattacgtttgattcactttacgtttattttcacgcgcttaagtgtggtcaatatggtttttctgttcgagtacactaactcatgtggttgaaacaaaatggttttaactttttataacatatgtaattctgacatagtcacatgtacttcaacttttgtatactcttgattctgatgccaactgatgatgtaataatatgttaaaaagaaggatcatatatagatgatatcattcaatatcttatactatcgtacacgagagtttctcctttccataaacataacagagaacaaacataactattatcatagtctacgctcactaccaaaaatggtccctcgcaacgaaagccacacttgtagcatcctggtcgatttataccattcaaagccacttcccatttctttttattgaactcaaaatgtagtcgaggcttcacatacctgaaatctcctagtacacactcgatatgagtagtcgaaccagagctttcgcaagtgtaaaatattatgttttgatccatttctctctcacatatctcgcaccaataactaccggcgatgtccttgtctccatcgtagcatagtttaagaggatgtctatcgtatttataccttaccgtaggtggtaaagtagcacacttgaaatccaaaacaaaatcgcaatctatacaagtcaaaacataatccgactcttgcttgcaagtgacacataccttgctatgtggtgaagtctggaacaaaggatgcgggtgacactcgtagaaaaatggttcggatactgaaccgcatcgtacatctaatttgatattgcaacattcatacctgaaaccactacagagtcggcgacaagcagagcataagaaaactccacgaagcatcggaaaatccatgactatgttgtcatcagggtatagagtaagttgatgattgtgtagtacatgtcgcttctttcgaggaaggttagcacacgttttatgaagaatgaaatcatcgcattgcatacaactatagaatgtgtttgagtagacaggacggacacatgctctgcatcgaatattttcatcacggatattagtaagaccatcctcaagccttagatcatgctctcgatgactaaagtgatttattactccatcactcacaatcctatacggttcttcacattcttcgatttcttcaggctcatcctcaagttctcgtccatcccacacatccctccttgtggcacatctagaatgaactgcataatccgaacaaatcgagcaagaataagccccatatctcccatcaattcttcttcgacaaactccacatttccaatctccaaaaccaagaaaataagtgcgagagatacgatgttcatgacgtataatgctaatgacgcgtggtaagtagatacaactttcatggatcataaaatcacattgaggacaaacgtaaggagatcgatcggattcaagaccacaagcattacaagtgaagcgtataagccttggcatgagagtgagtgtatgttcatgacctttcgagaagttaacaactagcgaaagcgggtttcgagcacaataaagatccaaactgaagtcacatatggaacaatgatatactaattttccaaccttttctccacatagacgacatttgtcatcttcaacttgttgaggtaagccatgtgttaggagcgttagaggatgtctcaggtgagaaggatggttaatctctggtgatgactcagcacattctttgtggaccgtgaagccgcaagtctcgcagttatagccatcgagaccgttttctcgaagttcggggcatccgtcgcattgaccagtgctgctatagtggctgtgtaaaggatgttcgtgaaatggaagcatcagagaaggtcccatgatctggtcaaacaccatggatggggttaatgatccatcatcatcatcataggaatatgcttgattttcttcatatgtaggtgatgatacgtcagagagctcctcaacaaggaccatttttgtgaatttgacgaactaattcttttaggctgtttttgttgtcgttggatatatgaattgggaaagaaataaaggaattaacgagaagaaaacaatatagccgttgtcaaggaattagttttttacatgaacctttttcgttttttgaggttatgtcccctaatcttatacatttaagattcgaatctttgggttacagtgcttgtagagctgcaaaagtttggtaagtgtgcttgtaaattaataattaattctttttgagaagatagctaagaaaatccaaacttcaataaatagtgcttgttttttttttctttttaaaaaggcaaatggtttgaaaagctaaactttttttaataatattcaaatattaatatatgctttatattcttgaatcgtattggattgccgcattattatttatttcttctgtactatttgcattctcaactttttcataattactttttcgactcttcaaataacaccaaaaaaaagattattcttgataaaactacataattgtttatctagataatttcgtttggtaaacaaagtgaaaaaaaagcaatcccagattaccggaatcagaagtttttaccaaatattgaacaaagataaaaattcaaagtttctttgaaggataagtttccaactaaaaagcttgatggttttctttggtcaaagaggcatcattttatcttttttctaagatttttctaaagtttccatcttttcttctttttgttttttaacttgcaatttaaatctttcctttgattccatttcgcagacgaaaacaaaagaggacaatcccatgatgtccatgttattccctaagtacatttactttaaatagtggtatagaaggtttgactgtcccatggtgtcttcatgttaattggattctcggtgtgaattaaacttaaatacatattccgtatgtatgattcatttacacagtctctaaatctctgaaagcttaaactaagaataaaagaactttcaaattaatatagcatctccttttatgctatgatatatttgtaattgaacattgtcattcggaattattcatgtcaatcaaaaaagtgttatggagactgccccaaattttctatcttataagatttgattagatgatgcagaatatttataaaccgaatctcatttcggttaagtgagctaggttttgttttggtaggatgagtccaattcgggctcatactatacagcaactgggtcaaactatgaaacaaaagatttgtccacacgatttagtatgctaacaaatgaaatataatgtgcactctaaaagatttatctatcatttattggagcaaagagttgtagcttctagatgtgaaagtttgcgtaccgatttttacagaatttagtgaaaaagctaaatgaaaataatttagtaattgtacagaattttttttttcccactgatgtgatatatgtttactaaaataaaagatctttcatattttttatttctttttgtctgagacataatatagcaattgtgagtaatatctaaaatatattataattgtgttcaaagtttttgtttgaccatagaaataggaaaagttttgagtgcatatacttggtgagttggtgttataccacagtggaccctttacattctcgttttttttatataaaatgttcatgaatatttctcctttttgaaggaatttgttacaaaatctagaatatttttggagcagaaatacaaacatatatagaatcttgacttggcccccacatatcggtcaaaggatagtctttctgcttggattgtaagacttagaaaagtcaaaccccaagtgaatctcttagaagaatgtagaaaaatttcgaatgttgaaaccatgataacatttaatatagtactctggttcactatatgaaaatgaatcttaatggcaattgtgatattactacgtaaatgatatacaaatgactggatgagtatgtctagagcaatgagaataaagtgtccacgctaaacgcaaaacttgaaacacaaaaagattataccaaccattatcttcagcatacatagataagtgaatttgcatgagccatgaatagtaacattgtattgtaagtttctttttgagtgctcttaacacatgaaaagagaaaaaatatacttcttctgttccttattattatatattttagataaaagcacaaaaatttaaaaacaataaaaaaaattgatcatttaattcaactaatacaaaaaatactgcataatttaaataatcattaactattaaattaatataaattattcctagaaattagagaaaatctaataaaatggaacaaaataaaaagcttaaaacatcatatatattgggacatagggactatagttaaattggatttgaattagaataaaaattaataatattagacaaatttgagtaatgctcatgcaaaatttttggatatagatatatttgaataatgctcatgtaatttttttgatatatatatttgaacaatgctcatgcaaaattttaagcttttccatagactaaggtaagaaattttcttatttgaacttatagatattgtatcatggaatgcaacttgagtaaattcatcttgtcgatctctttttataggaaagattcataaaactacaccaacatgagtgaatttttttaggtacctaaaaagttgaagtagttttagaaatagctaaacgctcaatgtccaacgaagctcaataacgtacgattcgaagtttcgaactgtcttcgtatctggatcttatataatagaaccatgagattggaaccacaccagagaaaggcatctcctttttttattttattttaaaccctaaaaacctcaaaagtggtctatgttagaatacttagggaatcatctaacttcgcctttatttttgtttttttggttcttttatgccccatgatttgcctatataagcacacatgcactctcatatattctcaaatctcatacagatcgacattaaaaaaaaaaaaagagaataaacctgtttaatcaaattctcctaactaaaaatatttgaggttactgttatttatactatggactacagattgtcaatggagtcctcagaaaccctaaggtatttatattattgcaatatttttgtttcttttgatcatataactatatcacgattggtctaaataagttttattatgtaccatcgacatctaatgatattattgtatgtatgcataagactctttggaacatgaacaatacataatcaattcttaactagtaaaacttgtaaattaataatgtagtgagaaatcatacctaaaatgtttatgaaagaaatgatgattaaaaacatatgggatacatgcaggaacaaatgtggagggtgttataggcaattcaacaaaaaggagcacttggtggaacacatgaggatctcttatcattcggttcatgaacctacttgtggtatttgcaacaaacattgccgatcttttgactccctccgtgaacatctcattggtatatatctccgggcctgatctctaccctctagtttatagcttgtctttcatttccttttttctcatttcattttggattatatcgtatgtagggccattgccgaaacaagaatgtaagaacattttcagcttccgcggctgcagattctgtcttaccatcctcgaaagccccaacgctcgtaggatccatcaagagagatgccaactctcaaacatcaattctgtaattataatcttcccatgtcttaattcattcaaacctaaaatcaaatttgtgtttgtgtttacttagcgcaaattatgcttacatgtgaaaataatatttcaaaattctttttaaaatatgttttttcataaagattttttgaatttgtaaacgaactcttcttacataaaaatctttatcaaaacactaaaacgtcttgtttaagaaaattgcattagtattaaacataaatgcatatagacaatctaatctttatattttagggattagtgactcgtatggtggccttaggcctaagagacaaccctacaatcgactacatgtcttcaaggtcaccgcgagtggtcgcactctcatgcaagatggttggaggaggcagtgacggatcgcttgacttatgcggaagggtttgcattacggatgagaacgaaaacattgtattccacacgtatgtgaagccaacgatacccgtaacgaattataggtatgagacgacagggatacgacctgagaatctaagggacgcaatgccattgaagcacgcacagagaaagattcaagagtttctttgtaatggagaaccaatgtggaagattcgtccaagaaatgggaaagcaaggattctcgtcggacatggacttgataaccatcttgactctcttcaacttgaatattcttcctccatgataaggtaaataaatatacttttactagaaacgctacttttttaagctatataatgtttggtttttagtccatctatgatcataaataatacttaaaagtgaactaaaaaaaagatgtgataagaaatatattgaccgtttctaccctttatcaaaagaaagaaaaaaagatattgaccatcttcaacttgagtatcattcttttcttgtcatggtaagtaattaattttttaaaattaaattaactatattttttgctatagtgaaattcatatagatgatcacaatacataatcactattaaaaattgtaaatcaagataaaaagaaaattttgtgttttcctaaccacttttttttatatacaattcatatgtatataatgggaattttatacaatttataacaattattttttgttgttaatagagatactgcggaataccctccattgatgaaatcaagcaagctaagtaactctctcaagtacttaacccaagcctatctcgggtaatattttaattacatttccatagtttacaaattgacattcgtcattggatatcataaattattgaaaatctatttgatcagaattttaaatgttccatgatgatttgaacaatattcaacttgaaaacaaatagttcatctactaaaccatgcatatattatacgtttcaaaaacaaacaaatcgtgtgtgatattcggacgcaacaactataagctagtaaagaaggtatccgacttttgacatgattaaaagttattaatcactgtagaaagtacgacatgctttatgcttattagcttaaaaagttacttaaaaattggaataaaatcaaccgatgataaccctaggaatatctcgtccgatccatatcaaagttcgatttgtctgtctctactctctacctcatattttatattattgattcataaccaaaagtttcgtacatgtgttcccctcctacctataaggtttttctaaaatactttcataaacaaattgcaaaattaatttattaatttttctaagaaatagaaatcttttaactcagattgttggggaaaaaataattaaatctcaacgaaaaatagtcgaatctttcaaactaaagaaatacgctattttgtttacgttagtgtcaatgatttcgtttttagaggttaaaacgagcatttataatttatataattaagggtttagtttaacaggtcataatgttaagtttgttttggattagagttcagaatttacaatttatgatttctaatttaaaataataatttaattactgctcttcttaattataggtatgatattcatgtgggaatacaagatccttatgaggactgcgtcgcaacaatgaggctatacacaagaatgcgatatcagaaacacagggccgaggcctatccgctggcctctgacacgcagaaccgcaataactttgcggcgtggaggcagaatgaactagagaggatgtctccagaggagttgctcgacctttcacgttcagactattactgctggtgcttggactcgaatgcttgaaaaagaaaattatactgatggtgcttgatcatctctgaaaataatatgcaaagatatatttagtatagtataattcaaaatcgaataaaaattgttctttattagtgattgtggtggtaatttggcattctcactcatgcatttcatacacacggctgtgtaagtgtaacaaaattactatgtaggttcttgcattgttattactttagtaagaaaataatgtcaatactgacttatgataaaaagtgaaatgtataaacgagcatccacaccatctttttacaagatggaatattattgttcaccatataaaataaaagtttcttttaaaaatcagaaactgggcccgtttagctagggtcaatgatacaacttggagagtcgaacaaaatgagactgtttgtctcgagcttgcgcttgtttggtttagatggaccggagtgcacatagagcataaccggaagccaatgagcagaaggcaaatgcgacaaaggagacgtaagacagtgagacagatgctctagctaagtctgggaacttgtctgctccccagtttgattgccaatcgtctacacggattgaagctgaagtcgaagccgatgcaagaagataagctagcatctgcaacatccaaaatcattttagcgggaatacagttgaattcaaatgccaaagactataagccatagccgcattaaaactttaataaatccagtagagatgtagcatgaatgatatgtcatcaaacagagacgaatactaaagtatatacaagaatcagagagatttagctcaaatgatgaaaccgatcacatctttagctataaattttcagactttaagcatcttgcgatgttttattctttgaaataccatggtatccttcgtttagttctcttgaaatggagaagaataggtaaggtaacaccaaaacagtactttggcctgaaacgaagcgtgtttgcaacaaaacagatgatgaaagtgacataataggatcgatttgacaaggatgaagcctatcggaattcagaaaagaccaatgggaatcactaaaaaatctggtctcatcttttctttagttatatcgcatcaaagtttcaagctatgatacaaaagaacagagcttcaatcatagagaggcagaaagaacatacttgatcaagaccaaattccaagaaatgccgtaggttatgtcgtgatctccggatgctagtagataaaaggtatacaagatcacatatcataaaacctgagtagacaaaaccaatcacattcgcagccaaacagaacctgcaaccaaaaaaaaataaacagaaaacaaatcacgcccaagaaaacatttaccagttaatatagtaatctaaagaacaggtcattagataacttcattagcttaaacgacttccatggctaatttcaagagaaagcttcaaattccacacaatgactaaaaccaaatcagagtcatctaaccctaactatttgacctcagatgaaaatcaatcctaaactaagtcttatattcctggtcagttgataacatcattttagttttaaacaatttgcacagctagttcccaggtaaaaactatatatatgtcacacaattattagcccaaatcaaagtcatctaccaaagaagactttgagcttagacgaaaaccaaacctaaacatagtcttagaggtactaacatatcaatctaagaaccatttaaagctgattctcctccaaaacattttcaaaaatgacaagaatcaataaactcaagaaaaaatttacaagaaagctttaggattttcaaaagtaatctaaagacaagctactataattaagctagaacaagtcactacataatctaacgacttccacagtaaatttcaagagaaattcttcaaactccacataatgtttagaccaagtcagagtcatctaacaaaccaaaacaaaacagtctctaggaaccatcttcagatatctaaacatacttgatcttcagatacttcttgaacatcaaatatgtaaatagtgaagcctaaaagaaaagttagaaactttaacctgaattctttgtaattgtagaaagaatcacgagcccatcctttatctctatcagaaaccataacagagaaggaaacaagacacgaaacaaacgcagtaaccctaaatccaagcaaagctttcctaataaaacttgcccatttcgattcacgcggagtagaagaagaagaaaagcttgccggtctcaattgtctcctactctcgctgactttcttctcctcatctccgttagtaaccctaaaaggagcctctgtctttgacacaacagaaggagttggaataatcgtgtgaggagaagatccatggctatcggggattgaagagagcgttggtgaatctggaggtggtgactcaattgttgtttgtggtaatgaatgaagtgatgatcttgaagacatctcgaggttgagattgttgatttgtgaacgtgattgagaagactggttttgttcgtcttgttgattcttcttcttcttcgtctccttgtgaaatttctgagttttttctgattcttccatttttgttgatattttttggttttaaattaatttaattttgtttgacagcggaagtgatgaagtaagctcttcttcttccactgtctcctctggtcaatggactcaaatggggaagaagactagagagttgtacttttaaatataagtgtttgcaaaaaaggacttagattcattcttttcttgcactttttacctaaactattgtttataatcccattaacttttctttgatcttttttgtcttatttattggtaacagtgattaaaaatgaaataaaaaccgggttttaaaaatgaatatggtggaagcccccttggcccattggttgattaaaggttgattaatgcttctacactaagaggtctgggttcgagtcccagatattgcgatttattaacaaatttgcagattaatagaatcaatcaactcaagaatcaatagaggcaagtatgcaagagatctccagcgatgtacaattatagccgtgtgccaggattctacgcagagaaggaagtgtcgtcagatcgtgtatcattgaaggtattcatcaagatcatgaagaaggaagtgtagtctgtcgtggatctactaaaggtcggcataaattgtcagttgtaaaatcgtctatataacagttctcataatttgcaattaataataaatctacaccaaaaaaatgaacatgaatcagcagccttttttacaaacgaaaacgactttactagaaggcccaaaatgtttaggtttgagctcatatatactaactgaatcacaagtgatgatgatacccaaggcccaaagtgagggagatggagatttattagtaatacgatcaaacccgaaagtgggttgtttcgagagcagactaaatcggaagccgagtggtttccagagaagcaccacctacttgccatgccgctcgctaggacgcgagatatattatatataagagtaagggtcagaggagtgtttgattatgtatccctggtctggctggtctaaaaattgaaaactaggaggccgaaaggatctgccattactacccaccaccaggtatgaatctgatccacttattagctgcgattcctctatgtatttactgttttagcgagagaagaaaacacataagtcatggtgcacataatactaataaacccaccaaccaataaaaagcccagcccaaaccaggttccttttttattgtttcttctataagtagaaaatagagcttagggttattgtatttataacttgttacttgctctcaacggactcttcccggaatattacctaaacccctcttttcaatcttctccatggccacttctagcagggactctaatttattgggttggttttgtgtggctctctcttatctaatgttcacttacttggctcttgactttaactttaatttagttcttttaggtaaacgacacccggaagatgatttggagaccaaacagattctcaagaaacataaggaaacatccgaggataaggtaaacctaagatggtcggattcctcttattccctgacaactattttctttacaacattgtcttctaatggctacttatgtatgtaacaggaggagacaaccaaaggatttgctgatgataatctccagcacaagtctgatcaggtttaattttcttaaacattgtactgtttgttagatttatattatacaagtttttatgttcaattaagcatcacttgtgctaacacatatatatatatatatatatatatatatatatatatatatatatatttggctgttaaaattcaggaagctgccgtactaaaaaatacgctctttattgccaatctctctccccaaactataatatcagatatgtaagtagcatcaccattaaattccgctttccttctctgagcatgactgatatattttaccctccacttttacagaatcgatttcttcaaagatgttgtacaagttgttcatgttcgactttttgtcaatcgccgatgtagccatttgtgctatggccttgttgagtttgcttctgctaccgaagcaaaggaggttagagtagtttatctatagttatatgatgaaaaaatgtatctaagtagtcatttgaaagtagggttgctgaataaatcttttatactgtaggcactggaaaagaagaatggtgaatatatgcacgattataagattcttcttaaagtcgctaagacagcttcacaaccaaagtaaatttattttccatgttatggatatttgtttctgtgacttattgccagagttttgatacaatatcacagagaagactaacgcttttatttttgttacttaggtactgcatagatcacaaggtttggtaagggatcttactttttgccttctgagttttgttatcaagagcacattgggtgaagtttttggtatacatgtagagatcactaggtttttttgaaatttcagctacaaagactaccttcgacgagaaagccttccgatagaagaaaatgagacacctcccgattttgttgaggtacctcttcttgttatcttcaaaatatgccaggctcagcgtttaataagacaactgttgccacaaagtcgaaagatgacttatttagaggatgaatcttcagatgaggctacttcttgttattaatgcaattttaagtctttttctccttagagtcgtgctaacataattggctgttagtttcaggaagtactctttgttgcgaatctctctccccaaactaatatatcagatatgtaagtagcactttaaatttgcactttccttctcggagctagcaagtttccatgactgatatttgtcctccacttttacagcatgtatttcttcaaagatgttggagaagttgttagtgttcgacttattgtaaaccacgagggtaagcatgtgggctatgcctttgttgactttgcttctgcttaccaagcaaaaacggtaagactagttttatagtactgatgaaaaaagtatccaagtagtcatttgaaaagtatgaaagtacggttgttgattcagtattttatacactgtaggcgctggagagaaagaatggcgaatatttgcacgatcatcagatgtttcttgaagtggctaagacagctccagaccctccacgatccacgtaaattgattttccatgttatggagatttgtttctataacacttgttgtaacttattgctagagttttgatgataccattattaaaaaaagactaacgctattgttttcggttactaggtacaaccttgcagagaagctttggtaagggatttaagtatttgccttctgagttttgttatcaagagcacattgggtgtagtttttggtatacatggagagatcactaggttttttgatattttagttacgaagattaccttcatcgacaaaactttgtgatagaagaagatgagacagtggaaggacatgatgaaactcccgattttgttgaggtacctgtccttgttatcttcaaaatatgtccggctcagacatttaataacaacactgttgccacaaagtctaaagatggcttattctatgcagtttaagtcgtttctccgatccttagagtcgtgctaacacacttgtctgttaaattcaggctgttgctgtaagaaacaagacgctctttgttgccaatctctctccccaaactgaaatatcacatatgtaagtaatacctttaatatccttttttcgctcttggagcaagtttttcatgactaatattatctgcttcatttctacagcatcaattttttcaaagatgttggagaagttgttcatgttcgacttatagtagactacacgggcaagcatgtgggtgatggcttcgttgagtttgcttcctctaacgaatcagaggaggtgagagtagtttatagtaatgatgaaaagtgtttaagtagtcatttgaaagtaggattgctgattaaatcttttatactgtaggcactggaaaagaagaatggtgaatatatgcacaatcataagatctttcttcatgtggctgaaaaagctccataccctctacgacccgagtaaatcgatttctgtaacactggttgtaacttattgctagagttttgatgccattacataagactaacgcttttgatttttgttaattaggtattgcatagatcacaagatttggtaagggacttaactttttaccctcttgagtttgttatctagagcaccttgggtgaagtttttggtatacatggagagatcactaaggttcttttatattccaggtatgaagactacttgcgacgagaaagccttctgatagaagaagatgaggcagtagacggacttgattggattcttgattttattgaggtatctgttcttattatcatcataatatgtcaagctcagaagaaatgcgtagcgtgtaatttatagaacttattcatgggatcaatctatattttgttactatgcaactttttcaggaagttgccgcaagaaaaaggacgctatttgttaacaacatccctttcaaagctaaaatatcacatatgtaagtcgcacttttagttttctccctcgttctcagagcaagttttctatgactgatattttatcctccatttttacagcatcaagttcttcaaatatgttggacaagttgttcgttttcgacttattgtagaccacaggggtgagcatgtgtgttgtggctttgttgagtttgcttctgctaacgaagtagaaaaggtgagactagttctttagctatgatgaaatgtctttgagtagtcatttgaaaattaatatacaagaatttatttgaaagtacggcgattgctgattaaatctttttacgtataccgtaggcgctggaaaaaaagaagtatggtgcacgtttgcatggtgataagatttttcttgacgaagctaagctagctccataccctctccgacccaagtaaattgtttttttcatatggagatttgtttctctagcttattgctatagttttgatgtaattacagaaggttaatgttattctttttggtaattaggtacaaccttgcagagaaactttggtaagggatttaactgggtgccttttgagttttgttatcaagagcacattgggcggcatttttggtatacatggagagatcactaggtttttgatattccaggtcgaaggtagaaagccatttgatagaagaagaagaagaagatgaagaagaagaagatgaagaggaagaagaagaacaagaagatgatttggagaccaaaccgaatctgaaggaacaagaggtacctatcaggggcggagtctgcggtaagaagattatcttctcttacgacgactgataaaagaagatgaagctctttggtgttttatttgttgccgcaagaattagccactgtctggccactgatttttgttaactgccgtattaagagaaaagcagcaacacaaaatcaacgacaaaatatttttgtggtggtgaaactagagattttggctaaatgttggatgtatcttattcttactctcttggtaaaatgggacatatttaccaagtggtgaggcacaagcaaccaatgaaaattacggtaaatggaacaatttaataaactccaaaatccaggggaacaatgaggacaaacatgcataattgcatatgaaacaataaaaaataaaaaataagagagaagaaaaagttttacaatgataggataggaacttttttaacaaataagatagagaagaaaaagttttacaacgataagatcgttaaccaagctttcaaaatcaacttttctaattgcatatgaaacaataaaaataaaaaataagagagagaagaaaaagttttacaacgataggatcgataatttttttcgatggataagatatccaagtcacgcaatctttcttgtgatatactcgaacggaaatacgaactgattaacttcagatttgaaagaaaaaaaaatttagcagatgcaactaaaaccggataagccatccataagtttggaaaacaatcttcaattgttttcagaaaatctaataccctatttaataaaaaaaactttgaccccttaattgtttaataacattcgcttatccgaagggttaaagttttgtcggaattattgttaatatcttctttgctcatatggatcttctagatccttccgtagtaaaaagcgtgaagcaatttataacgagatcgaattaaaaatatatatagaagaaacacaaaatatattttgaaacaaactgagaattaaagacattgattcgttaccaataacattcaatactgaggaccaaaaagtaggtcttgtggtttcgaagtgtttgctttaataaattgacatctttttaataaaggaaagaaaatcttaagtgggtattattatatggattaggttttcttgacaaagaaaagcgacgtgaaatttctagtgatgggagcattcggcaacgaagacctgagttctttgccgacaaacgaactccggttcatgaaacatgtccacgacaatgttcatggaaacatctatctcgatcccgttagtttttttcctttttttcttctcactttccaaatggttcggattttctgtgatgtgattatcttctttgtatttagagtttttccaatttggcttgaatttcaatttctctaaactagttgataagtctgtgaaatctcattgtttaatttgttatgcagctttgtttaaaattcattgacactgagcagtttcaaaggtaagtagttgttggattttgctaatttcaaaaggtatattttcgatgactaaagtgtaatgattatttttattcgtattccttgtggcaggcttcgtgaactaaagcaacttggtgagtttgcttgcgttttcaatacaaattaaaaaaagcatttattttaagaaatattttacttagtttactattttatttcttacatggttataggagtgacaaacatggtatatccaggagctgtacattctagatttgagcactctctaggtgtgtattggcttgcaggcgaaactgttcagaggctaaaaactttccaggtatttggaaatcttgtacaaattttagtggtgtagtcacatttttgttaagtatgctaaggttgtaatgtacatgtttatagggaatggagcttggtattgaaaatcatgatcttcagactgtaagacttgctggtaagtactattgttagctcaatgactgaattattcatttagatacaatttctgatatttgttttgtatatgtataggacttctccatgacattggccatgggcctttcagtcatatgtttgagcgtgagttcctcccaaaggtcataagtggctgtcaatggtatgttcaatgccatggtgttacttgatatgatacaagaaagtttactactttggctctctggattattcatctctctagctagctcttctttatatgccattacttatatgcatgcaggtctcatgagtcaatgtctataaacatgattgaccatatcgtggatacacatcacatcgatgttgaagcacaaatgctgaaaagagtcaaggttattttcttctcaaatgacctcttagtctttgaaactggaaactgtgacaatattattttcagtctttcaaatctttgctgatgattttctcaaataacaggatatgatattagctagtactgaattttcagagctcaaagtaagttttctaacggtcatattctcttctctagtcgaacattaactaactacttatactttgtatatattttccataatttgtagagtaacgcagagaaacgtttcttgtatgatattgttgctaatggtcgtaatgggattgatgtggacaagtaattcgatctattccttagtttctttctttctttttacactcatcatgatgcttaagaaatcaactcaaaaatttttcaggtttgactaccttatccgcgattctcgagcttgtggactggggtgcaattttcagttccaaaggtagtcttcatgcataatactttatagtcatttaagtttttgctaatcattgattcttagaagtttctagactgacagaaccaatgagagtcataggcaatgaaatctgctatcctgctaaagaatgtgagttttgtctacctcatataatcatattctgcatttgcctttgcgtctacgtaaaaccagatgaattgttttgcagatcgtactgtccacaagttatttgcaactcgagctgatctttgtcgaacggtctacacgcatcccaaaaaaatggtattgtatcattctctctgttccttgtcattattctctctctctttcccacttgtttctttccattcatttgcaggccatagaacttatgatagtagatgccatggttaaagccaacaatttcttggagatttcttctatgattaatgatccttctcaatactggaaggtacacaaatcttttcctctctgcagcaaaactctcttgcctatagtttaacatcattttttgttctccacaaatgcagttagacgatacaatcctcaaaaagattgaaatagcttcggatccagaacttgcagaagctaaaaagctgatactccgccttcgcagaagacagttgtaccaagtaatttatacattttcttgtgcttaaattagattatgaatttcccttctgaattttttacttgcagttctgtaacgagtatgcagtaccaaaggacaaaatcgatcatttcaaagctgtcactgctcaagatatcatctgttctcaggtttgtaatcttttaattaacaattaggaaactatttatatacagtgaggaccgttgccatacttatatcacttttgagttaacagaagcacacaagcttgacactaaaagaagaagatatcgctgttacaaacgtcaagattgatttaactcgtgggagagaaaatcctcttgaatggtaaacaaactacagtttagcttctttgttttatgataaaacttttatcattaaagtactaaccaacttatctttgtgttggatctgactacttgatcagcatcaacttctataaggtacatacatacataaaagtctttgttcttgttatacaaatttgcttctaaatatgtgtaacaagagtaaaacttgaaaataacagagagaatctcaataaaccaattgattttatttatggtatttacaggattatgatagtggcgagaagtttgtgatacctgaggacagagttagtcacttgttaccaacaacatatcaagacatgatagtgagagtatatgccaaaaaaccagaattggtaatgtgattaactctctctttatgattacattactgtttttttttttgattacattactgtttttttttatataaccacgaagtcacgttttttttttggtttacaatactatgaaacaggtagaagcagtttctgaagcatttgaaaacttccaaatgagaacgtatggaatcaaaactcaagtactgatggcttagccataattcatttcagttcatggtttttttttcagttcaatatatatggcagttttaagtttttaattaggtgtgaatcttgattttattgaatttcgttaattagatctcgacaaaatttgaaacccaaaagatatgtttattttggttgatctattttgtttgtttattatttctaaacacttgaagttcaaataatattggatacaaactcgtcggaaaatcccgacagcgaatccatgtgtttcaactacacgagtgtgttagaatctctaaaaaccaatgtcaaaaggatgcaagttgttcaacaatcatcaaattctttgaatcgtaatttgaccaaagatatgacaaatagtaaacacgcattataaaaaaaaaaaaacaataggttttgtttgaaggttaaattagtgaagcttctgtagtattcttacaagttacaacactacgaaaactcttatgttaggagttttccatacattagcaagaacgggtcatgctgctctaaagaagaactcgatagcttcattgtactgatccatgacaatgttgtggaggaggtgaacaggttcaaggagattcgggtagctacccaaaatgtcgcgagtcaaaggaggagtgtcctcatcttttaaccaagcgtgctgagccacagacaaaccgctcaggcagtaacatgtgtggtagaagtcgcgaggtttcctcggcttgtctctgaatccaccgtcagggatctaagcatacaagagtgtttgcgtgtgttataaaaatgtaagtgttaacttgactggatgttttgttctggtggtcaagcatctaagaactgaccttagagcacaagagtacatatctctgcaagccgaggctatcaaaaaccggttgcattcttctgttaatgtaggtggatgtatgatgaattctgtgaccattcgctgaatctgcaaatacaagctaactaaaattcagttgtgttttgaatatcagatagtattgatcgttgagaaaatttagtgagtaccttcatcattgtcctcatcagaatcatcatcatcactgtcttcaaggtcatcttcatcatgagcatgatgttcttcatgatctttatctgtcgcttgtgatatatgtgatgatccatgaacttcatgatcattggttgaatataatctttgtagtagaacacaaggggctgcctgtttaacatatacccaaaggaaaaaaagaaaagacaacaacggtgaagaatggaggagaattttggagtagggcctataataatcctaaaagatagaaagttaacctgccaaaatgtgtagcaaccatcgactaatttgttcgttctaccttgaaatcccatttctactccctgtcgatgtacagcccaattctagaatcacaaaggaaattatttggtaagaaaaatatttctaagggaaaataaaaggcactccagtaatcatctccaaacagcattgtatgttaccattaatgaatccaaattcaaacggttgacctcattgattaaaatcatagcagccaacccacagtaggtgtacctaaaaaaaagaataacttggtaataagcaaagctataggtgacaaatcaatatttcaggaaaataattacacttaaccatcaataacaatgtcatcaaggaagagagaagcagaacacaaatttgatcaaaccctcaacataaaggaagtaagtaggagaccatacccaccgtgagcttcggagccaggttcccctccaatgccaccttcataagtttggcaactgctcaatataaagcgagttaaaagagctttccaagggaaatcaataaattgatgaacttacaactatataacagtagttcagctatataaatatataatgcgagataaaagtaatacgaaaactacctcaagatgtaaactcctaggccctgggtgagttcatcatccaaaatgtttaggatgcttgcaatctgtgtgataagaacaatcaaactatcaggggcaaaaccaaccatgggatgcaagacttgtaagtcacaatacgagtcatctctctgcaaagtatttggtgggtacaagtttgcaaataataagattcattaacaatatcctaatgtgacgtttaagccatgaaactgttagaaacatagcaaaatgggtccagagtttgttgatctcatttcagcctaaaaagttgtggtgtaaaactcaccgaaattgcagtgtagcaaagaaattgagtgtgggtaaaactcaccgaaattgcagtgtagcaagctcgaacatccatttctcccatatcatgcatcctaacgatcactgagtaagtcagaattttgggccaggacaacaacaaattgcttgaaatagaaaagagaaaagcaagaactgaagaaccaacatgactgaagttattatgacattacgcagtcagtagaagttctgctttaagaagtccaaaaagaaggagaatcgaacctgaaaccaccacttgtatccttcatccgtcttaaaaaacaagacattttttctctgaaagaagaatgagtcacaatgtaagtattctagaggaaacatcactagactcttaataaaaagaaactgaccataaagaaaaaagaatgcaccacctattaattgaagaaagggctttgtgaccgcctaaagtaacaagtgcattcactgcagcataagttgttgcaagatgtggaagctgggaaaaaagatcaccattactagtagaagagagagaagaaaagggaggctaaaaaaattaacaaccaaaaaattgaactacaccaaagagatctaacaaaataaaaggctctggtctccattttaagtttccaatttcatgaaatgatagtgatccacacattttcaacaaacagacatatacttacttgaccaggaccaccaccatatccaccatccgagccctgacaagcgaaatgcgaaagcaaactaagtacataatgaacaataacagataacaataataggaacgggaaaagaaaacgtgaactaaaggagcagaaaaacaagaagaatgtatgagcaaatatgaagagtttccatgattgggtacaaagcaaaagaaattgagcctaacctggcagcgtccaaggaagtcgatggcattgttttctaattcatcatccacagactccccaagcaaagcaattgaatgaagaatccagtaacaaagccacggtcgactgttccaaaatccaaaaagccaaaatcaaacttaatctattggcaaaaatccaaaggtgcttcattctctcgacaatgacgggacaaaatgaactaacaaattcatgaaaacaagaagctaagcgtcatgtatgatgtatcacttacttagcatctaaggacgaaaactgcggacctagctgccttaagcctttcatcagataatccaattgcttatctcgctgaatctccaacctataacaataacatccatatcaataagattcatctctagacgaaaattctttcacaacgcaactaaaattcatcagatcatgaagaaaacttagaaaatcaaaatccgcgagcttacaggtatttctgagtaaaaatgtcgctggcgtcgaagtaattatagatcccaaacacatcgttctccaccagaaattgctcgcgctgacttacagtaaagctcggaggctcttccatcactctctctgcagcgttgattcgccgtctccgatcgtctgagccctatcacaacttaaaaatgccaatttgattccggtttggtttaagattcttaagaaattaattcaccctccggtttaatgttaatctgttgcttctttattaactagagaccagaagcaccagctctctagagacgtttcttcttaacaatgaaactagcaccaatgaataagctcgaagataaagccaaaactaaaccaatcaaacaaatctcctgcaaccaccacagagaacgataataagatcatccattactcaaatcaaagcatgcaaaatcacaaccaaaacaccaaatccaacagtcgtaaaagctctaaaccaaactccagtactaaaaagcgaagcaatcgtaaacaagcgacacaagttcaatttttccagaattcaatttttccaaaattcaatttttccagagacacacaagttcgaatctaaaatttcgataatctaacacgaacccaccaatatgcgtataagaaaacaccaacccagaccgttaattagagacgaacacgaacacacttcacctttagggattagagacgaacacgaacacgaacccgaacccaaaccaatgttcttccagaaacggtttccaccttttccaggtctcttccagacgaacactgaacctcagatatagagagagcaatcgaaccctttcttatagcttctcacgatcgaagaagaatgagatcgaagaagaaaagaaaagcgttagacgacatcgtttcaattaaagaagagaagagaaaagaaaagttgtgtaatagggccagcccagttttagcccaaaacattttaagcaaagtcctcctatatataagcttgaaattctcccattattttgtctaagcacaaagaagtgaaatttgttgaaagctgtgaaagacttatgaaagacataataatcaccaaatcaagttgagacaagtaaatttgtgtccctccggagataatggtttcgtcaaccaaatcagttcaaatatacagctcttacttaggtaaataatgaaggcatataacgatttaacaccaaaccattcaaaattatgcatattcaaacttacactcaagacaaaaacttaactagaagataagatagaaacaccaaagagcttactcttcttctgtcagtcgtcaaaacagaagataaccttcttaccgcagaatccgccaatcataggtacctcacgtttcttcagattcggtttggtctccaaattatcatcttcttcttctgcttcttctgcttcttcttcttcttcttcttcttcttcttcttcttcttcttcttcttcttcttcttcatcatcatctgcttcttcttctactatcaaatggctttctaccttcgacctggaatatcgaaaactcttgtcatctctccatgtattaccaaaaacgtctcccaaagtgctcttcataacaaaactcaaaaggcaaaaagttaaatcccttaccaaagtttctctgcaaggttgtacctaattaacaaatataatagcgttaatcttctgtgtgacatcaagaactatagcaataagttagagaaacaaatctccatatggaaaatcaatttacttgggtcggagagggtatggagatatctcagccacgtcaagataaatcttatgatccttcgaaaaatatccaccgttcttctttttcagcacctacagtataagagattcagtcaacaatcatacattcaaataatactacgtacttttcaaataaatacttctctcacctcctctgcttccttagcagaaccaaactcgacaaagccacagcccacatgctcaccattgtggtctacaataagtcgaaaacaaacaacttgtccaacatgactgaaaaaatcgatgctgtgaaaatggaggatatataaaatatcagtcatgaaaaacttgctccaagaacgaaagacgaaattaaaggtacttacatctttggtaatgtagttttgttcttttgtattttagttttgtaagggatattggaaacaaagagcgtcttttttcttgaagcaacttcctgaattaaaattgcataacaacaaaaagtagattcatccctagaataagccatccttcgattttgtgacaacagttctgttatttaacgcttctgagcatgacataatttgaagaaaataattaagaacatgtacctcaataaaatcgagaatttcatcatagccttccactgcctcatcttcttctaccagaaggctttctcgtcgaaggtagtcttcatacctagaatatcagagaccctgtaatctatccatgtataacaaaaacgtctcccaaagtgctcttgataacaaaactcaaaaatataagcagttaaatcccttaccaaaccttgtgatctatgcaatacctgattaacagaaataaaaagcgttagtcttctgtaatttacaataatttacaaccagtgttatagaaacaaatctccatgacatgaaaaatcagtttacttgggtcgtagagggtatggagctttgttagccgcatcgagaaaaatattatgatcgtgcaaatattcaccattcttcttttccagtgcctacagtataaaagatttaatcagcaattgtactttgaaataaactactttaacacttttcatcattacaataaactactcttaccttctctgcttcgttagcagaagcaaactcaacaaagccatcgcccacatgcttgcccgtgtagtctacaataagtcgaacatgaacaacttctccaacatctttaaagaaattgatgctgtaaaaaatagaggataaaatattagtcatgaaaaagttgctccaagaatgaaagagaaaattaaaggtggtacttacatatctgatatttcagcttcgcgagagagacgggaaacaaagagcgtctttttccttacagcaactgcctgaatataacagccaagtgtgttagcccgactcttaaggagaaagaacacaaattgcataacaacaaaagtagattcatcccaaaaaataagtcatctttcgactttgtggcaacagttctgatattaaatgtctgaacctgacatatattgaatttcataagaacagatacctcaacaagaccgggagtttcatcaagtccttccactgtctcatcttcttctgtcacaaggttttgtcgtcggaggtagtcttcgtaactgaaatatcagaaacccttgtgactctccatgtataccaaaaacttcacacaatgtgctcttgataacaaaactcaaaaggcaaagagttaaaatcccttaccaaagcttctctgcaaggttgaacctaattaacaaaaatagtagcgttaagtcttctgtaatggtatcaaaactctagcaataagaaacaaatcttcataacatggaaaatcaatttacttgggtcgtggagggtctggagctgtcttagcgacttcaagaaaaatcttatgaccatgcaaatattcgccattcttcttttccaacgcctaaagtaaaaaatatttaatcagcaatcatactttcaaataactacttgtatattttcatcataagtatacactacttttcaaatgactataaaactagtcttaccttctctgcttggttagcagaagcaaagtcaacaaagccatagcccacatgcttacccttgtggtttacaataagtcgaacacgaacaacttcttcaacatctttaaagaaatccttgctgtaagaagtggaggataaaataccagtgatatagaaaacttgctccgagaagaaaagtggaaatttaaggtgctacttacatatgtaatattttagtttggggagagagattggcaacaaagagtactccctggaattgacaagccaagtgtgttattaaacgacttataaggagaaaaagacctaaactagtattgatcgtataacaacaacaattggactctgtgggaacagttgtgttattaaaacgcagagtgttgtttggtcgatattctgaagataataagaagaggtacctcaacaaaattgggaggtgtctcatcttctgctatcagaaggctttctggtcgaaggtagtctttgtacctggaatatcaaaaactctagtgatctctccatgtataccaaaaacttgataacaaactcgagatgcaaatagttaaatgccttaccaaaccttgtgatcgatgcaaaacctaaacaacaaaaataaaagcgttagtcttcagaaatgacatcaaattactctagcaataagaaacatggaaaagtaaatttacttgggcaatggagggtatggagctttaatattcacttgaagagatatcttatgatcatgcaaagattcaccattcttcgtttccagcgccttacatttgtagaaaagatttaatcagcaattgtataaatacatttttttcatcattactagaaaactagtctcaccttctttgcttcgttagcagaagcgaagtcaacaaggccatagcacttctgagataacttgcgggttagtcgaacacgaacaacttgtccaacatctttgaagaaattgatgctggaggataaaatatcagtcaaatgaaaattgaaggaaagtggaaattgaaggttgtcgtgcttgtctacttacacatctgatattttagctgcgacagggagattcttaatgaagagcgtcttttttattacggcagctctctgaatttaacagccgatttaagaacaagatgcttattaattgaacgtaaaaaataaaattataaaaattaaccgatttaaaaacttgtataaaaattaaaccttgattaaattagcctgatgagacttgagctggacactatcagcaaatcttttggttgtctcatcctgttacacaaatgtagaagacaatgttgtaaagtaaaattgttttcaatgaacaagaggattccgaccatctgagtttaccttctcctcggatgtttccttatgttttttgagaatgggctgcttggtctccaagtcatcttccgggtttcgcttaccttaaaagaagagaagccaaaaaaaaaaaaaaactcttgagccaagtaagttggggtataaaatattagatcagagagagagccaaccaaaaacaaacccaataaattggccatggagaagatgaaaagaggtttattgttccgttgagagcaagcaatcataagttattataaccctaaagaagagatccacctagcctagtaagaaggttcgaacttatttgtataaataaaacagtgaatctggtttgggctgggctgggctgggcttttatgcgttgccagtaaaaatgaagatcaagcagagagagaatcaaacctgaaaccctcggaagctcttccatgccgattgagtccactccggtcaagtctgaggccttctaaaatgccaatttggttccggttaatgccgcttcggtttggttaagggtaccccatagctactcggttcagatacgataatcatcctccggattttccgaaccgtcaccattaacccacttctccaccaccacaagtccaccaccaaaacaacatctacggatctacctaaaaaacttaaaaacgaaatttacaatagagccctgtattttccatttaatacaaagaaactcctttactaaaacagtatgcacaacaaaccccgagttctgtaatatattgcccaaaacgctcacacttttacaaaaatgctgatttgtcatacgatcgcaagtttcgttatcaaaattcggtcctttttaaaacatacgtgcggggttttgtaaacatatttttctggtataaaatgtatgaattttcatactgatttggtattcggtttggttttaatccagtttatgaatattagaaataataatggtttcataagtattttaaagtttggaccgatccgatggtcggattcggttgaccgttgaaccggatagtggtacttaaaataatgtattactaggatcggacccgcggtccaccgcgggagaatattggtttacatacgttgtgtttaatattgtgtatgttttttagtataacgaatcgtgtagtatacttataaatattcataataacgaattgtagagaaaatgtaaaattgtttataaatatactcatggtattaattatgatttacaaaatagaattttgtgttttaaaattctaaaattagacgattcatgggaattagagcattcaaaataggtcaaaaaccgcgggtcgagcccgcatcatctcactatagggcagatttgggaaaatatattaaacccgcaaataagcgggccacatggattaattcgcagtgggtcataggtttaatcggttttcatcgtccgcgggttggcggatcagcccgcatattagtatttattgataaaattataatttattcaacatgtggtaatttaaacaaatttttaatagtattttgatttatttatttattttagtagtattttaaattttggttactttaaaattatttaaacaaaatccatggacaatcccgcaaatccgcatacattcgcgggacgggtttgtatttcatatatgctacccgcgggtcgtgcggaccgactaactacaagtcaaaatatttttttgtctatcgcaaaacagacttaacaggacgaatcaactcgctttgacagttctaatgggaatattatttagtcatacaacaaaatgaagtttggacatagtaataatataatatgtatcttatttgttagatgagagattgaaagatgaagtataatgattaaaaattaattattatttttcatgattcacaaaatttaataaatacttatcatcttgttgaataattctaaaatcatattcaagaaatctttataaattgaaaattaaacttctttggtaagctataggtatgaaaatatcataattttgatttaatctaattaaattaaaattagttacatggatttcatatatatttaatttacatgaccaaaataaaaatatctatttaatttacacgatcaaaataaaaatatcaatttaatttataaaacagatgggttatttgtgataaattttctagaaatctttagaagcaaataaaatatctttcaattaatgataattggctaaaatgagcgaaattaataacaaaaacgttgattgttatggaattagtcccattaatatatgaacaaatttattatacgtaattaatgtataatattgtttggaatatgcttttattattagttaccataagtacaatcagattttatttgatttccataaatatttgattttatttcgatttttcattattaattcgaatttatattccaaaaaaatttcaaagatccgatttcagaatttcgggttaattttctgattttaacccgacccattttcatttgtacttctcttttaatagtatagagatgatacctagaataaatatattatagaaaattaattacttaaaaaacttgataaatttatctagattaaattaaagcaattattctacaaacataaatttacttacatcaaataaaacacatcaaaataatgctattttctgaaaatatatttatctatgattataccattggtttagaaggcaacaccaaatcactaccattggatttagtcggttctatctgaagctcatttataaactcttgaaaaccagacttttgctaccttacgctattattccccctttcgttccgaaattagggcctctgggtttcgcagtgcgctcattcaatcctaggtatcaaaaatctgttgaatttgatgattcagattgaaatttagtgtctctcgagctcggatttacgattttatattggttcgatgcatctgcggtgatggtttccttagctttggtctttccgattaattgcttccttgtttctgaattagctgagtggcgtttgactgaagatttactcttctttggggtgttttttttcttatgggtcttgagttagtgaagtgttatgttcttgttgtatagtttcttacaggttatgctcaaaatttgtgggttctttgtccctttttttcactttgtagtttgaaaatgtctcggtatgatgatcgctatgggaacactcgtctttatgttggccggttatcatccagaactcgtacccgagccctttaacgtctatttagcagatattgaaggtaatgagtcttcttttctttcatcggataagcaagaagctttgtatggaaaaaaaaaaaaaaaaattagtgaatttgcttttatttctcttattatttttctctcttattatttttctctctcttagaaactaaaaccaatgtgcacgtgatgatcatgttattgtgatatgtagtatgcttcttgttgttacagttgtagactaatgtacttgtaagtaatttgtatatgtatatgtaatgtttttagagtgtgaaaaataaatgttgccttcgaaaagattttgttctgattttagttgattttatctaatgtctctgctaaattatatcccattatgcaagatggatcagagtattgaagtagtcgtatcatttggtaagtttttaatgatttcaaacatctcattacattgggttttgagctcacatctcaaaactttgtcatttttttgtgaccgattaaagaagctgcttgatcttaagatcaagaaggtccttatggaacaaaggttagtttagtttctgttaatacatataaatatgttgcgactccacaataaataatgttcatcactaaaaatctttgggtatataagtgaagtaaacaaaaacatttcactgaaccatatcaaaactataaataaaacaaataaaaaacttcctttaagagagaagagttgaggctgctatttaagtatttggttaagcttttgcttagataatttaattgaaggataatctactgtgtaaaaaaaccaaaaaaatcaaaaaataacaaaacaatagagtatgaaattgttttcattaaaaccagaaatgataagacaaagaaacttcccatttgtgcatcatatatgaatacactcgtgcaagttatagatggatgaaagtgtttgaacaactcctgagacaaaccatatatagaccagagttattagtatatactcctaacctgaaattaagccaaccatagaccagagttattagttattacactgtgacttattccaaagcaaagagtgatttaccttattcacagcctttatcactcaaggtttgaaacacctctttgaaaaagagattacaatttttcttcccatctatgaagatggtctttagcccatgtgactctagagactgctagagagagttttaaaaataatatttaggaatataaacaacttttaatcattttccacgatttagtcttagcactttagagtttgtaagaaacctcattagattgatatatctcagtgatggactccttttgtggaagcagaagaaagtagtcttcttacagcaccactttttcttcttctggcttattttcaagaacatgttagagcaagaccgtcttttgataacctatgatataaattgttgaagtacatattagaaaacttgttgatcttcaagaaatgaattaaaaatctaacagttgctcatctatactaaatgtttcgagacttacaattggtttacttgtcttctttaagaatatctacacaacacatcaaatgtttagtatactcacgaatcataaaaagtgaactttcatatatcaaaaaacgaaaacaaaacacataatcagtaccatttctattgtttcacccaaaaaaaaaaacagagtattgtataagtcagaaacattcataaaagttgacatgagaaaaaagatagatactaacaaaggatacttaggtttaatatacctaaggatttttgatatcgaagtaataggtggtttggtttgtgaatcaagaatgataagagtagtacatatttataaggaggtttagtcggctgatatacacaacttagcaattatggtggttaacgacgttttaggccatacattagatttttttttttgtttttatatattttaagattcatatatagagttttttgttaataattagtaagatttgtaaagattgatcctacaaaaaaaaaagatttgcaaagattgagatttttagttcaatattactcgcaaaggataatattctccaaaatgtgacagaccaagaatatactctttttgattgaatttagattttttggaaagtgaatacgaacaaaatttgttatcaccttaattagaattcgaaattatagggattacgattgttttggtaatatctttacttttgttttatggaaattttgtaacaaactggacagtttccaaccgtctgatcgattatatgatccgtgatccggaaatatgcccaggatctgcgtaaataaccgatctaggtgcccatgatccatggttattttgcttttaaattatgattttgcccttcaacgattttttttatttactctttgattgtaattatcctaatggcattttttgtaattttttacccttcataaagttatttattatccaatgcttcccaattaatagtatagattttactttatgcaaataagtgaacaattgcgattttaaaaaatgaaaatagcatatcaaaaataaagtcgtataaatctactgttaacggaattcaaatccaataatttaacaaaaaaaaaaaggattttcctaaaagttgttgtaaacgtaaaaaaaaaatagtaaataaaattaatatcacaaattatcttctactagctagaatcaaaatcaaaatgaatgagcatatgccatatccgtgtaatccagtttactgtcattatatttgccaaaaaaaaaatagaatttgaggttttgatcaagtaattttaagtacatgtatttattagaatataagaaaagtataggggtctattcggtaatttccttttatttaaggtttaatggaatattaatcgcgtaaaaacggcaaaaaggcatttatactctctcctctctctctctttctcaacttgtgcagcttaaaatcgctttctcaattctcgtcgttgtacc

SEQ ID NO: 5446 - DNA, 8407 bp, Arabidopsis lyrata
  Intron number 1 from transcript 327245 (locus 327245) deri ved from phytozome v7.0 (chr-ID scaffold_6; pos 20606849 t o 20615255 reverse strand)
gaaggtaattttttttttttaaaaaaacttctttcacattcttaaatctgaatgtatatatttacaattgttatcttgtccattacgaatagttttggtttttaagtaaaatatgattatgctaatctcatatatatatatatatatatatatatattggataaaaaacaagtacattcatttacaaaatctgaattttcttatcgttctatagttatatcgcgaagacaaataattttacataggatttgaatagttatatatatatattcagtgccagctctaagggtgtgccaaaggaacaaaaacacagggtcctccaaaaaaaaattcaaatttctttaagatttagggtccaaaattttcactatttaaaaaactttattattgaaaagccaatttttatacatcaggacaaggtctcgaataattttgaaccggccctgtatatattatacaatttactgtaagtagctgaactataattacccatacgttggtaaataaattgttttgcttttgtggacgggaaactatttgttggtcaaaaatattctactcttcaaacggattgttttggagcatctacaataactattgcaacctctattgtttatatcattatatgatctttcatcgctctatatttatgtttttatttagaaaaaattgggatcatctttgctataatatctttcagggacctgattttaagcaacatgtgagttttgacgcatttgttgagaaagagagttttatacatgatgtatgtgggagtatgaagcctaacgtatgtttctggcaagcgcaagacgatggaatatgggtacgtaataatccaaccggtgatctcaagatctctttaccaaggcattaccaacatcgacattgaggaagctcacgcatcaaattggaatgcggagacttaaggacttgcagggatgaccaaaacagggggagtaatacgtgctgtactctttttccttaaccatggttttgtcccaatgggttttcctggtaaggttttaatgaggcagcatccccaagcgtattactgagatcctttggcatctacacggttatgtcatccaagggggagtgttataaaccacatgttggatggactccataaccgtggaccttatgcatattctagaaggcccatgtccatgtcctagaaggcccatgcccatgttcttgaagattctccttatgacggcctatattgtacttagtgggcttttgggctttagggtttactagcccaatggggatttgtctcccctcatcatgtatatatatgtatcgaaatctcattcattaatcaatagaacaacacagtttacaacataataattaatttaaagatagtaatggtaatgaaatcaaaattaaagaattaatattacattaatttcaaaattaaatattatttatttttatttttttgtcaaccacacattaattaaaaagtaactccatgattggttgcccaatcaggaggagaagagtttacaaaagtagcttccgagagtagaagtctagaagatcgagctaaacaatccgccttagaattacatatacgagaaatataagaaagcgagaaaaagggaaaagaagcaataaaaccggtaattgaggcatgtgatacttctattttgatagaagagtgatcacactaaccgaaattttatgtagtcgatgtttgcataatgtagtgcttaattaggtagtagacatttagcggtaaattactcatatatatgttttttttggacaaacgtgggtttcgccctagtatatataaaagttgatcaactttctccatatgaatgacacatcatcacacaagaaaatgacatgtatcattcaacattatttaaattaaaaatcagcaaaattaattgaaagaaaatcaaaagtctcatattgtgttaaatcctccaataatccatttcttaaatgatttcttcaaaataaaaataaaagtataaaattattttaataaatcaattactacttttattttacttttattatttttctaaatttagtagtcaatggtcatcactcgataacgactaaataattatttgtgttgtagtttagttatttgctacctaatatcttattagtttagtaattttaccttgaatatttttttattattacgttatgtttcatatcttatcatatgacattctctcttttcatttttgtatcttatttgtaagatcgtaacattgacatgcaaaattttacaagtaataggcttttgagacgttagacataccacgaaattcaagacaaatccatttctcttatatggctatatgcaatagcataaaatctaaaagtgttacttaaataactctttaatttttgctttctttttcttcttttcatacgaaaactcttgcgatcaaaatatcttatattcttgttgtctgtattcatgataatgaacaaatactagaatcttagatataaaaataattatattatatatgaaaatgtataatttgatatttagagtcaaaaacgaatctaacaataaaaattgtaagtacaaaagatgagtctaattttattaagtatacaataacaaacaaaaaataaacacaaattagcaacaaaaacaattaacatattttgatcttaataattttcaaaacaaacccacgcgtaacgtgggaattcatctagtacttttataatcaaaactcaatattccgattaaggaataccgataaatttatgaaatccgtcgctactttgttgtacagacggttgtactatttgaagatcttgtaacatcaaaatactgaatttaaaggttttacatcaaaatttagagtaagattaagtcacctaaagattcaaatataacaaatgtttagagaattcaactatatatatatatatatatatatatatatatgtaaaaattactcagaatgacccatatcttatgttaaataactaggttgactctgttttgaaagggataactagaatgacctacatgtgaaaagacattctagccagttttaagtttatattaaccaaattgccattttgctttaattttgaaaatattttttttggttttttattatttaccaaatgaaaaacctaaaaccttttgagattctctctcattttttctccatcgtcgagccacaaaattccagagagaaaaattctctcgccttcttctcctgtgagttcttcgacgcagcttctccggcgaatgcttagacgctgcttctcacggagttgttttctccagagcacctgtctaaaaacaaaacctaaattctcaactcttcttctccagatttcgccgccaccatatgtggttcgtcttctcctctctgccaccaactttcctcggtcgagtcgtcttctcttcttcgtcacaaactgtcatcggccgcatcgtcttctcctttttgctaccaactggtttggcggtttttgatggtggttctctgcaaggcgattatatgacaacaacaacgaatttggagaagaagaaggcggcagcgacaatggtgtaaaacaattttaaaccctaatcactttttgtggtaaatgaatttgcaggtttagatttgataagttgtaggtttcttgttctaagtttcaggttttgttagataattagcttaagtttgtaaaatgtttgcatgtttttatataagaaacttagcttaggttgaggtttgagagttagctcatcgcagtttttgttgttgtttgatgacatatttattggtttgtgttcgcagttttatctgtttcttcgcaaattttttataagtgtttgcagatttatttgttgctcatcgcagatttgtttgttggttgtataacttattttattttgatggcagatttatctgttagtcatcaaagcacaagattcagattgacaagcacaagattcaggttggagagctcaatatcgaagttaaattatacgagaaagagatacaagagctaggaaatttcaaaaacatggttgtgtgcgcttttcgtcatgatcgtgatttattatttcatcattacgtaagagtttgtatgagcttatgttgtgattaattttgtaatggcctacgaaaagaaaagaatatggtccattaagtaacttaagccaatatctcttaacggggtcttgttttggtttaattcaatgtaattaaattctggatgaaaaaggtataaatatgttgtaatgtgtaatggagaaagatacgagagttaagaagaaaaaaggttaagtggctaaacctaaaattgaacaaaaatgctagtaaaaagtaagtacaaagcaattaacaatttaaagctttaggcgtgtaaatgtatattacaagtcaacattcgtttttggtaaaagaaactgggttagatccactctaacgtagagagccttaaccccatgtcttcaaatgatccaaaagtcaattcaataaacttatctaaatggttaaataatataaccaaaacatatatacaaaaatatagagctcttgactttgtagtattttacatttatattacatttatatcaagagctcatgactttgtagtatattattgtaaaaaaagttatgttattacagacttattattatgttactgcagatttatcattatgttactacaaatttacctaaatcgaaactttagaagataaggtgaaaattcggtcaattatcgatgagtcaaaccctaaatcggacggtctaaaaatctctatcgtagatactagtaaacaaatcggcggcgtcttcaaataagtttgtggatataaatctgcaaacaaagagtatcaacaaatctgtaagatataagtttgtgactactaaaaagttagattagtcatgattaagcctgcgaccacttcatcaaataaatctgcgatgatggaaaataattttgtgatacagaatatatctgccatcaaagagcaaaaatcggtgaccactaagagtcaatctagtaattatcttttggtcaataaaatctgcagtaacttatagacttagcataagtcggtagtaactattaataagtctgctgcaacgagattgagaaaaaatctgtaagaaaaataaatttgtagaaaaaaatccgcgagacaaagaaaatctgcggtgtcatcaaaaaaatctgtaagataaatctgtggtagacttaaaatctgtgacatcctataaatcggtagtaacatatgaacaaatctgtagattaaatctgtggtggaaataaatctgtagaaaaaatctgtggttcaaaaacaaatctgcaagaaatcaagtcagcgataactataccattaaatttgtgacagatttataaatcggtggcagatttataaaatcggtggcagatttatcaaacctgtggcatatttgttctacaaatttatttgaattcgcaaagatcagtggcaaagttgtaaataacgataggtttttttgtaaataacggcaacttttgcctcgctggcttttttttttaatggcatttttgttattatgattttcggtacaaagctttagaagtatattttagggattaaaaaaaaacgaaaacactttagttattattaaaagatgtaagttattctagttattaatctccatatataggtcattctagttattctccctatatatatatatatcaatcacaaagataacaatcccttgatttgaaagtaaagaaaagaagctcaattacgaggacgagtgttctctggagtcccaccaacgcctgacataagtacataactttagcgacatcacctgctgaagcttcaggcttcttcttgctagctatacaaaaccatgtagccaagtccaccgattatcactacatgaagcttcaggcttcgttgtctcttaatcactacttgcattgcatgtgatactccacgctgtgtataataatattaccttatcctcattctttaaaactcatttttctaaaaatttgtctttttttgttctcttgcattcatgttgttatgtttcttttctagataaaaatcttataaaaaatgccagcaatatagcaaatatttgaactgaatatcttctggatacacatatacaaattataatatgtacaagatcttatcataatacaagaaatatatatgtatgaatacataaggacaaatagttaatattagggctgggcaaaatatccgttagattcgcttcgatccgttatcgagtcgatttaatttgaaaaatctagatatccgtaactttacgaagcaaatcaaatattaaaaataggtattcgtcaaaagcgaagcaaatatcaaatactataatttatatagccggatatccgctccgctccagaatacatacatatatatagataattacatatataaattataattttattattcttgtatgtgttttataattttctaatcaccgaattaattatttgaactactagtttgactgtttgaacaattaaaagagaaatatatatttctgataaaatattactatttttaataaaattttactatttttggattaatttatttatttatttttaaacaaatagttaacggatcgaatatccggcaaatagtttggattttaacgaatattcgaacagccggatatccggtcactaacgaagtaaatacgaatcgaaaaacttagtattcggaaaaagcgaatcgaatcacaaataccaccaaaatcccgaatatccggtccgtgcccacccaaagagcccaaccgggaacgaaccgatgacctctcgaactgctatgagctcttttgttgttttttttttttttgaattgagaattgagagctcttttgttcgttaatcattatttaattaatttttaatcaaagtataatcgttaatggactttacatgtttggggtttgggctggttattttacgtatatgttaacttttattgaatctattacacattttttatatatctgttttgacctgaaactattacgcattttttttgcggtaaaaaaaaaatagatgtgaaatcatttgctaatcaatcacagtgatataaacagtcactatcactgtgaaatcatttggcttacatagattatgtcctctctatattaaaagagagtcatttttgattaacttataaaccctattttttatattgtatatggtaataatttgacaagtaaataaatacttaaaactataagtttccttaataaaactaactcattaatataattgactctgtgaacaaatgttaaaagaaaaaaaaaaactatttgtacattagatatgctatagtttcaaaacgaaagatttgttaaaaatcaaaaatagttgacaaaagaaaggattacaaagtaaattaaaatatctaaatgtgttaaagaatattttgcaagtaaattaattcaagatatgtttgtatgttttcattaaataaatgataaatgattttctaaagaaacatatattaaaaataaatgataggatatcattgaccatataagagagaagaaaactaatgaaattaaatatatcaacaaatgtgacatatgtatatatatctaagtcatgtaaaagacaaaaacatatagaaagaaaaaaacaatgataggaaaaattataatatattgcctcttgttcgccttttcaatccaaagaacagactctattcttgtatttagacgttttaacattgaaatttcaaatcatcttgagggtaacaaacaacttatggtccaatgtagatctggtgagcaatcgaccaaggttgtttttcttgcattcagtggtgtgttcaaagttcgtataatacttgattttaagacattggtatggtgcaacttatggaaggtaatttaaaaaagaaaaaaaaaaaaactagttctttcacgttcttaaatctgaatgtatatatttacaataaatttgttatcttgtccattacgaatagttttgttttgtcttgttttttactaaaatatgattatactaatctcatatatattggataaaaacacaagtacattcatttacaaaatctgaattttcttatcgttctatagttatatcacgaagataaataattttagataggatttaaatagttacatatatatatatatatatatattatacaatttacggtaagtaactgaactatatttactcatacgttggtaaataaattgttttgcttttgtggatgagaaacaatttgttggtcaaaaatcaaaatgatctacaataactattgaaacctctatttttaatatgatctttcatcgctctatatttatgtttttatttggaaaaaaatgggatcatctttgctataatatctttcagggacctgatttcaagcaac

SEQ ID NO: 5447 - DNA, 555 bp, Arabidopsis lyrata
  Intron number 1 from transcript 483491 (locus 483491) deri ved from phytozome v7.0 (chr-ID scaffold_4; pos 21373534 t o 21374088)
agccctaccaaactctcaaaggtcaaataaaaggtttctggatcttttttttctttgccttcttctgatttctgggtagctgttaaagttaaagtttcaatttttagtgtagaaaggtactgaaagagacgattcttctttgtcgttatctctgtgattctatccattcgatcctcactctaacaaatactcgaacccagattggaatttgggattttggcaaagctctgaactttgatcagtttttgtgcgtttgttgttttgtcatttgatatatattgaccaatttggcgatttcttcttcactaatctgagacatagttttctgagtttgtgttgatttgactcttccatgtctggataactacgatgaatgaattcgtatttctctgccagttaaagctgtgattgccattatcatttgctctgttttgcctttgacttagcaatttctctgtttgattagttatggatggtaagtgatgagatagtcatagttgtttatttgctctaattgcaggttagaatttgctattggatcatctgctaagctcg

SEQ ID NO: 5448 - DNA, 7282 bp, Arabidopsis lyrata
  Intron number 5 from transcript 470983 (locus 470983) deri ved from phytozome v7.0 (chr-ID scaffold_1; pos 3445979 to 3453260)
gctctgttcagtgtcagagtcggacaaaaaacgagcttcttttaatgatctggaacaaaagcaagcagttgagctcccttccatttcaggctcgaacaccaatggatcccgttccagtgatctgggaactactcaagaagtgggttcatctaaagaacaacacgaccaacagggtaatacagatggtcctagaagacagagcacacgaaagcgaccattgaccactcgggctctggaagctctggaatccgggtttcttacaaccaagagaatgaaaagtacgactaaaccagaaccgagaaaacgtgaaggttcaacgaagaaaaagcgctcagctaaagcatgtaaaagaaatgggggtgcagacttggagcacagaggagaagatagaagcatttttataaagaaagcaccaacaagtaaggccttggatcaaatagaggatttcaagcctagctatcttcttaatgaagcaagaactgagagtaaggatctggatcgaatacaggagtcaaggccggtcctaactgaataccgtaaacttccaccgattgttttgaagcttccattcaggcgtgggtaaggaggtcaacggacttaagtttgaaaattttgatcactgaatgtgagaagattggccttgctgatgaatgctgaagaataaatgcgtacagaagagagatttacacacaagggttttattcctttgttattcttattatttccattattagacagaagtaatgtttctattattggtttgcttgggagttatttaaagtaagtttttatatggttgatatccagaaaagctaagttgaataatgaaggttatgaatataattgatcaagcatgatatacagagagtcatagatacatacaaatcctcatgaacagtagtaagtagtctaaactaaagtcacaagaatgatttttatacaaatcttgactgatttaagtgaagctcatttgctgtggtcgcttggttgccttgtctacgttttgagagaagctttggttaagctagagtcctcaaaaccaagctctactacaaaacttttgcagccaataacataggaaccaaattgtcacttcaaattccttgacactctttagattagttttggctaaagttctttttgacttactttggatccaagaccagcttctgaaccttttttctaatttgaagaacgtgtgcttataaatacataaacgctaatctccaacatcacttcactcattctctcttcttcttcttcgaaaccaaaaaacaaaagaattcttcgtgattgatctcctctgtcttcacgcaatcgatttcaggtctctatctcctgatttcatgtcaagtccctttcatgccaccgagacactttcaccggtggattatgtcaatgacggcgaaggagaacaccatattaggaatgtggcctaacttaacccaaaagttagctcaagattaaggattgccacatcctttatatactacccaaagatcttaatcccaagcaatgtgggacattctaataggcctcctcgagatgtgggtgggaaacggtccaacgggaaacggcccaagcccaacatctcggaaatacaacaagacatgccacttatatgggccacataggtgggaaaccatttttgtgggaatttgcttgttgggccaaccttgggctctgataccatattacgattgaagaagaagagagagtttgagaaagtttgttagagattttatcaaaacatttctcgttattcattgatgattacagtacaagtatttatactatacaatgactaaaccaatgactaaacctgctaaaccaacatatataatctgatatgccccctcaagatgagcattcaaaaatgttaagaatgttcatcttggatttaagatgctcgaattgatggggaaacaacggtttagtcaaaatatcagctacttgatcttcagttctcacatgaagtagcttgagttcgccattgtccagtctttctctaactgtatgacagtctatctctatatgtttggttctctcgtggaagactggtttgttgcaatgtatatagctgcagtactatctgaaaatagaataggcactgttggagaagtctttaaagatgtgagtaaagtgtataaccagactatctcacaagtcgccaaagctaaagctctgtactcagcttctgcagagaacatggctctgataccatattaggaatgtggtctaacttaacccaaaagctagctcaagagttaaggattgccacatcctttatatactacccaaagatcttaatcccaagcaatgtgggacattctaatacaccacgacggcgaatgatgcaaaaaaagcgggaaagaggataaagacgagcatgaaagcgacgagcctatagcagctttggtgtatcatctcgcatgaggataaacgatccaatctgtgtttcgtcgatatcaggaccatcggattcggagcaggtatctttcttaatttccttttttttatgacgaatatttgatttgattttttttccgatcaagatattaggtagcttttattttaatgattttttttcccaaataaaaggttttcaatttttattttcaaatttaaaggtttttcaaataatgttttcaattaatcattttaatttcttaataagattttaataacaaaatgttttcaaacctaagtgttaaatttaaaggtttttcaaataatttttttcaacaaacttagttggaaggacaagccggctgagtcaaagattgggacgatcaaatttgtttatttttttactaaaactttatttagcaaatggtttaatacaaacgtttactacgaaatgaactacaaattattttctttgttcggactactaactttcatttgaccgggcatgttttcagcctttcaaggaatgaagaccacatgcatgatcaaaaagaaagaagacagacgacctgattcatttgatggccttatgggctttctgttttctgatataagtttgtttcactttttctacgtccatgggtctttctatttttagcccaatatgaactttgaagccacaaaatcttaccttggctttaaggtgaacttgttttatttatctaagacttttttgaattaagaaaacaataagtctaaaagtacagcacttcaaaatttcaaatgaaataaaccaaactaaattgagtgatatataatttatatagtttattatgaaatagtaaacaaattgatgcttttgtctatttaattttagatgattttacttttacctatgtaatttatacatgacactaatttttttctatctctaatacgagagttcatcataaatgtgataagttcatcgtgggtttttttgggtacatttttatcatttgataatatagtattttagtaaaatttcaaattatttgactaaacatgcgaacatttccatttccatttagcgaagtttccctaaaatagtttgaaacatgtatgaatacagttcatacaaaatattaaaaaaaatactgcaaatcttttgtaaccttttttttagaaaaaccttttttttttaaaaccttttttacatcatattatgttaaaaaaaaattgtgcaccaaatcatattatgttaatagattgattgagcatgaaatgatatcatcaattaccgtaaaagaagagaaaaaacgataatttaacctaggagtagcagacccaatgggaataatggagaacacaaaacacgtccacaactttagagtattgtaacattgaacacttaaactgaaaacaataaactctctctactaaaaaactcttaaaaaatagccaatgataatctccaaagtgcatataaaaaaaagatctttatattcgactctctcatatatttctctccttatgtgcctcattcttctctcgaagacttcgtgttgaaagagcgaccagtgctctttctctctatccacaaacacgaacaattcttcgttttctttgttcttgtagccaactccagattctcacagtgccacaatctccaacattgcaaagttgagacatctcataaactaagtcaggttatcaaatctatctcttatgccgtgtttggcaattcatgttttcgggtttgctttcctctttctggggtttcttgtgtcgcaacgccactggtttgtgaggaaactaacaatcggagatccttttagcatcaaagtacccagcttttgttttagagtttgtgtttccatgtttttgtctcttgcgtaaagatttcgacttttgctgcttttcttgcataccattgtcatatgttcgtctcttgggttaatcctttacgagatcattgagaattccatacaacttgttcatgttcgggaccgatgcttatgggctttgctttgatcaggtctgaatttgcgagattatgaatctgggtcagtggttctacggaatttgcctctgaaaacactagattttatctttgtgcttttgtgggttgtgctttaattcccgtgtctctgtttctttcaatgatcaagtcttttgattgaatcgaatgtatttggtatccctcaacaacttctttcacgatctgaggtagttgaatcatcagtttgatcttaaatatcagagctttatactttaccccgtcgtgtcgctctggacaatgtattttctttcagctccttgcggtttgtttgtatctttcatagttaatttcaatgttcatccttaaggaactgaatttcaaagttgggtcttttatctttgtgtttttgcttcttagtagtcagaaactaggattgatttcccgttgctgtttgatttagatgtttacagtttgtatgttcttgaaaagattacatttttcaaacagtttgagattcttttgatgttgaaatgcagttcttttgcgcttgttcaggtttcactacgctgagcatggttcttctgatggatggggaaaataatcttatggaagaaacagctgttatcgaagaagattcctatgatgacgagtttgcctgcggagatccacaagttgagcctcgtgttggagatgagtttcaggtcgagattcctcctatgatgtctgcatccaagcgtgatgtgtttctttcgactcctgttgctttggatgattcttcgaattcttttctcgtcggactacctgtccaagtgatgtggaaagacaaacatagaagaggacaaggaaatggagatgataatgttgacatgaaccaatctttgaagtctttaagagccaaaaaaagccgttgctctgccaagatcagaggaaagagtgacaagaattcggcccccaataagcaaagattgaatcttcaggctgttcctgagataccgtccagttcttgggaagatttggaggtcgctagctttgttcttggtatgtatacatttgggaagaactttactcaggtgaagaatttcatggagaacaaaggaataggagacgtaatgttgttttactatgggaagttctacaattctgcaaagtaccacagttggtctgaatcccgcaagaagcgcaaccggaaatgtgtatatggaagaaagctctattcaggttggaggcaacaacagttgttaacccgtttgatgccttctattcctgatgaacctcagaaacagatgctcgtggatgtgagtctctttcacatcctactgcggaatgcttaatcactatatatttgttctgttcattgatcttactattcgcaggtctcaaagtcatttgctgaaggtaatatcactctggagaaatacgtaagctcagtgaggaatcttgtgggtctgaggcttctggtagacgctgtggcgattggtaaagaaaaagaagatctcacggttcctacatcagcaccaatgaagaccaaaccatggttcactgtttcttcaaaaccttcttcggtcccgggcgtaggggattacaattcactcacttccgctggcataataaatcaattaactggctgttcgcgtctgagcaaagcccgttgcaatgatatattctgggatgctgtatggccgcgtttactagccagaggatggcgttcacagcagcctgaggaccgaggctatttcaaatctaaggattacattgttttcattgtccctggcgtgaaaaagttttcaagacaggagcttgtcaaaggcgatcattactttgattccatcagtgatattctaacaaaggttgtgtcggaacctgaacttcttgaatatgaaacaggaggagaggtcagagaagcggctaccaacgaatttgttgctgctgagaactcttctgaccagtcagacgaagattcttccccacgtgatagtcaaagacaccgttacctcaagtctccatgttctaaccgtggaactctgggaatgaaattcactgttgtggacactagtttggctgctgaaggaaagttgtgtgatttacggaatctgaatgcagagtctctagtagtttctgagccaaaggctcgtcttggagctaaagattattctgcccttaaaaattccctggacagtcagaatgtggaaaagtctcaagtgaggcctctggatgtcaagaaccaagtggatgacccaatgcgattcacgattattgatacgagtgtagaccactgcgaaaaatcatctgggtttagaagatggagatatttaccaagtgatgacacaaaaaagggttgtgtggggggtgatgctggtataaaggaggagaagactttggagaaggcgaagcattcatcaaagagggttattaaacctcggtctacccctcgaacagaaacaaattatcattctgtaaattctgcaccatatttgaaacgcagacggctcagtgcttgcatttcaagagaaagtccagtggtcaagcatttaccaggtgatgacacaacaaggactgtttgtcttgaatcagagcagcaaagtctatgtgcgggccaagaccaaaatatcacttgtgaaaagatgaatcaggaaaaggagactgtgctgtcagttgagcacctgaacttaaagtctgatcaatcaaaaaagactggaactgagccgtcttcttcgcttgttgagattcaagaaacgacagagattgaaccaagtgggttaaattccatcgccggtgtagacaagaactgttttccagggaagataagaactgcccatgaactcatttcggcaaaacaaaaaacaaatgggttctgttcagtgtctgagtcggacaaaaaacgagcttcttcca

SEQ ID NO: 5449 - DNA, 5650 bp, Arabidopsis lyrata
  Intron number 1 from transcript 933422 (locus 933422) deri ved from phytozome v7.0 (chr-ID scaffold_4; pos 13571932 t o 13577581 reverse strand)
aaaaaatattatccgagtcacatgtgtgtaaagattagagatttaggaatgaaagattgagtaatccatgtttgagagagaaagagagaattgcatagattgagaaaaagtgttcataacattacaatggtggctacaacctttatatataaaagagattaggttaaaatgacatagaggagactggcaggtcttagctaggcgggtgtctcagacatgcgggtttatacttgtccctgccagtttggatctctttgtctagccaggcgggtgtctcagaccggcggtttctcaatataagaaacttgtgttaaatatctaactattgatttagttagtattaaacaccttcttgattaacactccccctcaagtttatactacaatattcattggtataaacttgacacttatgctagtaacctcattaaaaacctaagatcggaaaaccacgtgggacaaaaccgatcttagggaaaaagagtattaatgacataagtggagaggtatctcaaggatgtgtgaggtctacaagcccaagtttgccatggataaattagcaaacttgggtacttgctgccttggtgaatatgtcggccaattggtccgagctcttggtgtaacaacgtaagatagtaccatcttcgatcttctcccgagtcttgtggcagtctgtctctatatgcttggtcctctcgtggaacacggggttagtagcaatatggatggctacttgattgtcacaatggaaagtgattggcgtcttttgctcgatcccaaagtcctttagtagagcctttagccatgttaactcattagtgagtttcttcatagccctatactccgcttcagcactcgaacaagacaccaccttctgtttctttgtcttccaagtcacgagattcccaccaatgaatgtgcaaaagccggttgttgattatcttgtattgcgatctccattataatccgcatcacaatatccaacaatctccgtgcttgagtttcttctcatccaaatgcctttaccgggactccctttgatatatctcagaatcctctccaccaaactccaatggtacaccgtaggggcttgcatatgctgagccacctgattcacggcaaaagagagatcaggccgagtatatgtcaaatatatgagcttacctacaagtcttctatactgttccgggcaatgatatggagtatcatccttctcccccttttgattgaccttgtatccttgctctagtggtgtatccactggtttagctccaagtttccctgtaagctttaggagatcgagggcgtatttcctttgtgagagaaacagtccctccttggatctacacacctcaatccctaagaaatacttcaacacacccaaatctttaatatcaaaggctgagtgtaaggaagacttaatagcttggatcccttctttgttacttcccgagataatcaagtcatccacatagaccaataccactactatgccttgattatcttgcttagtaaacaaagtatgatccgaatgtgacttcttgaagtcattagccaatagagtggagcttagcttgtgataccaagctcttggagactgtttgagaccatagattgctttccgaagccttaagacctttcccggagctactatgtcttctaaacccggaggaggtgacatgtagacttcttcttccaactccccctgaaggaaagcattcttgacatccatttgccacaactcccaatccaaattaaccgccaaagatagaacaaccttcaccgtgtgttgcttagctaccggagcaaacgtttccctataatcatcaccataggtttgtgtgaaccctcttgcaaccagcctagccttatatctttcaatttcaccatcactcttgtacttaatggtaaatacccattttgagctaacacacttctttccttttggtagctcttcttcatcccatgtatggttccttatcatagcttgtacttcatcatctaccgcattcgtccactcctttctttccttggcttcctcatagttttgtgggataaactccacatctagcttgctaagaaacgccttatgttcttcgggaagaaggtcaatcgaacatgtagcttgaataggatgagccacagcttgacaattgtagaggcacttctttgatttcctttctcttgtaccccttcttggattctcccgagtgtagattggatcttgtgtgacttgtggagcttgataagtctcatcttcgcttgatgattcaataatttcaccttcactagatggatctttctctaccacttcttcacttgatccttcttctctacccgaaagtgcttctctaccactttcttgttcaatatccaacggctcttgtgttgcattcccaccactttcttgagcttgagcttcattggtatccacatttggtgtagcttccgcatcttcttgggagggactaacattacccaaatgttctagaatatgtcggagactcttagctcgatctgaagttgaattcggcaagtctttcacactttcccaactcttttctccaaagtaagccttgtcttccatgaatttgacgtccctagacacgtgataccgattgttgactggatcaaagcacttgtaacctttctgagttgttgagtatccgatgaatacacacttagtgctcttgggttctagcttgtttctcaagtcacctgggacaaacacaaagcaaagacttccaaatacccttaaatgatcaatgttaggattctgtctattcaaaatttgaaaaggagattgatcattaaggatacgggttggtgtccggttgatgagataacacgccgtcataaccacatctccccaaaaccgttttggcatatgcttctggaacaacatagctcttgacacctccattagatgtctattctttctctccgcaactccattttgttgagggttgtatgggcagcttgtttgatgtaggattccacatttctctaaatgttctttgaacttggtgcttgtatattcacctccattatctgttcttaggattttaatcttggcatcaaagtgattagtcacataattttgaaagtttaagaatgcatcataaaccctatccttagatggaagcaaagttatccaagtatacttagacttctcatctatgaatgtgacaaaatacttatgattatctctagatgcacaaggtgaagtccaaacatcagaatgcacaaggtcaaagcatttttcataaatggtattggatttgggaaaaactactttgcaatgtttacctaaaatacatgcttcacagtttgaacagtcatatgaaaatccaggtaataaaagattcaaagcccgagaatgtggatggccaagtctctcatgtcacaatacaaccgatgttttaacagagtttgcaaagatagaagaggaaacattattattcaagacagaatttaaagataagtcttcaagcacatataagtcatccttggtgctcccttgaccgaacaccttaccactctcaataccctgcagcttaacgtcattaggactgaatatagctaagcaatttaagtccttagtcgttttcttaaccgagagtaaattcgaggtaaacttaggcatatagaaagcactagatttcttgttaaacagattaatgcatcctataccttctattggaacattgtgaccatttgcaaccttaacatttcctagtgccggtttaatgttctctaacaacttaggattgctaatcatatggtgagaagctcttgagtctaacactaatgaatttgaatcatgagagttagaggttaagagagagataccgccgggatgtaacttggatgcaatggattgaaggaggctctcgaggtcagatttgttcatgacaatggtctcttgcgcttgagaagtggaggcaccaccctggttgtgtgtgactgcttgcattgccttctcttgctgtccatattgcacaattgccctttcttcattttctgacccgccatcgcctccattagccacgtttgcctttggcttgtagttcttgaacttctctggttttagatgaggatgtagcaaccagcatttgtcttttaggtggcccttcttcttacaatggtcacaaaaccatgtcttcttatcctcttgtctaaccactcccactttgttggccgtaggtagacttacacctttagcaccgaatagcatttgggagctgtactccttttgaatcttggcacacacttgctctaaggtaggtgtcttctcgtctcttaggatgtgttggatcacatccgtgtagctcgagttgagtgaaagcaatagaccaaagacgcgatcttgttctcttcgttcccttaacaccttagcatcggtggtaaacggccttagcatctctaactcagccacgagagacctatacttcccaaagtgtgtattaaagtcactctcttcttggttcagacctccgagagccttcttaattccatagactcgagtcaagttagtttcatttccaaatacactcgtgagagtttcccaaagctctttagccgtctcacaatatgagtaaccttcgagaatcgaggcatctagtgagcaatgaagagcgttgagtacattgagatcatattgtttccaagtctcttcaaccaagctctcatcagtagcctttagctcttcataggtggactcgatgtgttttgtgagtttccttcctcctaacacatttagagtagtccgcttccacaatagaaagttattcccattcagagttaccaaaaacttcaagtctttgaaggtatcattcatcttgccatcatagaccgtgactgacattgtatccttctaagctttcagagtttaaacgaaatttgtaaccttttgccgtttagaatccaagaaaaaccaacgcaccacaagaataaagatcgaagcttgaaccgttcacaacccaaacactacctataacttcacaccaccaagataaagctctaacctttaagcgataaactgaccaaactgagctgaaccgccttcgaaacctctccaaagatgccttagaaccttcgtcagaacaccactaaaaaccccaagagtatcaccgtgatgatgttttccaagaaagaatccgaacaagaaccttcaaagttgcaagcttttcgactttcgagaacaaaccagaaataaagagtaaccttgcgagaaaaagaaacacaaaccgagagaaaggctaaagatttagaagaagaagattgaagatttaagaatctactctgataccatgtaaagattagagatttaggaaggaaagattgagtaatccatgtttgagagagaaagagagaattgcatagattgagaaaaaagtgttcataacattacaatggtggctacaacctttatatataaaagagattaggttaaaatgacatagaggagactggcaggtcttagccaggcgggtgtctcagacaggcgggtttatacttgtccctaccagtttggatctctttgcctagccaggcgggtgtttcagactggcggtttctcaatataagaaacttgtgttaaatatctaactattgatttagttagtattaaacaccttcttgattaaca

SEQ ID NO: 5450 - DNA, 3537 bp, Arabidopsis lyrata
  Intron number 2 from transcript 485068 (locus 485068) deri ved from phytozome v7.0 (chr-ID scaffold_5; pos 12908269 t o 12911805 reverse strand)
ggacaataaatcaacaccctaaagatgttctcatttgcgatactaaaaaaattactgttgtgaattcgataaacgttggattaatcctttaaggcataaacaagaaggagcaagtattcttgaggcggaataagatacaaactccaagacacctttctaaaatccaaaatccgatattattaggaccagtggcggagccaagattatttttaactggcgtaaaaaaaaaacaaaagtgttataaactattcaaaaaaaaaattgaatcacaaatcgttgcaaacaaatttacaaaaaacgaatcacatcacgaataaaaaaagttttttcaatgaaatagcggaggaaataactgattaccttgatttagagaagccatcatttagggtttttttttttttccttcgtccatgagaagaagaagagacaaagaactttgttttattgttttgtttattattagaaatataatttaggtgtatttttgtattaatccatgtaaatcattgaaaattgtattaattgtttgggtttgactttaaatgtgggttcaatatataaaagtaatgggctttttgtagatgtaaattagtttttgattgggttaatggggtcaagaaatatttttaattaggttcaatagatttaatatctacatatacatttttacaggggatttttgcaaaaagtcttttggatccgggttttacccgggtttaactctattcggatctagaataagaaatttaaggaagtttataataaaaacgacattaattcttaattaacacctaaattagaaatatatataatatatctaaactaaccatatttgttatttaccttaactacttctaaccataattatttaactatttatttctatatagaaagaatatgtgattaaaataaatattttgtaaaagattgatttggggaaaaattgttattacgaaaataatttgttttgttataaaaattaatatttgttatttgtaattaaattacataaatagtaataataatttgtctacaccatcaaatgaaaatagttagttatatatttttttatttaatattacgtcatttttaaaaaataaattcaacaatataatgtcaatgagtttaattctaaagatttgaaaatattaaaaagatactaaccaaacattatctatcctaatttgtttctaacaatttcgacacaaatctttcgaaaatttaatgtgatcacagtttgttactaaaatctcgattatatgcctaaaatctcgagaagatcttcctttaaatccgtaaattataatttttgaattaaataaactaacaatacgaatattcctaatatattcgagtactaataatccttattatagtatattccttatctaaatactaaatcttttatttttaattctaatcaaaatttatgaaatcggaaatcaatcatgatttcttaaacatccttaaatttcgaaataatcaacaattcgaatatgctgaaaaatcataacgaaatatctttatttacttaaatgttttagtaatcgttatagcaaaaaaatcaattccagcgctattggttctttaaactttttgatttacataaatattttgtattccataattaactcattaaattctttgatttaaataactacaatgtgaaaattagtatatgtaataaatataacatataatatttacgagattttcatatacttgatccccaacccaaattggcgaatatattatttctcataaaatatctttaaaagattttttttgtttcgtttagatattattcaacaaacttcctaaaacaaatggaaatatctttaattagctttcctcattcataaatcccaccatgcatatagacgttattcagttgataatacaaaatcgaatatattaggaatcaaatatttaattttccaatatttgcaaaattgttttaatttttagatcaaacctaaacttctcgagtacttttcattcatctatataaaaaagatcttttcaaccattgatccacaatactaaacgttttcgtaatagagatttatatggcttcttttaaacaatgttcttagtacattttatatttcatgtttgttttcttttaaaaaattaattgtcacctacttttcttatgttgcagctttcgattttaagatctttggaaattatggacatcatcaactccgtctccaaagaaactatcaaataaggtatgcattaaaaggttagttagtccttcttcttatcttcagatacgaattttttttaatgtccagtatttttttacattttcataatttcatgtttcctcataatgtttgtaaatgattttcttttataggctaacataacaagtccattctattaaaatcattttctttaacgtaaaaaggaaatgaatttgttaataaaataaagttcttattcttaattttcattattctaatgttatgtattttaattgtttttatgatatatacttttactaaaacctgtggatccgagttttggttggtaagtgtaatttttctaatcttttaaaaccttttacaacaattacatgttttatatggttaacaatcacatcatatatattttattttcttatccaatgtatttcatgtttaatgttttctaatattttttattgaaacttttaaatagtttcaaattattataaacatttaaactttattaaaagtaaaatattataattatttaaacatttaaaaaagtttatttttataaaacgttttaaatatttataatattaggaattttataaagtttcaaatattaaatagttgaattttataataatttataagaaatttaaacattataaatatttacaaaagatattaatacgggacggtatattacgggtgaaatcctagatataacaatcaaaatactattatgaattttgggtcgatattaaatgaagtttcgaatattagaaatatttgaattttattggaaaatgacaaaatgatgttgatttcacgggacagagttatatggtcggacggatttggggtcgatattaatacagtatgatatactacaggtgaaatcctataattaacaatcaaaatataactatacaatcttaaacactaaacaaaactaaacaaataatattaacaaaacaaataaaacttcaaattttaaatctttagttataaaatatcgtgtgtaccatacatttaaatcaaacaaaacaatagcatatatctatagatcatcttaaaaaaaaattaattttattattatttaataaaattatagacccgcggtgtaccgcgggttaatatctagtaaagacatataatggaatttttaaaattagtaggggtcagctgaccccactacccaccaagtgcctccgcccctgattaggactacaaaatcttgagaattattctaaaccaagctaacaatattgtgattgaatatatgatacttttacatacagtttgtacttcaatacccggacgaacacatcacagc

SEQ ID NO: 5451 - DNA, 1720 bp, Arabidopsis lyrata
  Intron number 4 from transcript 481121 (locus 481121) deri ved from phytozome v7.0 (chr-ID scaffold_4; pos 1071333 to 1073052 reverse strand)
cttcttcttcaaagtgttcattctcagagatcacagtacgttttctcttaacccatctctgtttgtgtcgggtcgggtcttttttacccatttagtttttttgtaccttatttttgttttttttttaaacgcaaacattgatttcacaagctttaaatttccaagttcacatgtcaaacttactgaaaggaacaaacagaggttcttaacttttttcatcagaatctggtgcactgttttgtagtttttcacttgtcttttttcttgtgttcatgaggaaattatacagtataattataaaattataagccttaagacgaattaaaccattatatatataaaaaatccttaaggcgaaagtataattaaaataaatgtttagctttaattttagtcaatacgcaataaacaaaagaaaaagctaaggtttcccttgattccatttccattttaacttttttttttctgctgagttttccattttaacttttaaaggtaattattgtactattaattttttcttgttcatgaaatggttttgattcccttgactatatgacaaatggtttaccaaaacataattgaagtttcgttggtaatgacaaattgacaatgcttggctactttctttaatttggatttatatctaaactacacatgcacacgcatatatatatatatatatatatcaattgttagaaagacaaaaaaaaacatatacttttttttttgttgttaaaacattcaaattttataacgtaaaacatctaaagaggagaatctggaaaccgagatcgtcacgagacgagtgtcaaaaagtcactatttccgttaaacgaaaaaaaaaaacgaagaatacaatgtttatggaatttctcttattaatctttcaaatttcaaccttcgtttattttttttaattacaacattggaaaaatattgggttactttttacctttcggctcaaaacctacttgtctttctttttaaactagtacttctcttcttctcagttctcacacacatataatacaaaaaatatttggtatattttcttttaacagattattttatactattatttatttttatatagtacttttatgttctttatgccttttaataccatgatggatatttgtgttccctcaattggaattattctttccgtcttcaacactcttcaactaattaatttgaccgttcatattcaagtggagttcgtaccatatacattaactactacagttttaatgttgaagttcttaaacccaaacaaaaatgaaataactcgttttcagatcaatgactctaattagtagaccaaaaactattttcctttgattgcatggatataggcaaccattataattaataactagctagatcactatggttaaaatttcaaaaaattgaataaaaataaataaatttgttttcatatcatctactctaattagtagaccctacctagaactattggaccaataaattagtaattttaatgctaaaaactctcaagtgttttttgaagctattttaaatacttttaagttttaacagttcgattaatattattgtaacttaaatgaaaatatgaaataatgaataattctaatccaaaaatacctactctctctctctctcggatttggtctaatttatttatcttttttttattacagaaacaaacttaacatcacaaagcctggacaaaaca

SEQ ID NO: 5452 - DNA, 15902 bp, Arabidopsis lyrata
  Intron number 2 from transcript 915048 (locus 915048) deri ved from phytozome v7.0 (chr-ID scaffold_9; pos 258856 to 274757)
tacaacgaacgagaggttcatgttttattttgactcttcgctatctctttatagtatgcgttatatattaattggcaagcaagattaaaaataacatttgatttgtaaacaattacatctcatgccaaggccagcttaatttctctctaaaccatgtttacgaaaatattatagatatatcctatatttaatatgttataaattgtcttaaaattttaaatatatttttagtcgaggtgttaggctactccatttgcacaacatgctaaagaacgggcttgtctcatactaaactatctaaatttatcatcaaatatttacatacacttcatatattaatttctatttattattttaaactttacatgaatctatatatacatttttggagcacaattaacaaataaatcctggagttgagaactatttacaacttatgccattagcatttatcattaagttacaaaatttaaataaaagatattaaccaaacgatatcttgtctaatttgtttcttaaaatctttacacaatctttccatatatcttcaaaaaacatttcctgaattttactctacaaaatatgcataaatccgattaatagcaaatatttatattaaaattttgcatagtaataaaaaatactaatttataataatcaaaatattcacatagaaaaatcatatacacatacatgaaaaagaattatatatatcatcatttaagccgttgctttatttaaataaaaaaaaaaacacaaaaagttgaaatcatatattttatatgataaatttaaaatatatattagtagtataaatttaaaatcattcaaggaacgatataccacgggtaagatcctaaaattattagattttataataataagaatttattttcttggattttataacactaataatttagctaacgggattatatagatgggtttatatgggatgacgggtttggatcgatattaataaagaacagtttatcacatatgaaatcctaaaattaacaatcaaaatacaattatacaaccttaaacaaaaaacaaaatatacaatattaacaaaacaaatataacttgaaatttaaaaattatagttataaaaaaaatcgacccacagtatactgcggaataaaatattcaaaattttaaaatctaccatacatcgttacttaaaaaaatgtatgttttcgaatctatacttcaaaaattgaaacctaaacaatagtaatcatacactaaataatacatagatagatatctacatttaaaaatacaaattaatatgctatattttcagttaatctttaaaaaaataacattacattttttttttaaatatagccccgcgggttaaattctagtatgaaatttataaatgaaaaaggttgtaatattttcatttatttaagtatatttatatacgaactttaaataatacaatctagctaattttttgtcagtgaatgaactactttaaaattgattttcttaaacatttaaccatataacataatattgatcataaaagatctcaaattcaatataattaatttttaaaatcagttaaatgtttcaatcattacattatagtgttttaaacacatgttatctttcttgttacttatataaagattacatatcttttctttaataaaaagaaaaaaagagattacatatgttttcctattattatatcctagaatagtccataacaaaacttcactttctttcttactaatcaactgttgtcgtattaaaagaaacccacacgtgattattccgttagcatgttcctttcgtcttttagtgcaagtaacaccatcggtttctcacctgctttttgcggatgatagtctatttttttgtaaggctaacaaggatcagtgtggggtaatcttggggatcttaaagcaatatgaagcggtctcgggacaacaaataaattattccaaatcttcgatccagtttgggcataaggtagatgacggtgtgaaggaagatatcaaatctaccttaggtatctctaatattggtggtatgggttcatatcttgggttgccagaaagtctcggtggttcaaaaacaaaaattttctcttttgttagagacagattacagacaaggattaacggatggtcggcaaaatttttatcaaaaggtgggaaagaagtgatgattaaatcggtagctgcggcattaccaacttatgttatgtcgtgcttcagactaccgaaaacaatcacttctaaactcactagtgcggttgctaatttctggtggagctcgaatggtgcctccagaggtatgcattggatggcttgggataaattatgtattaataaatcggaaggaaggataggatttcgaaacgtcgatgattttaattcggccttacttgcaaaacagttgtggcggttgatcacggttccggattctctctttgcgagggtttttaaagggcggtattataggaaatccaatcctttggaaaatataaagtcatattccccatcgtatgggtggcggagtatatgctcagctagatctctggtaaataaaggacttattaaaagagtcggatctgggaattccatctcagtttgggaggatccgtggattccagctcaattcccgagaccagcaaaaagtaatggatctattaatgacccatctttaaaagttaacatgcttatagatagtcgatctaatttttgggacattgatctcctcaaagcggtctttgaccaggaagatgtcgagttaataagtgccctaccggtgggtgcgccaaccaaagaggacaccttgggttggcattttacaaaatccggcaaatattcagttaagtcggggtatcataccgcacggttggataagttggaaaccaactcatctttcattgggccagatttcaataagctaaaggctcatacttggaaagtacagtgtccacctaggatacatcattttttatggcaaatcttaacggggtgtgtaccggttacagagaacttacgaaaaagaggaattgattgtgacactggttgtgccagatgtggtgcactggaggaaacagtcaatcatgttggtgtcggatcccgcaccagaagtacgagaccaaccaaagattgccgcgtgatcaagataatggcccataaaggatgaagcccattggacccgcgagccaaagggacggtcgaagtggttgtcgccatttcgagaatccgaagtgactacactgtgacacgagttcgctgtaaaggacacgggtaagacggttcacggacacttgggccgaaagaggcgaggcccataaagatcagagtcaactcaaattcaaacgttaagcattaaagccgaagaatcaaaacggacacatttaagaagaaataattgtgtttaattactcattttaatgtcgtttatcggtgtataaatatagaggccgatggccatgtaaaggggatcttgctaaaaaaagagagaaatatagagcaattctcgtatcaatttacaagttcttacgtattcatttttgtccctcaagaataatctttcccacttaacaaaatacttgagtgtgtgaatccgacatccacattttggcgccgtctgtgggtaatatcaggattcttgagtggtcagatttcttcttttctaacatttccgagataagcgacaatgtccggaggagacgccgttgagacatcattggccgaaaccctcaaagctatgcagcaaaccatgtcggacatatcacaaaagttctcggatgtggagaaggccgtcgatacgttgcaaacatcccaggtatctcttagtcaaaacgtcaataatatacaaactcgtgttcgctctttaagtgcaggaaacccggtgggaacccgaagagggatattcaactcgccaagttccgctgcacgaaatgaaaccagcgaacaaacaactctcggtgctactaataatgtagctcagacgtcggaagaagagacgcagcttggggatgaagaacaacttgcagctcagtacgagcaggagaacctcgaccagttcgagaccatgaggaaggttagccaggaattaaaagaaatgaaatcaaaatttcatcaggctacaagttcggagccagacatcaatcgagtcattgaagaagcaaggcgaaccccttttatcccgcaaattgcaagtttgaggatcaaagattcccggaagctcaagttggacccttacagcggattggaggatccaaaaagctatcttgcagcctttctgatcgctgcaggaagagtcgaattggatgaagctgatgaggacgcaggctattgcaagctgttttcggagaatctatgtggccaagctctaatgtggttcacccaattagagccgggttcgatcagcaatttcgacgaactgtcagccgtattcttaaagcaatactctatccttatggataaaagcgtttcggatgccgatctttggaacttaacgcaaggatctaatgagtcacttcgagttttcatcaccaaattcaaaggggtgctatcaaaactcccaagaatctcacagcaatcagctttatctgccctacgaaaaggattgcgacatgattcaaggtttaaagaagacttaatacttcataaaccagatacaattcaggatgcacttttccgtgcaaacaattggatgaaggtagaagacgaaaaagaaagttttgccaaacggaataaacaaaaaaagccggcagtcaccgtccctaccaagaagttcgagcctagagagagcaaaggaccaaggaagtttgggtcgcaacccttcaacaattccgtcgggaagcatttccaagggaaaggaagatcaaacacttgggtccgtgatgaaagtctatattgcgacattcataaagtaaccggacatttaaccaaggattgcagcgttcttaaaaagcacctcgcagagctttgggctagtggtgatctttctaaattcgatataaaagattttgtgaaggaataccacgaagcaaaggaaaactccaaagatcaagattccaaaagaccaaggttatccaacgaggaagaaccgagaagttcgaaggggaggatcaatgtgattctaggaggttccagattttgcggagattcaataagttccatcaaaaaacatagacgaaatgtcttactcaaagcaagcttgagtgaagaaattgattttcaaggtgcttcaatatcatttaacgaagaagaaacgcggcatctcgaaagaccgcatgacgatgctctagtcattactcttgacgtcgcaaacttcgaagtatcaaggatccttatagatacaggcagttcggtcgacttgatctttttaagtactctagaaaaaatgggaatcagccgaggagacatagtaggacccccatctccgttagttgcattcacaagcgagtcagccatgtctctcggaacaatcaagctaccggtccttgccaagaaggtatcgaagatcgtggacttcgttgtcttcgataagcccgctgcttacaacatcatcctcgggactccctagatttatcggataaaagcagtcccctctacatatcatcaatgcatcaaatttccaacaccaaatggggtggaaacaattcggggagatcaagaagcttcacggacttgttacttagctagccaccgtatgaagattcaatagcaattaacgaagcccgcaaaagaaggactaaaaacaaaatttcctagtgggcagaagaaagaggatgtagtagtcgaagtggtattggaagaagacaagccagaccggaaaataagaattggagcaactttgactggccaaataaaagaagctttgatcgaactcttaaggaaaaacaaagcatcatttgcatggtcagcagcggacatgccgggcataaatccgagtataatttgtcatgaactaaacgtagatccaagcttcaaaccggtgaaacaaaaaagaagaaagcttggagtggagcgggcaaaaatagtaaacgacgaagtggataaactcttgaagatagggtccataagagaagtgcaatatccggagtgggtagcaaacactgtcgttgtcaagaaaaagaatgggaaagatagggtttgcatcgactttacagacctaaataaagcatgtcccaaagatagtttcccgctcccgcatatagatcgacttgtagagtccaccgctggaaatgagctgttaacgttcatggacgccttctcgggttataatcagataatgatgaaccccgatgatcaagaaaagacgtcatttatcacagatagaggtatctactgttacaaggtaatgccttttggtttgaaaaatgcaggagcgacttaccaacggttggtgaacaaaatgtttcacaatcacctcgggaagactatggaagtctacatagatgatatgttggttaaatcgttgaagaaagaagatcatgtcaaacatttggaggaatgttttgatattctcaataaatatcaaatgaagctgaacccggcgaagtgcacatttggagtcccatccggagaatttcttggctatatcgtgacagaaagagggattgaagccaatccaaatcaaattaatgcctttctgaacatgccatctccaagaaacttcaaagaagtacaacggttgactgggcggattgcggctttgaaccgttttatctcgaggtcaacagataagtcgttgcctttctaccaaattctaaaagggaacaaaggattcctttgggatgagaagtgcgaagaagcttttgggcagcttaaggcatacttaaccactccacctgtactgtccaaaccggaagtagatgaaaaactttacttgtacgtatcagtttcaaaccacgcggttagtggagtcttggttcgggaagaccgtggggagcagaaaccaatttactacgtgagcaagtcaatgacggatccagaaaccagatacacaatgatggagaaactcgcactcgcggtggtaacttcagctcggaagctgcgtccatattttcaatctcatccggttgaagtattaactaaccaaccactccgaacaatacttcatagtccaagtcagtccggacgtttggcgaaatgggcggtggaattaagcgagtatgacatagagttcaaaagccggatcagtatgaaggctcaggtcttagcagacttcctgaccgaactaccaatacctggaacgatagagcaaccggagaaccaaacttggaaattatacgtagacgggtcttcaacaaagcaaggatccggagtgggaatcaagttggaatctccaacatcggaaattctagaacagtcattccgattgttattcaatgcctccaacaacgaggcagaatacgaagcccttattgccggacttcgactagcacaaggagttagagctaaggaaatattggcttattgcgattcgaaattagtagttaaccaatttaatggagactatgaggctaaagattcaagaatggaagcatacctcgaagtggtgaaggatctatctaaaaatttctcgaaatttgaattaatccgtatacctcggggagaaaatacaactgcagatgcacttgccgcattggcgtcaacatcagatcctgagttaaagagagttattccagtagaatgcatctcggagcgaagcattcaagacagcaaggaaaccctcgtcgttacaaggtctcgagcagcggcacgcgaccgtggcgaaccagagatcgaaccgccacccaataaacgaagaaagtcaaagggatcaaatacatctaataaggaacccgttgtcctagctgaagaaatgattccagaaacgatgttagaaaccgagccattactcgaggagaatattcttgagccaaacgaacatcccgaaccagagccacggatatttcacaaagttgaccaaattccggctaaagactggggggctgactggagggagccaataaagcactacatcacgacaggcgagctcccaaagaataaatggcaggccaggaaaatgaaagtcgttagcgcgaaattttgcctatcaaaagatgcgttatataggcgaggtgttagtgacccttacctattatgcatttttgggcccgaagtcgaaatcgtcatgagcgaagtgcatgagggattatgtagaagtcattcatcaggaagagctatggcttttaaagttaaaagaatggggtacttttggcccactatgatcacagattgtgttaagttcgcccaaagatgcaagcgctgccaactccatgcaccattgatccatcaaccgtcggaattattctcctccatttccgccccatacccgtttatgagatggtcaatggacatcattggaccattgcacaaatcaactcgaggtgtacagtaccttttagtccttacggactacttttcaaaatggattgaagctgaggcgtatgttggtatcaaggattcggcggtgaagacctttatttggaaaaacattatatgtcgacatggagttccatacgaaatagtcactgataacgggccacaattcatttcacacgagtttgatgccttttgtgcggactggggaatcaaagttagttattctactccacgatatccgcaagggaacggacaagccaaagccgcgaacaagacgatattaagcaatctcaagaaacgcttaagtcatctaaagggaggatggtatgaagaactccaacccgtcctgtgggcttatcgtacaacccctaggcgacctacaggagaaactccattctctttggtttatggcatggaagcggtagtaccagctgaactcaatgtgcccggacttcgtcgaacagaagcaccgttaaatgaggaagaaaattcagcaatgcttaacgattcactggatactataaatgaaaggcgtgatcaagctctaattcggatccagaattaccaacaggcagcagcccggtattataattctaaagttaaaagtaggccgttcttcgtgggagattacgtattaagacgcgtctttgacaataaaaaagaagaaggtgctggaaaacttggtattaattgggagggaccttacattattaccgaggtggttcgaaacggcgtttataggttaaaagacctagaagataatccagtcaagcgaccttggaatgtgatcaacttaaagaagttttatgtttagaagctacatgcatcatttatgtacatgaactacgatttggcttgatcccgaaatgggtacgtaggcagctcgaaaacgagttcagctattaataaagtttttgttttatttctttattaaaggaagaaggttcggctatgcgaacatacaagaaattggaaataagcgtttattcaaaaaaaaaaggggcgaagtgtccctcatcgtacactttgaactacgaaatcctcgttgacgagcagaacacttcaattccttgaccagcaagatcgaggattggcatcatacagtctggaattcgagcaaagtcagagattccaagctcaatccactctccggggtgagattcaaggatgtgaagatttcttgacaccatagtaagcctgcgttgcatccggttaatcctcttccggagcctcctcttttccgacgtaagctttcggtgttgaagttcaagtgcctctataaatgccgtcgctgttccttggtctctgataggtaaatccctgatcaaagcacatggggctcggatttgagatctcaagaagccgcgaagtggaggaggctgcctgttgggctcacttggaacatcttcattcatcattccgattctggagaagtcgggcatagattctgaacagcgtagattgaactccatgcctgctaaaataaaaaaatggtgaggagtaaaggggagttgaacctataatttataggaaccccatatccttagcaagctacggattctatccaaggaatggaatgattcgcggagagatttatgccctcgaacggatcctgcgttaaaagacgcatctcgaagaatatttggaaaagaaggaaagtaacaaatatttccataaataaaaagggccgaagcccattacgagtttttgttttttaaaaaaaaaagagaagtgaagaaattggagaacatttatgggagaggctcaggaacaggctccttcatcgccggtttagtcctcgaagtggacgccttgtttttggcatccacttcggaacgatcccgaaggcgtttccggcagtcgctggcctcctcctccaagtcctcctcctcttcatcgtcggatggaacggcgaagacgggggcgttcacgggacccgggactcctctagcgcggagatacatccgaagcatcttcgggatctcagcaacggagtcgaagttccgccactcccattgaaagggatcactctccaaggcccttatcttcctttccacccgagcgacgcgaccctcgagcgtctgccttttgagtcccagccgctgcctctcttcacacaagcgacggtgcttgtcggcgacctagcgtaaaaataagtgaataagacgaaacaagaagttttaaatcaaaaactttaacatttaccttgtcaatgaaatcgcaggcctctttcttctccttcggaggaaagtgaaagacggcgtgaggaaagagaacgccggccggttcaaagccgtcgccggataagaagagtggactgccgggatcaacgggggctatttcttcgttttccatttttaaaatatttctcaagagagattctatagtcatgtttaataaagcctagaggtaggtaagcctttatttataatgatttagggtttgtcttggaaacataaattcattaatggtagcgtgcccaagtggtttaaaccatttttggaaaatcgagaaaaggcaattattgcattaaaagacgagccgttttccctgagaaaggaaaaggcaaccgtcgcattaactacaaaagtttctaaggcccaagcctgacaagtttaccgagttgactaaacccgaagtggggaactcgctttaagccgagctcagctctcgcattctaaagagaaaggtctgatcagcctaaaaatctcgaaagcattgccacaaggccacaaaaggttgaaagcggactttgcaaacccgcatttaattttaaccaaacccccttgggtcacaacctagaaaggtttaaaagcctcctcaggcaaatatcttgttcaaaagaaaataataataaagcctccttaggcaaaaacaagtgtgaaattaagtcttaaaaataaagggacaatccccaatttaaagtggacacagccactacggagcagcagccacctcggagtccggctcaacagtcgaaacttcattcacgtccttggcagctgcttgatcagatgaagcttcctgaccaccctccacggtacaaccaacctccggagtgacctccgacaccataggagctacgggcgggacaacgtcctccgccccacttgagcctaggaataataactccagtcaatcaaaggtgcaagaaaaggaaaggtaataaatgtcaggagccaagcattacctgcccagtctaaacctgattcgcttataggaggcgattcggtgaagaattcctcgaagtcctgagggttgaaggtcgaagtaggaagagctgccaagcgactccgcttttcagaaagattagccgatagttcggttctctcttgatcctcggagaaatctgcatcatggatttgatccagcaggatcaggttgctctcatgctccttgatgtcagattccaagtcagacctagccttctcagtctgcatgaatcggatggccccttggatcaactccatcccgcgtcccttgacctcttttctggcttttgatgccgacctcgccaactcggagtcacgcaatttggcgatcgccttgtatttcgcgttgagctcgatgagttggttgttcagggaatcagcgtttgattcggactcttgaagcctaccttgaataccagaaaactcttcctggagtttgaagttctggtcgtactgaccctgcagctccccctttatctgcgcaagctcagatgttaaattgtcgactttgtcctccagatcatgcttggagccggcagaagaactgagttcggcctcaagggcggagagtttctttgtcaacatgtcaatctccttctcccggccaatgaccaacccttcgtaatgttcgatcatgtcgttaaattcgctttgagcctggtgttatacatgaacccgggatgacgagtcagttcgcagaatggcaatacaataaaaaaatatatacataaaagaaagcgggactaacccgagatgagtgatgcgcgtgaagcaaataacgttcacgaatcgcagggcgccatttgttgaaatctggcaagatcgaacccgaacgggtcttgaagcatcggaagacgctgccttctgtctccatagctgcgaagaaggaagaattgtaaaaattggaattttaataaagacaaaagtttaagtgtgtgtaaatcaccaaacctgaaagcgatttgacttgaggtacaagagcaggcttcagcctcgaggaagcatctcgagattcagaatctccttttttcggagacgcgctccgggcggtctttccactatcaggctgggaagaggaggacatgtcaaccggtcgtggaggacccattggttcagaaggaggggatgaccgaggtgagcggtcagtccgggcccttgacttttccctctgcggggaaagatcactgcgggaggacttgtctctctttcggcgaaccaagttcttaattggctcgttactaaaatcatctcgggaaggacgaggtgaatcacggcgaggagatcgatccctccgaggagaacgtgagtcgcgacgatcgcgacgaggagttaatctgaaggaagcgacagatcgagctccctcagtgctgccatcatcaaccagcaaggttctactgtagtccttcttgtctatagaagtcgcgagaaactttttcttctcctcgcaagcctcagccatcggcttggagagcaacttgcgcttggccgcaagggcccgagatgacattccctgagttgagggagggggaggaatttggtgaagatgaccaggcggactcatcctgagtctgtggttagcttccaagaatcgttcaagagtgaaggaattccaaagggtttccccttcaagaattattttgaagaattcgatgaactcttcggatgggaggttggaagcgatgaaagctgcgaaatgaaacaacggtgttagtcaataaagataaagaaacaaaccaagaaggatacgggcaacctaatcactaccgggtttcgtagaccacttcgaagggagaaaatcagcgagatttccaatcgaagcgggggttttcttaattagaaaccaaggatgatgccaattttcatccttgttcggaagatgtgaaatgatgttcctgttggcattgggatatgctgagaaatatcccgttttctttgatgaacttctcacgctcagaagctcgttaagttcagcaactccgataacataaccggcctccgccgcgactgttataattccaagaatagtacggagaagattgggggttaattgaggaagagcgatttcaagagccgctaggtataaaattagggcttcgggaagaggaaaggtcagcccgcaacccttgaaataaatctcatacacacagaagaaaccatcgcgatggttctctggagattctgtgggagaagctatttgtgcttccgccataatttccggcggaatccggcaaagctctctcaatcgctcgagggattgaagagtacaagtggacctatagtgcggaccggcaatgtcaccagggcgggtgcactcgtcgttactagaacgcctctcgtcaaaagatggagactcgggtctatcggaatcagaagtcattgggaagaaagaaaaattcaagatccggcgaagaaaggttttggtgaaggaacgaagagagaggttttgattaaagtacaaaagtaaaagaagagagtaatgatgaaaagaagttacctcaagctaatgatgaaaccgcctcggaagtcgtgtgggaagtgggaaggtttttcccgttttaatagtaattaatcaatatacggtcataatgatgacagatgtcactcggttaaaaatggatagtgccaaaattaaaggagtgatgggattttcggcgggaaatcagaaagattctcgagcgcaatctttggccacttgagcatttaaagtcctccgaactggaatagcacttcgaagaacttggggggctaattgttggtgtcggatcccgcaccagaagtacgagaccaaccaaagattgccgcgtgatcaagataatggcccataaaggatgaagcccattggacccgcgagccaaagggacggtcgaagtggttgtcgccatttcgagaatccgaagtgactacactgtgacacgagttcgctgtaaaggacacgggtaagacggttcacggacacttgggccgaaagaggcgaggcccataaagatcagagtcaactcaaattcaaacgttaagcattaaagccgaagaatcaaaacggacacatttaagaagaaataattgtgtttaattactcattttaatgtcgtttatcggtgtataaatatagaggccgatggccatgtaaaggggatcttgctaaaaaaagagagaaatatagagcaattctcgtatcaatttacaagttcttacgtattcatttttgtccctcaagaataatctttcccacttaacaaaatacttgattgtgtgaatccgacatccacaaatcacacactctttcagtgccatcctgcaagacaggtttgggcactttctcagattcctacggttatgggaacttttcccacagattctatttttgcaaacttggatcatttattttggagaataccatcggagtttgattctatagcttttccttggattatttggtatatttggaaagcacggaatgaaaaattgtttgaaaatgtggataacgatccgttagaggttttacggttagcggaaagagaggcacaattgtggcactcagctcaagtggagcttcatactgaaactcaggcttcagtggaatttccaaatcggcctcaaacgaggggggtgtccctagattcggattttacaggattccgttgttttgtggatggatcctggaaagacagcgacaagttttccgggatagggtggttttgtacaccatcaaacggtgagccatcaacaatgggagctgccaacctccgtagaagcctatctccgctacatgccgaattcgaggccctcctttgggcgatgaagtgtatgattggtgcagataatcaagaggtagcattccttacagactgttctgacctggtgaagatggtgtcttccccaaccgaatggccggctttctcagtgtatctggaggaatttcagagcgacaaggaagagttctctactttctctttatctttaatttctcgttgtgcaaatgcaaaagcggataatctggcacgaaaaattcgtacggaatcgcttcatatcacttatgtaaacaacattccacaagaatggctcttttgagtactatttaattacagatgacaaaaaaaaaaaaataacaccgactccacttcttactctctttgtctcatatgtcaactagcatataattaagttgtttgtttgatttttcaaacttctttaatatgaaaaaattaagttatgctgacaaaataattttgaatctgcaggtctttgaattatctataggtgctgcgtgcagact

SEQ ID NO: 5453 - DNA, 44773 bp, Arabidopsis lyrata
  Intron number 2 from transcript 474072 (locus 474072) deri ved from phytozome v7.0 (chr-ID scaffold_1; pos 25283771 t o 25328543)
ctattagcttcctcactctcctcctcttctctctggtatgtttatctctccccatatattgttaacaaatttatacacatgtatatgattctttatacatatgtacctctatatatgtatagacatatatgtgtgttaagaggcttaaattgaaagccttattctttatacatatgaacctctatatatgtatatggttaaaagtattactataagaaataaaaatcctggaaactaatcacataatttgtaattgtggcacacaaatttacagaagtttatgcatcataatgttttaagaaccttttttttttctcttcagtcggacaagaatctacagcatatattcatgacatagtttgtaatgaattttgatttgtacataagttcttgcatcatgggttcttaccacattgttaggaagaaaaaagtattattttccttctggcaaccttttttaaaaaaaatctatttaaatcgaaaagaaaactttgaatctttttgaactgtttggtgtctaatttatcggttttgtgtttcttgaatgtagtgggtagtggaggcacacacgtcaagaaagctgatatcaatcaaggaaaacgaaggtcaagatactagtcatttgctcaaagatggtgaattcgatgatccttcattgtacatgtatttcacacccaatgatctcaaactaggaaccaaattgctgatttacttctacaaaaacgatcttcaaaagcttcctccacttctcacaagacaacaagctgatctcattcctttcactaagtcaaagcttgacttccttctggaccacttctctatcaccaaagactctcctcaagggaaagccataaaggagactctgggatattgtgatgctgaagctattgaaggtgagcataagttttgcgggacttctttggagtctttgatcgatcttgtgaagaaaacaatggggtataatgttgacctcaaggtcatgacaactagagtaatggtaccggcccaaaattcgataagctacgctttgcataactatacattcgtcgaggctccaaaggaacttgttgggattaagatgttgggatgccatagaatgctatacccttatgctgtttactattgccacggacataaaggtggaagcagagtctttgaagttaatttggtgacggatgatgggagacaacgggtcgtaggacccgctgtctgccacatggacacgtccacgtgggatgcggatcatgtagcttttaaggtgttgaagatggagccgaggtcagcaccggtttgccatttcttccctcttgataacattgtgtgggtaacaaagtaagaaaatagacttagctctatataatgtgagtatgtgttgtaataactatggtttgaaaggaacaaaaaaaaaagaaagaaagacagccttaatgttggttttggtattgcctcttttgtgtaacttgcagcagctcgtgaaaatactagtaatgtaacatataatatctcatgctatactacatatttatatatcacgatgtatgtagcttttggtccatgaaatatatatgtccggtttggaaattttcgaattttggatcgaagtgactcgatcatgcgggaatatatgatttttacacgtgacgcttataatacagggtggtccaacgtatttttagcatcaagtcaattacgacttacccttcttgccaataatagcaagttttagtaatatctcccgactgtcgacaacgaaccattcacatcaccgcgatttgaacatttcatccaagttattcacttagctttgagaggtatatatatagacgttaagaggaatttttttttttgaatttaatgttaaattatattcaaaagaaaataaacgtttttacatatgaaatgctaacttttctgaaacatttgtaaatagagctactatctgttttctattgccttgattcaaaccatgcttggattccacctgcagatttcaaacagccacctttgagtgtgctcaagcgatttcgcatattcttgtctatcattttcacgagtagttccgacggtatgggttgttccccgtgcctccttctgttccgttcactccaaatcgagtggatggagttctggaatacgtaccttagcatatagcttttctttttgtcgaggatgttttctgctagtaacttcaaaatgtctgtccaactctccgagtatctagtagacagaattcccattgctaggttcttccatatcgttttggagtagggacagcagaaaaagagatgttcccttgtctctatcggctcatcacaaaagacacaacttgaattcacagtaccattccacttcaacattctctcccctgttgagattctgtttttcaaaaccaaccaagtaatgaatgcatattttggagttgcagttgggaaccatatctctttatgtccctccatcggcggcttagctatgcgcagttgtaaccaagtctccctcgttatgaacctcctatggtagcagtcattttttcctttccacagagctgtgtcatgttcattcaccctctggttcaaccttagttcccttatttcttcttctacacggtttaaggtgagctgtcgatggtttcttctccgagtcatgttcattacttctttcaccgtgctagataggggaattcccagatcaatacagccccgttctccaagtttctctatgagacatcccatgttactccatgaatcataccaaaaagatgtagtctctccattcttcacctctactcgatgaaacttttttgccatgtcacggtattttagaattttcctccatatccatgaaccactcattgaattcccttttaccgcccaaaaagaaccaaaacgaattaagtatctatgtacccagttcacccataaggacccttttgccgacagtatacgccatatcagtttgaatacactgaccttgtttgcttcctctatggataaagaatagaatatagatcaaatacaaacaaaaataaaaccagcagaagttatacatccagatgtgaatttgaaatgaataacatgattgttacacgttttcaacaaatatcatacatattatttcaatattttatccgatagtgcattatttatataactaggattagacccgtacatcgtacgaaaatttaatttttgaaattttattttagtataatcaaataaaaaatattattattagtttatcaaatacgtaacaaatcactaatacattttaaaaaaactctaatacatttaaaaatcactaatacatttaaaatatatatacatgtgtgaaacacataaaactaaaatcatgagttgttaattaaattgagagtgattttaggactctaacgatcatgagatgtgtggttagaaaagttaggaatttatagcatattatttgttgtaatttattttgaaaatttagaaacataaaatcttaggcagttgtatcacgttgtctgattttttttatatttttgttatttacttaaattttgaagtaaaagaccatgtgtcaaaattttattggtcaagtgacttgtactttctaatataaaggatatatcacgtaacttgtttaaaacatatacacagaaaatcaaaacctacataattacgattttttcacggcatcattttcataaataaaggtataaaatttggctatctagcctactaaatcctaacagaaactctcatgttgacaaaataaaaatccaatagagatctcacgagtttttattacgatctccgaagataagaatctatcatttttcacttgcatggtagttggtagaatagctaaatacagaacaacagtgtttcgaaatatagatttcaagaccatccccaatggtagagttttataagagactcttacaatttttttaattttagagtttgtgttagagtccttaaatttttcattgtccaatggtagagttcaaagtgagtttcttttaaaacaaatatttttaaaattaaaaattataaattttttttatttgataaaacttaataatcattgcaattcataaaattttaaacatatatgacataaaagcatataaaaatatgcaaataaaaaaatcggaataacgattagttgtaagcttgattcatgccaaaattttgttatatatgcttaacaaaatcagctttcaattgttgatgaatagtccgatcacgaactcgagttcgaatgtccatcatattactgagatttgaaggcatatatatatatatatatatatatatatatatatatatatatatatatatatatatatatatatatatatatattattagtatttttgaccaaaccagaaagcggggttcttaacaatccttaaacctcttatattaaaaaacaactcttaacaatccttaattttatttgttgttttcatttattttaattacttttaaccttgaagatttttttttttttttttttgaacacctaaccttgaagatttttttaagaaatccataagaaacaccatcggaggtgctctaaatttaaggtcacacttatgcccactcacatattgggcttttgaattattgggctatttcagctctataattcaaaagcgcaatatgtgagtgggcataagtgttgttgttgtgttgctacattttggttgtaatattgatcacctccagctaaaatcccaacaaaaacaaaagtatgacaaaggcttagctaagaagaaactaggtgaaactaaagctcaattaatggtacggggtttagttagggttcaaggttttgtacatagttagatgagatggtgtttaaaagagaagagcagaggaatatatatgatttatctaattcttggtgacaagaaacaaaattcatgtttttcttgactaataagaaactaatagggttttaattagggttcatggtttttatttgtacatacttttgcctgcggcgtaagcattgcttccgtagtacggcatctggtcaagctttgatttcttcttcttcttccgaaaacaacagacacataacaagatcatgacgatgaacaaaagtccagctgcagccacaagtcctataacagcaccaatgttcagaccatcgttacttgacgaattcgagccattgttgcttgtaggaggcgccatcgattttggtggcgatgaggagctatgatcagaagtcttagacggtggtggagtatgataagtgttcttgtttcctccattgccgttgcttccatcatttcctttgttgttttcgttgttgttacctttgttgtcactgtgctgaggcggggagggtgaaggaggaggtagagattgtgattgtgaggaggaggatgagtcagacagtggtggtggaggcgacgaggaagaacaatcaaaggaattatccggcgaaggaggaggtggtgattcttgttgttgttgaggtggaggagctaggtcaggtgaagatggaggaggaggagatgttaattcttgattgtcggaaggaggaggagatgttgtttgttgatcgttggaagaaggaggtgactgttatggctgaagccaaaacaaagataagagattcagaaatggaaggtagaagagaagagaagagatagaagagaagaggagagatagatgaggaagttgtttttgattttaatcggtaaaaaccctagaaacgggtactgttcccttaaatacattcaacagctaatgtaataagacgacagcgttttgatattatttaggttataagcgaactctctctctcaaatagaggttcttccacacttcaactccaaaacagactcttagccactttgcacttccttcctctgcaaccaaacacgagcctttctccccttagacctgttcttcttcctcatgaatgtgattggtgcttgcaacctatcagtgacggaggagaaggaggaggaggacccggcggtgagttctccggggattgcccctccgccattatctctctctccggtggtttcaatatgagatgaaacaagaaacacccaactctgttcctgttctcctaggaacaaggaaccattttttccctcaaattctatttttaagaaagttttcgaataatttttgttatttctatatttggtaattatacagccaggcaaaaaaaaaatattcacaacgacaattttcagttacaggatagattttctgtttgcaaaatgttaattattttaaaaaatgctctcgttgagagtcgaactcaagacctcccgcttactaaacgggtgctctaaccaactgagctacgagagctattcgattttttcttgttctttgacaattatcaaagtttttgttggtcaacggtactatcatcaaggttctttgttggtcaacggtaataataagttttgttgacaatgaaaattgagattttaatgtctctaatttaatgttgattacaaggctattcataatgacttgatttcatttttaaaagataaaaattaaattttagaaaaatggaaaccctagactttctactgccttttttttattcttataaatacatattagctcacatcaacattttcgctttggttgatttcatctgataaacatgttatttctcattttaacataaacaaaaaggttatctctcagttacctctttataagttcatgctctttcgatgaaatgatatgtgtttaacaaatttgggtcccatgatgtcctcgcagcaacgatttagcctaaatcctattgaggttcacgcggaatttacttaatcaaaacaacattgtcctgtgttgttttcttctatatatgccatgttctcctatcgaacttgctatatccactacaagaaaaatgagcttcggtagcagttctttgtagcgcaaatttatgaactgctactaaaagttccaaaatcggatggcaagtatttcgcagcactatattaacgctaggatatagttttttattaaccgggaacttaactcagtattatagcgggtaaaggtaattttggaggcaaactaattggggttttccccccaaacaaaaaaaaaagtctcgattctctaagtcttcagaccaaaaagactcgattccatgaaatcaaaaacccaaaaacaaaaagcattgagaaatcgcaatacccattccatgaaatctcgattcccattgacaagatctcgattctaagcaccaaaagctccgacagtctctgtgtctccgtcgctatctccgtcaatctctgtctctctttccggtatccatcgatttgtctccgtcgctctctgtctccgtcgctctctgtgtctccgtagctctctttctcagtttctctctgcctcagtctctatccgcctctgtctctttccgcctctgtctcaatagctcagtcgagctcagtagattcgaatctgaaaggtataaggcattcaatctatgcatttcagttctttactatgtactagtactctgattttaattttgaccattttaaacattgaaaggtaatcacatctcatcagctggatcttctgcctgcatcatctgcctgtttgcatcagaacacagaggcaagttctcacaatgaaactgaaatttgattcatttgtttgattcatttgtttacgagttgaatgaattggctgaatgtgaatatatttgtttggtgtttgtttggtgtttgtttggtatttgtttggtgtttgtgttattcttatgtgtttgttttgttttctttatgggtaaggacatataatggttatggaaaagagatgggttcatcttaacaggtatgtgagagcgttttgtatagttgagtttattggtttaattaatatgttaaagattttttaaagtttgtaattcgtttttttcttttggttttttgcttttatgttacttcattgcagaaccgatcctggttatgagaaaggtgcttgggattttgtgaggtctgtggctgcaggtttaggagacaatgcaatgattgtttgcccgtgtattgactgtcgcaacgtatatcgccactctgccgctaatgttgttgatcatcttgtaacaaggggaatggattggagttacaaggcgagtgaggactggtttcatcatggagaagtgaaatcagggactgagtgtagaaagaatacaagccagttgaaccaagagatcttaggtttgttcaaagctgctgagtttatggatgaagagctggttagtcagggtgatttaaatgatgttgctgatggcgatgataagttagaagatgagttcttagccaagctagctgatgcaaaaacaccactatatccaggttgcacaaaccacagcaagctatctgcgattgtttcactctttaggataaagactcagagtggttggtctgacaaaagttttgatagtctacttgagactttaaaacagatgctacccaaggacaatgtattgcacacatccttgtatgaagtgaagaaatttttcaaatcttttgatatgggttatgagaagatacacgcttgtgtaaatgactgttgtctatttagaaaacagctcgaggagctcgacacttgtcctaaatgcaattcttcgcgatggaagattaacacgcgaactggtgaggtgaagaaaggtactccacagaaagtacttaggtactttccgataattccacgtctcaagaggatgttcaggtcagaggacacggcgaaagacttacggtggcatttcagtaataagagcacagatggaaaaatgcgtcatccggtagattctgtgacgtgggatcaaatgaataaaaaatatccgtcatttgctacagaggaaaggaacattaggcttggactctccacagatgggtttaatccttttaacatgaaaaatgttaactatagtgcgtggcctgttttgctagtcaattacaacatgccacctgacaagtgtatgaaagaggagaacatcatgttgacattgctgattcctggaccaactcaacctggaaacaatatagatgtctatttagagcctcttatagaggatctaaaccatctgtgggagaagggagaggtaacgtatgatgcattcagtcgcactacattcactttaagagcaatgcttctgtggaccatacaggatttcccggcatatggaaatctagcaggctgcaaagttaaaggcaaaatgggttgtcctgtttgcgggaagcacacagatagtttgtggttgagtaattgtagaaagcacgtgtatatgtctcaccggaagtctctgtcacccacccatgtttatgtgtgaaattatactatatgtgattgtttttttgtatttatgattgtttagaatgtgtgtttcctgtgaatgatttttgttttctaaacaagtatatgttttgataatcaagtgatttcttttgtttcaggtgaactaagatggtcaacactactcgaaaaaggcattcacaaaaaaagaagaagattgccgagatagaggagaagcagttggaaactcaggaattagtagaggatcagtgtgaaactcaaaatctgtgtaatggagttgatgctgatttacaagaggatgctgatttacaagtggatgctgagttagaaggtaaagagaatgatgatgaagacaatgaagacaatgtagttgaaccagttgatgatgatgctgctgcttacaatgaagatcatactccgaatgttgctgaaaatattgctgaaccaaagcgtaaaaggaaacgaggaccaacgaagatgaaaaacatcgccaaggatccaaatgaaaaggttcacgtggattatactatcatgggagaaccttgtggtccagggtcagtaccgtttgcatcatatttaggtacaatagtacgggaacatgttccttacacaatccgggattggaggaaagtaagtgaagatatcaaacttgttttgtggagatctattgaggtattctgtaatttacttttacatgttgcttcttttaattagaattgctttgtgtgatttctgattttaaatgattcatttgaatgcagctaaggtttgatcttgaccaaccatggaagaaaagagctgcatttgttcagatgagagatatatggagatcctctaaatcacgccttgtttcagcggtcagaggagctgataacatgaaagataggatggatctgcgaccacctaatataactgaacccgaatggcgtaagtttataaaagagaagactagtaatgcatttaaggtagtaagtgattctatgaagaagaaaaggaagctgcagattcctcattgccttggccgtaaaggaatggtcagaaagagagaagaattaatcgaggcaagctcagacccatcccaggtgacaagagcaaaagtgtgggtcgagtcacggaccaagaaggatggtactcctgtaactacagaggcggctgaattgattgtatgttatgtttattcttctaaaattacttaatatattggtcatcattaatgagtgatgtacattactatgttatttgtttgcagagaaaggcaaccgagctagaaattgaaggtactcaggattcagctacaacaaatccaaaggaagatatacttagtcaaattttgggacctgataatcctggaagactacgggcaatgggcagaggcatgagcttgaccaaactttcttgtttccaagtcaacataagctctatagctgcaatggaagcagatcaggttcaaatgaagaatagaatttaggatttagagcaaattattgaaaaaatttatgatcaggttagtatactatatacacattatgtactgatataatatttaataagttatatatactatatgttgatatgtttctgaaattgcagagacaagagggtgatgttggtgaaaactctatacataagagtgtaaataccaaaacacttcctaagtgtagtttggttgactggacttcttctgatgataatgttgctgagggccgtattgtttcttatgatgctgatgaattagtacatgggatacctttagggccttatgcagttaaggtttttattgaatctgctaccaaaccagaagctccattatggagacctatacctgagaggtctactattgaggatgtagttggagaaatgattgcatgggatcccgatttatgtattgttccaagcgaaggtggcattgcagaagacattgcacctaaggttaagtatcttttattaattgttttttgtatgtagatcaaactttctcaataatccttcttcctgttttgtacctttgttccacagagccctagcacaagttcaaaaaacagatgcaaactcaaggctttgggtaagaatgatgaagttgtagctgaaggtagatggcagtctcgagaacggagtgcgttggtaaatggacttcctattggtccaaatgcaatcaaagtttatgtggattcggttttaaacacaaatacatggctatggaggcctacagcggacatgagaactctgcaggaatctttgaactgttttatagcatggcctgcaaatagagttgtgattgagacaacatcgactgaatcccctgttcttcaacaatctacatctaagggaggaagcataagatctcataaggagatgtctcctgtaatttctaaatctcctaatggtcctatatcttcgactaactcagcaagtccaagttatctgagggacaagtctccagaaactccaaaagctcctttgaagaaacctttattgaaaacaaaaccatctctgacaggggcatctcctcgtcacaaatcacaggtacatgaattggttgtggttgttcttgttgtatggctttaatctttgctggttgctgatttctgtattcattttttgctggttgttattgaagacatctctgaaagaggcatctcctcgtcgcaaatcccaggtgcatgctctttaaggatcatgattggttgtgattgttctatcttgttgagttctggctatctttttttttgcttgtggttgatttctgtgtatcttttttgctggttgtttttgaagcgtctcgccttcaaagaaaatcaaaaatgcaagttgatggatatatccgaaatggatcgcgttgttgctgaaggacgttggtcgtctagtaatcctgaccaagaagtacatcacaagaaactggggcctaatgcttgtcgcgtatgggtggatgttgtgattgaacctgatgctcaggtttggaggcaaacccctgcaatcgagtgtatggcagatgcacatggaacttgtgttgcctggccagaaggtaaaattgtaatggagaatgaggacaagtgatgtttcagatgggagaacgtgtttttgagtttaaagacatgactactttgtgttattttgtgtcttacaatggttatttggatccctttgtttttattttgcattattatgttgaatcagaaattctatgtttcagataatttaaatgggacaagttacttaattttttgtttttaaaatttttgagatatacttagtcgatatgttaataagccaaatttcaaaaatttagatatgttattagtcgatatctaaaaatttggatatatacaatgtaaaaatcaatatataaataattcaaatagtgtagagaaaattttaaaaaataagataattatgaattattaatatatgaaaaacgaaattaacaatgtaaaaatataattttatgtacatttgtacataattatgaattattaatattagttagcattataaataaatctttatatcatatagtaatataagatataaaccccaaaccctataccctaaaccctataccctaaatctcttagttgaaagcattctaaaccaatatatgaaacatgaaattaacaatgtaaaaatctaatactatgtatatttgtacataattatgaattattaatattagttagcattataaataaatctttatatcatatagtaatataagatataaaccccaaaccctataccctaaaccttataccctaaatctattagttaaaggcattctacaccaatatatgaaacatgaaattgacaatgtaaaaatataattttaaattttaaattaaactttaccatatgaaacttatttttatttaattgttacaccatattccaaaattaatacaaagaaaaataacaaaatactatactaataacataccaatcgttaacaaattatctcattggctaattgatgaaggtgtggatcacctaattattcatatctaccgttgattagaataaatctaacggtcattaattagctctgttttaattaacttttaatttctctctcattactcgatgtcttcaaagcttgaatctcattctcgagaccaaacaccaaaacgcaatctcattctcgagaccaaacaccaaaaaaaaaacacagattgaatctaagaggagatcatatcatctttgtcaccatcgccaaacactacaaaaaatcattgccgaatctaaaggttttactctctctttcgattgcttgtttttcgaatcatcgccgaatctttattttttgttgtcgctattttgctttctcgaataccctgtcagagatggtttcatgaaatcataatagtttttgttgtcgctattttggtttctcgaatacaagaatcttaatagtttttgtttcacaatgaaatctggactttcatgaaatctgcctgatttcacaatgaaatctggacctactccgtctctctctctctctggaccttaatagttactgattcagtttggaattaggtttcttgcagatattcaatagaatcgaacactgatagtcaatcttattagatttaagacatattaaaacaggttctcgtaatattttgtttgttgagattgttgatggtgttttgcatattcttgttcataaagacttttaaagattttaaccttttcattgtcaggttcttgtgataaatcttttcagttttcaggtttcggagctatatataacaggttctacaacatttcgtcattcaagcaaaggttatattcttttgtattgaattatattgttttcttttgattgttgtggttgttgataaaaaaataaacatatctaaacaatatcatatttggtactgcagaaactgttagttaaatggaaggtaaaggactcatatgcggcctccccgctaagaacgttgtaccaaaattcagacaacaaatacaacaacaagcaaagaacgatcaacaaaccgatgcggatgatgaactgaaggagataacaaagatagactttagacgggcttgtgctcaccgagggtacttaatacgcatcgaagaagacattgatacacgcatggaactagaggaagaagacattgaggcaataagaaagctatgtgcgaggaacaacactgataagaaacgtccaagagaggagaaaggagagtcctcatactgcaagactggttgaataataatggcatggtaacaactcttagagttcatgtttttgtaattaatgtttagttagttcatgttatctttaaactttgttaagttaactttatgtaatatgatattttatgattcatggtctttcataaataaaagctaattacattttgtgcaattcaatgtttcaaataacaaattatattgacgcaaataagttaaatatagattcaaattgcaatataaacagaaatttctcagccaagaaatcttatattatagcactaaaaaaaagcttgaaaacatttttaaaccacaattgataaatgctattgtaaatgatgttatggcaatgtatagtagccattaaaaactacacaatagcagaacaaatgcgctatataacactcttctataacatagcataagcgctatataacactatcctatggcacaaaaacagagctatataaaacttttctatagcaatgtttttgtgctactacagtgttaaattcgagaaccataatgtcacgaaacaatatccaccagcatatataatgtgttatcattaaatatttcacagctcaaagaaattgctatataaacaaacataacagcaaaaacaaagcgctagttaaaaatattaattagcgagcttctagcgctataataggtcaatctacgatagcgcgtaaaaactgctacggtagggggggggtctactgtagctcctcattatacagcgtttgtagtttcgctacgaaatccctttggcagcatattccttgtgttaccgaagctcatttttcttgtagtgatctctcatgtgaagtttcttcgattttcttcttataatgtggcttcgttatcaaatttaagtgtttttcctttccatgaaaattgtacgttgataagtatgagaagaaaacatattcctaattagtcttcatgaatctctcaaaaaaataaaacaaaatcttcctaatgcttccaaatcttttttttttttttgaattaccccaaaactcaatcctatcatcatcttcttcaataaatatttggcgaaagaagatgagcaactgctttatacaaaaatcttcttcaaatgcgtataagaaaaaagtagcttacagtatatagtttttttttttttttttaataccaggaggttctgtttcaaaacccgtaatctcccagacccaaaaccacatcatgtaatattagtttcgtcccaaatatatagttttttcatataccacaactatcataatgtttcaaccttactttcatctaagtatgaatgtagtcatgtcaagatatactattgatcatatgattaacttttagtttttgatccctcgatctgttctttcataaatcaattatgtttttatttctaatacttaaggtatcccgacaatgagacattcaatctatatcgatgatagtttcttctctttctgtatccattttcaatccaaatccgaagaagaaaaagggtaacagctaaccgatatggattcaatgaagaaggaaaaggaaaccgattaatgatttgatagtatattaatctgcatcttgaaactgtaaaatgatacttattcaaaaacaaaagttaagttatacaacgagacttaatttaaaacggagaaagtattataccacacgtaacacaattattattctatagatttttaatcacacacgaggttaattaacaaattttccgaaaacggcaacaatacagttatcattttatctaagtgtatggcatatttgatatacaacatacaaatttacgtccatttttaaaactcataagtactatttagaatttataaataaattatttaacacaaattctaattaacatgatctcagctaaaaagtatcggagcgagggtgcccatggaggatgttggcacaatatctacttgcttatttgactgactataataaaaaaaatcttgaacaaaagtccaaatgaaaaaaacaaataatataaatcaactcatatataacgttttgaggttctgtttcatggaaaagctcatggatttgaaacgaagaatcgatctcacatgacgcagggagagtatgtgatcgatgatttagagtttaaccgttgacggctcggtttcgggcctcatgctaaaggtttctagagctagttgtcaatcgtaacaaggtgttttcaatctgctttcgaccttctccttttgcaactcttctgggaaggacaacataaacgtcatcgcttcatcttgttcccacagcttctttgatttgttgagtagatggatcaaaaacttggtttaattaccgtcttatgctttcatgtttttattttttttgccatggaaccatgtgtatagattccaaatctttggattgtaacctaaaattttttcactatctatgaaatatttacaatttagcaaaaaacaaaaatgatacttattcaaaaacaaaagttaagttatacaacgagacttaatttcaaacggagattattatatataccacacgtaacacaattattattactataatttaacaatcacacacgaggttaacaaaatttccaaaaccggcaacaatacagttatcattctatctaagtgtatggcatatttgatatacaacatacaaatttacgtacatttttaaaactcataagtactacagtaaaacctctaaaaattaataatgttgggaccatgaaattttattaatttagagaggtattaatttatcgataaattaataattattaatttatagagagattttactaattttataatattttaaaaaatttctatctaaaaataaattttttctttgtaagcaatatttttttaaaatcaattgcaagtagagaagcaatttttaagtttaaaaaacaacacaaacttttttcgaatattagagtcatatttcattaaaatttttacatataagattttaaatatatatcatagtaattcatatataaatttatatcatatatatatatatatattgataagtttatacaattattaatttataatatagatgagaccatatgtttacatgtgattttcaaaaaaattattatcttattaatttatcgatttatgtcatattttacactggttccaactcgggaccagaaaaatttattaatttatagaggttttactgtatttagaatttataaacaaattatttaacacaaattcgaattaacatgatctcagctaaaaagtttcggagcgagggtgcccatggaggatgttggcacaatatctacttgcttatttgactgactataataaaaaaatcttgaacaaaagtccaaatgaaaaaaacaaataatataaatcaactcatatgtaacgttttaatatatagaaattgttgcttaccaaaaaaaaatatatagaaattgttaattagccagtcgtatatttttacattttatcttttaaatttattatgcgtttttaaatatttgttcttggaagtctttcaccttcctggcgatgaattcttaaacattgtaagaagattcaaaacaaaaaaattaattccaaaacgacttaagaaaacaatcattttaatcgccaacttaaacatatattaatgggtagcacaataataagattgacggcacaattttattgaaaagaaaacaacaacaataacaacaacaacaacaacaacatcaacaacatgtaaataaaaagttcagagacactcaaatatgagtagaggatgaagctgggtaagggatcttgcgaacgtacttacgagcccaaacatgtttgccatcgatggtgaacttgtttctagaccttgcactcacaatctggtccatcatcgacgcacactgaagtttcaacaccatcttcgcaaacaacggctgctcatttgcttcaacttcctgcatctctaccgcttctatcacttccccaaacctcctcgtaaagtaaaccctaacttccgcttccgaaatcgggtacccttttgaaaacgtcaggaaaaccgtccgatcatctgccgccaccaccgcttccttctcttttgcctccattatctctttctctttatggaacttgtttgtttcgtcttcaaccggacgaggaggaggaggagacgcaatttttacttgttgaacactcaacctgttagggttttcttgttgaagactcaacctgagcctcttcatgtcctcaataaatttctctctctctaaagccagaagtttctccctgttgatcatgtgagctctctcgcataaatctgtgaaagctcgagtgccaacatcggtccaattctttgacactccaacacgaaaaatttcgcggtcttgattgattaatctgagagttaacttccctccagtcatacttaagagcaaaggtataatggaattatcatcattgctagcagcgaagaacgtagatgcgaaatctaggttgtataacaaatttatacacacaccgatctcgttagccaccgcgtcaacgaaagcgtctggcaacgagacaagataggcgataacgtcacgggcgtaaccagattgctcgagcaacaagagaaaacacatcgctagaaacgactggtccacgtctcggtttagatggaagacaagacgactgaacaaggttctgtcgattgtgtgaaaagcattgaactcgtctcgtgtcaccacaattgaagatgaaggattgttagacggatacaaaggagaagccattactgattttttgtttgttttcgatatgtgtggtgatgtgtgatgttatctatgtgattagagagggtttataaagagaatccattgaaatggtgaaaaggtgtaaatctcatttttccttaagaatttgtattcattcctaaagagtttgtttgttctcgttcatgtatctaattaattacacatacaaaagtcgtaaccctccgattcagaaagaggcttggcatcgttttgttgtgagacattgtgacccttggatcatcatcattcatcacccatgacccttcgatcattcatcatccatccctaaaatttgttttttcgtatcattttccttaattttctttacatggaggagcctaaatcattattattattttcgtttacagctcttattgattaagataagatttacgcggtcaaacatttgatttaaatttcattaataacaaatattattatctatagtataatttcgatttgataaaatatatatacatcatttgattcaaccaaaattaattatttcatagaggttttgtagtcaaataatatatttcttattttttttctaatagttaattgtacttcttacttatttataaaatctaatatttaatttttcgtacatttccgtatattttgtatctttttaggttatctaagtcgttattctaatctcaaagaagaaatttagtaattaactatagttgtaaaatggtatataaaagaaaagtattttcgtacggactggcggaaatactattaatgcgttaaacccgatatttggtaaaataacgtatcattgaacgaattagcaaatacgatcatacataaaatgtgtacggttccgtatttttcttgataaatagagtaatatcaaataaaataacattatttatttaaattaatcgaaaagttttatcaaatttgtagataaattcttagtaaaccataagattttttaccttacataaaggtcaacattttttttataatagaaatatcctgtataaggttaattatagttggatatacatatttcttaaaaaaaatccctaaaccatcaccacctactaatatctcaaaaaaaaaaaagacacgtcagcaacagcataagaccacacgcagtggtatattttttacctggatgtaagcattattaaaaagtgaaataataataaagttggttttgaagcaacactcagatgtaaactaagactcggatgtaagcatatgtaagcattattctttcctttctctctcttctttttcctttctctctatttctttttcctccttttcctttctctttctttcatacatttaaattattaaattcataacactcaaggataggcatacactgctgtgtatgctctaaggcttcaagagaagaaagaaaaagcgtcttctccaaaaacccagaaaatcgcagagagcttctctttgtctttgtacagatctcgatgccttctcgtagaagaactctcctcaaagtcatcatcctcggcgatagcgggtaagttttccggtgactgactctctctctctctctctccgtatgtatctgcttctacatgttgatttagtgtttttcgatcagtaagtatatactttttctgggttcgaattttgattggattcgatctggattggtgtgatctcttaggtcttctggattttgattgttctgtaattacatggaattgaattgtgaagtgatgattagagattggattagttgaaattagtctcaagctgctatttgaagttcatgtctaattctctcagtatgattcagatttggtgttcttatctatttttgactggagagaaattgaatactgaatcttgtatcatattcaagatttgtttgatcctgctattattataagcaacaaccttttataagaaatcattcggtcaagtgttcgcaatcaaggaagaattgttttcggcttagtttgtttcttggtgagtgagagtgaatatgttctgaatcatatatttatttgtcgtgatgcctggtgaagctgttgagctatgagtccaaaagtcttattgttgtgtttatcgaagttaagagactcattgggaattttgcagggttgggaagacttctttgatgaatcagtatcctaaattttctgtgaatggagtaaagaggaagttattgcaatgttttttttttttataatatatatgaatagattctcttgtctctgttttatgactaacaacaatctgtcctctttcgagttagatgagtttgtgtttctgtttcactttaacaccatgcctttagatatgtgaataagaagttcagcaaccagtataaggcaaccattggggctgatttcttgactaaggaagtgcaatttgaagaccggcttttcactttacaggtttgttgtaacagcacagtttatcagtgaagtaattttattttgtcttgttgtagattttgcttgcttagtgcattggtatgagtttgaatccttagtggcagagttgatattggaaaaacggttgaatagtttatgagcttcaggctgatctctgcttaacttttgaattattaacttctctgcagtcttatcttatactaatgcaaacttaagttctgtcggattgttgtgcgccgttccaatattgaattggctcatacttgtttctgatgtgattcttacggggtttgctttggcatgatcaaagtacgaaaagggttcacagactctgtcctggattaagaatttatcccaagtactatatggaatgccctctttacttgactataggagctaagttcttgctttgtttgttacagatctgggacacagctggtcaggaaaggtttcagagtcttggtgtggcattttatcgtggtgctgattgctgtgttcttgtatatgatgtcaactccgccaaatcattcgaggatctcaacaactggagggaagagtttctgatccaggtataattatagatttatatttatactctctcttctcagtagattcaataataggactttacttcaatgccggtaattgtgatttgcaggcaagtccttcggatccagagaactttccctttgttgttatcggtaataagatcgatgtagatggtggaaacagccgggtggtacgtatataatctccttgtaataaagaacaaccttgaaatttgaaacctctctgcattgtttttaatcactttttgttttgaatttgcaggtttcagagaagaaggctcgagcttggtgtgcttcgaaaggaaacattccatactatgaaacctcagctaaagaaggcaccaatgtggaagacgcgttcctgtgcataactaagaacgcaatgaagagtggagaagaggaagaaatgtaagttaaaacacacacaatcgcaatcataggctttgctaatgctatttttcttttcgggttgatgggtcgactcgagattatgtctgaaacttgttgatgtttaatcgtttaggtacctaccagacacgatcgatgttggaaccagcaatccacagaggtcaacaggatgtgaatgctgaaactattcaaaatacatctgctctctcatcagtaatctcactcttgaggtttttaccattttaccatattgtaaatctgttgttctgtggtacattaatatttttaaaaaaaattagaaccctaataaataaataaaaagccgaattgggttggtcggtgtttatggatctctttttctctacactaacgttatttgttgtccactacatttatgaaaagactgaaatggtttctttttcattcttgtttttttttttttttttttttttatgactaggaggttctgaacctgtaggctagtacatccctccagtgcaaagcccaaacaatataatataactttcctaattatattccagttgtccccgagtaaattccagttgttcccgagtaaattcagatctctggcgatggacagtcaagagaattggatgataaaaatcatcacgctcaatttttgatctaattatattactcattcgatttgacttgtccccgatctaattctattacccattctatctgaacttgtctccgatctaattctattactcattcgatatgaatttgttcccgatctcattctattactcattcgatctgaacttgtctcatcttttatctgatatattaaaagagcaattaatggtctaaccctactctattatcatttttattaattaaattcaattatctagcaaatgtaaacgtgcaacatttattgcagacctgctccttctttggaagcgtcggacaaaactgtctctgtctctgacaaaaactttatccctgacacagactatgtcccactcaagggtattttggtccacatgcaattccgcatgtgctattggaatgtgaaagattttgaaaaccttttaagaatgtggtagattttgaatgccagttattgaaatgtggtagattttgcaatattcccttttttcatagggacataattattttattattattatttttgctaaaataattaattgatttcacaaaataatactataagtaacaagacacgaaaggcaccgtgtatttatttatatatattatcaaaacaaaatgtgaagcaagtctagttttcaccacacaaagactcactcactcacattaatggtaaaaaagaaaaatcccttatagctgcactaaacagaacatatatagtatacgtgtataacacaacaactcaagcaactcaaggagtataacatatacgtgcacgtataactcgatccatacattacataaacacaaagtcatatatataagaggcttcgtcaatattattcattaggattgtggtagatgatgacaacagatttggtgtcgaaattctggatgaatctctcttggccggtcctaaacggattgttgagaagctctttgattggttcaggcaacggttcattcttcatcatcttcttccaatattcttctgcaactcctcctgttcttccttcactcagattcacaaactgtaccaagaaatatatacaacattcagatatatgtatctatattcagatcttaattagggttttaatatgattaaagaagaagcttttaccagaagaaagctgaaaaggacgatgaagacgaccaagtaatgttgttgcttcatgtctgctttaagcttttgttttgttgttttgaggattttttctcgatctatgttaaatttttaggtgtttaaagtttatatatatagagagacccgtttaaaggaacttgttttcttgataagagtgataattccctctcttcttgcatttaataatcatttaatattacattgtcaggtcaactttgtgttgtgcatatatatatataatgatgatatgtgtaacctaatttatttttatttttcttgtctaaattttcagagtggtgggcctcttttttttttttctttttgtgcgaaagtggtgagcttattaagcaaggatttttgtctattcttttctgaagcaatcaactattagagtatgcacatagttgatattttataagtatcattaacagtattcttcatcttggcctaaagagttcgagaagaagtctttcaccgctccacgcggaaattgattctttgctttgggcaatggaatgtatgatctcgttaggcattatcactggcgtcttcgcatccgattgctctgacatgatttctctcctcgacaaccacgacgtttggccaacttttgtagcagaaatggcctctttccggttcctcgtttattttttctcttcttttaatattagatttcttcctcgtagttctaatactcgagcagactgtttagccaaaaatgctcgggctcgaaacagtctattttcccatgtaagttcgtcggttcctgattggctctccctagcggagagtctcttttcgatatcttaatagaaatggtgtttgatgaaaaaaagaaatatatatgagtatcattaacaattttttagtattaattttaatgtgtttattgtttgaaattttttatgatactggtaataaatctgttttcagtggtgagaccggtatcagtatcattaataaaaaaaaattaatgataattgaatcaattaaaaatattacatcaaatacaaagaatttaaatcaaatccgaaacaaaattttagaaatccttctataatcatataaatatagaagatgggatgatcagaccttaatgatgaaatcaaggccaaattcgggtcagactgaaccaggttgctccaaaagatgggatgcaaccagctctcaatcatggaatggtgaatcatggtttttgcacatggagattttgatggcatttgtgtactaatcacaatctacaaactgtttatattagcatctctcctcagtggtatataaaatctatggatacaagatatttacctaatcttgaagatgcttaaaacactccactatcattcaaagtcttaccccaacttttctttctcgagcttttcaactatggcattcttctcatcttcagaaatggacatgaacgtgaaaacagatttatctccgatatcatccttcaaaaccaaaccagattaaagatgattagtaatacgaaattttgatactttcatagatagcaagacctctatgaaagctcagtgaattttcttccagcaagacctctaattcaaattttgatacttgtacatggctaatcatcagcgacgagcagtgtaccttaataggctgagtgaattttcttccagcaaattctagaaagagcgccatccttgttcctagcaacaccagtcttacctcatcattcatcggaccgctctacaaatttagtataccaatttagttcaggcaaattaaacaaataccaacatcaccaattgtaggaaatgtgaagctttctctttagagcagagatacatcagattattcactaatgtggccttatgataagttcttatttgatctcaaaagtctagtccaatgtaactaaagcaggatatcttaatcaaccaagctactttaccaaatgatgatcatcaccttctacttttgacatttacgttagcagattattcactaacgcggccttatgattagggttttatgaaggcacaaacgtctgacatgagttcttttccagctttaaggatcatactacagaccactctacttttgacatttacgaaacatggtacaacagaactagaaacaaaatccctaaaacatggtctctagatttcaataactcaagtttacatcaaaaagataccacaaaggtgttaccttaatggtaagttcatgagggagaaaccaggaattggaattgtggagagaagtgcgctttcgggataatcttttggtggtatcttgaagaagcgacgcgaattggagtgcgcgatcagtgagacgatcttgaacagagtcatcatcggaagcttccaacagtttctcaaccactcaatccaaggagcagccaattgagagcggcgaggataacaaaggcacatccgggaacgagaggaacgaagagataatcttcttcgatgagaggtcttgatcttcttcaatggaacccatcgtgacttgcttgtcttccagttcaagctcgcggtggagaagaagaagaatcggcggaggagttggagaagaagaagaatcgctatgaattttttatttttctctgctttcagcgaaaacgctgaccaaccgtgtgctgccacgtcacccgatactgagtatcaaaggtatcagtgaactgatacggatcaggccaaaatatatggtttggtccattaaaaaatgatttttgggctactgatacccaaaataaatcacctatgtacatggtcttacagctcagatagcaacaccaacatttttttatatgtattaagaatatatttttttgttgaaatgtgtaatttatatttcaaaatagtgaatatttacaaatgtttgacaaggaggtaacgcatttaaaaatagagcataataaagaggaagaacagagcattgccaatgcaagagacaaagtgtagaaacaaggaatccgttgacgactacggctttaccatgagtcgcctctggagcagaagacgcaggagaggcttggaggagtaatccaatgaagaaatcctattttggacaagcttttcactatggcggatcagttgagctatggacatacatccactattgtgaatgcgtgaattttgctcctgccataacacgtaaatagacacctggaagaagagcttgatcaagatatctcgaagcttgtctcctgagtgacttcgaattgtcgctactgtctcttcccagcccggagataagtggtgtcgaaggagcttcccagccagcgaggatcaaagtgtgaatgagtacggacatgcgaaaaacaaatgatctcgagtttcatctatttcacggcaaaaaacacaatgttgttgttgtccccaaaggcgcattcgatcccctgttgacaaacggttctggattgcgagccaagagatgaaaccacaacgcggaattccttgacgaaaccagatgagattaccccaaggtacttgaggatgactttctcgaatttgttcccatgttttaagtgaatggaactgacccgtgaagccatccatatcagttttccatagaaactgatctttaccacgaggagcatcgggcagaggagtagcacgtatggcctgtatgagtggatagagagtggctgaccttgaacgacgcaatttccagccttgaaggcctatcgcttcctttactgtcgcatgtagaggaattcctaattgtcgaggaccagtaggtcctgtaatgtgtaagatactaccttgtggcatccaagcatcaaaccagaatgatgcatcttccccgttaccaatctccacacgaatgaaaggcttaacatcctcacgaagctttagtagctttttccaaatccaagagcctagaatagaattgggagctgaccagaatgaccctcccttcatcaaatttttcttagtccaagccacccaaagagagtccgacaaagtgaataacttccatattaaccgatatgcaaaagcacgagaaacatcacgtaatcttctcagccctagacccccttccgcctttggtaatgtatttagaatataatacttatataattgtatagaacaaagaagaattctgtaaatgtttatgttaatgtaaaagtagataattctataacaaagattataagattcactaaagtatagggacaaaacatattaaacgtggcaactagaattccattaaaattgttttcaaaacaatctttttatcaaaaaaaaaaaaaaaaaaacaatatttcggcgcaagggatgtagtaaaatgacaagtgatctaactccatttacagaaaataaaatctaaaaaaaaaattagagatttttcacttttatatatgttcaatcgttttattatctcatgctaacatagaaccttcaatacataggatatatagttaagattgttgattagttaacaacttaacatagataacttcaaaagtcgtaaatacatagaaaaaagttttggttttccttttaaatttggggtccacttgaattaattattcttacaaaaataaatcaggaagaaaaatgttggcttttctccgtgagagttactttaatttatgaaaaagacaggccaaacgttttgtttgataacaagatgagattataaaagctggatttaatcaaaaagaaaatattataaaagtgaagcgggtcaactttcaatgtgtgtgcacattagctctacgcgacacataacccaaaagtatttttagaacattgactaatttaataatgtcttatgatttcattatagtgggctacttcttcgaattacttattattagttgggattcgaataatatagcgggcgattatttacaccgattgatatgccgattcttcctccaaaatgttgttttgatgaagttaaaagttataatttttgatgaagtgtcattcaatgccatcagcatcgagtccaagctttgtgtcttgggcatgcaccgtagtatttatgactggattagtttggtccccataatggtgtgttgtccaaacccaaaactagaccgagaaacttgacgtttttaaccaaatgcatgtaatatgcataaacattcatattaataaaaaatttataaatctattaatcccattttgctaaaactagatatatatatatatatatatatatatacaataaaatacaatattgtttgcaattaattagataaaacaaaggtataagattagatacaagtactaattacatatatcataagatttgagaaacatttcttcaaaaacaaaaacatttgaggaacacttatctaaccacctaggctaagattacaaaagtatacttctttattagtcttttttttttgggaactttagggccactttggtataaacattatgttttgtccacaaacctactattttttttttgacgttctatttctatttcttttcaaaactcatgttaataattcttttgtaggtgttcgtgtcatgtaacaagaatttttagtttttgttttctaatttactttgagttttaaccaaaaattcaaatgactaactacgtataaatttttagaaaggtttagtttggacctttgaattagataaggtttgtatttaagatttgtaaacttaaaaattacttaggttaagaaataaactaccttagggtggtattcgaaacttgagtggtagagaaataaagagaaaaagagataactatgcgagagctcccatttcaacattatatccatgggtgtgtctattgcaaaaattacctcttaacatatatatatatatatatatatatatatatatatatatattgatatcaaggttaattatttattttacttttagttttgcaacatcgattaaagaggaacaaataattcagagagttcgaaatctacaaataaaaaaaaattatgattacaacagaaaacacaacaaggaagacaaaaacgataaccagctaccagagaccggaattgattgctcttaagtacgtcttaacatatatcaacagaatacaactttgagaaaccaagaccattttgtaatgagatagttatttttggtactaatgtactacagagatacatataaaagttggaatgtgaattatttttattcggttatcttttgatcctacataactttctagtaaaattagaaggatatttcctacatatatatagatatatttagggttttttcttggtgattataaaattaattaaatttaatttaattatttttatgttgacaagtatgggaagaatttcaaaaataccactgttatgatatctcttttaaaaataccacatctttattcatatatatatatatatatatatatatatatatatatatatatatatattaatttatttatttatttaaacactttgtttctaaaaatacaaaaaaaaaaagcgatctagaaatacagattataaactttctaaaagcatgttataaaaaaggtttataaaattttagaaaattgttataatgcatgttataagctgtttgttaaattttataaagttttttttgttcaccaagattttataccatactagtcatcctcaaaagaggaaaatgttacataggtaggagccaaagcaattaaactccctgaaccaaaagcaaattggtacacaatttaaattttataaggttaaaatgttttataagacatgttaaactattatttttgaataattttttttcctactaatatttgtaaaaaaatatggtatcataaaagtggtatctaacaaaattctcttaatacttatacacatgtcgacttgtcacatgctctccgtctatgctaattaatgattaatgaaaaacactatcctacttaatctatatgatttggaaaactttcctgctaaaaccaaagccacgtgttatctactcaattatctatacataattagaaattacaacattgtgaatataaagattgatttggcaacttagtagagtacacaaataacctaactgcttaattggctagagaacaatggatgaataagtccccaccattagttttgaagttgatcctctcaaatccatggaaactgttgatgaaggcaatgctgtatttgtgattatgatttacacttcaataaactattatttctcttgttatgatatcaacaatatggcatatggccaaatacactcatattttctaaccttattttaattttcctaacttttagtggccatggaattttgtctaaagatttgaaaccgcttctacaatattcccattagaaaaggataatcatgagtcatgactaccagcttagctttagaaagaaagtcataaagaaaaagctgatcttagtgtttctcataagtgggtatttgaaaatttgttctattatggggtttaattaataaaagactaaagagtgtagataagatatatggtcagaatgatttaacttttgtctctgattaattgtggtgcaaatgaaatcatatatatgaaagttggccaactctctccgtatgattgccacattatcacacaagcaaatgacatatgtcattttacattatttaaataaaatttttttgcaaaattaaataaaaaaaataaaagttctttattgcattaaatcctcttaaatcctactcttaactaatttcttcaaaatatgaaaattataaaattatgttaatattataaaattatacaattataaagttcttcattttactcttcttattttactaattttttttctttttatcaatggtgactaataactaaaaataaatatgtgttttagtttagttgtttgctccctaacatcttattagtttaataattttacattaaattttttctcattattacgttttatggttcatatacgataactatgtgttgtatgcaaatcttattagtttaataattttaccttaaatctttgagatgttagaaatactaaggaattcaagacacgactatatattttatgtggctatatgcaatagtagaagatttaaaagtgatgataaatgactctttcattttttgctttctttttttcttttcatttgaaaactcttcagatcttgttcaaattatgtcaatcaagtatttaatcatgagcctattatgatgtggtcggagtactagatcaggatagttaatagagcaatgaatttttttatttataatagagtaacataattatatattattgtatcaaaatatcctatattattattgtatgtagtcatgataatgaaaaatattaggatcttagatatataaataatcaaatttatacatgaaaatgcataaattgatatttcggatcaaaaataaatgtaaccacaaaaattgtaactacataagatggatctaattttattaactacatgataacaaacaaacaaaaaaacataaattagcaataagaacattcaacataataattttaaatagatgatgaattttctatttgcggcaaaattgtaaaattgtaaataatacaggtttttatataaatgacaatatgacatatctgataaaatccaaaccaattttcagatttacaacaatgatttatgcaaccaagtggtagtcttttagtaattctcacttgtgaaaaagttgtcttataggtttaagcaatgtttaagatagcgttaggtgctaaaagggtgatgaccttgcgcctagaactcctaatcagagcattggtaattttagacgggttaaacgttttatgcgtttacagtataaaatattataaatatgatattatagataaaaacataaaattatatattataaaataaaaaatattaaatcataaacaagaattagacaaaaacatttctttaatttatataaacaacatatgaacgtttatatccatgtatatagaggtagaacttataaatttaaatctatgtagttggaaattggaaaaatacactaaaacgagatttatgctattttaggcggttgagacggtcatctagacgtcacctgagcgtctagcgtctagtcggggcctagacgaccgcctaaaccgatttttagaacattgtgtttaaatcatgaataattcctttcaaatatgaaattattctatcacttgtatttgatccgttgaaatggtatcatatattaacattagaaaattcagtgaatagattatccaacgactacatttacctaaaaagtaatagtaaaacatttcatcccagaaataaaaaaataattaattaaacatcgtatatcatattccatattttaatattatatatcatatataattgaacttgcatttaaaagtaacaaaaacatttccaaaaatcatgcttcctaatcaagtttatatacaaaaattcagctcagaaaaatattaatcaatcgaacatcgtatatactatatcccttttttactttaaataacggttttgaatagtaactttgtcctgctttggtacgagatgtaccgcttttacaattaccaatcagaaaacgatataaaaaacgttactaaaaatatgacactcagcttttttatacagttttcgtgtaccattattttttacattttggtattgttatagctttgtgttaggaccataataatttaccttgcatttaaaagtaacatttgtcgaatggcacgaagcaagcgagtggggttcaatcaagtcatgcatgcatatcttaattttaatgtctttcttgaaattatcaatttgtagtaaatactccctccgttctttaataagtgatgttttaagtttctaattttgttcttaaatagatgatgttttcagttttcaatgcaaaattaattacttttttattggttttgacgatttatattctgtagattatatttttattggttgattagataataaatgatgttttagtttagaaataaaaaaaattaaattatttcttaatcgatgtgcattctcctaaaacatcatttataaaagaacggagggaatatatagctatagtcaacttctacatgtacttattggaattagccttttaattctaaagtcaacttaggtttctcaatcatgcacaaatattacaattctctttttatactgcaacattgcaactatctctatactattaaaagagaagtacaaatgaaaatgggtcgggttaaaatcagaaaattgatccgaaattctgaaatcggatctttgaaatttttttggaatagaaattcgaattaataatgaaaaatcgaaataaaatcaaatatttatggaaataaaataaaatctgattgtacttatggtaactaataataaaagcatattccgaacaatattatacattaattacgtataataaatttgttcatatatttttgggactaattccataacaatcaacgtttttgtcattaatttcgctcattttagccaattattgaaagatattttatttgcttctaaagatttctagaaaatttatcacaaataacccaactgttttataaattaaattgatatttttattttggtcgtgtaaattaaatagataattttattttggtcgtgtaaattaaatagatatgaaatccatgtaactaattttaatttaattagattaaatcaaaattatgatattttcatacctatagcttaccaaagaagtttaattttcaatttataaagattttttgaatatgattttagaattattcaacaagatgataattatttattaaattttgtgaatcatgaaaaataataattaatttttaatcattatacttcatctttcaatctctcatctaacaaataagatatatattctattattctatgtccaaacttcattttgttgtatgactaaaacttcattttgttgtatgactaaataatattcccattagaactgtcaaagtgagttgattcgtcccgttgagtccgttttgcgatagacaaaaaatattttgacttgtgttagttggtccgcacgacccgcgggtagcatatatgaaatacaaacccgtcccacgagtgtatgcggatttgcgggattgtccatggattttgtttaaattattttaaagtaaccaaaatttaaaatactactaaaataaataaataaatcaaaatattattaaaagtttgtttaaattaccacatgttgaataaattataattttatcaataaatactaatatgcgggctgatccgccaatccgcggatgaaaaccgattaaacctatgacccactgcatattaatccatgtggcccgcttatttgcgggtttaatatatttttccaaatctgcctcatagtgagatgatgtgggctcgacccgcggttttttgacctattttgactgctctaattcccatgaatcgtctaattttagaattttaaaacacaaaattctattttgtaaatcataattaatacgatgggtacgtatatttataaacaattttacattttctctacaattcgttattatgaatatttataagtatactacacgattcgttctactaaaaaacacacacaatattaaacgcaacgtatgtaaaccaatattctcccgcggttgaccgcgggtccgatcctagttgctcgttattataatggatattcactgtccataggagatttattctccctgtttaaatataagtactatattaactaggatatgacccgcggtacaccgcaggttaattatttgatttttttatttttataaattgatgaatttattgtgtataatattttttgttgtataccgcgggtcacatgcgttgtatctaaaataaaaaaatttaagttgtatttgttttgtttagtatttaagattgtataattgtattttgatttgttatttataggatttcacctgtggtatattgtctcatattaatattgacccaaacccatccaaccatataatctaaaatgaaattaaacatcattttgttatttttttaataacacttttatttaaatgtcatataattcgagttaatttgaaagttgctttcaaatagtttccatgtatatttttaaattagtgtgtgtttttggaccaacccgtaaaaacaatttataattgtatcttaaaatactaattaggatttcacccgtgatatactgtcccattttagataattgtaaaaattaaagaaagatccgaatgactcaatttcgggtctgaataaaataacgacatgattaaatgctcaatttgttcttaaaaatgttaatatagattacacacatatttttattcatcgattgagtaatatatgtccgttttaaaaaatttgaattgtaacatatgcagaaaaaaaaaaactaaaatttactaactatttatatattttataataatttaaaataatataaatataagatcaaataaaagtgaaataagaatcatatatttatgtttaaattaggtagagaggttttaggaaattagtgcaaatttgttatattagcattaaatcatcatatttgatttctttatctataaaaatcgtggagaatataccataaataaagcgtttaaatatagtaattagttgagaaagtatatatattttagattttattaattattttcgtttttaattttgccaaaatttaaggaaagatccgattgaagatttccgggtcaaaattaaacaaatttgacccgatttgggtaccccaaaaactgctgcaaaaatgtatagtagatattttaactatatttttataaaaataagttgatttttgaaattttacttttattttacgttttcatttagttttagttacaaagaaactttgtaatgtcactttttgatactataatacattgaaatcatataaggacgattttaaaaatgaaaatgttagcataaattgacactatttgtaaaatggaaagagaatacattatattcatccatgtgttagtcattttatgtcctcgaagatgtaacaaatgggaaacaacccaattatatcacaagaaatcaaaaataaaattgagaataattgaggtaaatatctgtatttaaattttctcatttatgttttttttttgtcttttcattcctttttattttatatatctagttcttggtagttttaatgcgaaagcgaaactactatatttttgttagcactctgcagtttcctatttaaaagctactcatgtcagaaacattcataagagagcaaatttaaaacaaatctcgaccatggatttaaacccttagtttgttgtgatttcggcacgttaaatttctcttaaattcttttttttttttttttgtaaaacaaaaccacatccatatgctaaaaacagattccacgaacatgaatattcattctgatttcttcttcttattttcgtgtaaattcggatgataaaatataatggatgatgtattaaagtcaaagattttatatagtgggttggttgttgccttaggattagagtaattatgcgaaaaaaaaattaggtcaatgatactgcgactaaagtgcaatgaaagatcaaagagctttaggtttactttttatttttttcttattattattatttttattattattttttcttattattattagaagaagaagaagaagagaaagaaccgtgaggtgaggagagagatggagacgtcgcggagttggtggaatccggtgggtggaatccggtggtggatctgattggtcatggcctggctgtggcaggcttcagtggtggtgaagagaaaagttagagcagaacagaggtgaagaagagaagaacaagaaagaaaaaaaaaaaggaaataaagttagtgtggaggaggcaattctggaggctcttcgacaccaaatatgacgtctttcctgcaagataaaggtactgatgttttcattaccaacccaggagtccatagcaactgacggatcttgaatcgggattaaaggcaagaagttatggttgttgctttcgggtcaagtaactgcagaatctgtcaaaccccaaaaccctaaacgggttccgagatggcttctttgatgcaacatttggaggtccaaacgttgtccgatctgagtgaaactttttggagttattcatgatactactagctaaagattcaatggtgggatccggattctaacggttagttgttaagttattcttatgtttccgagacagttcattattgagtaaatgatgacaagttatattgtttgatttggtaaattgaggttggattgagctgaagctctacaggagaagtcttggtgttttggtgtatgtgttggttagttggagaaccaagatggaattttgtgtttatgtcgtagcgtctccaacaagtttaaggctaaggtgaggactagttggtgtctttttcatataccgatatgtttagatagttacttagtttaaggttaagccaagcatacctatatgttacattataagtaacatatatttgggtgataattgtatattttatttatatgtagatatatacttactgtatttattaaacgaacgtataagatgacaacagaaaataaatgtgtgttggttgatgttatgagtgtgtgaaatgcatgttattttgtggtgaataaatggttgtgttatgagagaatgtgccaatggcacgaagatgcggtgagccgcggagagtcctacaaggaggaatccttgtagttttgtgatggtctatggacgcgggttgcggatagatcaggatggctgacgagccgacgattgagaagtgtaggaagaagtgcaagaggcacgaggaatccggttgcacgaatgaaaggtgcaggaagaagtgcaagaggcacgaggaatcaagtaatgcacaatgtaggaaaaagtgcaagaggcacgaggaatccagtaatgcataggggatggcgtgatttgacacgtgatatcctccctgcctatgtggtagtggttatgggacgtagtctcatttgtttgatgtgtgtgtgtctttgacacgtgattgcttgcttgtcttaggtttagactttgtaattgtctaagcgtgtttgtgtatgaggacttcttgagccctaaggcttgtccagactgagtaattttcaatagctcacccctctctcttttgcaggttggttaagtcaagagtttgttttccgttgttaattggcggttttcatttaaagatggtttgggccgggccaggaagtcaacacgttgaccagctccgtatagcggattcgggtcctttcaatttggtatcagagcccaaagttatgtcaaaccggttctgatccgggagaccgtcctgagggagattggatttctcgggcatattatttgagaagttggggtgttaagttgactttggaaagttaacgttgataagcaattgaccaactaccaagaaaactattaaggtcggtagttttcttggacgagaaggttacatttggaaggttgtaaaaacttgctggtatacgtaaacataatgactcgactcacaaaggacgtgaagttcgaatggacggagttagaatagcttccgaaggtgaaaggagttttgacggaaacaagtgttactacaactaaagatgaggtttcgagatggtgccactaagttcaaagaacggatcttgtagcaagcacaccaatatcttatggatggagaacacatgagagaattgttgtaaacaaagtgacggagaatagtgtggaaggataccacataagaacccacatgataaacttcttcaaagaacgtgtatgtgatagatggtcataacaagagctagttatgccaatgaagaacgggctattataattttcattgactttagtgaagttatctttacccgaatagaaaagaatatggtcgaaatggaatttggtagtggactgcccaagccaattattagtaaggatgcaacttggatagttgcagaggagatggagtcaggacggaagatgtcggaaaaaaaaaaaaatggtaagataatttttacattgtggattcagagaaagcttccgacaaaggctgtcgtttcatatattaaagaaaacaaaagtttgttggaagacaaagtaatatcagaaatcatcaatctggctaggtggtaattaaaggagtcccctaaggatagtgagaaggaaaccactaaggactatgaggatacattaattagatttggagcttcgcctaatgcaagatggacattttgtggtaaatgagaattacttggagaagtaatactttggacaaaaaaaagcatagaagcgtgaactttgataggaacgagaccttatagagagtgttaggaaaacactatgagaactttatgagtttgaagaattttagatggatattagtcttaaaaaatgagcgcagtggaagcgtggtcggttataacatgcgcatggcattaaaccataaaggtcatggctaatgtttatactataacatgttgttagacaacgtcgtctattggtgattcagttattttcacaaagactaggtagtgtgaaaagtgttgtttaaaattcaattggaaattggaaaagtttattcaagcttgagaattattcgaaggatgagtattctatataagatcgggaaggttaaaagaactatgacactagaatatttttgctctcaatcaagtgtatacttgaccgggttggataagagacgggtcaatttcttttttttttttgtgtatgcatgggttcgttattgatataaaaatcgaacaaaatatgtaggcgaagggtatttcaagttgggtcaaaaaccaagtgaaggagaaacagatttacgaattcgaggacgaattcattctaagtaggggagaattgtaacatccctaattccaaaatgtggatattttgaattgtagcccacatatatatattgtcgtcttctaaagagccatcgaagccaccacccaaaaccctaagcccttgtaacacgagatcatacttgttgcgcagttgtcgaaattgtctccacagtgacatacgtgagttagacgttgttgtgtgtcgttgccgtgatgccgtcgttgtcgttattttgagttgaggcaccgtcgtgaatgcttgatcggatccatctggtgaaaagagatgagcagcttggagagaatgcatgagagaaagaaccgtgaggtgaggagagagattgagacgtcgcgagagagattgagacgtcgcggagttggtggaatccggtggtggatctgattggtcatggcctggctgtggcaggcttcagtggtggtgaagagaaaagttagagcagaacagaggtgaagaagagaagaacaagaaagaagaaaaaaaaaaaggaaataaagttagtgtggaggaggcaactttagaggctcttcgacaccaaatatgacgtctttcctgcaaggtaaaggtactgatgtgttcattaccaacccaggagtccatagcaactgacggatcttgaattgggattaaaggcaagaagttatggttgtttctttcgggtcaagtaactgcagaatctgtcaaaccccaaaaccctaaacgggttccgagatggcttctttgatgcaacatttggaggtcgaaactttgtccgatctgagtgaaactttttggagttattcatgatactactagctaaagattcaacggtgggatccggattctaacggttagttgttgagttattcttatgtttccgagacagttcattattgagtaaatgatgacaagttatattgtttgatttggtaaattgaggttggattgagctgaagctctacaggagaagtcttggtgttttggtgtatgtgttggttagttggagaaccaagatggaatttcgtgtttatgtcgtagcgtctccaacaagtttaaggctaaggtgaggactagttggtgtctttttcatataccgatatgttcagatagttacttagcttaaggttaagccgaacatacctatatgttacattataagtaacatatatttgggtgataattgtatattttatttatatgtatttatatgtagatatatacttactgtatttattaaacgaacttataagatgagaacagaaaataaatgtgtgttggttgatgttatgagtgtgtgaaatgcatgttattttgtggtgaataaatggttgtgctatgagacactgtgccaatggcacgaagatgcggtgaaccgcggagaatcctacaaggaggaatccttgtagttttgtgatggtctatggacgcgggttgcggatagatcaggatggttgacgagccgacgattgagaagtgtaggaagaagtgcaagaggcacgaggaatccagtaatacacagtgcaggaaaaagtgcaagaggcacgaggaatccagtaatgcacaggggatggcgtgagttgacacgtgatatcctccctgcctatgtggtagtggttatgggacgtagtctcatttgtttgatgtgtgtgtgtcgtctttgacacgtgattgcttgcttgtcttaggtttagactttgtaattgtctaagcgtgtttgtgtatgaggacttcatgagcccaaaggcttgtccacactgagtaattttcatgaaaattgatcaattgctcacccttctctcttttgcaggttggttaagtcaagagtttgttttccgttgttaattggcgggttttcatttaaagatggtttgggccgggccaggaagtcaacacgttgaccagctccgtatagaggattcgggtcctttcaaggatgacatacttttctatattttaaaattaaatcagaaacattcatacaaaataaaccttatatatatatatctaaatttgagctattaggaatcatcctatcacaaataaatatgtcttaatttcatttatcaggattcaaacgtctccatcatatagagaaaaaaaaaactcacaatactatcaacacatacaataattttaactttttatgagatctgaaactttatggaaaaaattctgttcacacaagtattgaaaagtttcttatggctgatagttgttttttttcttacgccatcgttccctagcgttgatccccgatagtcctaaagactacatgcaaatgcggataaacaaattttggcacgaataatacaagaattattttgcaattaaatcttactatttatagatgactctcgaattctctatctatttttaagatgattacgaccataactaatatacaaacaagattcatttctttcttttttatttttcaattacgacgtaaaggatgatccatgaactatattgtttgtattatagaatccaatcaaaccaatctctttggattaatatcgaattattttatctccgtatcttttacagtttcaaattagatgacgatttaagaagctgcaggcgtcacaataatttaataattacaaataaaattgagttaaaactgtcaacagtctacttatatgtgtaaacttaaataaacgaataaatcctcgaaatttaaaaataatgaagaagtcagcatcatcataatggattattataaatacacacacatagatggatgttcaacttcattgagatctaagatcacttttaaaaaaatattctgctctcctttttttataaacaaaaagtcaaaatatcaagaagaggaagaagaagaagaagaagaagaaactcattttctctccgcagagaaaataaaatccatggcttctacttttaggctctctattagcttcctcactctcctcctcttctctctggtatgtttatctctccccatatattgttaacaaatttatacacatatgtatatgattctttatatatatgtacctctatatatgtatatacatatatgtgtgttaagaggctcaaattgaaagccttattctttatacatatgaacctctatatatgtatatggttaaaagtattactataagaaataaaaatcctggaaactaatcacataatttgtaattgtggcacacaaatttacagaagtttatgcatcataatgttttaacttttaagaacctttttttttctcttcagtcggacaaaaatctacagcatatattcatgacatagtttgtaatgaattttgatttgtacataagttcttgcatcatgggttcttaccacattgttaggaagaaaaaagtattattttccttctggcaacctttttaaaaaaaatctatttaaatcgaaaagaaaactttgaatctttctgaagtttttggtgtctaatttattggttttgtgtttcttgaatgtagtgggtagtggaggcacacacgtcaagaaagctgat

SEQ ID NO: 5454 - DNA, 4566 bp, Arabidopsis lyrata
  Intron number 4 from transcript 493361 (locus 493361) deri ved from phytozome v7.0 (chr-ID scaffold_7; pos 13159147 t o 13163712)
aatttgtcccgtaatactataataagaaattttcaggtttatgatgaaaaaaagattttctctcagcttttggcaaactgagatttgattctcatggattgacagttaaagttttttatgacgaaaatacccctaatgagttaaaccaaacggtactgttgatttcggtttagttactttttatttgttttacggtttggtgttgaattaaaaaaaaacaattacgaagaaaccaagaagaaatcgaagattacgttacacagaagcgtcactcaagcatcgattctcacttcagaagcggaaccagaaccggaagtgtccggaatcgttcggaatcgcgttcttaaaaagcagaatttggaagcgtagaggaagcgaacgtttctgatttggaagcgtatttaaatgttttggaagcgtccaaagatatggccaaaacacttgactaaatctttttagtaggtagtttaattctgagtaaactctgtgataatatgagaactggagtttgaattagaaaataaacagtgtttatcagaacgaaaggctatgcggcggagggctgcaagaagaaacgaagaagaaacagtgcacgtgtctcaggctgattgttaaacaattttatattgacaattacatgttgagatttcttggctcatttggcattaagtgccccatgttatgtcttgagcgcccagttcgatgcctctctatgaactttttttttgctttaattctttttttgtgtacactttcttttatttgtccacgtcctcttttggtgccttccaattcctacatgttttttttcttgtataaaacaatgttctttcagttatataactgaaaagtaactaattttaattttaccctaaagtattaatacctatattttaatcttaaaatgttaataaaattagtaaattagttaaaaatattatctacctagtttatttattgttttagagtttaaatttgggtgatattgttacctagtttatttaatgccttttctaattaataaattaaaaatatgtattttaaatatatctaacatatgtatctgagtatatttagatgtattttcattaaaattagcgtcttttcagattttaaattgatattagattcatttaatattttattattaaataagtttgaaattattaattataatgtgtcccatataaattttgtttctaaatccgccactggcactaaccgtattatttggtataacaaaccaatattgatggtattttaacgggagaaacaaatattttttttaatagataaaaacatttctttttctctatatatatatatatatatatatatattcatttcattctctatcttttcatgttgctaaaagacatttgagaatgttgattttcttaataggattttagaaacaagtgtcgtgtatactttttttggtgtttgtatatacatatcagatatcttactatgtatttttatttgaatagttttagatattaatacttaaatttagatatttagaaaattaatttgagattatttacatatatacatatatatatatatatatatgtatattaacggttctaaaacgtacacgacatcaccgtttgaattgttcgcaacttgatttgaggtatcgcattgaactctaaaaaccggcgaagagaaacttatagtttatccggcgaagaggaactcagaaattccggcgagatagcaaccatcgagatgtttgggaataaacccaacgccgatgtcccgacgaagcattatacgcggcaaggcccccagaaggagaatcgggaagtcagagttttcccgaggaataaactatctccgacaaacccgccggagaaattgggtaagttctgatattattttgtttgtagtttctttgggtgtatcggattcttaaagcttgtgtaattaaagggtaataacttgccggaatttgcaaaatcagtagtttgaaaatttgagaagttcaattagaactgttatttccgccaaaattcatatttgaggatattatgttgataattcctgtgtacgtacgcgaattcagattgtttacatgttttccttacttaattgtttatgacagtacttgcaggcagtacaagtgtggctccgactgcagattgttatagtacaagtccacactccggcttgctgttggcaactgcacgtacggtcaatgctgcatagggtgtttcttctattggtacgtgagggagatgtgtatcttctattagatttgacattgctatcacggatgaaggataatattttcctcctcatgtgtatgctttggctctactctttagtttatttcttcgtaatctactatactctgtttgtctttatgcattgtattcctttttttcgggcagttatattatgaatgaatgaactttttgttgtttgcagacaacatgtatgaaatacgtatggttttgtgtacgtacactggttttgtacatagcggattaaactagtaagacgtacgaccacttagtatatttcaacaagtatgaaagactttgtctctggtgtacgtacactaaatacgtacatagcgtaagactaatattacgtacatagccgattaaactagtaaaacatacgaccacttagtatattccaacaagtatgaaagactttgtctctggtgtacgtacactaaatacgtacatagctgattaaactagtaaaacgtacacagacaatatattttaataatggcgtataactgtacgtacaagtagcatatattcgtaagtttcagctgcggtaactagccgatgatcattcagtgacccacttgctgaagctctaataccacactcgagaacatcatcccagtgactttgtctataccattaatattggtatccgtgtacgtaacaaaatcactttcgcagcatgtatcttgtacacagtctctagtgtacgtacattgtacaaaccatgttgacacgtacgtgttggagtcacaattggtgtactgtcacccaaatgagaaaagttatctccgccaggtacacgataacttgtgtacgtacactctgccaatagacaactgaattcccctggatgttgaaccgtttgttgagtgagaatgacgtcctcctcaacattccctattccatattcttcaacaattacatcgttccacttgttgtaatcgtaatcttcgccactgccttcactaccgtctatagtaggatcgagagtacttccccccatagatccatcatcaccctgataatcatcatacccagcaccatcttcgttgtcctcctcttcttcatcctcatctgttttatcgtcttcaacgtcgtcttgctcatctacggcctcattatttccatctacatttgaagccgctacgatgagatttggtgtcgttgcactcccacacacacggtaactctcaccatcgtcaccatcggtcctagggacaatattcccgagtgccttgacggttgtaatgaaagagacaaacaaggtgacactaggatcccaccacgaatcaaaaagaaggtatccaggctcatttgattgtcaatattgacaggagggcgtttactttctatcatcactgacatctttcccggcatccaattactaattattggattgcattcggtggacttcgaactgaaaacctcggataatgtacgtacaaattccgtgtacgtcatgttttccttaacacgtacacaacgaccaaaccagtctttccatggttcaaattaccattcttcttctttgcatctccactcacccaccatagtaaatacgggaatatccattacacacctgcatcataaattcagcagaaccccattaaatgcaaatgaaagcatgattatatctacaaaaaacaaaaagaattcccaactacacacttatatacataaatctatcctcatttagcattttcaactaaaaaaattagaaataaaaatattctgggtttttatataaaaacaatgttgatttcgaacacaatcaagaccctagtgtgttataacaaaaaacttcttaaccaatttcattacttacacgatcaatgcttgtcttggctccaagctttgtaaatcaagaagatcaaaacttctccagcatcacattcgttcagactaatttgtttgtttgatggatcatgtttatctcttacaactattcacacatataaactaatattagaaaaagtaatgatgccttttgcattaattgtgacatgagtcatgtctaaactttttgggcattaaatactgatgtctcattgttttttaatgttattaatccctattttactgtgcagccgcagaaattaaaacgaaaatatattgcctaaccggaacagtgtacgtaactaaaccgcataactaaaccgtacagtgaacagtacatcgttacgctggcaggggtaaaatggtcagaatttggctaaagtgtcaaaatttgagaactaattctcactttaccaaaccatgaaaataaaagttggtcttctgccctgccatgcaatttacccataataataggtgg

SEQ ID NO: 5455 - DNA, 1790 bp, Arabidopsis lyrata
  Intron number 4 from transcript 492451 (locus 492451) deri ved from phytozome v7.0 (chr-ID scaffold_7; pos 7740364 to 7742153 reverse strand)
gttcttagcttcataggatcagtcaaagagataagagcaacatcaatggttgaatccttaaaaggattcttaaacatattttaataataaattatgacaattttgaagttaagagtttttgatgaatccttaaaaaaaaatttgtccaatggtagagtccttaagtagatttcttaaaaaaaaaaaattataacaaatattagcatcaaagttatgagaacttgttgtttcacaacagagaaagattcaaaaatgtattctttccagaggtaagaaataaactcaagaaaaaggaaaacatacttaagccatcccttcagcttcagcctttcttgataagtgttagtctcggcctttcctctcaaaaacctaaaaacaaattgctttacaccaaattatacctgtcattgaataagaaacagaccaattaagagaccaaagggtattcaactccagaaagataagcaccaataacatacttaagccattgtaaaattggtgtataaatttgaaagcagcagctaaaccggttaactcttttattaagcaaaaactacatatcacagagacttgattaacaaaacaactctctactcaaagaaattccaaacaaaaagtttattattattatatggaattcaccagattatgcttcatctgcagaattgtcctttgtagaaaaaggacttatcctctgactcaatttacatttttgagtttgaccaagaaacaaaacatgtttttaccaacattttcttcttccatcctctttggccaacaaaaacagtcaaagagttaaacacttttcggtgctattttttaatcagcattattcttctttaatactttgattttccacaatttaagaatttataaaagctttaaaatgatgctgaagatttgaagaaatcaatgctactaacctggtaaagcaataaaagcatcaaagatcagaagggtttaattagggattaaaggaagaatacctctctaggcatgagtgtcttgggaataattctgtggtcaaataacaccaaagatgagaaaaaagagagacttattcagatatgtgagtaagcaagtatgacacttaaatggtgattagatgaagagttaccaaataacatggcgaccaccatcatgaacagcttgtgaaaccaaacccatcaaacctatgcttccacctccatagactagatcaatgttccttaaaacctgtaatagtatacgaaaaacagagtaaaccatctttctcattacagatagtttcagaaatgagctaagaagagaaatcaaaaccaaaaagactatgtggtgtttcttttttctctttgatttctctaagaatctgtgtgtgatcaaattaatcaattcccaattcaacaaaccttaatttcgatataatctaaaaaaaccctaattcatcacgatctacacaatcaaacacatagaatcataccttcagaaagcgattgtggcttgatttgttgacgatttgatgatcatgacgccggcttttctcttccgatttgttcttcgtctttcggagattagaagagaagagagacagagagagatcgcagaatggtcgggaaagattttttttaatactttttctgtttgccatcaaaacttgccacgtatgcgtctctaaaaatcacaaaaaactctaaagtaaggaacgcaccttaccattaatcacatttttatttatttttgggttttattcataaggattctcaccaagaatccctttagaactgcccattgggcttgctctaagaagactt

SEQ ID NO: 5456 - DNA, 476 bp, Arabidopsis lyrata
  Intron number 7 from transcript 495044 (locus 495044) deri ved from phytozome v7.0 (chr-ID scaffold_8; pos 13532038 t o 13532513)
tggtgaaacatcttcaggaggaacttaaacgctatgtaagttttaccagttcttagtttacccaagtaatgattttacaaagttgttccagcatattgaaaatgagtatgaaagtggtcagaacattgatcataaccctctgttttattcaccaatagaagctgtactcgttcttgattacttaggctatctaagacaattcctaggtaaaagagtttacttttcaagaaatttgaggtgccggagaaggatgtatttttcatgtagcactagttatgcaagccaatttctaatgttgatcgtaaattctactcacatacttttcatcatttgaagacatgtactatttgtagattctgttttccacttttatactttccatgtgatgtctatttagtttatgtttttcttgttgattttgattcttgataattgtatcaggaagctgaagtgcgagaagctagaaaattaaaatc

SEQ ID NO: 5457 - DNA, 283 bp, Arabidopsis lyrata
  Intron number 1 from transcript 471306 (locus 471306) deri ved from phytozome v7.0 (chr-ID scaffold_1; pos 4683605 to 4683887 reverse strand)
ttcactctcggtctcgtactatacttacttaaattttcatttctcttaaaaaaataacttcatttatacaaaactttaaatcatatcaaaaatatccataaacacaaatactactaaacggatctgatgaaattaccaactacaagtcgatgtttacgttcctcagaatctaatctaatctctaaaatgaataaagtcttctttggtcaaactttaaaatgaataaagtcttctttggtcttcagattctaatattttttttttgccggtgacatagcttgga

SEQ ID NO: 5458 - DNA, 1413 bp, Arabidopsis lyrata
  Intron number 1 from transcript 906168 (locus 906168) deri ved from phytozome v7.0 (chr-ID scaffold_3; pos 18901730 t o 18903142 reverse strand)
ggagtttctgagagtgttaaatagattgacagagaatgaaagagaaagagagactttatatgttagtgtttgtttacagttgtgggtaacaatcaatgatacacttacttctaaaccctaatggaaaccaaacaagcattgatcaattaaaaactgatgtagacaatctaattcaacatcaaaactaacagaaagcaaacaattaaaaactcttttaagaggcatttatcactaaattaacacaaccaaaacactcaagtctcacctaatattaactacaaaaataatcaatgttctaaatcaaattcaagatagcttctgtttccttaatgtctggccatttaacgcagcttctgatcctcacagtctcctctccgttctctcatctttgtgtccaataaacaccatatctcacaataaaaagaaaacaataaatcaaattcaagattaagaaacaaaacagattaacatttgaattaaaaatcacaaatataatgaagactaatcactacacgaagcatttatgaagtataatcactacacaaagcatttatctgatgtagacattctaattcaattttaggtagacaaatagcaaacaattaaagacactctaaaagcatttatcacaaactgacacaaccaacaacactcaagtctcacctaatcttaatgaagactaatcaatatgcagcagctaacaaaagctcaattatctcaatagtttccggaatattaatcatcatcacaaatgatccaacaaagtcttaatccaaacaatcatccacacatcaaaaacagagtattacctgacattcatgttgaagaacatgacacaactgcactgcttctttaaaccgagtgcttccatgaactccactgcttatttaaaccgacattcatgttgaagaacctacaatattaagcatatacaatcaacttttatagtttgagaacatgcttccaattgacaatgacttaaacattacagaatatagattaatcatgcttctaattagacagcatcatacacttaacaacaaagaacactatttctcaaaatccagaaacccttattaaacaaatccaaagaacactacttagaaattacttaaacaacaataacactaactcaatcatgcttccaattagcctattttccccaaatcccgaaaccctaatttcaaaaatctgaagaaccctaatttgaaaactattttaatacatcaaacacacactcaaacatgcttctaataaggcaaacaatagacttaacaacgaaaccgattatccccaaatcccgaaaccctaatttgttaatccgcaaaatacatcaattcaaacaccaaatgagacatgcataccttcaataatatagagcgagagcgagagagcgagagagcgagagagcgg

SEQ ID NO: 5459 - DNA, 8679 bp, Arabidopsis lyrata
  Intron number 1 from transcript 915105 (locus 915105) deri ved from phytozome v7.0 (chr-ID scaffold_9; pos 761051 to 769729 reverse strand)
gcaaacaagtaaataaaatagttagagaggcttaaaagacatttgacaacttttaagtgttatttgagtaagacccctctccacaggtgctatctcagtaattaagtcacttttaaggtatatttgagcacattttctctatttgcatgccaatcagatttgattgaagaattcgtgaagaccaaaatttttgtcatatcaattgctatgacagaacgaataattaacaagagtttttaatggatattattaaaagaaaaaggaaccgtatcctctagtccaaacaatggcttttgttaaataacatggtttaggatatatcttcacgttatcacctatgtatatattctcatctatgtgtttatgaacctatatacgggaattgattagggaacttaaggtgaaaaaaaacaaagaatattaggtggtggaagcatgcagctacattgatccagtgatacctttaattgtctttgcatatcacaagaagaataataataaatgaaattatattattcgattttggaatagtagactgtgcatgattgtctcccatacgtttacgtgtatttattgggtccaaaaatttctcggtatcgtgcactcgagaacgatagtacgtcgtgctcattttcgtcatttctttcattttcgtccttttaaaatattcattttataaatcttttattttgttaagtttttttttttcgccatttgtccattcccattgatgacgttcatggtacatatatagttcataacagagtttagaatgtagcttttctaattaagggctaatccatctatattttttatcagaaaaagtatttggattagaaaaaaaaaaaaagtatttggattagctatttaaaatggtacatacatatcaattctaataaaactataaaagcaacacataaatgagcaaggtttacttcacaaataccaaggggagaagaaaaagaataagaaattaacaagatgcatgatttaaaccacaaatatttttttcaaccaaaactattggattttgaaacagaatttatttaaaagtataaaataaaaattgaaaaaatcaaataatatgaaataatagctacatgataaaaaagagaatgggactgatatttgattgaccctgatgacaataactccatacctgcttctgctagtctgctaggctcttgtctccctacaacctttttccaaacttttacataaatattaataccaaaattataaattataaaggtccatgattttctataataacaaaaccgtagattttgtatctttttttgtctcgtagtttttgtatctggttataattcaaaacaaaatttgtattagtttttttttttttttttttttttttgcgacgtattagtttgtgttgaagtttaattacaaattacaatatttgacgtataagtttaaagacaaatgatatcttattttgcatttaaaataaccatgatatatatatatatatatatatatattagattttgattatttaattaaactaaaattttgaaaaatattgcttttatgtatatattatccagataattggatatacatatctcatatctggattaggatgaaatcagacgtaaattagacgtcattacgaccaaagcagtgcccaatattacattttatttagtttttgtactagatcttgtagcaatttaaacgacacaagaaaccaaacacatggacattgcctccttgatgttttgttttgattatcttcgtttagattttttgacgccatatatgtctatatgttgagttgtttacgtttcaaacttttcctacaattttgggttcaaaaggtcaaaatggttgacgtggacctataaatcttattaaatatggatctcatttaaagttgttaacttaattaaaagtggcttgtaagatctaatttgtgtttacatttgtataacaaaatattatatatattttattaaaatataatagttagattgttttatttaacatttttcataattgtttttcgtcaaaagctagtatattaattaatcaaatcattacacaatagtttgtttagccatgtaggcggagttacataatccgaaaagaaaaagagctaattacaatcgagtttagaaagatggtgagctgcgttgttacaagatcgtttgacaaaattaacccgtatatatttaaactttgctttccaatagaaaatatcatgtaacaaatttgctatctcgctgttcttggtggatcctttaattgtgttgattaacacttcacggtctccttcaaatatatataaccaaggtgaaatcataacattttcataaattacccagcaattgtgaaagagaataaaaagacaatgcttgttgtgtccctgatcgttttctttggtagattaggcaatggattgtgccctctaaagttataggagtcgaattttgaaataaaaaaactaaaataaaaaggatgcatgcattataactaatgtattcacaattaaaatgatcagtccaaaagcttgagataaaagcaaacaaggagagaaacggtctattggactaaacaacggacaatctgatctcttgatcggtgataatttggttgattaagttaaactttactctctctttttgtcgtcaatcaataggttctacccatggttaaagtctcgtaacagatggtaacacgattttttgggaaccatacttcgatgagaaaagttgcaaagatggattaccacttgactaaattggacttctcgattaaatttaattaatacttagaattttggttgattttcatttttttcaaacttttataatttaaaacaattcaaatatttcaataggaagaataaaatttatataattaatatcttgcgggtattgtcaagccctacgtgctgacctatccgctagaatcttagttgatttattttagttttgttaatttattggacattatgccattaagtgattactatctttattatcagtcaccatatataccatccaaaattgagctcaatctcgtggtaatttatagtaataaacattatgtaaataatcaattttgaaatgtttgcatattaaatgattctataaaaaacattttgtataaattagttgaatccttttcaattttcaaatttttttttcttaaagatgtaaagagactagaaatattagttgtacacttaattatactaagcaagatacatatacaaatttaatattttttaagattcaacatttaatacttttttctcatcgaagtgattaatctaagagagtgaacattctttttgctaggaagctttcaacaatctcttcatagataaaatatttgaatcaaaaaaaaaataaaaaatatatatatatatatatatatatttatttgaatcgaaatttaaatgattaatgtataacgatgaatgtttgcccacagttgaatgaaacgcgaaactgtagtaagcttatgatgttggttttatcgtcaagaacactctaccaccatgcacgaattgcataaatctaattttaaacaaggataatatttcaaaggggacttggcaacgttgctttcattaaccaaaataaaataaaaaaattaagatgaatgaggaccccatccactacacacaaccacgcaaaaaggtctttatgataataattttacaatgatatagattcactaaatcctgagcaaacatatccaatgacaattttcaccgatcttttttctcaagattttggattcctggctttgttcttgacagtgatgcttcatcaagtttttcgtttctttttctttcttattttcgatatattttgttttcccatgttacagaaaaaaaatgtaaaacaaagccatatattttgtttttttccatgtaattaatacgtaatacaaagacgaagaatctgtatatataatgggagagttttctctcctcttagggtgtccacatcatcaccaaattaatattatggatcctactaataattatttcaaaatatttaatttcatagttaattacatctcattatcaaagaagtaatcatcaattaatgcacagttttaaataaaggttacatgaataataataacacaagtgtaacatatttacatataaaacacttaaattaattttttgttaatatataacttaaaatgaacataatccctaaatatttaattaataaataaaaaaataattatgaaaatttcataaaaataccaatgttatttaagatggacaaaaagcttcttaatgaaatttattatacaattaaaaacaaataataacttattaaaaataaaaaacgtttaaaaactatcatttttaagaataataaagaaacctcaaatataatttaggatgaaaaaagaattgaattgaaatggaaagctataagagttttttttttttaataataagaagatattcatatttcatggaaacattaaattaaagagatcataatgaagtggaagaaatttatttaaaataatattatttttagattaaaaaaaatggttaaatgttatagtaaatgtatgattgtaaaagtttttttaagatataagaaataattcatatttaaaattgaatattatatttcaagagagtaatagtataaattcacattgacgaaaaaatataaaaattaattgtatcttaatattaaattatagtaaaatataaaaataaaaataataaagttatatctatattattgtttgctttctaaataaaaaggtgaatatgtttaaatataggtaaaaatctaaataagtagtgttgaggaaattttaacaaatatatatctttcgtaaaattatattacgttgaagcatgaaaaccatataattaataaaataaaataaactaaaaagatgaaaatgaggaaatagttttcagttaagaatcaatttaaagttttattaaagtgagcatagaagataaaaaaagagtagatgttgggaagcgaacaaatgcatcatagaagatgacgaaaaatatttgaagagaaattgagtagtgcttgaagcatcggatatatgtatgcacatgactaaacgatattcatcagatatatgtatgcattatcggatagtttggtttagtaaaccagactatcatattcaatatcaggttaaatcgtcgagccatgtaagcgtagtaggatagataagattaagacattcatgatttggtcaaaactttccttaaggtatgatggtcttgcttcaataggtaaattgtgctctccaaacctattgaagcggtatgaatattacgtttatatattttcataaattgatgttcaaactcagcaaatttacttttagtatgaggtacgaataggtcaaaacatcaaagacagttatatttacaagatttgtttatggaaataactctctttttgataaaaaaaaaattcattgatgactacagagaccgattaatcttatataacttttgttattacgcggtacgtaccaaatatattttataattttctatgttgtagattgttttgtaaaacaagtatgaatatatatatatagtttttaaaattcaagtgattatgattattcttaacattttgtattatacccagttgaaatttgatattccgcgcaatgcgcggacgagtaaatctagtataaacttaattagaaaacaaaaacgctgctctatatatttatcattgtacgcatgtagatgatgtagaatattaccataagtcagagacaagaaataaatttataaaggaaatgagaatggtcaatgagatgtatcaaagcattctttagtcattttactgcattctttccgagcattatattcttgagtgctttatctttgtgtaaagctatcacatccaaaagaaaaaaaaaaaagcgcctatgaataacaaagttattttcataaaattgttacaaattttcataggacattagtggtaaattgccacaaatttctattgaattattctgataaaaataagacaatcaaaaccatgttggttgattaaaaccttttttcatgtttactagttttattttatttttatttttttattattttctaataccaagaggttttagagcaaagcccgtaatcctccaggcccgaaaccacatcatgcaatattagtttcatcccaagcgtcactcgaaccggcgaccactaagcttcatctaagatctttaccagttgaggtaatgacacttggttagttttaataattagtaaaaatttaaaatttaaaactaattaaaaatagatgaaataaaataagatatatatatatatatatatacaatgaaaagttgttaaaaagtattaatctttcgaacgttagaaattaaaatgttgttaaaatactaatgatcaataaaattaaagtaaaattgcatgttttcattcgtcctcttcaaaaatatgttggaagttcttgtttagagcatctccaaaggggacctcaaatttgaagtttagggttgtatctctccaaacaaaaacctcaaatttaacttcaaatttttttgtattttgcataatagtcctcgttattaattataattacataaaaccataaaacttttataaataacaataaaacatacattaaaaataatacaaacattattaaataataaaatattacattataaaataaaattacacaaaataataagaaaaacacacaattgaaatcacaaattaaaattaaaataccaaattattgaacctaattatttccgtaatgctcccatatatgatcaatcaatgtatttcgaagagctagatgagtctctttattttttatctgtagattacgagataaaaattgttaaaatcgagtattttcgtttattgccatttctacagttgcctctggtactgatcttgcttttctaatcggtgcggtgatatcacgttcatcctcaattatcatgttatgcattataatgcacacagtcattatatcatgcaatacctctattttccaataacgtgcttctcctacaatgatagcaaacttggattgtagaactccaaacgcacgttcaacatccttccgacatgaattttgtcttgctgcaaataattttttctttggaccttgaggatcacttatagtctgaacaatagttgaccattttggataaatgccatcagctaagtagtaacccatggtgtactcttgtccctgaataatgtaattagctggaggagcgataccttgagcaagctttgaaaataagttagatgaattcaaaacattaatatcgttgttactgtctggcataccaaaataggcatgcaatatccatagatcgtaatctgccactgcttcaagaattattatgggtgatccgctacggcttgcaaattgtcttgcccatgcagttggacaatttttccacttccaatgcatataatctagactacccaacattccaggaaatccacgttgttggccgatattaataagtcgggcaacttcctctgatattggtgacctgagataccactccgagaacagttctacaatggcgcgacaaaatctcttcatacattcaattgttgtagactctcctattttgatgtattcgtctgctgcatcagtaggcataccataggccaaaatccgaagagcggctgttacttttttgagggtggataagcccattttaccagtcacaagacgatgttgggtgaagtagttgtcatgttgtttaacagcatcaacaatgtggagaaataacctcttcgacattcgaaatcgacgatggaactctctctcaccaacatgattattagaaaaataattattgaacaaattaagatgagcattttctccatcacgttgtataactgcatgaccatgaatagagcctcgatgacttacgtgatcgctttcttgagtaatttggtgaagaaggcggttgttgttgacatacaaatttgctgcaatttgttcttctgttgatgcattttcattcattagccattcatcaaaatcagatgagtctgaagaagaagacgaatttacaaaagaagatggctctccaatattaaaatttatttttactaagttgagatattgtgatgtttgtgaaacgtccatgtatacatttttttatagatatacattttttatttgagaagataaggaaatctttctaatttaatctacatcatccattagatctctcacattatcagccgttggattaaaatcatatccaatccatccaacttgataagaaaatctaaaaaattgatttgtagccattcatttgaaatcttttacatccattatcgtgtataaataatacacttcattcaatgaaaaaaatcacacttcaaacaactcattttataaacaatatggaaaaaaaacagaggctcatcattcactcaacaagaagatgagttattgtgtcgtgtatatttagaaatatcgcgagatcccattggtagcaataaccaagctataggaaaattatggaaaaaataaaaaaaagttacaatagtaaaaaaaatgggagttgggaattagaagcaataggtcactacaaggtagaatgaatactattatgccgttaggaatttgaagagctgcataatccaagtggagaata

SEQ ID NO: 5460 - DNA, 3237 bp, Arabidopsis lyrata
  Intron number 1 from transcript 314242 (locus 314242) deri ved from phytozome v7.0 (chr-ID scaffold_1; pos 24364039 t o 24367275)
cagccggacccacacagcttgttttctaatgagaaatttgccaaagggaaaagagaataaagagaaagttgtgtcttattcatatcaaaaaaagagtatatatacatgttataggaaaccctaaacatacttaaggatattaacataaaactctaggaattgtactatatttacatataactccctaatactccccctcaagttggagcatgaagattatacatgcccaacttgcgccgtaaataagcaaattgttgagaacccaaagccttagtaaagatatccgctggttgctccgtagtggtaagatgtgcagtaaccagtgaaccatcctgaatttcatcccgaatgaagtgacaatccctctcaatatgtttcgtccgctcatgaaaaactggattggtagcaatatgtaaggctgccttattgtcacaaaacaaacgcatcgcctgcggatgagacactccaaaacatcctaaaagctcacgattccatttcaactctcgggcagtaaaactcattgcacgatattcagcctctgcggaagaaaatgacaccacatcttgtttttttgtcttccaagcaatcggagaatcacccaatataaaaataaagcctgtaaccgatttccaagacatggaacatgtagaaaaatttgaatcacaataagctgtcaattgtaaatcaggatcagcactcaacataataccttgacccggacagcctttaagatatctgacaacccgtataactccagcccaatgcttggcacatggttgttgcataaattgagccaacatatgcacaacataggacaaatctgatcgggtaaaagtaagatataccaaacgcccaacaagcctcctatacctctcgacatcctcataaaactctccttcatcatccggcaacttatggttttgctcaagcagagtagacactggttgacatcccaacaactcacattcacttacaatatccaaagcatacttcctttgcgacaagtaaaaaccatcaggagaccgagatacttcaatgcccaaaaaatattttatagcccccaagtccttcatatgaaaacattcactaaggtatcccttaaacttctgaatacctttaagatcatttcccccaatcaacaaatcatcaacatagaccaacacaaagagttgcatagatccacgctccaaggtaaaaagagagtaattggctacctgctgagcaaacccatacccttttagtgttgctgcaagcttagcaaaccaacagcatggtgcttgacgtagaccgtataaagatttcttaagtcgacaaacttttgatttatcttgagaaacaaagccaggaggtagtctcatataaacttcttcctcaagatccccatgtagaaacgcattatgaatatccatctgatgtacttcccatcctttgacagccgcaatcttaagaaactcgcgaatagttgtcattttcacaaccggagcaaatgtcttatcaaaatctaaccttcgacttgtcgatttcccatggccaccaaacgagccttgtaacgctcaatttccccattcgacttatacttgatagtaaatattcaatgactgccaataactttctttcgtggcggaagatcagtaatatcccaagtgtcatttgcttccaaagcattcacctctccagacatcgcattgcaccatttctcatccttaacggcttccgagtatgacttaggaaccgagacagcagtaatggccgcaagaaaagctctctgtaaatcagaaaatcggtcacaactcacataattggcaatgggatagaggaccgtacctggagcagaggacgctgattgagtgggtaccggtgagagtgtgggttgttcaactgagcaacgtgtagtatatagtacataatcacttagatgagtcggaggttttctttctcgttcgctttgtctaactttaatccctttaccagtcaaattatcattccctaattgactccccctttcctccaaagcagtatccgaagtttttttaattacctttggaccccgtaatatgaacaccggatgagctggatgctggaccgatcgatcccggtgccggatcgatcgatccgttagtggctgatgtctcagtaatttgctccggattgatcgatctaggtttgggatcgatcgatcgctccgtcactggttgcagctcgtcacatgtcagtagcttgggatcgatcgatccacgtgccggatcgatcgatctagtttgatccgtcaattcatcaaatgtcagtagctcgggatcagtcgatccacgtgacggatcgatcaatccagtcgtctttggtcgaaactgatcatcgtcaaactgtgctggatcgatcgatcctggctgtagatcgatcgatcactcctccaacaactgatatgggaatttatcttccttgaaacaccacatctcgagaaacaaagaattctaacttctccaaatcatacacacgccatcccttctgaccaaacggataccccataaaaacacaccgtctactttgttccccaaacttatctttatcccgcaaaacattccgagcaaagcataagctaccaaagacccgtaagtgagtgaagctaggtacttccccgaacaacagttgatagggtatctttccttgcaaaatagtggatggagttcgattaatcaaatgacatgcagtgataacacactcacccaaaaactgacgtggtaaggtagcttgaaacatcaatgatctagcaacattcaatatatgtctatgctttctctccactctaccattttgttgaggagtatagacacacgatgtttgatgcatgattccctcttccaggaagtaggatcgcaaacccataaattccccaccattatcactacgtactactttcaccttcttctcaaactgtcgttccaccattttgaaaaaattcttaagagttaaacctacttcactcttttcccgtaacaggtgctcccaaaccgctctcgaataatcatctactattttcaaaaaatacgcagcacccgaagtagatactattcgatacggaccccagagatcacaatgaataaaatcaaaaattccagcagctttattagagatcacaatgaataaaatcaaaaattccagcagctttattagagatcacaatgaataaaatcaaaaattccagcagctttattagattgatcccaatctctcaggtttgtt

SEQ ID NO: 5461 - DNA, 3503 bp, Arabidopsis lyrata
  Intron number 1 from transcript 314370 (locus 314370) deri ved from phytozome v7.0 (chr-ID scaffold_1; pos 25657187 t o 25660689)
ttattctcctcaaaacaatcaaggaaaaagtaaaaaatattattttacacactttattttttttttatctttttcaatttcgtaaaaaataattgaaactttgcttgcatgtgtggatttttaaaagagaaactagaaagcttagaacaaaaggaattcaacaaagtataactctctttattgattgtttagaaactctcacaaaactaaacaagctttctctgaactcatgaggttacaactcaaccctagagccttatttataggtagcacaacattgctaatcctattacaattaggaaaatataactccaaacctaattagaacattctaggcctttcttaaactttaacctcgtcattaaagtcatcttgggccttaagcctcttgaagattatccaacattcacccccttaagcttccagctagtctttgagaggtcttgaactccaatcatactcctcatttccttaaacttgattcttgctagggcctttgttagtatatccgcacgttgctcttctccgggtacaaactccacttcaagttgcctatcttcaacgcattctcgaatgaagtggtaacgcttgtggatgtgtttgcttctcccatgaaagacggggttcttagtaagctcaatggctgacttgttgtcaataagaatggtagtcttctctccttctttacccgtgatctcacttaacaagtcttggagccatatcgcttgcttcgcagcttccgttgcagccataaactcggcttcacaagaggacaatgctactactggttgtttttgagagcaccatgtgattggtgattcaccaaagtagaagacatgtccagttgtacttctcccatcatcttgatcacaattatgtgagctgtcactgaatccaagtagtttctttgatcctcctttcttgaaaactaaaccataagccgttgttccttgtagataccttaagatttgctttaaggctcctccgtgtgattctctcgggtcttgcatatacctacttgttactccaactgagaaagcaaggtcgggtcttgtatgcaaaaggtaccttagacaaccaatccttcttcgatacaaggtagcatcaacttcgggttcttcgtcttgtcccttagatagctttaaaccaaactccataggtatgtgagcaggattacaagtatctaagagcgcttccttgagaatccttcgtgcataggcttcttgttttatctcaatcaatgtacggtttcttctctcaactacgccgttttataaggagccgtcaagtgtctctttatcccattcttgtcacaaaattcttgaaagtttcttgaagtaaactcaccacctctatccgtccgtaaagtaaagatggtctttccaagttctttctcgacaagagctttaaacatcttgaacttctcaaatgcttcacttttctctcttagcaaaattgtccacatatatcttgaaaaatcatcaatgatcacaaagatatacttgttcctagcaagggtagcgggtgtgattggtccacacaaatccgcatgtagtaattccaacacacttgaggcccgaaattgtgatgctttaggaaaggcttgacgagtttgttttcccaccaaacatgactcgcaaattcgtttttcactacttagctttggtagaccatagaccatctcgtttgttgacattgattcaatggttttaaagcttacatgaccaagtcttgcgtgccatctccatgtatcttcttcgattcttgaatgtagacaaataggcttaccaattttgagattaatcttgtagagtctatttggagatctttcaacttttaccaagagacgtccattcgggtcatgtaatgttaggtaattttgacgcatcctaacatcacaaccatactcggtggcttgtcctagacttaggatattgctctttaacctggggatgtagtaaatctcggttaaaagttgttgctcccctgtttttccttgaaacagaattgatccttttccatcaatgttaacacacgatccatctccaaatcttaccttgcctttgacgttttcattcaactccgagaagtaagtctttactccggtcatgtgattgctagctccattatctaagtaccatattccttcttctcctttatccgattcatacttcttaggaatcaaattttcttcattaaggaacactatctcatgcatgtagagagctgcatctgcctcttgtgtctctaccttgttagcttcttcaagtttttgtttcctttcagggcaaaccgaagcaaagtgacctgccttatcacatcggaagcatacaacattagatcgatctttcttctctttcgattgatcttgtgtgttgaaacctccacggcctctaccccgattactccttcctctaccacgacctctccctcttcctcgggaattctcaaagcttccttggtacccacgcgaatccgtgcttgtaaacaacaggtttccttgtgtatcaatgttactttctacaccacgtatacgtgactcgtatacctttaatcgtcctactatgtcttcaaagctagtattgtttaggtccaagacttgttccaaagacgctatgatttgaatatattttgattgtggtaagctgttaagaaatttcttaacaagttttggcttatcaatcgtatgacctagagctgcggattgagatgccacctccgctaaccttcccgcaaaggtatcgattgattccgagtctttcatcaccatcctttcaaactcagccattagggtttgaagtctagcttccttaactctttcagctccttgatttttagacttgattgactcccatataccttttggagagtctgtttcaccaatttgcaagattagggcttctgtgatggattggaacaataacccgatagcaacatcattcttctctgcatccgttgaaccaggatctatggtgtcccaaaccttgtttatgcgtaacaagaccttcatcctcatagcccataccgtgtagtttgtatcgtttagcataggacattggattacggtcttcgccaccttcttttggcgcggcacaggatcaacaacttctgccatcactcggctttgttgaatccgtgtttcacaaggcgatcgttaaaccgctctgataccaaataaagagaaactagaaagcttagaacaaaaggaattcaacaaagtataactctctttattgattgtttagaaactctcacaaaactaaacaagctttctctgaactcatgaggttacaactcaaccctagagccttatttataggtagcacaacattgctaatcctattacaattaggaaaatataactccaaacctaattagaacattctaggcctttcttaaactttaacctcctcattaaagtcatcttgggccttaagcctcttgaagattatccaacatttttcacagaaagttccggctagatttgtgaggtttggtcctaa

SEQ ID NO: 5462 - DNA, 7747 bp, Arabidopsis lyrata
  Intron number 8 from transcript 493893 (locus 493893) deri ved from phytozome v7.0 (chr-ID scaffold_7; pos 21897738 t o 21905484 reverse strand)
acaaattaaagccacagctttaaagcatagaccagattcaaagcatagatcatgcaacaacgaaaagaatccaagtcatgggttctaatcatagacaatgcagcaatgagtatattcaagtctccaaacatcacacaatcaggtaaggaaacgtaataatcaacagattcaagtatgctaagactacaaataaaaatcatgtcacaattcacaaattaaagccacagctttaaagcatagaccagattcaaagcatagatcatgcaacaacgaaaagaatccaagtcatgggttctaatcatagacaatgcagcaatgagtatattcaagtctccaaacatcacacaatcaggtaaggaaacgtaataatcaacagattcaagtatgctaagactacacaacaaaccgaccaaatcaagtcatagctacaaagaatataccacccaagtaaccaatatattcaagttagcattagaccacacagttaacattacacagatccaagtagataaaaatcatgtatgatgtaacaactaacaaatcaaagccaaagcttcagattcaaagcatatatcatgcaacaacgaaaataattcaagtcatgggttcgaatcatagactatgcatcaccgagtatattaaagtctccaaacaataattcaaggaaaaaaattaaatcaaggcacataagctgatgcaactaccagaagaatcaagccatgacttaaaagcataaatcatggcccatgaaatagaccataaagcaaccaataaaatcaataggcctcaccaatactctcacatctaattgttcctaacaatactaatcaagtaatgaatatctatttcaacgattataaaaaagttagaactaaaaggtttacttacctgagaaatttttatgcttgaaatcttcttactctccagaagaatcaagccatgacttaaaagcataaatcatggcccatgaaatagaccataaagcaaccaataaaatcaataggcctcaccaatactctcacatctaattgttcctaacaatactaatcaagtaatgaatatctatttcaacgattataaaaaagttagaactaaaaggtttacttacctgagaaatttctatgcttgaaatcttcttactctccaagaatttggacactctttcaagcagctacgtgcttttttacttgagttgtgatttagttcaaaacatcactcacatgtctcacctacaacttcacagatcaaattaataaaaagaaagattgtcaaataaatgattacgtttatatctaaattgattacctgactacgataaattatcttgttgtagatgtttttaatatctgccaaaatcttcactttctgccattatttaagtttttaacaatataagctaattaaatgcaagtttaggagaaacacatacctatcttgaagtccacagacactttgaaatctttcatgagtctccaaaaatatctggaagaaaaagaaaggctgcgttagtacatttgtaaaatatgggttgatgcctttcatgcacatactctgttaaaaattttaaaccaaagaatcagctcctgctggtttgtgtttttcgaaccgaataagggactaagctgtgggttttttacagacacaatgtggctgtgttctagtcatagagctcccaaaaatcagacgagttagggagtttttttaaccgaataagggactaagccgtgggttttttaaagacacaatgtggctgtgttctagtcatagagctcccaaaaatcagacgagttagggagttttttttaaccgaataagggactaagccgtgggttttttacagacacaatgtggctgtgttctagtcatagagctcccaaaaatcagacgagttagggagtttttcgaaccgaataagagactaagccgtgggtttttttacagacacgatgtggctgtgttctagtcatagagctcccaaaaatcagacgagttagggagtttttttaaccgaataagggactaagccgtgggttttttacagacacaatgtggctgtgttctagtcatagagctcccaaaaatcagacgagttagggagtttttttaaccgaataagggactaagccgtgggttttttacagacacaatgtggctgtgttctagtcatagagctcccaaaaatcagacgagttagggagttttttttaaccgaataagggactaagccgtgggttttttacagacacaatgtggctgtgttctagtcatagagctcccaaaaatcagacgagttagggagtttttcgaaccgaataagggactaagccgtgggttttttacagacacaatgtggctgtgttctagtcaaagagctcccaaaaatcagacgagttagggagttttcgaaccgaataaggaactaagccgtgggttttttacagacacaatgtggctgtgttctagttaaagagctcccaaaaatcagacgagatagggagtttttgctattccccatttaggggcttttgctattctcatttcctctttagggactgttttaactttaaagctcacaatcttaagctttcagggagcattttgcaattcccatacccctttgttttcgaatgataccagctccgatgggacagctctaatgatagagctcacacattccaggttgtgtgataagctttaggggattttgcaattcccataccccctttgattttgaaccgagaaaagggtctaagccgtgggtactatctttccaatttcaggactattgtctctctatttaagccgtgggtattacagacacaatgtgactgtgtttaagccgttggtttttattaaaatctttccaagccgtgtgtactatcttttcaatttcaggacaaagtttagatcaccaaagagggacaaatcttcccaagttagattaagacaagaggcaacaaataatgccgtatgtctaatcttttggggttgaaacacaataacacaagttagagattttacctgaagatattatgttgacctgaaaactgcaactttatggatccttgagaaactctctgtaatcacagaggaaggattcttcttatacgaactgcaacaaaaaaatattgttaaacaaagatttgataccaatttcaatttcaattgttttagatcaccaaagagattatgaaactggaaaccacaaattagagattctacctgaagagattaagtagattggtgtcaaagaatcctccagaaactctctgtgaagaagaatacgacctataaagaaagaaaaaaacccagaaatctctgattaattaaattgtactcataaatcatgtaaattaaaacagaaaccagagaaggaacttggtaaccaaaaacgattacagaaaagaaaccctaagaagttaattcgaagcaacaaacataaatcttcaatcaattttagtgaaatcgagttaaccaaaaaagaaacgagagaaagaaaaacggctatggagattctgaaaccctaaatagttaatccgatgaaatctaccaaagagaaaaacttaaatcttcgactaattttactgaaatcgagtaaaacaagagaaagaactttgaaactttgaatccctaaacatcgactaagagaattactaacagaagagagagataaatcatcgatttcacaaaatcaaatcataagcgaaaccctaaacgaaatcagaagaaagtgaagaatcgattaagaagaaacttacagagaaaattttcaaaattcgccgacgaaagagttttagagaataatggaaaccttctagaacttttgatatggtgcttatataagtgtgtcgcgcattgcgaacgttaaacgcaaacgccaataacggctacatcaataatggagcgtttagagaaaaataaaagcgtttgaattacaaatacatcttttcctagaaacatgatcacacattctcacgtttgaaaaaaaaaggagagtattattcaaaattaattttttttgttgttaatatcaagttttgtttgttaatatcaagtatgtaaataatttagttagaatcaagcttaactttttctgttaaaacttttcaaaattaaaatttgttgacataaaattattttattgaatttgtttaattctttttaaataaacaaacaaaactataaaatcttaaccatcaaaaagtatatttaacaaagaaaatgtattatacactcaattaatatactcgaaattccatatatacattaagaatgaattaactaaatgatatacacaaaatttgattccaactatattgagacagagaatgtgcgatatatatctctgttcctgcttcttgttacaactaagtagggtacattcttgaagatcttgacacactgttaaggtttcaataccttgaactctgtaaactcttgatagatattatagaatcgattacgtaaccacaaagagaagataagaatcgttatactcaaatcaacatagatctaagcaacgattacacagagatcaacattgatctctcttctagcacatcgctaggccaaagtctctcacgagagctctcaacatcaaaagcataatctctctgtagcaatcaagtctctatttaaagaagaagagtttcaacggcaaagcctctgatagtgaaagagtctttgccctcatttgccaagtcaacttagtcaacacttgtgatgactttctcttcttcttcttcttcttccttaaatcgtatcaatacttccccctttgaaaacaagcttgtcctcaagctttgtaaaagaaagaaataaacgaccagcttctgaatcatttgtattgccacaggtttctgatatgcagcccagtctctcttgtatgccttctgtttaaacttgaatttccatgccttgcgaaacttctgtttcttgaaattgtgcaaggcacttgtcgactggtcctcccttgttctgtgcgtaagcctgtgacacctctcaaaaacacatctagcacacccactggaacacagccccatcatcccatcctttagagtcatccaagtaagtagtctcatgtgcaaatgttggatacccatacacaagaacatcactgtcctatattgttgtactccaatagactgtgaagagagtgatattgctgctgcatcaataataaaggctccattagctgcaactaaaaatgcattaactaatcccaagaagccgatcccttcgccggaccgagaatggacaaaaccccacatcattagttctgaaaatggttgtaacttcccagctttgttcttgcaacggtaccaaacttggagtcttgcaatcccaagatgtgtcaggtccctggaatcttgtcgaaacctccatttagacagcaacagtgacatatgtgtctgcgtcatcctcttctgaatatgtatggccttggttgcacagtaatcattgttccatgaatcccttgtaaatgaatgtagtctcttagatcgccatttgtgcttcatgtagagtttcatatcctcatcacgctctctcggtccaaactgattttgatgttgttgtattccttctgactcatgtttgtatgtaaatttccaagagtttgaacttctttccttcagcctcctaagtgatgattcaatattgctcaacacatacacaacataactatcttggagtcgttgaagctctatctcttcaagaccaacttgtagtataggtgtaacaaaactatctcggaaactttctcttgattcgcatgcagaaaggaacatgagcttcatatcaccatgaatttccagtcccgatcttgtccaaaaacacagtggaaaactctgaagaaacataaacatctcatttcctaaacctgtggcagcctccccattacttccaccgttgaaaacaagcttgccctcaagcttggaaagagtaaacggatgtgcttggattgctatcctacacaaaatgggatgctttttgttagtcccaacaatctgtttgtgtccttggatgtatctgttttttgatacttcttgtgcaataccagtgtcatcccccgattctactttacataagaacttaggtttcatatcaccatgtataagctgtttcatgcctcctggatcatgcaacatcctcaatttacatagaacccttgacatatgagcgtgcttctttagtctcaagctctgaaatgttttattcttccttaccaatctaacttgagcaaacgaacaataatccttgagctgttgaattcttgactttgttttgaacttaaatcgccaagccttaggatattgtcgcagcttacaatgttgcttccttcttccgtctcccataagcattttatcgaacagttggagtgcacactgtgtggtcttaacacttgtagacatctctgaaatctcaaccatttctaaagcatcgacaacttgtgattgctcaaagaacacagatgagaaagcatccatgacatccaatgaatcattgctaaatttaaagctaggttccaatagtgatatcgataccttcagttgtgaaacaccatcaatctccatatttgattcctttgcctctgattcaagctctgaaatcgaagaatttccacctactgattcttgtgcactaatcgcttctgcttcttgaatcgaagtgtttgttgcaatctgttcttgtgcacaaaacgatgctaccacctgaatctttggagattctcgttgttccttccatagacgatcgtttcgaagaatcgctaagaatctctgcaattccttgtcgttctctgtgcttactttgatcctctccggatcgtcaatgcgtccaaacttcaacaacatattctgcttcaactcatcccaggattggaacaccatcaccttctgtctctgatgataccaagataaagcttctccttcgatgaatccataagccattgcctgtttctgcaaatctgtgaaatcatcatagcgagcaaagtattgctccatccaatcaatccatggccgcaaatcatcaccagtaaacaccggaacctcaacacaactcatcgttgcgttcatggatccactgttttttgaaatttacgacgccgattcacccaatttcttcatagttttagattcgaactctggttggtcatgttgtccttttcgcgatgaacgatgaatctccatctgctttgtgccaccggaaaacgatcgtgattccaatccctccaagtcagaaaccatcgtctgcaacgtatcgtccatggattgcaccttcgatcgagtcgtctccatcgaatcaagctttcgtttcaaatcccccaaactcaacattgcgtgagattcgaaccagtttcaccgcaccattgttaaggtttcaataccttgaactctgtaaactcttgatagatattatagaatcgattacgtaaccacaaagagaagataagaatcgttatactcaaatcaacatagatctaagcaacgattacacagagatcaacattgatctctcttctagcacatcgctaggccaaagtctctcacgagaactctcaacatcaaaagcataatctctctgtagcaatcaagtctctatttaaagaagaagagtttcaacggcaaagcctctgatagtgaaagagtctttgccctcatttgccaagtcaacttagtcaacacttgtgatgactttctcttcttcttcttcttcttccttaaatcgtatcacacactcacgagcc

SEQ ID NO: 5463 - DNA, 530 bp, Arabidopsis lyrata
  Intron number 1 from transcript 482239 (locus 482239) deri ved from phytozome v7.0 (chr-ID scaffold_4; pos 15626106 t o 15626635 reverse strand)
tttggaaatattcttctcttcttcttccattccaagtaaacccaaattctctctctctctctctctctctctcaaatttcaaattccgtatttcttgattctctggtgataaacctaaacctctggttttgatttgcggttgtcgttgtttgctacattaatggtggttttgatttttctctgatccgtttttcgccgtgtggtttcaatttctccggctgtttttgttcgccggcgctcggtagattcgattctatacgatttgagttttctatttttttttccttccttaggtttaagagtttccttttctattaagttaacaaaattttaccaactaccattaaattttagaaacctcaacggcaatagcttcatcaactctttctctcaaagcgaagctcttgtgtaatttctgtggaacattcggatgtatttgttgtcgagtatgataatgacgaataatctggagttatgtctttcgatttgtttcagtgattttgagcgattttgaggtcaattcgacgttt

SEQ ID NO: 5464 - DNA, 1146 bp, Arabidopsis lyrata
  Intron number 1 from transcript 894337 (locus 894337) deri ved from phytozome v7.0 (chr-ID scaffold_6; pos 10620716 t o 10621861)
gtagtgtcttgtgacaaaggaggatgtgtgggtggtggagtctggtgatataggttaatcaaatcaatatatatatatatgcaggaagattgtaataaactttagtaaattatttatactatatggagtggtctaactataattggacaccaagatttttttcttaatgaaatcgtcacgtctctaatgcatttgtgtatgcaatgtctttacatatgggcatatttatgatgtactaaaaaaaaaaactatttatggtgttctttcttttaatcccatatcctctttgttcatatctaattggagtattttatttattttatttttttgtgatttgttaggaaaattgctagataaattttagtagaacttttaaataaatttggatcacacatttgattaaaaaaaattatatggagtattatttttcttttgttttgaatatcagttattagttattaccattgatgtcatcctaatttatgaaaaaaatctcaacaactatatttaccaatttagtttatttttcttttcttttttaattaaaaaaaaaaacttttcctaataaacaaagtttgaatacattatatgttttttattagttaactaaaagggctttgggcctagtgatgggctgatagctatataaacaagatcttcatgccaaagttcttattattcatctcttcgttctctgattctcaatctctcccaaaaccctaaaatcgatctctgcaaatctcttacgattctctctttgaaggtaccataattttgttctgattcttttgttttgattttgcttctgatcttttggttcgtcaataactattcgtagttcgtcaatcgtcagatttgcatattgttcgaattttgtggtttttatctttcgtttttagctgttggatgagaaaaaaattactgcttagatctgtttaatccactgcttaattgtgagattctcagagaaaaaaattgggttttcgaagacgatctaattcaattttaggttttctttgtgcgattctcttttgtttagggtttatgttagcttgattaattcttagggtattgatttctttaacggctttgaatttggtttatgtcagctgatagattacttgttgctctcttttttgtttgcag

SEQ ID NO: 5465 - DNA, 2114 bp, Arabidopsis lyrata
  Intron number 1 from transcript 900164 (locus 900164) deri ved from phytozome v7.0 (chr-ID scaffold_4; pos 6109086 to 6111199 reverse strand)
aaaatgtatcaagcttttactttctatttagttttatcttgcaataaaactatttttatgtttatcatacaagtacttaaaatgtttttggttctgtagggtagaagaatcgatgcaaggattccatctggaacatacctttggaattttcgaccattactgaaagaaggattctggtttcatctgtctgatttccaggttatccaaccagagaacagaatcagatatacaccatctctatttgaaatcaggtttatctcggaaacaggaatgtggcctgtgaaacagagatcatggagtaacttctttgagtttgtttttcctattgaagtccagtatgctatggaatcgaataaagaatttgtgactggtaaagatttctagaaatttttttaatgtggaatccatatattttatattactgattatagttggtttttattgttcattttttgagtttagatgctattggtgtgattgctggtgtcaatattgatcgaagatttccttatgtgtgtcctcggggagggtcagacaatgagtcaagatttgtggcttttaagataaaggacaatatgtaagtttttctcttaatatattctattctatatgtaagatcaaagatgttttttgatattttcagagcatataagcataatgcaattcatgaaatatcatttaggggtggaataattgagtgcattgttgttggtacgtgttgtgatttctttatgaccaactggtctgctaaggtcgactcggtgatttataattatgaaccaatcgtggctgttcttcgcaactagagaattacagagtttgatggttagttctaaaaattctttgtttccttttgttaattagactatcttatgtgtttgaaatagttaatatttctaaattatatattttataattgttctataggaagaaatgtcttgatgagtgaatttggttgttcccgtttgtaccttgattcaacttttcatgacttggatattccacaatacgtgtaagtgtcatttttaccaattatacatttgactattaatgttacaaggagacacactaatttggtctatgttatttcacagtcgtagcttcactgatgaagatgaacatgaagatgatgatgactaagagaatctgatgatggaagttcccttgatgttttattttcattggttttatctatttaggttgttatgattcaaatttcggcttgataatttttttatttatgtttcaaacaatgttatcctacatttgctatcaagttaatctcatgaattgctctataacattttaatttcataactctttataatctccttaactctttatattccattggtttgatgttttctaaattattatcataagagctactaaacgacaaagtatatagatttcttttgatttaacagttcactcaaaatcttctcaaaaccaatcaaaagccttttggaaaaatgtaggttccccaatctataaaatatattattagctactatcgaaatgatttgtattcatctatatatagaaatacttcattgggaagtaaaactaataaaatcctatactgtaaaacaacagtcatcattcaaaaccggatttttggcttttgatatacccaatgtctatcatttctagctgacataaaacgtaaacaaaacacttgagtagttttttgaaaggaatgttatacttattagtatttgtttaaattatcagaatccagcctataaaaatttttaaccaacttatatttattttgtttgctctctaattctcttctcttccattaacaagacaaccgtgaagttaaactaaacctaaatgtcaaactcttcctatcccatggattttgtttctgatttgaacaacgagagaatgaactggaaggttcatttaaagatcttgagtatttggaatcttcattccacaccaaattcgagtatggttacaagcatgattttggttgatgagaaggtatgtgttacttatgagttatagtttatttttagttttatttgttttatcacagacttagttgtggacatcttacaatatcacaactcttataaaatctcttatgtaggcaaacaaaatcg

SEQ ID NO: 5466 - DNA, 717 bp, Arabidopsis lyrata
  Intron number 9 from transcript 324014 (locus 324014) deri ved from phytozome v7.0 (chr-ID scaffold_5; pos 17189956 t o 17190672 reverse strand)
taagcatcttaaggcgaaaagtaacccctactcaggtatggcctggtcacttctgataaccaaaccaaaaatcgaaattcttcaaatttgaatcgaagtaacgatctgtggtgtgtttgtaggtgacgatctgtatcttaattatgacagtaggagcagtatgttcagtcattggcacatattcagcccttgcagagatcattgagaagttgaacacctaaaactgatcaatcttgagttctactcattttgtttctcttgagatttggtttttgtcctacatcaatagaacatctcaattcatatggaacattgcaaacacataattgtatcaaacatcttcagcattggaaatattaccaaacagtgatctacaagaaacataataatattggaacataaggtgaagttcggttccataatggtcaagtagcaaaagcaaaaaagagctctctttattcagtagacatctttcctccagctaaatcttcaggtgtaaggttaagagaatccatggatcctctcttgaattcttccccttgagaagcaagaaagtcctccacacttcctggttctccaaaccaaccacgacggtcggcaatcaaatgaagattatcacaccctccacatcgtaccatcacaacgccgttttcatatgattctcggctcgccatcttcatagatcttgtatcacagaccttgcaagtgaagaccatc

SEQ ID NO: 5467 - DNA, 216 bp, Arabidopsis lyrata
  Intron number 15 from transcript 474163 (locus 474163) der ived from phytozome v7.0 (chr-ID scaffold_1; pos 26277272 to 26277487)
atactattgtacagaagctaacactatcgcaggtaggccttttagaaagattttttttttcacttgattctttgtgtgtgattgtattctgagtaggtttggttttccacactgtaatcatgatctatgcctcttatttatttggaatcaaaccttggttatttatttttgtgctgaatttctttcttatatgctttcaggccattgacgcaagag

SEQ ID NO: 5468 - DNA, 5078 bp, Arabidopsis lyrata
  Intron number 3 from transcript 472658 (locus 472658) deri ved from phytozome v7.0 (chr-ID scaffold_1; pos 10584332 t o 10589409 reverse strand)
ctaaggttgggcttcatcgttacaatttgttcaaggtaaaatatttaaactctttgtctcctctagttggtacgtataaaaaagtgctctgttatatataccaaatatattgattgattcgattttcttcctcaggggacaagcttcaagctcgataccctaatgaaattcaacatgttacagaactatatgtcctctttctacatgactctgcttgcacatgatcccgatcccgctgctagctcattgcagaaaacctttcaggttcgagttgatgaacaagattatggcactttgcatataacgtgctccattgctagacttaaagccgaaggtaacttgcttgtggtgcattattttccttatattttttttttataaaatttcacgtagcttgctgattaataatgaatgttgcatagtgtccaccgaaacgcccttcatacctcactttcaaggtggcgcacgggcatatggtatcttcaaaggtgaattgcctgattggccctcagatgatgctttcaatgacggaaaacgattttacctggtaagatgccctatatatattatgcaacaacactaaattaagtttcttttttggtgctagctagctcttgatcaattaagctagcagtgatatgttgttattgctttcgcaggtgaaggaatcagagtggcaatccactgattggatttctatgtatttggaacttgtaattactacaactgataggtcgatcactgaagtaagttttacatatatatcaattactggcataccactggcactactggtaataataataataataatgaactccaaaattgtagacgcgtcagaagaccgaagttctgtcccagttggagatagtgaaagtggcgatagaaactgctaatgaagatgtggagctgccgaatgagagactcaaggcccagagtgcacatgtctacataacgtttaagggcttggcagagcctcgagcccctcggcgggtttttgagattggtgagcatgttgaacgccaagctatagttagaagagtcatgaatcatacaggatacttgactctcaagggtaagctttgtggtggtcaatatatcaaaaagcgttctctggctctcaagagtggagaagagtcctaggattgtaaaaagcaagctcgcgtaggttaggcattcgtatacatgggcgtctgcgtaatgttaagatccattagaaagagaagtcaaatatatcattttatttggtggggttttagacttttaaagagtatccaaaaatgggatggaatcattattggtaggggaaaataatgatgacccataatttgtattattctccaaaaagagcattcgagtgagttaggtgaggagaactctcacgatgatctccaaagtcgccttctaaataattacgtcacgatgatctctcaagtcacaagttgtcttcaaaatcatatcaaaccaaatcaaatgaacattcactatttggtaaaatcatgtacaacacatgtttgcatgcctttatgtcggtacgaagcagtttctatcggagatttataggttcgatcaagcaaaccttgtaataaattaatttcaaaaaaaaaaaaaaccttgtaataaatgcaaactacgacatgatccaatatccaaaatctggagaaaaataatcaaagtagatgagattctgagatggaacctcaaaattgcacacttttttttgtaattaaaaatctcttactaataaaagggataatttgtagcggaagagtctttttcctctgtgatcattcatcttcctcacgtctttgtttctatttacttcctcccaaacccctttaaaagcaggactaaatcggtggagagaaacatgtgcccgtttggtatccttctcaaagtgtctactcttaagctccatggttgccaactgcccatggcaatacctacgtccactcgcatggaacttaaacacagaggcgttatcagaaatagccggagattccgttgatttctcctcctccaacaatccctcgaaatcatcttcatcccactaatcgaaagagatcgacgaaggtttcatggtctgagttgttagatccagatatgcttgccgccaatgatgatgccgtttaggtctgcttctccgtctcttatgtgcgtttgctcgatttgcttttgtactttgtttgtatatttctgaatgtttttggagatagaaagagatggagatagctgttgtgccgagatgcaagcgaaagtcgcaaaagaaatgggagctattgaaggtttgtgtctctttcgtttatttgcttctgtattttcgagaaattgaatacgtttgctcaagatctctgtttcgatatactggcactctattgattgtctatattacgtacacgaaattaaagttttgttggttttatgccgttgtagagagtctcctttaccgcttagaggtactctttatttgatgtctaatatcattaggagatttgatagctcttaccatgtttagtggtctttttttttttttaattctaatgaatgtaagaaaactttagcctctgtatttatttttgagtgttaagcaattactacgtggttttggttatttatctttctcttgactgtcctgggtttgatttgttttaaccttcttttcgaataataatgttggctttgttgcataggtgggatggaaacgcttatcatgatggtgttgaattcttgtctcttcactttgtttcaggtcggacactccttgatcttctccatcaagcttcaggtctgttccctctcttctctcaagttctctgttttcattctcttctttactctctgttttgtttcttttgatttagagtgaaagcaagagaatgttttagaaaagagagataacaattgaaaaccacaaattcttcttgacataattatattttaactactcgccatatttttcttttgtgagcttttaatttgccgtcattctgtttctctttgatcatttccttgatcaaattctctcctttgtatgcaactaattgcagaaacttgtgcatagtctctgtctttttgccctcatggtgatttcaacttatcatacaaaggttaggtcttgcttcttgctttcttagatcagtccttcctttttttttttccacaatttttctttttgccaattgtttcagatcattgattgtctggtctctgttgcttgcttcttgcccttgatcattgattccaactttctcttcttgtgcagaatttaataaaggttcatacttcaacagatagatacctcatacgacacgattaaatcatgtagagatgctcaagaggattcactctataactccagcgaaacatcatatttgttttcagctcataggactcatcctctaggatggatatgttcaacaggatactcacagtagccctccatcaatgtagaagtagattgaatttgttttcaaattgattttagacgttttcttttgtcaaataattggtttaataaatattatttggattattaaataatgactatttcatattttgaatataagttttgtaattaatataattattgaaaccaatttaattaatttagttaaaaaataatagaaaacaatttgtaggaaattgttagaaaatagttttctaccaaaaataatcatagaaaattagtaggactttgttggtaaggaattggtagaagacatttttctaccaatttttcctacgatattgaccgtagggctttgaaccttttttacgatatatgtaacagacctctatataatttccactgaagagtggaagcttcaatgctatttacaacggaaactaaaacactagagttctttatgtatcattaacacaaattttaactctttacttaaaatctaagttacatgtcttaattcagtttcagaaacttcatatttagaggactacatgcataagaagctagaaataaagaatggaatgaaaaaaaaaacaaaatagggatgacttgaaaataatttaatggatcgggccttgtcgatccaatgatgtcaaaaaaaaaaaaaaaaataataataataataataataataatttatgagattatatagatgagaaaataatatataattaatagtaataaaagaaacttttagaaaaatgaaagttaaatattaaatatatactattacaaagaataattttaaacatagataaaactgatcaattaattgtaccatacatgtttttttaaaaatgtaagatactatttaaagctctacgttgtgaagtttaatggttggacttggatgtgtgagtcttattaaaaaaacgaaaaacatatttcattcattatgtatggttctaatcataaatcagatttgagttgagaaagcccactgaagcccataaatgaatagttagaatcccaaaaaagttaattcacttcaatataacatgtatcggcataacaaaaaaaaaaaagcatccaacatgcaccacgaggagaaggagaatatgacgacggaggaggaatctgtttcggcggtggaagagggttacaatgtacatagagactattggcgtcaagcggcggaatccgatgtaattctttcatcttcttaatcatctgttatctatgattgtgatttgttccttttgtttcgcaaaattaaccctaaacctgagttcttaaaagcgattctagacaacaattcgaggaaattattaatcgcttgtagggttgtttatggactgatagattgtttttggtaatggatcttagggtttcgatatagagaacgttaaactaccaccaggtatgaatggagttggtcattggactgatatccttcgactgtcaacgttatagtttttatccgtatcctatcttggtcaacctttttgctaaggttgggcttcatcgttacaatttgttcaaggtaagatatttaaactctttgtctcctctagttgatacgtttataaaagtgctctgttatatataccaaatatatattgattgattcgattttcttccttaggggacaagcttcgagctcgctacccta

SEQ ID NO: 5469 - DNA, 9007 bp, Arabidopsis lyrata
  Intron number 2 from transcript 331550 (locus 331550) deri ved from phytozome v7.0 (chr-ID scaffold_8; pos 14686214 t o 14695220)
gtccaagattttctttagtgagatggaatgttttaacaaattgtgtagcgtgggtgttactcgtggtggtgagatcgtttttaccgaatgtgtgtaccgcactcaacagaggttaggtgtcttctattttgatccgaagctagatagtaagaggtatattgacctcgaaggcatttatcctaaggaaaaaaggcgtaccgattgtataatatggactgttccggattatgttgagaacactatgcgtttatattagataagaatatatagtcctatttcataaaaaattcttgctgtggattttctttttttcttttttagttaaaattagatatagtccaaaaaatactaaatgtcttctttggtttagatatatgcagatctaaaatgcattcctcatgtagtgagagcttttctctagatcaatggttttaaaccatgcaacaaatcgttattaaggtgatgtttgtaatttctgcatatggattgcatccaaatgctctatctagatgataaattcagttgttgtttgtttatgtatgtggttgtgtctttgatgctcaatgctcaacaactttttttttttttttttttttgtaaatttgtctctccgtttcgatgtatttattaatatcaaagtgactaaaataaaacaatctcaacttcaatgatatttttatgttctaaattatatttacaacataaatgatattttaaaataatttttttaattttccgtttttaatagtttagaagccttcttttgttaacctaaactccaagggattagtgggtatggtggttcacataacgttaaagtactctagcatgtatgtgattctaaccaaaaatctcaaaatcagggtcataatcgtaaatttcatatgctgattgtttcgaaaaaatcacataaatagctggcctctctgctctctatttcgcaacgttaactcttctcctcccacaactaacggtcagcgagagttgaaatttcaaaattcaattcttcaaatcccctttgaagaaaaaaacgagttagggttttacgtgatcacatggagaagcgattttgtttttctatcttcttctgattttgattcttttctccgatcaattgaatggcgtctctgattgatacaaggattaaaacttgtctattggtttgaattcggatcgtgtgatagtcctaccaaatcgaagaaggtacgcaatgtttcgatctctatcttcttgtttagtttgggaatctagggctttggatttggaatttgctttccttgatttctgttcgaatttagttgtttgatggttttgagaactttttattattaaggtaatcgcgcaattgttcaatggttggtgatcggagagttttaatgttctgaaatagttgaacagagtctacatcaaaatttctctcttatgaatttaactggttgaaaaaactaccgatttagagcatttccctcatgtccatgtttttgattgtatcgttttgggattttaaggaaccaatcatatatatttgcataatctggactatggatctttgtggcgtcgtgatgagtctatcactgtctttatctgtgattctgtgaagattaatttgaaaataaaatggttaatttgcaagaagaatctatgggaacacatacattgtttatctcagatatcttttgtttctatatttgcatgttcatgtccccatttccgagtcttgtggtcatatgattcaggcaatcaagtggcaattcatatctcaatttggagactggaacaaaatgtaagttttcaaacattgtttgaattgtatttgtagcgtagatgatgtattggagtctcttttatattatctttaatgtgttctcatgaatgagattgtttttctaacttttatgtttttcagttgtgttcttcgttttacagcatgatcgtaaatattaagagtaaacagattagcaagcagtcagattttggctctgtaagactcttaccaagttttttctttcttccttggcattgattttgtggtttcattttattgtttgtatgttttactttcagatgcagtattttcaagtgaaattttggcttcgcaagcaaaagcaaatgaggggtcgtttctcctgcctcatgcagataattttgaggtttgattttgtagccaagagcatatgcgaggtcagatatctctctctctgttctcatgtctattgcgtcatgcctatcatctctctctcttttatattatcttaatgtgttctcatgagtgagattgttttcctaactttgatagttatatttttcagttgggttctcattatgcgtcaattttacagtaagtagatagtaagcagtcagattttggctctgtaagactcttaccaagtttttttttcttggcattggttttgtggtttcgtctattgttgtactttcaggtggctcagtaagcaaaagcaaatggggtcgtgtctcctgcttcacggtccagagatcaaaaatttcgaaggtgattttgtagtcaagagcatatgagaggttagatatctctccctctattctcatgtcttttgtgtcatgcatagattctctgagtcatctattgtgtcttggcttgtttgggttactcacacagtcacactatctagaaacacacacgttcacagacacaatgcactaactcaaaacaaacccaaaacaaaactcaaacataacatacacaaaactcaaacacaacacaaagaaaaagttcacatcacacgcaacaaaactctaaacacacgcaaacacaacataacacaagaattaaaatacagcacaacataaaactagacacaagaaagagagaaaacaacaataacttcacgattcatatcttttctgttgctaagtcaatttcaggtgaagtatctttctcttctcattttctttcctttcttggtctcttacaactattaatcatttttttggtcacattgacgcttggtacgtttagtgaagaatttcgtactttgatgttattccaaaagagaaatacaaagccactacaagcaaaaacggtgtcctgcatacaaaatttattcagatatcagatatatgtttctttccatacatatcagggatgctcggtgatgattcaaaatccaagatataaactagacttctaaggtaaagtttctctatttcttctcattacttttgcttcatacaaattttcttatcaatacatacattagaaagggcaaaccaatcgtaaaaactggtttttatcatactataaacatgttcaaaatttcagctgctgacattgtttccttgtcgagattaacagaaacaacaggagaaaagtagccgaataccgacattggatccgactttgtaagatttgcagtaagtttcttcactagcattatttttctggtttaattttacagtcttatgtatttagtaactgctattagaatggctttgtatcatcatgatggaggacttttaagctgaaaataactaaacttaggaaagtgattcaattgcctcggaaaaaggaaggatcaggtagatatactatctgcatcccttttcagagttcttgtaatttttttatggtcttgtatatatatagtatactgctaacataatggttttgtaccaagatagacgattcgtaagcggaaagaaccaaatttaagaaagtcatccagtctcctcgaaagaagaagggtcaggtagataaattacacacaccgatacagtgttttctggaaatgtctgacgtgtttgagtgatatataacttgcacgaactaataaagcatatcatatttctttactaggtcttgatttccaaggtaccatactaacgatatcagggatcggattcttgttgttggagagtcttgtgcaagcaaatgagacaagaaaatatgttcttcggtgctaaggtgattaaatttcttcatcacctcttaacattctcgttatttgctaacttgaagggttacgttttttagtcgggttcttcgttatacagcatgatccgtcaaagattaataacaagaaatgaaaaaccagtcagcctctgtaagattcttaccaaattttttcttggcaatgattcgtagttttttttattgtttgaatgtcgtgttaacgtgctgtttgctctgcccataatgtttgctaacaaaatgcttttaatactagagagtggatccttattctacaaaagaacaaagttcttgccaagagcaaatgagaggtcttatatctttcagctgcactgtacaacatttccagagaggattttgggattttgtaaccaagagcatatgagaggtgaggtaaagtatttcttttcctctattctcatgtgtattttctcatgcattcgttcctacaggttatttgcatttgatgagcctaggtggcttggcttgttttggttactcaaactatctagaaacacacaacttcacgaacacaaatacactcaaaaacaatcaggaacattgttatatatttctaattgcatttatttagtttcttgcttccaaacttttgtttacatcttgatcttgtcatttcgttttgatcaggttttgaaacactgttaaatcatatttctgccaagatgatggttggattctcttttcgacatcttaatgcgtttcaagcgttttacaatttctattcctctagagtgagattgttttcctaagtcgaagagttatgtttttcagttgggggttcttcgttatacagcatgatctatcaagattaaaagtataaaaattttgcaaggagttagattttggctctgtaagactcttaccaagttttttttttttttatcttggcattgattttgtggtttcattttattgtttgtttattgttctttcaggtaaaattttggttgagtaggcaaagagcaaatgacgggtcgtgtctcctgcttcagccttcatgcagatatctttcaggtccagagaacaaaatggtaaggtgattttgtagccaggagcatgagaggtcagatatttctccctctattctcatatctattttgtcatgcataggttctctgggtcatctcaacaggttattttcatttgattagccgagctgtcttagcttgttttgattactcacactatctgaaaatacacacgttcacagacacgaaaaacacacaaatacaatgcattcaaactcaaaacacaccgaaatacaacaaaactcaaacactaccaaaaaaaatcacatcacacacaacaaaactctaaacactctcaaacacaacataacacaagaaataaaatacagcacactgcaaaactagacacaagaaagaaagaagacaataaataacttaacgattaatatctttttttattattgataagaactctgagattatgttgccaagtcaatttcaggtgaagtatctttctcttcccatttttctttcttttcttagtcttttacaaactattaatcattttgttggtcacattgaatctaattactttttatgctgctctaaaagtgagattcaagggagtacaagcgaaaacagtgtcctgcatacaaaagtaaataggtaatcaatatatttacttagatatgtttcgtactgtgatttcttgtgaagggatcctaagagttttaaggtgatgattcaaaatccaagaaaaacactaagagttttaaggtgaagtttctcgatttcttctcatctacttttgcttcatacacaattatcaaaatgttcaatatttcagctgttaacattgtttccttgccaagattaacagaaacaacaggagaaacgcagtcgaatcccggattggatcatacttagtaagatttcgagtaagtttcttcattagcattaattttgtggttttatcttatagtcatatatatttagtaactgctattttgtatcaagatggaggactcttaagctgaaaataactaaacttaggagagtgattcagttgcctcggaaaagggaaggatcaggtagataaactgtcttgatcctttttgtagttttttttatggtcttgtgtatatagtatactgctagcataatggttttgtaccaaggtaaaggattcttaagaggaaaaataacccaaatttaagaaaaccattcagtctccctgaaagaagaagggtcaggtagataaacacacactgatccgatgtttttctggaaatttctgacgtgtttaagtaatctataacttgcaatgactaataaaacatatcatatttatcttctcgatctcaatttccaaggtacaatacaaatgaagtcagggatcggcttctagttgtttgagagtcttttgcaaatgagacaaccaaatacattctacagtgctaaggtgacgaaatttcaccatctcctcttacacaacttggtactctcttattgtgtttatattttttctaacttgaatggttatgttttttatttggtttcttcgttatacagcatgatccgccaagattaaataacaaaattgagaaaccagtcaggctctgtaagatttttagcatatttttattgtttgtatgtcgtgttaacgtcctgtttgctaacaatatgctttgaataccagagattgataccagagagtggattcttattctacaaagaacaaagttcttgccaagagcaaatgagaggtcatatatctttcagctgcacataacatttccaggcgattttgtagccaagagtatatgagagaggtcaggtaaagtagatatttccctctattcattctcatgtgtattttctcatgcattcgtccttacaggttatttgcatttgatgagcctatgtggcttggcttgtttaggttactcaaactatctagaaacacagagacacacaaacacaatcacctaaactcaaaacacaccataagacaacaaaattcaaatatgaacatataaaacgcagacacgacacagactcacgcaaataaatttaaaacaccttcaaacagaagaaataaaattcaacacaacacaatactagacataagaaagaaaaaacaataacttcacgattaatatctttctttaatgtcaagaactttgccattctgttgacacgtcaaattccaggtgaagtatctttctttttagttttttttttttttagtctcttacaattatcaatcattttgttggtcatattgaagttaattatgttttcttaacacttccgtaattttgtactttttcttatggtcttgtctctttactcatagtttactggtaacataatgattttgatcaagattcatgattcttcttttttggtatcaaaggatataggattcttaagctgaaaaaactaaattcaaggaagtaattcagttgcttcgaaaaatgaaggttcaggtaaataaactatcttgttctcccttagctgtttattggtattcacaatctataaataaactgtcaaaggatattgtgtgttactttattacattattcccgtggcatcactgtgtatttccatcaaagaaatgacatgagtttgtttcttggtgcagaaagtttgtggtgtttattccctcagcacttcctcttacggtaattcaatctctttgtcttcgcttagtctcttaccccagttggcatttgagtagactctgcacaattctcgtcgtaagtttctttcttcacataaatttcattgtttttattttttcttccatgttttcagttagacaattagtgtcctgattactctgcttcttgctaacagaatagttttcttttaacatttttaggctgagaaacagaacttcaaggagagatttatctgccaatgagaaaatgaaaggttatgtaaacaaataaactcttttagtcttcatgcatatgttttgagaaacaacaaaaaagcaaaattccaggagaaaattcagtcaccaagaaggcaagaacaaatgacgggccaggttaaaacacaaactctctttgtctccttctcgtgcattttaccttatgcataggtgataggtctctgagctacaaagggtaaggtaaatataacttgtttgggtttctcacactcgagctcaattaagaccaacctaaagcacaaaaactgcgcttaaacaaaacaaaaaaatcataaacaaatcacacaagaaacaagcaaaacaaaaacatcacacacgatacatactactttcaaaacacactcaaacgcaacaaactcaaatacagtataacaaacgagcagaaaaaaaaatacacaacaaactaaataaatcataacgacgtgtaaaccaagatacattctttttgactttacaaaggagaaagcttggaatgtttaagttcctatactaaagaaagtggagaaatgggcatgggtcatgttcccacattctcggaacagaggattccctttgtgcaaactaaaccaaaaaggtgaaggaacaaaaagtaataattagcgttaagttttcctatcgccaacaaaaacttgggcttttctaattttcgacttacgtgacatactatacaattacaattttacaagtaatctctagggtttcataaaccaaaggtgatgaagagaggacacgaagagacgagacctcaccatcgtcgacacgacgagttcttcgcggtggagatatcaaaatacctcctcgatcttacggtggagatactcaaaaaacttcccgtgaaatctcttttgaggttcctatgcgcagagccggctctgaatggtaatgcgccagaagccaaaaaaatttttttggatcgattaataataacttaactttagggaaaaaataaaataaacggaaaaactgtaacaaaggaggatcgaaccatgtacctcacgctaccgcactaatgagtaatgacccatgtaccttaagttaattgggtcatggagacacaaggatggtccaaggatcttttttttatgagatagagggttcaataaa

SEQ ID NO: 5470 - DNA, 778 bp, Arabidopsis lyrata
  Intron number 3 from transcript 480380 (locus 480380) deri ved from phytozome v7.0 (chr-ID scaffold_3; pos 19631850 t o 19632627 reverse strand)
caacgaacttgtccggatcgctagtagtcttctttgtgagtgtttactttacttaggattttatagggaaatttggtagattactctgaatatgtttcttgtttaacactatggagattcttgcgcattgatgtccttaccgttctttgtttgagtaggattaagtgatattttggttgttcctgtttttgttaaaagtactatttgggtttgggattgataggaattggaaaagatgggtgatgcacatggattttacgtcgctggcaagagagtgatgctgcattgtaggtttcttatcaatatttgaagattagactctgtttccttttgcattgtgttggcggattagacagaacaaagctttgcttagcactgaataacaaatattttgttcatttaaacagtttgtttgattctcttgatttaaagctttttgcatattcatgaagcttaatataagggctgcaacaccaaatagactgcattgcgcagagactgtctatggcttggcataataaagttgcacaatggggttttgtttccttgtgctcccttcgagttgacttggttatcattcaaagagtgttagatttcatgaaatcgataacgagaataagtcatatatgatacacaatgacgagaaagaagaatcgatagttaggaatgtttgccactaagctcgatgaattttctctcagtgtcttattcggatgtgtaattttggttgcaacttgagacaggtacttgaagaggcaaaagagtgtcttttcaccgt

SEQ ID NO: 5471 - DNA, 508 bp, Arabidopsis lyrata
  Intron number 2 from transcript 923423 (locus 923423) deri ved from phytozome v7.0 (chr-ID scaffold_1; pos 25964688 t o 25965195)
agaaattgaaactggcttctatactaaggggacaggtaagaatgtgatatcttttaagtttttacgatttcttactttaacagggccagtgtcccaattaagacgttttctttttcttctacttttgaggaataagacagatattctatggaatttggcttagtgattccttcttgccgtaataagaaaagaatgttttggatataattcaattattgtacaatggtaattgtcccgtaacgtatttagcaaatgaactaattaattatttgtgtatggtaggtagattttctatatctaccactagaagttggtatgcttacttgcttagaatctcatattacttgcataagatatatgagattttatttatctcgaaatgataattgtagtaatagtacatatctacaggagaggcatataagaaaagaataaagagagtatgaatttttttttttttttgtattagaaaatactaaacttgctcgctgtatttattaaattgtag

SEQ ID NO: 5472 - DNA, 10366 bp, Arabidopsis lyrata
  Intron number 1 from transcript 913384 (locus 913384) deri ved from phytozome v7.0 (chr-ID scaffold_1; pos 17100777 t o 17111142)
agttggaagcataatcttttggaaattagcttttggtaatagaaacattatatatatacatatatttataattctacaagaaaaaaccttccactatatatggtatattatacatatgatttttttttttttttgtatgaatgtaaaattatattcaccaaaaaaagactgttttacaataaatgcaacgtagtgagcaaaaatattttgagcaacactttgagagttttaagaaactggaccgagactagagaccgcgagtgtgaaaccacaatcggagaatgccttcgtagttggaagaacccgaagtagccatagtgctgagacgattttggacgctcttatcgattatagacattaacttcgtagccggtatgggggtgtcaccatgacgtcgaccattgcgctctcgccaaatgctatgtattgtgagctgaaacacataccttatcacaaacgattgatatcgtgatgtgaatgaagccattatgatgggtaggatagacacccagcttgtcgagaaattatgagcaataacacctctagttaaagctgtccaaacctgggagaagtaagagtaagaaaagaataaatggttccttgtctcgactccgtccccgcaaagaacacaagtgccattcgcatccgcgttccatctcaataatctgtcccctgtagctagacggttttgaaaggctagccaagtgatgaaagcatacttgggagttgagtaaggaaaccaaactaccttgtaccaatcacaaactggataatgttcccgaatcaagtgccaagtttcctgtgaggagaatttacacttgtaggagtcattctttcgtttccaaagatggatatctttaccaattggagatgctctgtttcggagagaatcaagctcatcctcaatcgtattcaagatttgaaaccgatgtcgtctccgacgatgagtggcaagggcgttggcaacagaggattgaggagctatgcccaaatcaatgcttccacggggacctagaataccatacaaacaaccaaggggacaccaaacatcatgccaaaaagaagtatcataacccgacttaacctccattttatgtaaaggtctcgccttgtctctgtattttaatattttcctccacatccaagaacccgatgaggtattcccacgaattgaccagaagttcccatttcgaatcagattcttacgaacccaattaacccataaagaatcccaggctgataccaatctccatatgagctttaaaatgctaaccgtattagtttccgacagaattcttaagcctagtccaccttctttgattggtttacaaacgtctctccaagcaacctttgccttcttcggttttaagtcaggacatgaccacaaaaaagcagagaacatactttcaatttcttttatgcacttactcgggagtctgaaagcggatagccagaagttggtaaggcttgaaaggacagattttatcagttggagacggcctgcgaatgacaaaaaccgtccagtccaagaagtgatgcgtgttctgattcgttcaagtaagggaaggtagtcagctctcgtcatacttctggtgaggagagggagaccaagatatcgaaccgagagtgagccttcttccaaaggaaattgactcaaaatgatttcgcgaagctgaggaatgaccccagccataaacaaggttgatttctccaagctaatttttaaacccgaaatagttgcaaactgatcaaatatcctcaaaataccagcaacagaccgagaactcccatcggagaaaactagaatgtcatccgcaaaacacaagtgagtaaggctcatgtttttacatctaggatgatatcctatttttttatctacaactgctttgtctagcatccgcgataaaacgttcatgcagattacaaatagatagggcgataaagaacaaccttgtcttagtcccctgttgcttcaaaaaaatccggctaactccccattaacctgtacagagaatgaagcagtcccaatacaaagttcaatccagtgaatgaaagtttctgggatattgaaagctttgagaatgttaaccagaaatgaccactgaactgagtcaaaagctttggagatatcgatctttagagcacaacgagcggagactgaatctttgtggtaatccttgactatttcagaggccagtaactgattttccaacatgagcctatcttgaatgaatgtagattgatttggggatatcgatgtcggtaaaatcctctttagccttttcgctaaaattttggatattaccttgtacatgacgttacaacaagagataggtctatagtctttcatttctttagcttcaatcttcttaggtatgagagcaagaatcgttgtattgactcctttaggtaagaaacctttcaggaaaaaagattggatagccgtaacgaaatcgcttcctagaattgcccatgtctgtttgaaaaactcaactgtgaacccatccggacctggtgctttgttccccagcattttgaacaaaacattgcggacctcttcctcagttacctcctgaactaaacccgcttgagcagactctaagcaacgaaaatccagaatctgtttgaggtgatcagacgtttccacatagtcgactggttggtgggttaaaaactccttaaaaaatctcactgcctctgttttgatatcttcctgtttagtaacaatggagccatctacacactgaatctccctgatggcattttgagctattctggttgaaataacagagacgtcaatggaggctgaatgattcagtatatttacttgaggtttgattacatatatatatcacagaggtgtgatccccaaacctaagcgatcaaataattacagagaagaatatggaaactaataattctaggtgctaaacatacgggatatgatttccgaagataactgatatcatatcccaataccctccctcaaactggagcatgaagattcaaaatgcccagtttggtacaaaaatcttcaaacgatcttcttccaagtggtttggtgaatatatccgctagctgagcaccacttgaaacatgttgaagctgtagagtacccaactgtatcttttcacgaacaaagtggcagtcattttcgatgtgtttcgtacgttcatggaagacaggattcgtggcaatgtatatggctgacttgttgtcgcagtaaagacgcatcggctgtgtatgtttgacgccaagatcgagaagaactcgtttcaaccacataagctcttttgtgatgaacgccattgctcgatattccgcttccgaggaagacatactaacagtgtcttgtttccgtgttttccaagacaccggtgaatcgccaagttgtacaaaaaatccagtgacagaccgtcgggtgagtggacagctgttatagtcagcatcacaccagcccgttatctgaaaatttttctctgctttcaagagtataccttggccgggatttcctttcaaatatcgtacaactcgcaacgcagcttcccagtgatcttcgcgtggagcttgcataaactgtgctagtacatgaacgcagaaagccaaatcaggtcttgttgctcccaaatagattaaacgaccaaccattcgacgataaggttcaggatcggttaacaaaggtgaggtagacaaggccaatttgtgattctgttctagaggaaatgttgctggtttggatcccagaagaccagcatcagaaacaatctccaaagcatactttctttggcttaaataaaatcctttggagcttcgagaaacctttatacccagaaaatatttgagcggtccgaggtccttcatcttaaagcaagaggccaaataacctttgaaaccagtgagtgcttcatctgaattacttgtcacgatcatgttgtcaacataaatgagaatgttgatgtgaatcccacctttgtcaaaaccaaatagcgagtaatctgagagagattgtacaaaaccatactcacgcaacgcagtcgttaacttcgcaaaccagcaccttggcgcttgcttcaacccgtacaatgattttctgagacgacacactttgttctcatcacttgtaaaataacctggcggtggtttcatgtagacttcctcggtaagatcgccgtggagaaaggcattgtgcacatccatttggtgcacaggccaattgtttcctgctgccacttccagaaacatacgaactgtttgcattcttgctacaggagcaaatgtgtcaccataatccactccttcgatttgtttgttgccgagagctaccaaacgtgctttgtagcgttcaatggacccatcagagttgtattttatcttgtacacccattttgaaccaatcgctgtctttcccggaggtagatcctcaattgtccacgtattgttctcctctaaagaaccaatttctgatcccatagcatttgtccaaactttacttcgaatcgcttgcttatacgtctttggctcagcatctttgctgatggctaccaaaaacgctcgatgtgtggctgaaaaacgagcacaactaacatatttgtcaattggatagagagatttgctattacccaatatccgtgtttgagctgagttcgtgacataatcattaagagccactggcggagctcgaacccgttcaccacgacggagaggaacgaccggcggaggttgtggttcgtttcccgtgacttgagcattccgatttggtgaagacgatggtgtggtcgccggagatttttcaggtgacgatggcgacgatcctggtgactgagaatcggaggaagaagacgatgatacctctggtgtcgtgacagatgtttcagcagatgagctcaatatttcattagtttccaatgggcttgtcaaaccagttgggcttatttgagaagaaactccagcaggcctgttttcttcatcttcaattgggcctatggatcttgaaacccacattgtttcacctctttcttcttcctgcacgtttttggcaagagagttggcagcctctgcaaatggaaactcagactcacaaaaacgcacatctcgtgaaataaagaattcttctttatccaaatcatataatctccacgcctttttcccataaggataaccaacaaacacacacttacgacttcttgatgcaaatttgtctcctttatgcgtttgattatgcgcatagcatagactcccaaaaactctcagatgctcataacttagtgctgctccatgtaacacctcataaggcgtaactccattcaaaactgaactcggtgttcggtttatcaaatatcccgctgttagaatacattctccccaaaaactgattggtaaacttgattgaaaacgcaatgctctagctacattcaaaatgtgtcgatgctttcgctcgacgcgcccattctgctgtggtgtggcaacacatgacgtttcgtgtcgaattccttgagcacgaaagaaccctcccatactcacaaattctgtcccattgtcgcttctaacacatttcacttgtttgtgaaattgtcgttcagccatagcgagtaaagctttcaaatttgttgacgtttctgttttatcttgctgaagataaatccatacactgcgggagaaatcatctactattgtaagaaaataacgagcaccggaggaagacggtgttcgatacggtccccaaagatcacagtgaatgatttcaaaaatagacgaagttttattatcactgatcggaaaactcgatctagtttgcttggcgcggaaacaaacatcacacgccttattggaaatttcagaatcaacagaaacagaaacatgtggaagagaaccaactactctagcagacggatgtcccatcctattatgccacaactcataagctttcgcatcctccattgtaaccgacgccaccaactccattctgcataagcggaaagttccagaatctcttttaccagccccaatcatcgtcctcgaaacgcggtcctgaatgattagaaactgatcagccatttgtaccacacaccgattttcatccattaactgtcctaccgatataagatcagtgtgcaattcttcaacataaaaaaccgatttcaaaaccagatctgatcccaacactacagttccttctgtaaacgagattctttctcgcccatctgccaaaattactaacaccggatccatattccttatgtttgtgagagtatctaagtttcccgttaaatgatgtgaagctcctgtatctaatatccaagaaggagaagagattttacacgagagtttttcgttgctggtactagctccaccattaacgccaccattcagaagctttttaaggttttgccactgaatgtcattcaaaccggtcacgccgtcccgatccttgtctgtgatcacatgattaacatgttcctgagtcgatatattcggaacatgaactgcatttgcatagctcgtgttacgacctcgtccagcaaaagatccaccacggcctctgctctgcattgttctgcttcttggacgatccccccaccattcaggatatccgaccaccgcgaaacagctgtcagaagagtgaccaccacggttgcagtgtctgcacatcaccgtcccttcatcagaatgcaccactggtcgcacacgacctcgctgctggactgcatatgcggttacttcagcagcttcgtctccttttttcacattatttttcaaatcttcttcttgacgcaccacattgtagacttcctccataggttgaattggtatacgtgacaccaagctggacctcactgtggtgaaagtatcatcaagaccggccaaaaaatcatggaccttgtcttcctctctatcttgttcctgcagtgtattaagattacactcgcacttgccgcatttgcaaacacgtagaggtctgtggtttgccatgctgtcccaaatacggttcaatttgccgtagtaggcttcgatcgcaagccctctctgcttacagcaagccagatctgctttgagttgctggatacgtggcccgttggttacagagaaacgcttcttcaagtggtcccatagatccttggctatgtctcgatgagagatgttggagagcagtgaaggatcgatagtcatccgaatccaagagaccagcaacgcctgaatggtccaccaatcttccaaatcaggagacccttctgctggtcgagcgatggatccatcaaggaatccaaatttctttcgtgagcaaagtgcagttttcataccacacgcccattcttcgtaattcattcctttcaacaaaggatgagagatcacggctccagggttgtcattggcggtcagatcgtacggagagatcttgcgtctcacctcaacagttgtcgtgttcgggattggttcagccatggtcaacaaaatcgaaaaaaaaaaaaaaaattagggtgtttgtgtttcaagctctgataccatgaaataacagagacgtcaatggaggctgaatgattcagtatatttacttgaggtttgattacatatatatatcacagaggtgtgatccccaaacctaagcgatcaaataattacagagaagaatatggaaactaataattctaggtgctaaacatacgggatatgatttccgaagataactgatatcatatcccaatactggtcttcactgcattgtgacaatacttgttgttcttatcccccacattaagccagtgcaacttagatttctgtttcaagaatccctcttcgagattagtaacatgctcccaagttttataagcttgatcttcttccgccattgcagccatggtaggagaatcaagagtatccttttgcttatcacagagtattttaaaagcctcgtcaactctccgggacagtgcatgaaggttgttgcgacctaactctcgtaagataggctaagagcttttaattttttagcaaacctgaacatggctgaggtagaatgatacaagacaggggttgagtcccagaaagtttgcaccgttgctaaaaactctggagcctgcgcaagaacatttgaaaatttgaaaggacctctttttcgttgcagctctggtccaaacttgattctgcatctcaggtggtctgagcagcccccaggctcaaacacactataagaatccggaaaggttctgttccactcctcatttaccaacacccgatcaagctttttgcaaatcagacctctttcttctctcttattgcaccaagtaaacaaaggcccatgtgaactcatgtcaactagtgagcagaatcgaaccacctcctggaaatcccgcatacctgcaggaaaagttggtgagttttcataatttgagtgttcttccccatcaagaatctcattaaaatcgccaataattgaccaaggcttgttctgcatcataggtgacccgtagtgatgcttcaaatcgtcccataactctttcctttcttctacaaggtttgaagcataaacgaaagacataaagacctcttatgttgcaccttcgaccagaattgaacatgtaatgacttgtccacttttaaacaccggagtaactctgacattgtttctacacaccagccaaattcttcccaaacgattaaattcatagttagacatcgaagaccagtctctaaacaccgatgagatgatacgagaagccttactctcttgaacccatgtttccaataagcatccaaattgtaacgaatctgattgtaaccattcacgaactatggaatgtttcttatttttattaaatcggcgcacattccaaaagaaacttgacattaatgttgtttcttggggtttcttctacttgaagtgctaggagggaccttagcttgttgagagagaaactccgcagtggatttctgtgaatttttcgtgtttctagttgctctggaagagccaagcttttctgatgggatcgacttcttagcagtttcatcacttgcagcagtgtcatctactttcatattttgcttagattggtctgtacccgccattactgttggaacatcctcctttgcgtgtaactcctctatgttatcatcaagaacagagaaacgtgatgctgagagaatagtaacttgaccaaattcaagtgacttcctgtttttttcattactctttcgaccctttcctggagaaactagagaccatccctctgtatccttacttttctgttgagtttcttgcatagaacctgcttccaacgttttatcgtgtaaaacttctgtagactttgccagactagattcaacttgttcagccattggagcagaaacagaggactctgtgtttactaacacattttctcccacgatctcaccttcttcaatttcccccacagtgaccttacttggagacccttttttgtgacacaaacatcttccaaatgaccccatttttcacaacgagaacaacggggaggcagccacgagtaagagaactccacagtggcatcatctttttgattcaatttaaacctgaatgtagttggaagtgactttgtcagattcacttccacaaatacctttgcttcttcaaaattactacacaattctgtttccggatgaagcctaataggatggcctattggactagtgaggaaaccaagacccttccaggagtacaatgaatggggaacattcttcaacgtaacccaaagaggcatggtagtgatttctggctgagcgtcttctggaattggagaccacttagcgagaatcatagaaatacctgcaatattccacatacctcttcttagcactctcaatcttgtcgatgcgtctcgaatacggaatttcactgatgtagaattttgttcaaaaacatcaattttcactgacttatcacctagagtccatatcttgttaacaatgacatggatcttggcaacatgtggagcagtagaagggaatctacctacaagaaaatcttcccaaaggggaacagaatcactgattacttctgaaggaaccttgatcgttgggacaccatcgactaaactgacttcaaaatcgtgctttttaagagaaggacgcttgttgaccactgcagcataggactgctgtttggtttgagacgaggatgaatctcctggaagagagactgatttttccggctcggacattgaaaccaccggtggtggccgccgcctaaacccttgcgtgcagggaactcttcaaaaccctagaatcgccttcagaatcgctgagctgatgtggacttttttctttttttttttttttctttttttttttttttttttttggtatgcataagatttgtgaacctgtattggtgcag

SEQ ID NO: 5473 - DNA, 6649 bp, Arabidopsis lyrata
  Intron number 5 from transcript 319696 (locus 319696) deri ved from phytozome v7.0 (chr-ID scaffold_3; pos 22046543 t o 22053191 reverse strand)
ctttcagagatacaggttccttattatactattttatgaattccacatatataagatgttaattaaccgtggtttacgaagttcgtgttttccggtgtattgcacggagctgatcttgttttcgctggttttcgttttgggcctcttctattttgtaaccgtggttggtcgtttagcccaactttcataagcccatttgggattaataaattaaattttaaaattaaaaaaaaaaaaaaaaaaaaaaaaaaaaaaaaaagatgttaattaacagttgatgtattctgcttctatatatgtggaatataattgtttgtagggtaaatttcaagttatggcagttgaccaagttttattttcaagttttggcaaagtgagaatggcctttcatgttttgacattttggcgaaaatctgaccattttacccctaccaacggaccgatgtactgttcactgtacggttcagttaagcggttcagttacgtacactgttccggtttagttatgcagttcagttatgcgatgtactgttcactgtacggttcagttacgtacactgtacacggctcagttatgcggttcagttatgcgattgactattcacaattttcttataatcttttgtttttttacatttaatttatttattgattttgtaaatctagtttatattagcgtattttgaagtcgaaaaactaaaatacaaactctataaatattacgtacaccgtctccacaatagtacatgatataactgaagtacatatctattttataatcaatactgtgtataccgtaaactacatacacgtaagtagaaaaaactcaaataaggacatatttctaccaaaaatatcttaccaatttcatacaagttttctacgaactcaattaaaaaaatattaataatttgttttcagtaaataattgaaatcaactatgatcaacacacaaattgactctaatgagactcacaaaactccagctctgttacgcaatttacataatcatatgtcaaatacgagaagcagtagaaacaaacctcacaactaaagaaaaacattgaggaatagtatgttttaacgtgacacagagccgtgtgtggtttgaaaatcttaaacacttgtcagtagatgattcgcttttccattttataaatatttattgtttttatatttttagttaaaattctttttttttctatcagacccattttcatatttttatttctattttaaataatattttatttattattatcgaagactattcacgattagcaatatcatatacacatatgtgcgtaacggtaataatatatacgtacacggtaataatgtgtacgtacacggtagtaatgtgtgtgtatatatgtacgtaaatatctaaataatttgtatatttaagtttcaaatattttttgactataaaaacaaaacattcaaatcatgtatgaacaacatatgaaaaaaatacagtcatacaaataactgacataataacttaattttgatgtcaaaaaattaaattaatgttgtaccatgtacgctccaataaatatttttgtgtacgtacatagtataagacttatgtgatttaggcatttttaggatgtaactgtttggagaggtcgtatgatgcggacatcaaacatgttgatggactagctgagctatttgctgaaggagttgtaagagacaaacatgatccatcaaacaaacaaattattttgaacgaatgtgatgctggagaagttttgatcttcttgatttacaaagtttggagccaagacaagcattgatcgtgtaagtaatgaaattagttaagaagttttttattataacacactagcgtcttgattgtgttcgaaatcaacattgtttttatataaaaacccagaatatttttatttccaatttttttagttgaaaatgctaaatgaggatagatttatgtatataagtgtgtagttgggaattctttttgtttttttgtagatatagtcatgttttcatttgcatttaatagggttctgctgaatttatgatgcaggtgggtaatagatattcccgtatttactatggtgggtgagtggagatgcaaagaagaagaatgaaaatttgaaccatggaaaggctggtttggtcgttgtgtacgtgttaaggaaaacatgacgtacacggaatttgtacgtacattatgcgaggttttcagtttgaagtccaccgaatgcaatccaataattagttactggatgccgggaaagatgtcagtgatgatagaaagtaaacgccctcctggataccttctttttgattcgtggtggggatcctagtgtcaccttatttgtctctttcattacaaccgtcaaggcactcggaaatactgtccctaggaccgatggtgatgatggtgagagttaccgtgtgtgtgggagtgcaacgacaccaaatctcatcgtagcggcttcaaatgtagatggaaataatgaagccgtagatgagcaagacgacgttgaagaggataaaacagatgaggatgaagaagaagaggaggacaacgaagatggtgctgggtatgatgattatcagggtgatgatggatctatggggggaagtaccctcgatcctactatagacggtagtgaagacagtggcgaagattacgattacaacaagtggaacgatttaattgttgaaaaatatggaatagggaatgttgaggaggacgtcattctcactcaacaaacggttcaacatccaggggaatttagtcgtctattggcagagtgtacgtacacaagtcattgtgtacctgggggagataactcggtagaccgtacaccaaccgtgactccaagacgtacgtgtcaacatggtttgtaccaatgtacgtacacaacagaatgtgtacaagatacaggctgcgaaggtaacaccgataccaatattaatggtatatacgaagtcactatcgaccgtggtattggagcttccgcaagtgggacactgataatcggttagttaccgcagctgaggcttacgaagtgtataatggctttttttcattacatggtggcgagttggagattctcgataatgatactgctccggtattcgatgatttagtcaatttacgagatgatgagacacaagctgaactgagtacgacaggtgagactttgtatgtcgggagtgtttttaagaacagaaaagtcatacaacaaacaatgtcttatctcgcaatcaaacaatgcttttgctacaagcaacgtaggtcatgtcctacaagattggagatggttagcgttgatgatacttgtccatggcatttgactgctcaagttgtcaagaattcagaatgtttcaaaatcacatcgtatggtaccacccatacgtgtgacatcgacactcgtaagaattataataaacatgctagttataagcttctcagagaggtagtgaagagcagatacagttctacgcaagggggtctgagagctgtcgatttaccatagttgctcctaaatgatctcaatgttcggatttcatattcaaccgcttggagagctaaagaggttgcagtggaaaatataaggggggatgatataaaaagttacaggtcagcgcaatgttgttgttgcactcgtcttctggcgtttaaccgatagagctaatccgaaggttgtgagtcatggtcctgtgtcaaaggtctttgccgatccggacacaccagaagtggaagagatcaagaaggtcattttttaattagggggatttgttttcccacatcttcttattatttaagaccagatttatgttaagtattgtttattaaactacataaagtttttgtcgttttcaaattacttgactttgaataataaactattgggtaactgtacatacattttatacgaaaaccgtgtacaattacaattaatttgccagtatacgttttacttgattttcggttattcaaacagcaaagtgtatgaaatccgtgtacgtagaccaaaacatacatatatcataattgttgtcctcaaacaacaaaaacttcattcattcataattaagtggccgaagaaggacatacaatgcagaaagacaaacaacttatattagatgcggaagcaataaactaaaaaatagagcccgaagcatacacatgagccggaaggggcaccaagaaccaaattctcaatcacgccagaggaaacatattcagcaagggacttgacaatgttgtcatcctcaagcgtgacatcaaggcattgtatctagcaaccaacagagagtaaagaacaatgcattcaaattacgagaagctttactataacataggttcacattagaaacaaatcaagcgaggacaagcgatcttatcatggagctttgaggcatcacttccaccaaaacaataagaaaccagaataatataaaccaaaggaaaagatacaaccaataaaacccaagaattatgaagtccaaggctaaaaataaatcgttgatgctttgaattgctgaaaatgagatgaggtgagcaataccaccaggctgtgacactgatttatatacacccatcttcaaatctatatctccttcaaagtaaatcatggaaccgcaaaaatcaatcactattatgaccattaaaccccaccgtgaaatcttagctcttctagcctttatcagattgtaaagaaaccttgataaggcttctagaatctctctccgctcgcttactctttgtacttcctctgaattgccctcatcaattgaccaaaactcacccaatgaaattacaaccggaaataatttctccagccgtgaacctttgcccttttgcaccacgatcgctaccgatataaacctttccagatatgaaagattgagcccatttaaaaccaagtgactcacctgagatctccgagagatatcaatctcccaaataagatgaaaaaacatctctggtcttaacacctgactctccactcctgtccatagaaactgatatcgtagaattcttctactcctttgagctgtacccattgaaatgagataaaatatgtataactctaccaccgtgagctcttccccaatcacacccatttgataccctctatagactccgacaaaaccctgactgttgcttctctcgtcgacccctctccgatcccaagcttcttcacttctatttccaaacaccatgacctcactccttagacattcacctccgtatatggagacccacctcttatttgccctgaaatatagttcatcccaaagaaaccaacaaaacttgccatcaaaacccaccatcaaatcccaacgaaaccaccaaaacctgccatcaaatcccatctctaattctccgaccccgattctgacttgaatcacccagatccgaccaaaacctcgttccccagcaagaccaaaacaaacccaattccaccaactgattttcccatttccaatcgaaacccaagcaaaacttttgccaatcgaaaccggatcaaacccacaaaccctgagaattaatatcccatttatacaccaacaaggaccttcaatttccaccagagacaccaacaaatctcccgttaatccaccaacaaaactcccgttaaaccaccaccaaggaccttcgatttctactagagacaccagatccgccgttccctgaaacagcaaacgcatggtcgggtcacaaccctaacgccgtcgccttctccatcgccctattccgaactagattttaactcgtttttttttttctaaacgatgccatctctgatcttaagattttgcacaagacaaagttgagtttttttttttttttagaacgggaatcttaaggagaggaggaaaacactgtgaaatggaacgacaagtgaacaaagaactaaccctaacccagaattcgcacttttcttcttcgagcttcccttttgggttttcatcgactaacccagaattcacatttttcttcttcgagcttcccttttgggccttcatcgattacaaagcttaagaaccctagattcgcatttaacaatatcaatctctcgattcacttgaacaatctttgcctctatcttcttcgttttcttctcggtttctgcagaagaattttttttttttttttaattcaaaacaaactaaaccgatacatgtaaaacaaaaaaaaaagcaactaaaccgaaattaactgtgccgtttggttttcgtcgttaggggtattttcgtcagattttggcataactgccatcacgtgaaaacgaaatctcactttgccaaaagctgagaccaaatctttttttcagcataaatgtgaaaatttcttttgtttttgtattggtatatcaaccgatgtaccacttgaccatccatccaaaagaaagggtcgggaaggtcccgcgttcaagcaatgatgaaggatatgagctaggcttatttgatatttctagttcccggtccgaagaaattatgagtctagacccgaaactttttagttaatttttataaaatatgtatggtgttaatttggttgaatgatataaaacattgtttttttcttacatgcatgttgacataatgggttgtgtgatatggcaggcagctccagagaaacgccaggttttccgcc

SEQ ID NO: 5474 - DNA, 692 bp, Arabidopsis lyrata
  Intron number 1 from transcript 941387 (locus 941387) deri ved from phytozome v7.0 (chr-ID scaffold_6; pos 7760335 to 7761026)
cggctcagtgacccagtctcaccatatcagcttaggtgaaatttttcattcaaacttttttgggatctgttgagttttcgtgtcttagatcgattttcgtttctgggttctcataaagtttgtatctttggtaatgatttgggtagaaatgttgatgtttctgatctaattcatctgtgagagctgtgagctatggagtttgtggactttaattcctgagatctgatgtgttttgggaggtttcattatatttagctccaaattgttgtttgtgtccagattctgtttaattctctatgtacatggatcgcaaattaggattagttctctatccaacaaataatgaatcataaaaatgttagctttagggtttcagtaatgaagagttattgataaggatgttctctacttctaaacatccttatcaatagtagatatgaattttgttttctgttgattgaagttgaatgtgaaagctcattatctttgaacctgaaaagttttagggttttagttgattatgattttttcaaatttgaatatactgattttgatggttaatgttatcttgttccctttcttattagtctgtcactttatctgctgcttcccacacattgctctttagaaagtattaacagtttctttcttttgtagataaatcaaaatctcgacgaggtcctgaacagaag

SEQ ID NO: 5475 - DNA, 11350 bp, Arabidopsis lyrata
  Intron number 3 from transcript 916001 (locus 916001) deri ved from phytozome v7.0 (chr-ID scaffold_8; pos 5492276 to 5503625)
acagcaaacttgagaagttgtgggaaggaattaaagtaagtaattttgatttatttcttttagatattttattaatttcaaattaataatttatcttttgtacaattttattttaattaattactaatagcatggaagtctgttttctaattaagtgtatatacatgttcttattatttgtatgtatagccgcttccaaatctcaagtggatggatttgtgttggtctctcctcttaaaggagcttcctgacctctcaactgccaccaatcttcaggaattgaatctgagtggttgctccagcctggtgaagctcccctccactattgggtataccaaaaatctccgaaagttatatctcgatggatgctcaagtctggtggagctccctttttctattgggaatctcatcaatctaaaagtattgaatcttagcagtttatcatgtctagtatcactcctacagattccagattccatctctcacatagatgcagaagattgtgagtccctggagagactagattgctcctttcacaatccaaatatttgcctcaaatttgctaagtgcttcaaactgaatcaagaagccagagacctcatcatccagacaccaactagtgaatatgcggtcttacccggcagagaagtgcctgcatacttcactcaccaatctactactggaggttccttgacaatcaagctgaacgagaagcctcttcctacatccatgcggtttaaggcttgcattttgctggttcataaaggtgatgatgaggctcgtgatgataaaaactggatggatgaaaatggctgctatgttagttgtaaaaaaagtaagcattatttatatccagttttagcagagcatatgtacgtatttgaagtcgaagcagatgtgacttccagcgagcttgtctttgagttcaagatcgacagtaaaaataagaaatggaagataaaagaatgtggggtattccaactctcagaggttccttgatgaatcttcaaaaagtgatttctgaaacacccttgatgaaactgaagtctgtggtgaagtaatggaaatagtcactacacaattcaagagcataatgagagaagcaaaaaggtaatctaatctaaatgttgatagattttgtacaatgttgaggaatttgaaagctctctgtatctgaaattttaatctcttgtatgaggattgatattttactttacttcattgggccacataaggtgatgtgtatctgcaacttcagttcttctttatcttctttaatcctcgattactattaaatatcttttcaactatttaaatcatctgtaataaaatgaaaaacaatttgaattttaacagtgtactgtaatttcatcacatgaacaaatgtggggaattttttaggactttttgtttgattcgatgattattacacaaaactgacactcacatcgatttttgttttttgttttatctcctgtaacaaacttataactctttcaacaataaagattaaaaacttttcatctaattacagttaggtttttcgtcggacggtgagcaattacggtgagcaaagtatcgtcaagccgcccatcaggtgattaaacttgaactcttatacagaattacttagaagagcttcaaaaaaggcttgtccgtgtgagtgtgatacatgtagatcattgtttcttcaggctgtcaccaacgtacactaatttacgagatctaaattcaacagtgttacctgttgctgctgaactttttttgtgcagaacccacaggtcttttactcgttgttgccgctacagctcctatggagcggctaagaaaaaaacttctttgcaccaaagatactactgctcctatggtctgaaagtcttaattttttatgcttatattgagttctttgattgcctttgttgatgatgtgaagatgtttttgttctttttgggatgtgtttagatcaaacgaaagacttgaaacttctcttagatctttgaaatctgtgttctaagagcatcgaacccagcggtggcatcggttatcttcttcctcctcaggtcttttgctcgttgctgccgctgcagccgttatggaacgaccaaaaaccttctttgcaccaatgataactctaagtcaagtgttatgaaagtatagatttttaaagctttttataaagttctttgattgctttttgttactgacatgaagatgttgttctgtttgggatgtatagatagttcaaataaaggagttgaaacttctctcagtctatggcctaagatcatggaacagacatgaacagataggtaaaaaactccatcaacagttttttggctaagtatccgagccttgcctctgcaaaccctcttgtttttcttcagctctagatatattctcctaagcactaagcaggtctgaaactaatctactgtcaatgagtatactgatgcttgtcgactcaacggagtatactaaccaagtttttcaatctccagtaactatccatttcacctgacacaaatccgagtgattagtggccttagaaaacactaaaccttgaaatgtatgaggcttttgtaatcaaaatcatgcaatacggggaaccaactccatagtattagatgataccaacactctaatacgaaaaacgaagagagtccaaaaccaaaagagtcattttaaaacagagggagagagagagtgataaaaaaaaaaaagattcattttggtgtgagaggaatagctgtatcgtctcaattgtttcttcaacaatggataagtctaccaaatccaccgtaccatactaaattgattgcattaaaaccaaaacgaaaaaagcttcagtgaaaccagaagattaatatgcatttataagaaatctgagtggtgtcaaaaaaaaaaaaaaaaaaaaaaaaaagaaatctaagtaagtaatttaccaaaaaaataaaagatatctaagctaaatgggtgaacgacctgtgtccccccagtaagtttcatatagtaccataacaacacagatttcgggtctcgtctccagtccacacaaaacgaaagttaaactccagtttccccctaaattgaaagttcgagacctcagtctccataatttcaaatttcgtggtttatcttcggtttactgtgccgaacccgattaaccgcttaacatcgaaattaaaccggatttacccagaaaccaacccaattattagacccattaaacccgataatcccaaaatcgtaaaatcaccaaacttcacaaacacacacacacaaaattcaattacaaagtgatcaagaaaagatatcagtgagctctactagtaaattatacctgaggataacaaatctgaatccttccacgcattgatttaggaggtttgaatatagcctagcaaatttacaaccaaatttaaaaatcagattttggattttcagcttcttcacactctaatacgaaaaacgaagagagtccaaaaccaaaagagtcattttaaaacagagggagagagagagagtgataaaaaaaaagattcattttggtgtgagaggatagtctaccaaaccaaatccaccgtaccataccaaatcgattgcattaaaaccaaaacgaaaaaagcttcagtgaaaccaaaagattaatatgcatttataagaaatctgagtaagtaatttaccaaaaaaataatagatatctaagctaaataagcacattatcgagattcgagatgaagtaaaaaatctattatattaccaaaaaaaaaatttatagaaaaaacgactataaaaggagcaaataatttatttttacctttctcacttttagcctatttatcttgtaattgaaagttaactttgcaaatatatgaaagatctagaagagttgataattttttaaaatatatttttgcgtaattttcttttttcataatttttttttaattatacaaatcaactttaaggaatgaaagatgatttaatcataaatgaaaaatctaaaaatgtattacgtagatttgaaaagagatgatgatgcaacaaaggtattaatataaaaggttttgtacaaaaacactctcaaaatcatcaatttttgtaactttatcctctacctccgaagaatgcagaataatcatatgaagtcaaaaataatacgcaatatatcccttataaatatattgtaaacgttttcacaatcacataaatttggtttttcaaattttaagggtagagttgaactcctcatttcgagggcttcaatttgatatattatttatcaaaattttaaaaacttgagaatagcgaaaaggggttataatgcgtattattttttacttcatatgattattctacattttttagaggttgaaggtaaagttgcaaaaattggcgactttgaagggttttgcacgaaaccctaatataaatgacttgttgtatttcatgataattaatcaaatgaattaaaatctcccctaataatattgatatatcatggtttttacggttttttaaacatgatataggtattattattagagtatttttgttatttctagagtcttttctagtgtttttcaggtttatgcatgcacgggaccaatttggagaatatggatcattctagagcaaaaacgagatgttatgatgatacaagagcagtccggagaccaatcttggtgtatgtgtcgatcgacaccaatatctaactgcaattcgatctcgtgtgtttttgaagttttgaatatttgcagaatcatcccaaaaattttctcttttttcaaagaagtctctacacgtttttaagacaatataaatatattcttaaggtcattgtttagacctaagctttatttttattttgttcttggacgtaaaccctgtggagctccctccagagaaaattcttcaaaactctattctcttcttgttttcttgcaagattcctactttaaaacatgttttgttcttcgataatcatgtctgagtagtcctcttgtttggtttagggattctcaatagggatttggatatttttttctttttaatatatatatatatatatatatatatatatatatatatatatatatttgtatttttcgttttatatttttttcgtttttttaaaatttatttttgttttgtattatttttcttctaattttctatttaatttagttattatatgttaattattttattttaattgaattgaaaataaaataggtatttgtcttttttcgttatttatttttaatgttttttcaatttatatatattttgtttgttttgtattttttttccgtttttttctcaattttcgttttttcgttatataatttttgattttgtattttttaattttctatttaatttaattattatgttaattatattattttattagaattgaaaataaaatgggtatttggtcttttaacacaaaaattgtgttattctagtaaaccacaatatttgggtgttaatctagttattttactctagatttgggtcaaactaggtaattttcagtataaatatattcttaaggtcattgtttagacctaagctttatttttattttgttcttggacgtaaaccctgtggagctccctctagagaagattcttcaacactctattctcttcttgttttcttacaagattcctactttaaaacatgttttgttcttcgataatcatgtctgagtagtcctcttgtttggtttagggattctcaatagggatttggatgaattagtagatcgataacctgttagtaaaataaatctctagagtttttcatctttgattgtttttaatgctagttctagagtaattaactagaacttgatcttaggataataggttagacacgagagtgcgcttattactagaactatcttaggtgggcagaagtagttagatacagacgagagttggtctagatacttttgtgaacatatcgaacctgatcttaatgctttcttagttttagggatttacagacgagagttggaagttctgctattaagcatagatagtcaattcagacgagagttggttgattatagttttttttttttttatttgagttttaagaacggttctttaataattcctaactaattgctagatctactattctaatatttcctgagaaatcccttagcctaacgtttcatctatctgttttacaacttatttttaaaggtttttttttgtattttaatttacttaattttctgtttagcttaattcaaaacatgttagtctattgtgtgaacaacgagagctttgtggaattcgaccctaaaatgctatacatgatctctttatttgacagagtagtcttaggttaatttgactcatatcaaatataaatctacaatatttaaaaacgcaactcatccaaaaatatgatgattacaacaaaatataaatcagaactactaccaaaaaaatatatatatataaatcagaactttgtattttttttttccgaataactatttatactacttcctaatcactcggtatttggtctacctgatacaaatgttttccttgtttatgcgaatagctttcaacattacttcaaatgccctgaccgtcacacctctcttaatgggtccacgttctctctcggccggtccgctacgtccaggaggctttaaagacttgtttaccgttcctacaaatcaccacatgatcttttcttgtgttttgtcctcactcacacagtttcgacaatcacttcctagaaggtcacccatactgaaattgcacgcttaactgtggagttctctcagggcagttgaccgaaaagataagtgcactttggtgacatagatggtcaaatcaactcttttaacaccacattcttgaaaccagggttttacattacttgaaaggaatcatggccacattgataaagtaatttcgattggaaaagttgcccattaacttgttaatcgttaacttgttaatcggttagtggggatgtcgtacatgcaaaacggttcattagagattcgaatgttgcacggagaactgaaatgtggaatcattgttcgtgggagctgttcatcataattgtatattcgaatgttgcacggagaactgaaatgtggaatcattgtttgtgggagctgttcatcataattgtatatgccgtaggtaattgattatcatcgtaataggataagctcaaatatctataatgataatgtaatagatggttaaaaaaaaatttgatatctgttatgagaaaaagaaaaagatatattaaaaatcttgtaaataaaaggagacttttcttatgagaaacctaaatgatacagatttgaattttctttgaaatttgatgaaaatttcataagataaaaatgagctctgtttttactagtaatttctcaaacaaatatgttgtaatgttatattgctcgaactcaagaaaatttggtttatagcatactttttcatctttttaaaagtaatataaaaaattaggtaactcgtaagatttcgcctctgatattagccgtatcgtaatcatcaaataaacgtaaccgtatttaaccgtaaccgttgtaactgtaaccatatttaaccgtatatataatggttaaagttacggttaaaaaagtttataatcgtaaccggtgattaattaaccgtaatcgtaataaccgtaaccgtggtcatacctagaaaattgtagagagataattttaatttgatacaccctcactttctcaaagaatgatattttgagttttacacacaatttaagaaaaagtaatttaaaatttttttaattattattttgttagtttaataatgttagtacttctcacctttatctattagtcgcaaacaaaaacaatgatgatgtttttacaaaacatcaatcttggctgaacaagtaaaaaactcaaaacatcaaataactaggaacagagggagtatagtttttattattttaaactgtttttgtttttgtctaaaaaaaaacttgtttttgttattatgtaccgcttttgataaatttatcttgattggtaacaacagctttgtacagctttaaattttgtgaccaatcatagccattataaatgttggagatttggcatctctatatcaaaactcgatgtaagtattttcacatcttttctataaattttagatttttgatagagacattgattttagtcactgcttccttgtgtttcccatttctgatttgcatcatagattcggatttcagttgctaatttgcttcttttagattcagaatttcaacatttcatgacttgttcacaaaaaatcatgtctttagttaccatgtttgtattgaaacttgatactgttctttttcttttttctttggacgaagcttcctttgtctattgtaggaccaattattgacgtctgcgaggaaaatagctaggaattaggtacatgaaagaaaacaagaagctaaaacctctatttttgatagtatagtttctttgttaatatatattcatgacttatatttaggaaataaaactataaatgttgtagaattggcatgtatatatgtattaaaactcgatgcttattgcttgctttatacgtttgattttttctagttatctgttttcatattttagattttcttcaactttatcttttgttagtggatctcatttttctaaagaagcattctataccaaagctaatcctcttgtttgctagtacagtttcaaaatattctcactttctcggtcaatggagtcaaccttctttgtttagtataagtctgttttgcaacttcttcatccgcatagctctctttaaagctctctgatattattaatcctctctccaataatatatactaactaatggattcttcttcttcttttatccttaccactgttgctgctgcaataggcttcttcacgcttcttagaaatctcagatgccatcaagaagatgacaaagaaaataattcttcttcttctacttcatcacctccgtcttcttcatcgtctttgtctcctccatcgtctttggatcgcatctggacacaccatgtgtttccaagttttcgaggggaagatgtccgtagagactttcttagtcacattcagatggagtttcaaagaatgggaatcacaccattcattgataatgagatcgagagaggacaatccatcggtcctgaactcattcgagcaattagagaatccaagatcgcaattatcttgctgtcaagaaactacgcttcttcgagctggtgtcttgacgaattggcggagattatgaagtgcagggaagaattgggtcaaacagttttggctgttttctataaagtggatccatctgatgtaaagaagctgaccggagattttggaaaagtcttcaaaaaaacatgtgccggtaaaacaaaagagcacgttgggagatggagacaagctttggcaaatgtcgccacaatcgccggttaccattcgaccaactggttcgttgttttctatttccatttgaatctctttatcttcataacaaacatcaaactatttacatttctagctttttttaaatatccattgaacttaaagttttttttttgatgtgtgtgaattttctataagtatttaatggatgtagtgatgatcttctttgttgttagggataatgaagcgaccatgattagaaatatcgctactgatatatccaacaagttgaataattctgcctcatcaagtgattttgatgggttggttgggatgactgctcatttgaagaagatggaaccattgttatgcctaggctcagatgaagtgaggatgattgggatttggggtccttctgggattggaaagacgaccattgctagagttgtatacaacaaactctccaacagtttccaactgagtgtctttatggaatctatcgaagcaaaatatacaagaccatgttccgatgactatagtgccaagttgcagttacaacagcagtttatgtctcaaataaccaaccagagtgatatgaagatttctcatttaggtgttgttcaagataggctaaaagacaagaaagttcttgttgttcttgatggtgtggacaagtcaatgcaactagatgccatggcaaaagaaacttggtggtttggtcctgggagtcggattatcatcacaacacaaaatcgaatgatttttaggggacatgggattaaacatatttacaaggtggattttccatcaactgatgagcccttcaaatcttgtgcacatatgcttttggtcaaaactcccctaaacatggttttgaagaactggctcgggaagttacacaacttgctggtgaacttcctttgtgtcttagggttataggctcatattttcgaggaatgtctaagctggagtggacgaaagcactaccaaagttaaggagtagccttgacgctgatattcttagcattttgaagttcagctatgatgccttagatgacgaagacaaatatttgtttcttcatatagcttgcttgttcaatcatgaatggattgtgaaagtggaagagtatcttgcagagacgttcttggatgtgagtcatcggcttaatgtcttagctgagaaatctctcatatctttgaataggggatgtataaacatgcatgatttgctagtcaaactaggtagagatattgtccgtaaacagtctattcgtgagcctggacaacgcctatttttggttgatgcacgagaaatttgtgaagtactcaatcttgatgcgaacgtaagttttgacatttctctccacaaatcgtgttgatttaataagtgaccatttcatattatttatgttatgtttttcagggtagtagaagtgttatgggcataaatttcaactttggtgaggataggatcaaggaaaagttacatataagtgagagagcctttcaaggaatgtctaatctccaattcttaagagtcaaagggaataacaatacaatacatctaccgcacggtttagagtatatatctcgtaaacttcgattactacactggacttattttccgatgacatgtttgcctcctattttcaacacggaggtgctggttggactagtcatgccttacagcaaacttgagaagttgtgggaaggaattaaagtaagtaatgttgatttatttcttttagataatctattaatttcaaattaataatttatcttttgtacaattttattttaattaattactaatagcatggaagtctgttttctaattaagtgtatatacatgttcttattatttgtatgtatagccgcttccaaatctcaagcgg

SEQ ID NO: 5476 - DNA, 2923 bp, Arabidopsis lyrata
  Intron number 2 from transcript 943502 (locus 943502) deri ved from phytozome v7.0 (chr-ID scaffold_6; pos 23787500 t o 23790422)
gccgtatctgccgctcctaactcgagtgaaaccaggtacgaaaacgttagatattaggttagatattaggtttcaaagaaatatcttaaacttgttctatactcatcacagctccaacaacaacgcatgtcttaaacctttttttttttttttttgcatgtcttaaacttgaagaacaagatttttcccttttaattcttacgcaaaagcaatgacaaattaaaacaactattcatatcttcacaaaatatatcatcaatacttccacaaaatataaaacaactacgcgttgagatcattagtttttttttttttccttttgtttgtaacaaaaaaaaaaaaaaactattgtctaatgatattatggttactcaaagaatcaagaataattctacataaattatggaaaagatctccaaataaactacgataaacacataatcttgcattaaagtgccaattaaacataaaattccataaattgttttgatattgttgtcttgtccatttagttttaagggaaaattagaaataaaggagctctaaaaaaaagtttgaccatatacattttttttttagaatgtcactttggactaaaatacccctactctctatttaagcattttttgaatgattttaccaaaaaaacatgttgatatacaagattatacatgatttgaaaaaaaatattgatgatttagttgaaaaaagttgatttttttatggataaagtttcgtctaaaattattagaatatgttttctagcgttctacgaatatcagaatttatattctaaacttttgtacatattctacgaaaatcagagtttgtattctaaatttttgtacatgttctatgacttttagattagatacatgttctaacaaattcagaagaccggaatacaatttccaaaaatccttagaacatgtattctacgcttttcttcatgttctaattttagtcagaaaatctattctacgatttataacatgttctaaaaacgttagaaaacgtataattattttagaatccgttttctaatataatatagatttcaatttctgaaaagttttagaattcctaaatatagaaagtgaatctttcaaaaaggaaactgaatatttattaaatattacgtttttattgtttagattacgatctgaggatggttagaatacgtattctaatattttcagatgaaaaaaaaaattaaaaacgaaaatctagagggtgaaatcgttttttagccctaatcgtcaaagtcttcttctttcacctcttccttttaagtccacgttgaaaggttagactaatttggtagatttgtcgttgtttttccccgttctgtgccacgttttgtcatttggtatatacccatatgctgatgatgtgtatacaactgccacttggagatcattatatgaggaaactattaatccaataggtgttcctgaagatgaatggcacgtcccagaggttgttgaatctgcaaaagttttaccacctgaaacaagaagacaacctggtagacgaagaaaacgaagatataaatcagctgaagacaagataaaagcatcacaacagtcacaattatcaaaaaagcataagtgcggccgttgtggtaaagaaggtcataatcgagtaacatgtgatgtagcaatataaggtttgtgatcgtgatctgactactagtttaaaacttaagtatagattccctacttttatattttgttttgataattgttttctttatcttttttcaggattatgttgcaactgctctcattgaacgtttctagttaccactatatggattttgaacttctttctcatttcatgattattttcgcattttttatttcagatgtgaatttcctagtactctatgtttgaatttttgttctcataattggaatccctactactcttatgttcgtagttttgctttgagtttcggattgacttatcactaaattaagtatatacagcataagttccaagaccaatttaacataatttaaaaagaaatgtaagaaccatagtctcaacctaccaagtaggaattttcatttagtgtattgtttatcgatgagggaagttgatatgttgtgtttttatcggttttgagtctttgttttctttcctacatcatatgttttatagagtcaaagtgcgtttttagagtattttagtcttttatcgagtctttacaggttttaggttgctttggaggaaaacgagctgttttgggttataaacacacttttggagatgcagtttcgcttagaagtttcatacgtttagtctcagatggaatacttcacaccgttagatctttcttaatttttaacacaagcaagatgaagatgttggcttgattttccaagtggtttgaagaacatctaacggtgcattcaagagttatacccaaattagtgaagacaggtcaatctggcgaaagaatgagggtatctgaattatgtaaataaactaggaaataatttttttaaaattttgttaattatattttcgaaaatatgagggtaaacttgggttttgatttttaaaaaacctatttcaccaaactttttatataaaagtatatatggacatttatccattaaaacatcctttatttctaattttctctaattttaaatcattcagataaaattctaaaaatatgttttaagaatacattttatattttcatgatctttttccttttgtaattggcacctaacactaatgagtgaaatacgtgtagatatttttcttttggtcgtcaatactcatatatgttttattttagcttaaaatacataactatgtctttctttatcacctttgaatatagatttcatgtctcagttagtctatattgattctttttttatggtaggtttgtgatatatataaa

SEQ ID NO: 5477 - DNA, 766 bp, Arabidopsis lyrata
  Intron number 1 from transcript 912356 (locus 912356) deri ved from phytozome v7.0 (chr-ID scaffold_1; pos 11124107 t o 11124872)
gcggtagaggtaaggctttctctgagagtcgaagaaacatgttgtttttcatggaaaaattggttctcattgcttcctcttgtgtgcgatgtgatgaatctctgttctctgttgctttttacctcttgattcttcaatttagcgtcgttgatgaatctgtagctccgttttgtttatctcttctccgatatctcttagcttagttttgttagcttagttttggcttctctaatcgtgatctcgtagcttcgtcttgtttccgatttgaaaaattggttctcgtagcttcgattttgatgaatctgtagctccgttttgtttatctcttctccgttatctcttagcttagttttgttagcttagttttggcttctctaatcgtgatctcgtagcttcgtcttgtttccgatttgaaaaattggttctcgtagcttcgattttgatgaatctgtagctccgttttgtttatctcttctccgttatctcttagcttagttttggcttctctaatcgtgatctcgtagctttgtcctgtttccgatttgaaatattggttctcgtagcttcgatattgatgaatctgtagcttcgttttggtttatctcttctccgatatctcttagcttatttttgttagcttagttttgttagcctagttttggcttctctaatcgtgatctgaagagtggatcgaaatttttcaggattgtgattttgtttcatttttgcaggctctctttaaaaagattttcagctgctgctttgg

SEQ ID NO: 5478 - DNA, 1738 bp, Arabidopsis lyrata
  Intron number 1 from transcript 942149 (locus 942149) deri ved from phytozome v7.0 (chr-ID scaffold_6; pos 11568753 t o 11570490 reverse strand)
aagccgaaccttatcttggttttgcttcttatttggtaagattggatttttcttctcacccccttttggattttgtccttcttagatcgtgttaattgatcttcatccaagtgatccttcttctattgagttcgatgatgattttgacgaattgggttttttttttgtttgtgactgctaacttttttttgggatccttcttctaggtgcactgtgttgatattgtggattagttgagtatttctgctattgactactgttattgaattgattgtgttttttttggtaacaattcttttgcaagctcctgtatctttttaactctaattagctcttttttgaaatatcattgccctttgagcttggtttttgtggttatttcgtgagcttattttgatgtgtctttctaagacaaggctcatattcacttaaaagttctctactaatgtacaatccgcatgttcacaattaaatctagttacaagttgttaatctataaatggtatcctttgataattgtttcttcatatttagtgttggtaccaaccagtgtctggccagtgccttttacacatgttttagcttagcttaagattgttctgtcactttggctctttgttatgtgtttctttctttttcttctgtgttattcttcttattggcattgttagatcatcaaatcatgtggaagtgagggaagggtagagatggattcctttattttagcttttggtgcattttgtcaaaaggtttgttctttggtttaagatgtaagacctgaaacttatttagactgtgtccttggtttaaaagtcttctgttggttcaaatctatggaaaatcatgtattttgagatggtttagagtcttggagaatactagttttttgctctcttttctggttgaaaggtaacaagtggtttagattcggatgagaaattcactgaacattctccatgatctgtttgtagttctctatatttgaagtagcagtatctgatggtttaaaactctctttgcataaatgtgcgattgagctaaagtagtaatctcaagagcatgtggccgttaggtgatttcagccgtagtatagtgtgacttccgtagaataagcatgctatatatgaaaaaaattgcgcagtgtttgaaccaatttatttaagattttgctatgtatccattattttgaagtctttgttctgttagtatttcacttagcccattgataataattggaacttattattattgtgcttattatcgtttctagatttgtgttgttctagaatttgtattgatttgtattgatttgtattcatttttattgttttattcattgattccctaatagctcgtgtaagagcataggcgatggtttctctctgcaaatatccaagcagatatctgtgtcttcttttgcaagttttttttttttttggtaacaattcttttgcaagttcctgtgtcttcttttactctaattagcaatattactccatgtgatagcttagtttcagagactctcatttgaatgctcttttttgaaatatcatcattgtcatgtttaattatctctttctatacttgcagtacctcagttcattttctaatcacagattggtattttttttttgtcttttcaggtcctcataggctttttttagtgtctctggttttcttcttcatctagttgttctgaaacgccgcaaccgctaagaattgatcggcgagcgcgacg

SEQ ID NO: 5479 - DNA, 20412 bp, Arabidopsis lyrata
  Intron number 6 from transcript 487557 (locus 487557) deri ved from phytozome v7.0 (chr-ID scaffold_6; pos 2846120 to 2866531)
gttaatgaactcacagttccctcattaatcttattatttattaccaagggaaattgataaatcaatatctccttcggacagattaagtaattaaataaataaataaactactagtaattagttaactttataaaaatagaaaatattagatagttggttcattcgaagagatgtgaaatggttcgggtggtaataatgatccaagatttaaggattcctggagctgctaagtcttaatctttgcgctctactcagaaaattgctgcaacaaaacatggaggcaagacacatgaactcgagattacaaaagaaaatatataaaagtaaaaaaaaatagatgatattgagatggatcatacttccaagagatgtctccggccaccatccaatgtccatctctatctaaaaacttcaacgtatgatgattcccaaaaacagagctatttccctcgccgtctactagatcgaatcaaagaaagtctattagtactaaaaacaatatttttgtgttttattggttaacagattttaattgatttgggaatttaagtttgtagagcagatcacagcagccaaatagaagacaataatgtttttgagcaagtgatttagattttttttgtgttattagtccaatggtcgtgcattgcattaaaaccctccctgaattcatttatagtattttgatgtcattaaaatttagataacagttttggaaaaacaaaacatggaaatgaagtattttataattttcttcaatttaaaacaattttttaaaaagttatttacatctaattgctgtatcaaacatatcagacagagcggctgcaagactttcgtagttattaaacgcgaagatattgattttcctccctatgtagttaccctctttgtaaacctttacatagcgagattgagatgatgacgagttcattgatgcgatgcgaccgacgttgattcgatcgattgatattaacccaaagttatatgtgattctaccatttatattcttaatttataattattactgattccacgtttcaatttatataaatatttaggtgtttgtattaactccaaataaatatgtatagttatgtttttatacaacaattagtatcatattatctaactgttgattacggattaattatgaaaacaactaaaagagaaagatatctatcaactaaaaaagtaatagaaaaattattaattacaaagagatactgcattttttacattataaattaaattttatattaatcgtgatcatttagttctcttattaaatatgaagtgtataatctatttaagtataggatatgatttgattaaatggaaaacaagacattaaagtatatatatgtgtatataattgatttagaaatataatatgcttacttaaattcggacatatattttatggtgataaactttaattgtagttcgatggaaatattttctgataaatagtttgatagacatagttatcagcaataaatttatactgtttccgttgacttaaaaatataacatatttgagttaaaaaaacaaaaaatataacatatttaacatattcgtttttttttgtctcactgttgatatatatatatatatatatatctcaattattggtttttttgtgatcatttgtattttttatttagactgaaagatatgtttcagaatgatgacaacaatgttatacctaaccatatatagatttaaatgttgtttcagctataacatatatttattttaaaaatcagcgagcctttatttacgtttttttttatcgaagatagattaaaactacaatttagaaattagagtaaaatgagtaatttaaacaaaaacttgcaaatcaacaaagttcttaaataactgattgtcaggcgaaaataagaagcaaaaaacgtgatatatagtccccaaaacaagagaattggttagaaggggttgattgtgatgaattaggagtcattcattatagcaacgacttcgttcgatcggtcgtggagtcagagtcagagtcaactatacttgtgaatcgtaacatggatcttaatatataaagatagttttagaagaaaacaacaagatcataaaactattaaaaacaatcgggatacttctcgttagagaatctacacatcaccgaaaaaagaagagaaaacagaaagaaaattaaagagaaaatacgaagaagaaaggcgtagccttccctttgcctctgttgacttgccgtttgtatccttttcctctgttaaccagaaccagagaaagataacacggaaccgagctaacttccattagccgtagctcgaaagcttcttaacgtcgtcgtcttctttttcggtgtcttcctccatatctctttctcttccttagattatttttaacaaggagagttaactgttagtgtttgctttagtcttctacgtctatcttcaccccatttataatgcttcatctggtcccatatccaaactttatctttagaatatattattcttaattattgtttaaacaatgtttttaacatgatatatgtcttgctaagttttatttttcagtccatggaatctttttgaaagttatacctaacgtcggtaaaaatttaataaacattttaataacgtgcatctacttttaaaagaaatccatttgcattattgcataatagattaaaaaaaacaaaacaaaagatgttaaagcattcgtctgcccgaaagagttagttcaaatggtttgattgaatttttttctttcttttttacgtaaaacgcttgatcttaaaatttcaagttaaatttgaaccatggtaaaacaaagttgtcgaataacttaattatactgcaaattaatggtctgaaccatagtgtctgaagctagtggaataagataatattcagaaaaaaattatgacaagaagtatcgaggtggtttctgcagacggatggaattattctttaattattttttcgtcggcatagtttttgctatattaatcttccacttgttagaattatactaatatgttatacaaatttcgcacataaattattgttgttgttactgtttatcgttaatactttttcttgtttattagtagggctagtttgctaaataaacaaaaaaaattgaagtttactagtaaaatgattaagtggtaatcataaataagtgatttattatgtaaaagtagaatagtatgccattagataaaatatataacacgctatttatctaacattcacataaaaatcaaaaaaatttgaaaagaaaaaattcgcataaactcatgattcttttttgcacaaaaaaaaaactcatgattttttataaatagtaaattcaaaataaatatacagtgttgtacgttgatgttgtcaccgcgtcaattttgcaaatcaacctctagaatttggctatctaatgtacctttataactgttttttttgtcacatattactcataaacttattatgaaaccaatgaattataatactaatagtaagtaatcaggtatagtgaaaatacatttgttagatattacttttgaaacaacttataacaatagatttatatattttccaaaaatttacacagtcgttaattctagtaggtggatacgtttgatggaccattgcaaaatcaatacgacaattatatgatttataacagtagtttaattttcgtttagaacttaattataattatttttttggtagggtagaacttataattattaaattaaagatgaatttagttatcggtaacagctcataaaactcttttaacctgaaaatctaaaagaccaaacaactcaaacagattctaaccgaaacatatatagaaacgatgaatacccatagattctagctcttggttataaatatatgaaaatatgaaaacactagcaaatagacgacacatatcattttcttctctgatttcatatctcccttcgtccaatattctttttggactcttcgtcctatattatatagtaatgtcgtcatctccactgtcatacgaggaccacttaccccatcagctcaacccactaatattgagtttatcagtttgacaaaaatacttaaaaactttccacaaaatagcaaaaaaaaaaaaaaaaagaagaagtgggaattagttatttactctttcacttaataaaagttataaaactaggataacaaaaaattgactcttttttttcttctgaaagtttatgagaactttttcagacgacgttttagttaacagtcttggttaaataagagactctttgatcaaagcagttaagatcaatgcttctttaggccatttaaaattttttaatgtaaacatcaattttaaaaaatttgtcgtgagtgagtaaaagtcacgatacaaagaagaaaattcatagttgaaaaagaaaataaagtagtgatgagtgtgaatataattatacgagtaacacatataattaatgtgtaggccgcctttctttctttatataggataaagctctttaattttcataatcatagcatgtagtttctttcagttgtctctgatgccggattcgtataaccggtttgagcctttgtctaaaaaacagtgattttgtaagatattttacatataataaagagacatttcagtgaaaaaaaaaaaagctgtttaaaccgttttatatattacaaaaatagaaatggacaaataattgcgtcgaataagcactaattccattaaagtgggagctagtaagcaccaagcacactagttcaactcatcaatttattctatttaaatcagtagataaaacttgttttaattcctcattgagaaaaggtttgtccactttagttaagtcttatcccaaatagccttactttttacttttcttttaaattatgaacagtattaaattcattattcaagacacaagacactatgaaaataaaaaataactccattaatttttatttaaataattcataaatatattcgactttatacaaaagtgtctgaaatttataattacctaaacaaatatatattttctcatctttttaaaatagcatgtattatatgaatttcaattggaatgacgacacaacgataatattaacatgaaaaaaatatgatttttatttagaattgccaacaaaaatgattttctttctatttctgtctaaaaaacggaagaatatatatgttctctcttttagaaattgattccatcgatcgacacagcagcaacgtgattgtcacatgtcgtattattaatgtggtgagcggaggattatctagtagaacttactagtgaaagaggataatgatttggtctactattccattaggacactcattcaaataaaaaatactctactttgacacaaccaatgaagaattatgttactgcagtgaaatcccaattagaaggaatctgatttgacgtggaccttcaagacacttccacgaattaaactgcatgttcttaaatgcttacacgtgtacttctacattgatcttctcaaatccagatgtctccatcttctttttatatattcacaatccaaaacactcccaagaatagtagtaatccacaacaatcaaaagtaccaaatcttcttttctgctagattttacctatcattcgccaagaaccagctatggccgtccgatcaacagtaagtaacctaatacgtcgtcgcttctctataattcaattggtcttcacggtttgacttttatcatttttgtgtttgaagggtcacttgaaaaacgtagtgcagaggttaagaacttacacgactacagcgaccgcacaaggacccaaaccgtattctacggcagcaactgagtacggtggtcagagaaccgccaccacaacggcagcaacaaaaggtgacttcacaccagtttacgtctccataggattgatttcattgtcagtatcattcggtgtctacactgcttatcttcatctacacgaaaaccctagcgtgcgtgtcaacaagaagacaagagagactgttcccgagattgaagatcccgatagagttctaaacgaagcggaccggttcgcgaacaggtcctggtttaggaaaatagctcacattcaagagtttgacaagcaggatgtgatctccgatccaatcaggaaagaccagttcgctcataaacctcgtgccgtgacccttaaggatgttggcgttgatcctaagatggctacggctcactgagctttataagaaactggtatatgtgttttgttttccctgtttctgtctataaataaaaacaacatctccttcagatcaagagttttcagattggtctattcaaggttttatccctgttttctcttaatgtatcacaagtgatcaagcagcttgagtgtattttcgtgttattaaacagcatgtaatctgatgaaatttctaatggtaaatttcgttttgcttttattttcgtctggattaacgattttataagataaatttgggggtctagatttaaatgagataaatttggttagcatcgtaaccttgtaataaagtcgggaggattttcatttaaaattgggcccaggaccaggcccaatactatggtccaagtgggcgaaaattttgcacgcgtcggtgctttgttttggatgacgcggcgatctgtgataggctaatgtcacgtggcgagcgatattcattggaagaaaactatcaaaatgatccaaaaaatacgaggactaaaagagtatatatatatatatatatatatacatctctctctctgatccacttctgtcttaattcgatcgattttgagtctctgtttctctctcttctctcgagattgcgataatgagagaacggattcttacattcgtttcgctgcttcttgtagctttgctttcgttttctaatctttgctactgtgacgaccaaacggtaattgctcacttccttgataaagtttctgtttttaagatttgttcatagatttttcagttacctggtctttttcgttgttgttcagatcctgtatgaatcgttcgacgagccttttcatggtcgctggattgtttcagagaaatctgaataccaaggtaaagctccgatgttgtcgtggtgaatttttttaatttcctttcgtttgttgaagtaaaaactagttagaattagtgtaatggaagtttgaatcaaaagagaaactttaaagttttggtttttattggaacagatttagaaatgtttactttttactagaagtggataagaaacagactttgtgtgagttctgagttctggtagttttcttgtttaaagcccttaaaaaaggttgcttcttatttgaatcctttaggtgtgtggaagcacgagaagagtgaaggacatgatgattatggacttttagtgagtgagaaggctaaaaagtacggaattgttaaagagcttgatgttgatgagcctctaaaccttaaggaaggaactgtggttctgcaatacgaggctcgtttccaacaagggcttgagtgtggtggtgcttacttaaaataccttcgtcctcaagaagctggatgggttcctcaaggttttgataatgattctccttactctattatgtttggacctgataagtgtggtgctaccaacaaggttcatttcatcttgaagcataagaatcccaagagtggcgagtttgttgagcaccatctcaagttccctccttctgttccgtttgacaagctttctcatgtctacactgcaatcttgaaacctgataatgaggtgaggatcttggttgatggtgaggagaagaagaagggtaatttactgtcggctgaagactttgagcctccgttgatcccttccaagaccatccctgatccagaggacaagaaaccagaagattgggatgagagagccaagattcctgatcctaacgctgtgaagcctgatgactgggatgaggatgcacccatggagattgaagatgaggaagctgagaaacccgtaggatggttggatgatgagcctgaagaggttgaagaccccgaggcaagcaagccagaagattgggatgatgaggaagatggtgagtgggaggctcctaaggtttccaacccaaagtgtgaggtagcacccggatgtggcgaatggaagagaccgatgaagagaaaccctgcttacaagggcaaatggagctcacctctcatagataacccagcttacaaaggaatctggaaacccagagacattccaaaccctgattattttgagcttgagaggccgaatttagaacccattgctgccattggtattgagatttggacaatgcaagacggtatcttatttgacaatatcttgatagctaaagatgagaaggttgcggaaacttacagacaaagcacttggaagcccaagtttgatgtggagaaagaaaaacaaaaggcagaggatgaagctgctggtgaggcagatggtctcaagagctaccaggtatattgattttcgccacaaaatgtgaaaaggttatacatatcctttgtacttatatttgtctgtgcattgctgcagaagaaggtgttcgacctcttgtacaaggttgcagacatttctttcctaagtgcttacaagtcaaagatcatggtaagttctcatttccagacttaagaaacgtattgtatgaagaagaatcttcactgagaatttgctattttcgtctgtaggaactcattgagaaagctgaaacacagccaaacttaacaatcggtgtgctcatttccgtcgttgttgtcttcctctctctcttcttcaagctcatatttggtggtgcaaaggtaaaaaacatgtcagttggatgtaatgtttggtttgcgggtgtttggttctaacaaaatttgggctatatatgtaggctaaggtagaaaagaagaaaccggaaacagcagcagagacctcgacaagtgaggcaaagacagaggaaaaggaagaaacggcgcctgtaccacgaaagaggcagacgagacgtgagagttagagaagaagagggatagatttttgatttttgggccttctttgtttcagtttatcaacgtatagacagacagtactggaattgatatcaagacaagattattgtaacatgtattttttctttttcttttttgtatggtcacatgaatctgaatgtggatcacaacatttatgagttgaaatttgacaagtaatggggttgtgcacatcacatgcatattagtgtatcatctttatcttgagtgttaacaactgtatcaaacaatgaatattggctttgatgtttagacttccagcaaagggtttgatggtaatagttgaccaagattgatagcacgagactcgtatgatatagcagaacttgctccaacgaccatatctggtaaaacttggattaaactcaccatcttaggcgccataacagaagataaagtaaccgtcttttccggtggaggtccagctctgctgaggctcaaagccatgatcactaagcagtctccggaggtaacagcttcactcttccttcgagccattggctttcagtcactgatgccatgttcactggctaagaccttagaccaaagacatttccacaaaagtcagattaaaacattcaaaaatatcgtttactgcataaaacatagtacattggtaaactatatggtcaaagttcaatttggtccgatcagagaatcgaaactacgaacgagataacgctacatgcatcgattaaaaaggctacaaaattcttcctcaatgaatcataaaaatgtacagtcgtctcgatctgcactatcaagttggattgagctaaccaaaccaattagacgagactctagataagctaaatgtcatgccttagctatacatacttgatgcacttcaaaaaggaccactcttctttgatttctccttcaaagtacagaatcttcaagtgtagttcttacttcttagaaagagaggctatggtattagattgatcaaagatctggatttacacttgaagcctatggaggattagagagtaaaagcatcaacctgcacacacaccaagatgtgattcagaatacagtactcaggatcaagtagagtgaaaccttttaacttcaagcaaataggtatttcccttcattatatcactggccagcttataaaagttctcaactacctcttaaatctcttctgatttattgaaatatctaaagtaaaaggtcgagagtcgagacagcaagcaaagcactcgtgaaacatgatgaatgtagtagctgatcaactaacaatgaaattcatatggaaaattaatttcaataagcctggcccagctaataatttagaaaccatgcgccatactgtgtcttaatcatatccagtataaccaatatcccctagtgcatcaaattagtaggcagcttaattctagccatccgtatctaaagcttaagttaataggtaaattccaagattcatcagtggttattgttaagtcaatgaatgctttcaattcatgcatcattacacagaaagatgtgttacgggaaaagaatgtacctgtaaaatggagctaaacacctcttaatagaagctgatcaagctcagtttccagctccgtcaattcaacctgattttgatttccgcattgcagcaactgcctccttagatctcggtccagctcattaagcttctgaatcttcttttcttgagatagaattttctgccacaaatagtcattcatattatcattagatatggcaatcaaatgatttaataaagtaactaagagtgtggaatttcagataactatgcttgatatgctttctctttctgcgaatgcatcacttggaggactcaaaattgggatatgctcaaagggatgggatgaagttggaaactagcctttattgctttcccaagactacactcaacaataaacaaagttgtgactagaaagatgaaaaagcaattggatttagagtgataagagatggactgtgtgtggttcaacatgtagagaaactaagaaagtcactaaaacggaatgtgtcacagaaaaaggcattggacaagtgaagtatcagtttaagaagccaactccttccttaggtccgtatacacaacaattctaccaccaaagaggacatcaaaaatgaattaaaaaaacaaaccttttttgattgtagaaaaggattaaacatcacaaactaacaagtgtagaaaaggatccaaatcacagtaacctttgaacattctaattacaagaagtgtaggaaaagattaaactttcacattccaaaaactcagaatcaagccaacaagattcctgaagatttctatttccaaattataaaaaatccacatctaatggaggaagaagaacaatttactgctccaaattaaacatgacaaacgagcttagctttactagttttagtaaaatttatgagcaacaaagtcaaaacagacatggacacataaaaacaccaaaaaattcataccagaactatagattcgataagagcgaagacgattagcaataattaagactgattagactcaccagtcgaaatctgaaagcatgaatctaattaagttgtgagctcttcgtgtttttgcctcaaaatataaaaagaggagctagcaacaagtatactatttcactttttttagagtttttcagccaatcagaaggctctatttcgcaaccactcgcaccaagtgcgcgttgcgcgagtgagagcaattcttgaaggggtttacctttaggaatcatgcctattttgatcgacgcacttctctccaaaatttccatcgcgtgacttttttgtttttttgttttcttcttctcttaaccaatgtaaaccgaaccaaacattaattgtaattttaaaaccattgtaaaccgaaatcaattgtaatttcaaaactatgtaaaccgaacagctcgtcctcatcggaatattttttctccctccgacggaagactaaagtttctagggtttttgctttgttttaactgaaataacaatccgaatttaccaatatatttctctaacgaaatcaacaaatagtagcactgtgaacagaaaatttctagcagtttccatgatttggctgagttttgaaaggggtttttgccacagtaagttcttgtgaatatgagtgtctacagtttggtggatgaagtttacaagtctggttggtacaggctagaaaatgtatgaactcttgttttttttttttttttgccagccaaaacccatttcattaagtcagaatcatgaaactctcctctaaagagagcctaacatgaaccatacaacttacatgggtaaaaatagatagagaatcacgggaagttgttcgcaaaactaactttaaaactcggacggaacaacaaaaagcaaagtaactaatacaaagcaaaagataagggattctaacaatccaaaagatagagagtgtcctctcggaatgagaccatccggtccaaaggatgtttaacctatgacaggccaccatctttttaatgcaacaactccaaagacttttcagaatttgaaagctcttgctactccaaacttgcccctgaagtgtgaaaactcctgatccctgaaaagggaggttgcaagtaggacgagcacaaatgctcgcgatccaaaagccactaccatcattccctaaagaattttgacactggcttaattcttctatgattattcccagctggaaaaccgagattctagcttcaccatcttccaaactaattagcaatgcaccatagtgatcccggtctagcggagtgtagaacgtgcacacctcctccagcatcaatttggagcctcgtttgctcttagttttcaaaagaagcccaagtttcatctgaccacaaggttggcagagagaattcttaaaaaagcattggtttattctggaccaatcctgggcactagtaatactaaggaggtaatccctcagttgccatactccagagcggggaatgccacaatggctccatacaaaactaacatagtctatgctttttacaattgaatcttcaaagagagctccaacagatgaaaatgatgaggaaaataacaacactttactctcaaagaagtaagttgagataaaaagacctttatgctctaggaattgtacattgaagctacaacgataaccttgcaaattttgcagatttgttttacgagtcttagattttgataaaaacatcaaatctaataacttgaaacaatacatcttaactaatcgataagatgtgaatcttgctttggccccttcacatgaatgaagcaatctctccacatgagaggaaatggtcgaataacggacaagactaaataatattctggcccaagtccgggcccaccaagaagcacagccatgcgtggtgtgagtgaagaagtaattgacagctaggttaggggaacggaacgtgtcaggaggaccttgccggaaaagaggcaacgggagaagctggctgagacgagaccaacgaagggaggcatatcactattcccatgaaagtgaattcgtcggcggctttcttcacgagcagatctagatctgttgaaggagaagctggtgtgaaccttaattgaagaaggatcttggactatacaagtcgagaaagagtcaacaacgactatccaaaccatgttgggcaacacgagagaagaagatgagtaaggtatgtccggcggatctggtgggtccggtgggtccagtgagtgaagagtgctttgcgaagtgttcatcaccctatagtgagagagtacactaacaagatctggcggacatactcgccggtgctgcaggtggctggcggaaaaagagagtggagcaaggtaagatctcaccgaaaaccatggtggaaacaaagtagaaagatctcgccggcgaatggaaaccgacggaatatgagacaaggtcttcggacgagtggatccgagagagtggaagaagaacgccgttcaaaaggaggtagagtcaacaaaattgtcgccggagaagacacatgtatgaactcttgttttgagagtgtaagctcttaaacaatgtagcagcagcacatattcatgttttatgcagacttgtgttgcgttaacacacggtacttatgcttgaatgaatctgtgagaacaaggagttcttttctcgggtggagcaatggtttcccactctctattttcttattcttagtaagttttggcattatcagattatagagaatgttccaggaagaagagccaaggttgttgaaacaggttcttggtggttaaagtggatcaggtcaagtggctacaagacgaaagaggatgtgtcacatgttcagacatactttctcaagctctaagacatggttaacattgaagaacatgtgaattgttccaaggaattgttcaaagcaacattaaagaatggttttaacttagattggtgaagctaaggttatagagacatagtacatccaagggttatggtttcaggtattgttgctacaagaaaagcaacgcatatcctaaagatatctcctggtggagctacgtttgttggatgattgttcagctgaaagtaaagagttaaaaggttgcataactttgtttcagagtgctaagaagaaagcaagttaagcacataaggttatcaatgggtgttcagcttaagcatggttacaatctaatggtaaaaggtttgttacagatttggtttgaagctgggtgttggtaaggattgtcagaaacatattgcaggttttctagagaagagttgcaggtttctggagtttttccagagaatacacaaatttatggtctgagatgaagctattgaattaatttcagttgtttttttttctaaagaagaaactgaaggagacaaaagcaagtgatacatgatttgtctcaagggtgcttacttcaagaatgtgaaggtgttgtgtatctaactagataaacaactcatctcaaagctagtgtcagaagctggaaaagagaagtcctagaaaggatgaaaatgcagagaaatctagctgcacttcgaagaaaccaactaatgagttcaaagttgtttgtttgcataatgaggagaatacataagtgtctactcatgggaagtaatttgcaggtcagtcaagtgaatgatctaaaagaagaagagggccttccctaaagactgcaaattgaataatgcaatagccaaattcgttttggtggaggatacatacaagaaaaagtgatgcaggttgttctttacagcttgaaagagacatcaagggttctagagttgatgtgtaagctgttataaggacgtgtctcagggatatcacaaggtcttgctgatacgagacatttaggatccacacaatataggatccaaacatcgacttccatagcttaattggtatggctgctataggagactaaagactgcaaattgaatgatgcagccaaagtcgttttggtggaggttgtatacaagaaaaagtaatgctggttgttctttaaagcttgaaagagatcaagggttctagagttgatgtgtaagctgttataaggacgtgtctcagggatatcacaaggttttgctgatacgagatattttaggatccaaacatcgagttccattgttaatcgttatggttactacaggagatcaactttgctcctgaactactcagtgatttagccagtaacaaaggaagaggtaaatgactctctgacagatgagcatgagataacacattgaagtacattgtaccaggtagtaacctaatacgttttattataataagatgaaaagcatgaaatatcatgattagtgaatcttacatgcatagtgtgagtttttccactgcttgtcactccgtatgcgaaaatggtccctgtggttggattaacactcactacattaaaatcaaattggtaaaaaaagctaactcaaagtgttctagagattagaagaagcactagatacattttggcaactcaaagatctcagtttctaaatgaatgctcattcaaactgttcatggtactgtagctcggggtaaaattttaataacaaaaatatctctttcttttctaagattaaagtcttaactagatcagccaataaaaagtttttgatccataccattgatccctgccatagcaccattaactacatgctgagcagcaacatcatagacatggcgtgttgtcgtggtatgcccgaaaacacgatctgcaagaaaggacagaaattaagtaaaaaatgacagattggtctttgacatctagtttaatttacgtcttgattcatgatgctggaaacttcactatattcaacagaataacagttatgatggttacagaaacttatgaactctagtcaaactgttaagactaaccataggcataagctattgatccatctgcataccatgcaatctcctctcctttggactacgtcaagcagaaaccaatgtcaacaatccacagaacaaacatcaaactaagtgacattgacattttctttggactgcaaagccttaggtggtacctttcatgtataatgtaaatgaggcttgcttcgagcagatgaagaagtaggggagctatggctatccacagatgtttctggataaaagctttgaggaagaggttgttgaaggtgcatgggagtcaagaagtgtaggaaaggattaaactttgaaatcccaaaccaagaagaacaattcctgaagatttctacttccatggcatccaatgaaggaagaagaacaattcactgcttcatatagcttagttttactagttttagtaaattttctcggcaaaaaagtgaaaacagacacataaaaacaccaaaattttcaaaccagaactgtagatttgataagaaaaacgaatatttgcaataatttaaggtgtatacagattttaacactcaccagtcgaaatctgaaagcatgaatctaatctaattgtgagctcttcgtgtttttgcctgaaaatgagagaatcagaagaaaaacataataataacataaaagaggagctagcaacatgtatactatttcactttttttagaattttttagccaatcagaaggctctatttcgcaaccactcgcacaaagtgcgcgttgcgcgagtgagagcaattcctgaaggggtttacctttaggaatcatgcctattttgatcgacgcacttctctccaaaatttccatcgcgtgactctttttctttttttttgttttcttctcttaaccaatataaaccgaaccgacaattgtaattttaaaaccattgcaaaccgaatcgaaatcaacttttttatctaacggaatcagcaaattctggacagaaaagatgtggcagtttccatgatttctcaacatcccaacgagacaaaagaggaaacaccacagctcaaaatcacaaactatgaagtgtagaaaaaatccaaaatcacagtaatctttgaacattacaagaactgtaggaaaggaaattccaaaatctcagaatcaagccaagaagatttctacttccatggcatccaacagaggaagaacaacaattatctgcttcgattaaacatgacaaacgagcctagctttactagttttattaaattctctcggcaacaaagtcaaaacagacatggacaaatagaaacaccaaaaaattcagaccacaactgtagattcgattagattataacaacaaggaagatttgcagtaagtaatttaaagtttatacagataagactcaccagttcgaaatctgaaagcatgaatcttgttgtgagctcttcttgtttgcctccctttttattatctttcttacaattttcttatttttctgttctctgagtatattttcttatattttactctgctgcttcgagatcaacgatttaaaagtgatggggtaaattaagaatatttagttttaaaggggctgaagttgtaaatttgaagaagtgaaagatcaaacaaataatacaagaccagagacgacgaaacctgccggagaactttggctttttttgtttgtttacttttttttttgttatactttattaagtaatgaaagagtctttacaaaccaatcgtttaagccacaaaggctgatctacagacctagaaaagaaatcaccatggaaacaactgaactttgctagattatgagcgacactattacccgaacgtctaatgaacataaactgaatagaagaaaactttgaagaccagtagtcaatgtcctgtatcagatttattaaatcgctgtgaatcgtccttccattgactgcattgatcaggatttcagagtcaccttcaaattgcaagtccttaagacctcgtatccatacctgttgcattgccactaaaagagcttttgcttccgcttctaaaggagatgatacatgagtcaattttgatgatccccaagcctttggattcccgtgattatctctgatgatccaaccgccagtagctttatgcgtttcaacatcaaagccagcatcaaaattgcatttaaacaccgtaggagggggtcgtacccatttatcagctacaaaacgatgattaggtggtatgttggttgatgtttgagaattatttagactgttaatatattcttgaatttctgcttcgacttgtaggactatttttgagggactttccaagaatttgttaaagaccaatttattccttgctttccaaattctccaaagaagccaaattgggaccaatttttggcttaaagtgaggttcttgttttgataagaattaatgatatgactaacattatcctctgtatcatcatcgaaacgatgagtttgtaatatcggtgtattggataattgccaaaccatttttgcaaaagggcattggaagagtacgtgatttattgtttcctccgctgtgggacatcttggacaatgagactcaatgcgcatacctctggtaatcaaccgtgaacaggtggggatagcttgcgatacaactctccaaagcatatgtttgatttttggaattatttgtattttccagatcttgttcttgagatcaactgaaccatgagggataggtggtttactttgtgtagcaatgggatcatgagttaaaaaccagtatcccgaacggaccgtgtaatctccattagtattgtaattccaaactaaagtatcttttgattcatttttggggagatagatattctctaaaaagttttgatcacttggatctattaattgagtaattttttgtttgtcccaaaaacggtttgatcctactttagagatgaagttatcaatcgtacctaaccagccaggatttgttgctaaaagtggtcgtgggggatgtgagtttatgatattatcaacgccaatacgggctgtttgtttacttttgtttttacttttctaaatataacgctcaggaaaaattaatatatataattagagagtctctttccatctaaattatccacatcagcatccacattagcgtccacctaaacgtatatttaattaaaaattataatttatttaaactatttatttaatacatacttatttatatttattattatttatgattaaaaaattaagtttaattcaaatgaattaatgttacaattataaaacaataaaatatgttatacataataatataatttgaactttagtgaaagttttttaaattaatcatttttaaaattagaaacatttcagtttttacactactattaaatattaatatgttggatatttctaaaattgtatgaaagttgaaaggtcatatctttttcagttttaaaaaaaaagatatagcgatgaattttatgacatatttaaaatcaatacattgggtatttttaaaattgttgtgaattcagactcatgcggtagataaggtgatacaaccaaccattgttgaagtagctcacaaaatcttggtcgagaactgtagttaagtaaggtgattctatttcatcattttgtcgatttgttgcacaatttggaccgtcgatgagaacccattgcgatgaattcttgcaattctttctctccaaaataagtagattgagattaaaaaaacagatcttaagaagtatgttatgttgactttttccatgtgcctgaaatcaaacttgctaaaatactctcccaatcaggatcaagacgatgttgaaggagaaagaccgcgaccttcgaccaaattgtaaaagtgaatgggcaggcgaagaagagatggtttctagattcatctcactctttgcaaagaaatacatggttgagcgagtcctcaaatccgcatatgtgttctcatcgataatggatcacgaaccgcgagccatgtt
